United States Patent Application Publication US 2008/0050393 A1 - sequence listing, part 31

SEQ ID NO: 114098 - DNA, 1286 bp, Homo sapiens
atggctgctgccacggagcttaatcgcccgagcagcggtgacaggaacctggagcgaagatgcagacccaacctctcccgagaggtgctctacgaaatctttcgctccctacacaccctggttggacagaggccgggggcagctaggcctgcagaggtgtgggatgcggtcccgaagccgaggtgtggaaggagcccgggcccagcctcctcggtcggagtgaggaggacggcggtaccggttgcagagtcgtttaccttgcagctgtcctccccaagagtgggtgaggttggcctaagtgaaaacccggctccgagagaggcaggcttggagagaatgaatgtggaaaagcttcactgcgagtttaggaggcgcttagcgttcagggtcctttttcctccaacttactctttatgggaattggttgcaaaacttcagtctccgattaaagaggagaatacaactgctgttgaagagataggaagaacagaaatggggaacaaaaatgaagtaaatgacaaattttccattggcgacctacaagaggaagaaaagcacaaagaaagtgatttaagagatgtgaaaaagacacagatccattttgatccagaagtagttcagataaaggctggaaaagcagaaattgacagacgaatatctgcatttattgaaagaaagcaagcttgaaatcaatgaaaacaacgtcaggggaattttgcaatgttattgattgtaatcaagtttctagagttgtgaatacatacggaccacagactagacctgaaggaattccagggtcaggtcataaacctaacagcatgcttcgagactgtggtaatcaggctgtagaagaacgactacaaaatattgaggcccacttgcggttacagacaggcgagtggaaactagtcatgaacaatgagtgtgcattcttgcttcttaaatggctaaggaacgaaccagttttgacatgctgcaaatccggcaaagtctgggttaacaaaaaaattcccgagagagagaaagagaaagaaaatctgatgggcccagttcatcttttcaagctagggcacttcatagggcactggcctatgggtgggccacccttgcttcagagtaataaccaaacagtgacaaccaaacagaggattttgcaagcagtgcacctctgttggcagcagcagcccagggtggtagctgttctgaaggaaagacatgggtttgacactgaggagagtgaagggaaagctcaaaggacattggagtatacagagccagatctgtag

SEQ ID NO: 114099 - DNA, 652 bp, Homo sapiens
ttttttttttttccaagaggcttttattggctctattagtcaactttaattccttaaagaagtctgtttatatttgaaagcatgccactcgagtcaaacccttgttaaataaccagtttctccaattgtgtccggagcgtactttactcaattgttaaaagctgtaaatagctcaagaagggggggtttcttgactcgataaagggaagacttagctttccaaaaaaaactgtctcttttcgttcctttcttttttctatagccaaagtcagccaattggggctgtagtctatttcctttgggttgagggtgttttctggtatcgtcccttcgtggttcacaggttctggtgccagctcatttggctcccggccatgcaatgccccggagaagagcctcctgtccctctaggtgcagggcagctggcaggagtcagagcagacaagagagaactctggaatattacacttcagtattttccctcccattagctttgaccgtgcctgaaaattcctccatttgtgcgtcatccgttggtgtcccagcctttctgacgatctcctcagctggtcaggtggcctgaaaacagagctccagccatccacgacagcgccacgggcccgagggacgaggacctgcctctctggcccac

SEQ ID NO: 114100 - DNA, 432 bp, Homo sapiens
atgaagaagggaggggctctccctgttgggccttatcaaacggcagctgccagagggagaacggaacaaacgcacgatgcccattacgtggtcggcagtgaaagggtgcctgggaaagggcacacagctttactgatgggtggccagtggggagtgcccccatcgggcattccaccagtcggctccgatggtcctggcctcctcatgtttatctggcccagggacaccaaggctcagagagtgaaccacgaagggacgataccagaaaacaccctcaacccaaaggaaatagactacagccccaattggctgactttggggggaaactttagagatgatgagattgctggaaaagatacctttgctactgacaagcgacctcctgaactattgatccagtgtcaatggaatggaggcctctggcctccctga

SEQ ID NO: 114101 - DNA, 249 bp, Homo sapiens
atgaaggaaagagagaccagcaaagacatccagagagaagcccaaggtgaacttggtcatcatattaacccctatgcaataacaaaacatccaggcttgatctaccagagcttatcagtttggccaagtgtggatcttgctgcatatgaacagcctgccatttccttccttgtgtacacactgcctgtggaaaatggacaagggaagttacatttctatcaagagctgaaacaagcaattttgctttag

SEQ ID NO: 114102 - DNA, 798 bp, Homo sapiens
atgaagatcgtgcgcgagcactacctgcgagacgacatcggctgcggtgcgcccgggtgcgcagcgtgtggaggggcgcacgaggggccggccctggagccgcagccccaggacccggcgagcagcgtctgcccgcaaccgcactacttgctgcccgacactaatgtgttactgcaccagattgatgttcttgaggaccctgccatcaggaatgtaattgtgctacaaacagttcttcaagaagtgagaaatcgcagtgcccccgtatataaacgcatccgagatgtgactaataaccaagagaagcatttctatactttcactaatgagcaccatagattcaagacctttgaactcattctgcttgagatttcaagaattttgaatactggcttagatatggaaactctgtctatttgtgtacggctttgtgaacaaggaattaacccagaagctttatcatcggttattaaggagcttcgcaaggctactgaagcactgaagcgagtacagcaccaagaggatggtgctaaaccattcatgagggatgaattcagtcaactcccaccaggccccacctccaacattggagattacaatggagattacaacattggaaattacatttcaagggttaagcccccatggctgctttcgtgggctggcattgttgagtgtctgcagcttttcaaggctcagggtacaagctgtcagtggatctaccattctggggttggagaacggtggccctcttctcacagctccattcggcagttccccagtgaggacattgtgtag

SEQ ID NO: 114103 - DNA, 2243 bp, Homo sapiens
ctcggccttagccatggcgagtagcagcggtgctggggcggcggcggcggccgcggcggcgaatctgaatgcggtgcgggagaccatggacgttctgcttgagatttcaagaattttgaatactggcttagatatggaaactctgtctatttgtgtacggctttgtgaacaaggaattaacccagaagctttatcatcggttattaagggagcttcgcaaggctactgaagcactgaaggctgctgaaaatatgacaagcttgactttctggagaaattcctgatgagatatgtcaagctctgcaagagggttagaagattgcattgtagttgagaatgtacaatgaaattactgcatgcagcagtgtagaaaaattttactttttaaaagaattataaaaccatagctttataaatcagtgggaaagtggcttacagagagacctatcagatgtgtttacatcacatcttattcactttttttaacagctctaatgctttggcattgctatgttcatattcatgtattccctatttatagctctgatagctttaattttctaagcagtctgtctatcagatgtgcacatctgctgtgccaggttgaagtatagtggaacccatcagtagtaatgtgtagtagttatgacttgttgacatttccattataaactttaattttgaattgtttatgcattataactgtggatttatattgtattgggctgaaagttgacaagatttcagccaccacttgtgaatttttatttagattcattatgtatatcagaatcttgttttttgaaataagagcatggaaaacatttcttgttaatctactcttgaacaaagaatatttagtttttcaaacagtttgttgggcagctaatagtgtgaaccaggtcatttttgtattgagtaaaaaaatcaaactttgagaaacttggattttaaaagtaatgacaatgcttaggttagtattatttgtaatttgaatcatttacatctaatgagaatgttagttgagaatgttttctaaaagttccacatcctataaataacggaataaaaaatattgtaaaatgaaacaacaaacatgcaaaattcctatttacttttattacataaaagtaattttagtgcttacctaataaatcttgaatggttatttaataaattattagatgggtgatgtgtttcaaaagatacttgctattttttgaagaaataaggatttccagtcattaaacaaaactaaacaatcttattagatgggtgatgtgtttcaaaggatacttgctattttttgaagaaataaggatttcccagtcattaaacaaaactaaacaatcaaatgttctatattagggatctcaaggtattggctttttttaaaaaaacctttttaacatcttgatgtcaaggattataagtatggcttttcagaattgttttgtttgtcattattcttgcctttaaaattttaactcatcaaagtgaagattagaaataaattttagaaaatgtagaatagtattgattctgtccctgtaatagaatctcagtggagtttttttgcaaaactaatatggatttcatctgattttattatttcttaaattttagattttattgagtaccatttatatgattgtacaagcattcactctttagtagcattttttgtttttcagacaagctgaagtggttttattaagatttggtaatatttaaatagcaaccttctctgcctttttttttttttaatatagaattttgaccattttgactttttaaatgcctggcatctttaccaaccaagtaaactggaagatctgttactggtagaacaggttgaggagacagtaggaatttgtaaaaagtcatttgatttataatcaacactacaaatactatgtgttatttataaaatcataaagaacacttttgtcagactccaaaatttgtatatacttccaggccataagagttgatggtattatttatgactttgtagattaaggttatttatgtatgaaacaaagcaggaaaatatattgagaagggatcgtgtttacagaggacttctttaaagtgtcacatttttaaaatgtaaacatatttttaatgcatacttaagtaatatttaagaaactaaacaaaataatgatacaattgcagtgttgtgcttgttgtcaatgacaaaaataaaaccattttggtggtaaaaaaaaaaaaaaaaa

SEQ ID NO: 114104 - DNA, 225 bp, Homo sapiens
atgagtgaacttcagcagcaggaaggctacagtggcagcacagcttggagagtgcctccatctactgggggaaaaagagggatacaaaagcagtactttgatcttgactcagtgacaagtctgccatggcagcacagtgtggagacactgatgcttgaaagaatgagaggggaacaggtacacaatgttgctttggagcatgccatggtgaggcccaagcactga

SEQ ID NO: 114105 - DNA, 2673 bp, Homo sapiens
atgattaaaacgagatctttccctaacagaatagatccactgcgtttgctgccaattgatggggcaaatgatctcttttttcagccacctccactgactcctacctccaaagtttatactatcagaccttattttcctaaggatgaggtaattgtctctctacctaccaacttggtgtatgggtatggtcccaaagttgtttctaaagaaattccagtagagtccatcgaagaggtttctaagattattaagagagctccagtaatctgggataacattcatgctaatgattatgatcagaagagactgtttctgggcccgtacaaaggaagatccacagaactcatcccacggttaaaaggagtcctcactaatccaaattgtgaatttgaagccaactacgttgctatccacacccttgccacctggtacaaatcaaacatgaatggagtgagaaaagatgtagtgatgactgacagtgaagatagtactgtgtccatccagataaaattagaaaatgaaggcagtgatgaagatattgaaactgatgtactctatagtccacagatggctctaaagctagcattaacagaatggttgcaagagtttggtgtgcctcatcaatacagcagtaggcaagttgcacacagtggagctaaagcaagtgtagttgatgggactcctttagttgcagcaccctctttaaatgccacaaccgtagtaacaacagtttatcaggagcccattatgagccagggagcagccttgagtggtgagcctactactctgaccaaggaagaagaaaagaaacagcctgatgaagaacccatggacatggtggtggaaaaacaagaagaaacggaccacaagaatgacaatcaaatactgagtgaaattgttgaagcgaaaatggcagaggaattgaaaccaatggacactgataaagagagcatagctgaatcaaaatccccagagatgtccatgcaagaagattgtattagtgacattgcccccatgcaaactgatgaacagacaaacaaggagcagtttgtgccaggtccaaatgaaaagcctttgtacactgcggaaccagtgaccctggaggatttgcagttacttgctgatctattctaccttccttacgagcatggacccaaaggagcacagatgttacgggaatttcaatggcttcgagcaaatagtagtgttgtcagtgtcaattgcaaaggaaaagactctgaaaaaattgaagaatggcggtcacgagcagccaagtttgaagagatgtgtggactagtgatgggaatgttcactcggctctccaattgtgccaacaggacaattctttatgacatgtactcctatgtttgggatatcaagagtataatgtctatggtgaagtcttttgtacagtggttagcaaagctcatcgtggagacggacacctttggaagcagagttcgagtccgaggagccgagacgggcctctacatctgcatgaacaagaaggggaagctgatcgccaaggtgaggccccagcaggcaggtggtccgcgggacctagggagtggcttgggctggctggactcctccaagacagtcctgggctctgatcccaacaagagcaacggcaaaggcaaggactgcgtcttcacggagattgtgctggagaacaactacacagcgctgcagaatgccaagtacgagggctggtacatggccttcacccgcaagcccggccccgcaagggcccccagacgcggcagcaccagcgtgcaggtccacttcatgaagcggctgccccggggccaccacaccacggagcagagctgccctttcggccccgacagcacagtagagcgcccagggccgccgtgtgagcgccctatcccagccatcagcgctccatcccacggccgggcggaagcggggcccaggtgccatgcgggccaggcccgcaaggagagtttgtccgattcccgagacctggacggctcctacgaccagctcacggagacagagctagaagctctaggcctgggaagtgccatgtggtgtcctgcatgtccaccaaaccacttggctgcccgggcatcctctctttcccacatggggagattatcaccaggaacaccaccagttagtgagcacttgtatctgccacaggcttggcaggcactgtctcctctaaagcccatggggagagccatcatcaaccactttaaccccaaaattgagtcctacgctgctgtgaatcacatatcccaactgtcagaggagcagatgtctctaattcagcctccaaatcagagggtcataaagacctttaaggctcattacatatggtactctatgcaaaggactgtcaatgctgtgggagaaaacccaattggagagaatatcatgaaaatctggaaggattacaacactgaagatgccatcactgttacagaaaaagccatgggcgagcaacacaaatatcctagccaactcgacctgacatactatacgccacactcgctcttcttcaccccagcagtacaagcacgttatcttgtgccgattttccacaaaggctactacacgaagtactacccatatcttttcgattggaaccagaccaccctcaggaatacgatcccaagttacaaagactatgaaactccgacctaa

SEQ ID NO: 114106 - DNA, 258 bp, Homo sapiens
atggtgctggaggtggtgagagccaactatgacacgctcacgctgaagctgcaggatggcctggaccagtatgagcgctactcagagcagcacaaggaagctgccttcttcaaagagctggcagtaagagaagatgctattcgaggtagtattgcctacttctcctttgcagccatggagacagcccttgcacagctccagctgggcctggggtttgacgtgtgttcccagcagcagatctggctcattattccttaa

SEQ ID NO: 114107 - DNA, 1186 bp, Homo sapiens
tttcgtgctaccagaagaagtgtcgggtacgtctgcattacacctggcgggagctctggtcagccttgataaatttgctgaagttccttatgtcaaatgagactgtacttttggccaaacacaacatttttacattagcccttatgattgtgaacctatttaatatgtttatcacatatggcgacacatttctgccaacccccagcagctatgatgaactttactatgagattatccgcatgcaccagagctttgacaacctctactccatggtcctgaggctttctaccaatgcaggccagtggaaggaagcagctagcaaggtgacccatgcattggttaatatcagagccatcatcaaccactttaaccccaaaattgagtcctacgctgctgtgaatcacatatcccaactgtcagaggagcaggtgctggaggtggtgagagccaactatgacacgctcacgctgaagctgcaggatggcctggaccagtatgagcgctactcagagcagcacaaggaagctgccttcttcaaagagctggttcgatccattagcaccaacgtccggagaaacctggccttccacacactcagccaagaagtcctgctcaaggagttctccactatctcctgaggccacgcctacctgagcagcctctgactgcccttacccatgaggatcatgggctggagggggagcgaagggagagggggctgcccccgaggttggagagaaacacagataccaagttctcttggtgaagaccgcacttcaatggagcttgcgcagcaggggcaggagggtcaagccagggataatcttatttggggaggaatgggtgggcacagtggggagaggcctccaggaatgtggggacttccagagtgggctccctaaacagcccctcacatttccaatcttgaggttacaagctgtagctactgactaattttcgggagctggtgaggcaagcctcagggtaatgccagcaccctgaaagtcagtggctctgctcggcttctgaaaacagatcaactctcagatatagctggagctacatcctgcttcctttgggcctggggctgtgcttggcttgaaatctgtgtcccctgcctgcactggcactttgtccagtcatcgggacctttggctcagatttagggtaagataggaatagggta

SEQ ID NO: 114108 - DNA, 624 bp, Homo sapiens
atggacactaaagacaaacgtacttttgcttttattcttattactagaaatctttctaattttactttaggatatgcgcctaccataggaagtagaacattcaagacgaaaacatcaactgtccttggtgtttcagtcttcgggacctctttgtcacattctgggatacagaagccatttgcctatggctgtggaaagtactcagtaaatattggctggctggctggctggctggctggctgcataaaaggatggaggaaagggaaggaaggaaggaagctaaaaaaagatggagaacttccccagatgccccacaagtctaggaattgtttccagaccagcataagcaatggcaaggctgagggactggctatgggggatgtagcagtggacaagagcctcgctaagtgtggaaacggggaacagagggaagctggggaacttctcagaggggataaagttccaatttcaaggcaaagaaacttaaggcccagagaggccgaacaagtggcaaaggccaaacagtcagccaggaacagaaggggaagcaaagcaactcgaatttattatgtgtcaactgtgggctatgagcttcactatcagtcatccacagacatcatctaa

SEQ ID NO: 114109 - DNA, 395 bp, Homo sapiens
atagtgaagctcatagcccacagttgacacataataaattcgagttgctttgcttccccttctgttcctggctgactgtttggcctttgccacttgttcggcctctctgggccttaagtttctttgccttgaaattggaactttctttggtgaaacaaccagaaaatgcttcagcccagaaacttggtcagtacttggatgggggatcacctgggactacccaaggatgtgggctgtctgctagactatagccccttgagggcaaggtgggcgccttgctcatggttccatcctaagccccagcacagtagtgggtgcatggtgagccattagtgaatctttgtggaatgaaggtgggagaaaataaaatacctgtacttcacagggtattgaag

SEQ ID NO: 114110 - DNA, 399 bp, Homo sapiens
ttttttctttttaattaaaattttattttacatgtttttaaaattcacaatagatattttatcctaaaataaagtaaaaccgagaggtgacagcgtgctggcagtcctcacagccctcgcttgctctccccgcctcctctgcctgggctcctactttggcggcacttgaggagcccttcagcccaccgctgcactgtgggagcccctttctgggctggccaaggccgggtgggcgtgggcttggcgggccccgcactcggagcagccggccagcctaagcctcccacccactccaagggctcctgtgcggcccgagcctcctcgacgagcaccaccccctgctccacggcgcccagtcccatcgaccacccaagggctgaggaatgcaagcgcaccgtg

SEQ ID NO: 114111 - DNA, 379 bp, Homo sapiens
gtgttgcttgctggatcatattgtgtacggaattggtgggttcttggtctcactgacttcaagaatgaagccgcggaccctggcggtgttacagctcttaagttggcgcgacaggagtttgttccttctgatgttcggatgtgttcagtttcttccttctgctgggttcgtggtctcgctggctcaggagtgaagctgcagaccttcgcgctgagggagcgggctccggccttggccagcccagaaaggggcctcctacagtgcagtggtgggccgaaggactcctcaagtgccgccaaagtgggagcccaggcagaggaggcgccgagagcaagcgagggctgtgaggactgccggcacgctgtcacttctcaatatg

SEQ ID NO: 114112 - DNA, 267 bp, Homo sapiens
atggcgggctgcaggtcccgagccctgccccgcagggaggcagctaaggtccggcgagaaatggagcgcagcgccagtgggccggcgctgctgggggacctagtacaccctccgcagccgctggcccggcccagaaaggggctcccacagtgcagcggtgggctgaagggctcctcaagtgcccccaaagggggagcccaggcagaagaggcgccgagagccagggagggctgtgaggactgccagcacgctgtcacctttcagtag

SEQ ID NO: 114113 - DNA, 447 bp, Homo sapiens
atgcgcttgcactcctcagcccttgggcggtcgatgggactgggcgccgtggagcagggggcggcgctcgtcggggaggctccggctgcacaggaacccacggaggcgggggaaggctcaggcatggcgggctgcagtcccaaggcctgccccgcgggaaggcagctaaggcccgggccggccggctgctccgagtgcggggccgccaagcccacgcccccccggaactccagctggcccgcaagcgccgcgcgcagccccggttcccgctcgcgcgtctccctccacacctccctgcaagctgagggagcgggctgcggccttcgccagcccagaaaggggctcccacagtgcagcggtgggctgaagggctcctcaagtgccgccaaagtgggagcccaggcagaggaggcgccgagagcgagcgagagctgtgaggactgctag

SEQ ID NO: 114114 - DNA, 579 bp, Homo sapiens
atgatctcctttgacctcatgtctcacatccaggtcacagtgatgccaaaggtctttgggcctgtgatgagaggggctgccatgaaggattttgcagaaaagaagtccacagcaaaggccctggaagatgtaaaggcaaacttttactgtgaattatgtgacaagcagtatcacaaacaccaggagtttgacaatcatattaattcttatgaccatgctcataagcagactcaggagcccagctggcttcacccagtggatcccacaccggggtgcaggtggagctgcctgccagtcctgcaccatgcgcccacactcctcagcccttgggtggtcgatgggactgggcgctatggagcagggggtggcactcgttggggaggctccggcggcacaggggcgcacggagcagctgagggacccagctccggccttggccagcccaggaaggggctctcactgtgcagcggcgggctgaagggctcctcaagtgccgccaaagtggaagcccaggcagaggaggcgctgagagtgagcgagggctgtgaggactgccagcacgctgtcacctctcaatag

SEQ ID NO: 114115 - DNA, 1059 bp, Homo sapiens
atgcccagtccagaaatcaaagtaaataaccttaaaccaaacacagatgaattggctttcctaactcaacccagatggtgtgtccggaattggtgggttcttggtctcactgacttcaagaatgaagccgcggaccctcaaggtgttacagctcttaaggttgcgcgtctggagtttgttccttctgatgttcggatgtgtttggagtttcttccttctggagtgaagctgcagaccttcacggtgagtgttacagctcttaaggcggcgcgtctggagttgttcgttcctcctggtgggctcgtgggctcgctggcttcaggagtgaagctgcagatcttcgtgctgagtgttacagcttataaaagcagtgtggacccaaagagtgagcagtatcaagatttattgcaaagagcgagagaacaaagcttccacagtgtggaaagggacccgagcgggccttgggtggtcgataggactggccgtggtggagcagggggcggcgctcgtcggggaggctcgggctgcacaggaacccacggaggcggggtaaggctcaggcatggcgggttgcagtcccgaggcctgccccgcgggaaggcagctaaggcccggcgagaaatcgagcgcagcaccggtgggctggcactgctgggggacccagtacacccttcacagccgctggcccgggtgctaagtcccttattgcccggggccagcagggccagccagctgcttccgagtgcggggcccgccaagcccacgcccacccggaactccagctggcccgcaggcgccgcacgcagccccggttcccgctcgcgtttctccctccacacctccctgcaagctgagggagtgggctccggccttggccagcccagaaaggggctcccacagtgcagcggtgggctgaagggctcctcaggtgctgccaaagtgggagcccaggcagaggaggcaccgagagcgagcgagggcggtgcggacttccagcacgctgtcacctctcaatgggaccatctagtttcaggaaaacaagctcagggctcccactga

SEQ ID NO: 114116 - DNA, 816 bp, Homo sapiens
atgctggcagtcctcacagccttcgctcgctctcggcgcctcctctgcctgggctcccactttggccgcacttcaggagcccttcagcccactgctgcactgtgggagcccctttctgggctggccaagaccggagccgtctccctcagcttgcagggagacttgtcacagactttatcttcagtagtaggtagagacaggaatgctaagaaaggagagatgatcatgctggtaaatgtggctggaacccatgcaaatgggctttctccacatgatggagaagatggctgccaggacatcagccatattggattagggcacactcaagtgatttcatttcactttaactacctccttaaaggccctatcttcacatacacccatattcccagggactggagaactgcaacttccagtgagtccctctgtgtgtctggatcagggaatgcaattaaagccgagtacttcgagtcaccttttaaaaacagtgaagccacgaatgaaacgacagtccttgctccacatgaaacaatctttcgagccgaagatctatctgtgattcttaaagcgtatgtgttggtgacgtccttaacccctttgcgtgcattcattcattcgacgggcacagtttggaatccaccaaagaaaaaacgcttcactgtcaagcctgcttctccctggagccatcaagggaaggtatatgctgggatgaggatgggacccagttatggacttgaaaagagcaagtgttgtttctctgaactggatcctggaagtgtattgcccgtgaacttcacagaagctcttaaaaattaa

SEQ ID NO: 114117 - DNA, 558 bp, Homo sapiens
atgaagccgcggaccctcgcggtgagtgttacagctcttaaggtggcgcgtctggagtttgttccttctgatgttcggatgtgttcagagtttcttccttctggtgggctcgtggtctcgctggcttcaggagtgaagctgcagaccttcgcggtgagtgttacagctcgtaacagtgtggacccaaagaactcaggagcccagctggcttcacccagtggatccagcaccagggctgcaagtggagctgcctgccagtcccggtgccgtgtgcccgcactcctcagcccttgggtggtcgatgggactgggcgccgtggagcagggggtggcgctcgtcggggaggctcgggccgcacaggagcccatggaggggctgagggagtgggctccggccttggccagctcagaaaggggctcccacagtgcagcggcgggctgaagggctcctcaagtgccgccaaagtgggagcccaggcagaggaggcgcagagagctagcgagggctgtgaggactgccagcacgctgtcacctctcagtgtccaggaaggaaataa

SEQ ID NO: 114118 - DNA, 540 bp, Homo sapiens
atggcgggctgcaggtcccgagccctgccccacggaaaggcagctaaggcccggcgagaaattgagcgcagcgccggtgggctggcgctgctgggggacccagtataccctctgcagctgctggcccgggtgctaagcccctcattgcccggggccggtggggcgggccagccggctgctccaagtgcagggcccgccaagcccacgcccacccggaactccagccggcccgcaagcgccgcacgcagccccggttcccgctcgcgcctctccctgcaagctgagggagtgggctccggccttggccagcctagaaaggggctcccacagtgcagcggtgggctgaagggctccccaagtgccgccaaagtggaagcccaggcagaggaggcgctgagagcgagggagggctgtgaggactgccagcacgctgtcacctctcactgggattacagcaggtgctcagctgacatcggtgagggaatgggagtgattcgtcatcacagtaaccgtgtacttcagttctctgacggcagctga

SEQ ID NO: 114119 - DNA, 555 bp, Homo sapiens
atgctggcagtcctcacagccctggctctctctcagcgcctcctctgcctgggctcctactttggtggcactcgaggagcccttcatcccaccgctgcactgtgggagcccctttctgagctggccaaggcccaagcccactccctcagcttgcagggaggtgtggagggagagtcaggagcaggaatcggggctgcgcgcggcgcttgcgggccagctggagttccggcaatatttcagtatctcagtagcaatgagcacactcagatcccagattttggagtcaaatatcactctccacccacaaatctgcagctcctggaggaaatagcacctccaggactggggcagggagtagggatccctgagaaccaagctactgtgaatactgctgctcctctgggtctagctgcccagtggggttaccacactccagatgacattttcttgctgcattctcacatgacagaagagtacaaagagggacaaatgctgtgtcctgacctggtagaggaggtggaagggccaggtggttctcggaagcctcttttataa

SEQ ID NO: 114120 - DNA, 648 bp, Homo sapiens
atgaagccgcagaccctcacggtgagtgttacagcttttaaggtggcgcatctggagtttgttccttctgatgttcagatgtgttcggagtttcttccttctggtgggttcgtggtctcgctggcttcaggagtgaagcttcagacctttgcggtgagttttacagctcataaaagcagtgtggacccaaagaactcagaagcccagctggcttcacccagtggattctgcaccagggctgcagatggagctgcctgccagtcccgtgccatgcacctgcactcctcagcccttgggtggtcgatgggactgggcactgtggagcagggggtggcgcttgttgaggaggcttgggccgcacaggagcccacggaggagctgagggagcgggctctggccttggccagcccagaaaggggctcccatagtgcagcggtgggccaaagggctcctcaagtgccaccaaagtgggagcccaggcagaggaggcgccgagagcgagcgagggctgtgaggactgccagcacgctgtcacctctcaatcccccctctaaacaggacaccctaactgctgttggcaatttggctgatgaccactctagctacttcctgctggataggggtgaagaaggggccctgcagttgtag

SEQ ID NO: 114121 - DNA, 798 bp, Homo sapiens
atggacgactctaatgagcatgttggtattgaaagaagaaaggcacagcaggaagtgacaagccaggaggagccgcctcaccagaagctagccctggcagcacctttatcttggactttaagccttcaggactatggaggaacccttgggtggtcgatgggactgggcgcagtggagcacggggtggcgctcattggggaggctcgggtggcacaggagcccacggagtggaggggaggctcaggcatggcgggctgcaggtcccgagccctgctcgcgggaaggcagctaaggcccggcgagaaattgagcacagcagctgctggcccaggtgctaagcttctcactgcccggggccggtggggccggccgggcgagtgcggggtccgcggagcctacgcccactcggaacttgcgctggcccgcaagcaccgggcgcggcccggttcccgcccgcgcctctccctccaaacctccctgaaagctgagggagctagctccgggcttggccagcccagaaaggggctcccacagtgtagcggcgggctgaagggctcctcaagtgccgccaaagtgggagcccaggcagaggaggtgccgagagcgagcgagggctgtgagggctgccagcaggctgtcacctctcagcctgactcattttccaacccttcccttgccttctggacagtcccctgcttccctagctctgacatcctcatgaccttctgtctccagcattgtcaggcccttggaccagctcacggcagccaggacacagaggcattgtgccattcctag

SEQ ID NO: 114122 - DNA, 1455 bp, Homo sapiens
atgaagccgtgggccctcgcggtgagtgttacagctcttaaggtagcgcgtctggagtttgttccttctgatgctcggatgtgttcggagtttcttccttctgccgctggccggggtgctaagcccctcattgcccggggccggcagggccagctggctgctcccagtgcggggcccgccaagcccacgcccacccggaactccagctggcccgcaagcgccgtgcgcagcccgggttcccgctcgcgcctctccctccacacctgcctgcaagctgagggagccggcttcggccttgcccagcccagaaaggagctctcacagtgcagcggtgggctgaagggctcctcaagtgccgccaaagtgggagcccaggcagaggaggcgccgagagcgagcgagggctgtgaggactgccagcacgctgtcacctctcactatgcaatgcttttcataggaactcgggaatgtttgtgttctggacagatcgccaaaagtgactccatacatcacatgagccactcccaggggcagccagagctgcctcctctgcctgcttctgctaatgaggaaccgtctggactctatcagactgtcatgtcacacagcttttacccgcccttgatgcaacgcacgtcatggaccttggctgcacccttcaaagaacagcatcaccaccgtggacccagtgattccatcgccaacaactactccttgatggcccaggacctgaagctgaaagatctgctgaaggtctaccaaccggccaccatcagtgtccctagggacaggaccggtcaggggctgccatcatcaggaaatagaagctcatcagagcccatgaggaaaaaaacgaagttttcctccagaaacaaagaggattccactaggatcaagttggccttcaagacgtcaatcttctcacccatgaagaaggaggtaaagacatctttgacgttcccaggaagcagaccaatgagtccagaacagcagctcgatgtcatgttacagcaggagatggaaatggaaagtaaagaaaagaagccatctgaatcggacctggagagatactattactatctgaccaatggaattcgcaaagacatgattgcccctgaggagggtgaagtgatggttcggatttcaaagctgatttctaacacgctgctgacgagtcccttcctggagcccctgatggtggtcctcgtgcaggagaaggagaatgactattactgtagcctcatgaaaagcatcgttgattacatcctcatggacccaatggagagaaaacggctctttattgagagcatcccccgcttgtttcctcaaagagtgatccgggcccctgtgccctggcacagtgtctacaggagcgccaagaagtggaacgaggagcatctgcacacggtgaaccccatgatgctcaggctgaaagaactgtggtttgcagagtaa

SEQ ID NO: 114123 - DNA, 1278 bp, Homo sapiens
atgtttctgcaggctgcacaaaaagcatggaacccgcatctgcttctggtgaggactcaggctgcttccactcatggcagaagagctgacccccatgtgggtcggtgtggggagaccccacagagctggggtaaaggagaatcacttgctctcgctcccctgagccttactaaagcagcacttgaggactgttcacagatcagcccctcccatcaggggacattgttgtgtctcctcatcctggacctgaggacaggaaagctttccctggagcacactgaagagcccagtgatgtcccctcccatctcctctatcggtggagcatcagctctgcgatcactgaagtctttcaggctctcgcttcctctgattccacctcgcagccagtaaatgtccacaccaaggaggatatgaaagtacaagacatagccctggtccttccatcgaggaagtcaaggaatgcatgcaggacgacaactagtacttgcaaggcacttcttatgcgccagctggcagccagagttattctgcaaaactgtgtttccaagtcctcaagaggaatacatgtcccccagaaaaacctaaccctgccagtgagaggtgacagcgtgctggcagtcctcacagccctgctcgctctcggcgcctcctctgcctgggctcccactttggcggcacttgaggagccctttagcccaccgctgcactgtgggagccccttgctgggctggccaaggccggagccggctccctcagcttgcagggaggctttagctgccttcccgcggggcagggctcgggacctgcagcccgccatgcctgagcctcccccacctccgtgggctcctgtgcagccggagtctccccgacaagcgccaccccctgctccgcggagcccagtcccatcgaccacccaagggctgaggagtgcaggcacacggcaccgcactggcaggcagctccacctgcagccccggtgggggatccactgggtgaagccagctgggctcctgagtctggtggggacgtggagaacctttatgtgtagctcagggattgtaaatacaccaatgggcactctgtatctagctcaagttaagtttcctgctgaatatttcgaaactctttgcaaactgacttcagcacctctgtgggatattcccttccactgccaacccttagttgtcagaaactctgtctttgggaagcatgctacattttctagaacaaatctagatactttagaaatgatggatgatgatgatgatgatgaatga

SEQ ID NO: 114124 - DNA, 3206 bp, Homo sapiens
atgcgaacagcaggggcagagcgtttgagatggagtgaacagttagtcaaaggtcctaaggcaaaaagtgctcagcattttggagaaatgaccaatgtggcaagaatatcacgcttcggagcagaggagtacgagagcctgtacacgagccacatctggatccccagcagctggtgctcactcactgaaggtcctgagtgtgatgtcactgatgacatcacggccactgtgccatacaaccttcgtgtcagggccacattgggctcacagacctcagcctggagcatcctgaagcatccctttaatagaaactcaatgttggaagttctggccagggcaatcaggcaggagaaggaaataaagggtattcaattaggaaaagaggaagtcaaattgtccctgtttgcagatgacatgattgtatatctagaaaaccccattgtctcagcccaaaatctccttaagctgataagcaacttcagcaaagtctcaggatacaaaatcaatgtgcaaaaatcacagtcattcttatacaccaataacagacaaacagggagccaaatcatgagtgaactcccattcacaattgcttcaaagagaataaaatacctaggaatccaacttacaagggatgtgaaggacctcttcaaggagaactacaaaccactgctcaatgaaataaaagaggatacaaacaaatggaagaacattccatgctcatggataggaagaatcaatatcatgaaaatggccatactacccaaggtaatttatagattcaatgccacccccatcaagctaccaacgactttcttcacagaactggaaaaaactactttaaagttcatatggaatcaaaaaagagcccgcatcgccaagtcaatcctaagccaaaagaacaaagcaagaataaagctggaggcatcactattcaaactatactacaaggctacagtaaccgaaacagcatggtactggtaccaaaacagagatatagatcaatggaacagaacagagccctcagaaataatgccgcatatctacaactatctgatctttgacaaacctgagaaaaacaagcaatggggaaaggattccctatttaataaatggtgctgggaaaactggctagccatatgtagaaagctgaaactggatcccttccttacaccttatacaaaaatcaattcaagatggattaaagacttaaatgttagacctaaagccataaaagtcctagaagaaaacctaggcaataccattcaggacataggcatgggcaaggacttcatgactaaaacaccaaaagcaatggcaacaaaagccaaaattgacaaatgggatataattaacctaaagagcttctgcacagcagaagaaactaccatcagagtgaacaggcaacctacagaatgggagaaaaattttgcaatctacccatctgacaaaggactaatatccagattctacaaagaactcaaacaaatttacaagaaaaaaaaaaccatcaaaaagtgggcaaaggatatgaacagacacttctcaaacggagacatttatgcagccaacagacacatgaaaaaatgctcatcatcactggtcatcagagaaatgcaaatcaaaatcacaatgagataccatctcataccagttagaatggcaatcattaaaaagtcaggaaacaacaggtgttggagaggatgtggagaaataggaacacttttacactgttggtgggactgtaaactagttcaaccattgtggaagacagtgtggcgattcctcaaggatctagaactagaaataccatttgactcagcaatcccattactgggtatatacccaaaagattataaatcatgctgctataaagacacatgtacacagctacgcggcggcggcggagcgcaggcctcgtgccgttacggccatcacggcggccgcagtggcgtcctggagccctcctcaggtagctcttcaacaagcaggcataaacacttctctgatgagggacgcgatggggaaaggctttgttctctgaaaactccctgtaggaactgcctttcttctgagtgtccacttgtgtccggaattggtgggttcttgatctcactgacttcaagaatgaagccgcagaccctcgcggtgagtgttacagctcttaaggtggcgcgtctggagtctgtcccttctgatgttcggatgtgttcagagtttcttccttctggagtgaagctgcagatcttcacggtgagtgttacagctcttaaggcggcgcgtctggagttgttcgttcctcctggtgggctcgtggtctcgctggcttcaggagtgaagctgcagaccttcgcgggctgccggtggagctgcgtgccagtcctgcgccctgcgtccgcactcctcagcccttgggtggtcgatgggattgggcgccctggagcagagggtggtccttgttggggaggctcgggccgcacaggagcccatggaggggctgagggagccggctccagtcttggccagcccagaaaggggctcccgcagtgcagcggtgggctgaagggctcctcaagtgcggccaaagtgggagcccaggcagaggacgcgcccagagtgagcgagggctgtgaggactgccagcatgctgtcacctctcacactgaccccagggaaggcagatttagcccagaacatgccccacccctttccaatccaagaccagtgatcagggtggcccttctggtcctgcagtatctgggtctgaaaggcaagtataactccatcaccagtaaccagggtgtagagactatctgtgtgggcccttctgttcttgggaaatcaaccctgtctggggctggctttgactctcctgttgtcttgccaacagccatccttacccgacctgggatggagatcaccaaagatggcttccacctggttattgagctggaggacctggggccccagtttgagttccttgtggcctactggaggagggagcctggtgccgaggtgagactccagccttggcctttgggtcaggcttcgggaaagaaggcacagatttctgaggctctcggtattcagtttcccaagaccaaatcctcagaagaagaatccaattggtcttgctcgtcttatcaggccaagcttcaggggttgctggtagccagctcgcctctgattggacccttctcaggccaagg

SEQ ID NO: 114125 - DNA, 1092 bp, Homo sapiens
atggtgacaaaacaggctgtccccgatccagctcacagcgtactctggtactctctgcctgactcaggagcccagttggcttcacccagtggatcccgcagcggggctgcagatggagctgcctgccagtcccgcgccgtgcgcccgcactcctcagcccttgggtggttgatgggactgggcgccgtggagcaggggatggcgctcctcgaggaggctcgggccgcacaggagcccactgagggagtgggaggctcaggcatggcgggctgcaggtcccgagccctgccccacgggaaggcagctgaggcccggcgagaaatcgagcgcagcgccggtgggctggcactgctgggggacccagtacaccctccacagccgctggcccgggtgctaagcccctcattgcccgggtccggcagggccggccggctgctccgagtgcagggccggccggctgctccgagtgcagggccggccggctgctccgagtgcagggccggccggctgctccgagtgcagggccggccggctgctccgagtgcagggccggccggctgctccgagtgcagggccggccggctgctccgagtgcagggccggccggctgctccgactcagaaaggggctcccacagtgcagcggtgggctgaagggggctcctcaagtgccgccaaagtgggagcccagacagaggaggcgcccagagcgagcgagggctgtgaggactgcctgcacgctgtcacctctcagtatctttataaaagagaaagtagattaaaaaatgattgtggcctctgggaagaacatgtttacttattcctggattcaggtcatgttagcgaacaaggattaatggcacatccaattaagaccataaataaaactgcatttggtttaatatcccatctcaatggctcacctgaagtggaccagctgcttcccgtggaagaggggcaggatatgatgaaagatgcagatgaacagccaggtgaaggcgaggtcctgagcacaggagcctctgtccccatgatgccaggaagcatcagtgaacgaccacggctaatccggttgccacgtcaggcgctgtaa

SEQ ID NO: 114126 - DNA, 1112 bp, Homo sapiens
gagcagcagcaagatttattgcaaagagcgaacaaacaaagcatcccggtgtggaaggggacccgagtgggttgtcactgctggctcgggcagcctgcttttattctcatctggccccacccacatcctgctgactggtagagccgagtggtctgttttgacagggtgccgattggtgcgtttacaatccctgagctagacacaaaggttctccatgtccccaccagattaactagatacagagtgttgacaaaaaggttttccaagtccccaccagagtagctagatacagagtgtctattggtgcattcacaaaccctgagctagacacaaggtgctgattggtgtgtttacaaaccttgagctagatacagagtgccaattggtttatttacaatcccttagctagacataaaggttctccaagtccccaccagactcaggagcccagctggctttcacccagtggatcctgcacaggggctgcaggtagagctgcctgccagtcctgcgccagtcccgtgccgtgtgcctgcaatcctcagcccttgggtggtcaatgggactgggcaccatggagcagggggcggagctcgtcggggaggctcaggcggcacaggagcccacggaggggaggggggaggctcaggcatggcgggctgcaggtccccagccctgccccgcaggaaggcagctaaggcccagtgagaaatcgagcacagcagctgctggtccaggtgctaagcccctcattgcccggggctggtgggggcccgccggccgctccgagtgcggggtccgccgagcccacgcccacccggaactcgcgctggcccgcaagcaccacgcgcagcccggttcccgcctgcacctctccctccacacctcctcccaagctgagggagccggctccgaccttggccagctcaggaaggggctcccacagtgcagcggcgggctgaaggggctcctcaagtgctgccaaagtgggagcccaggcagaggaggcgccaagagcgagcgagggctgtgaggactgccagcaggctgtcacctctcagtgggagagtggaatgcttgatatggagcctatagaggaatcgctgttgtag

SEQ ID NO: 114127 - DNA, 975 bp, Homo sapiens
ctttcatacatttttgtaagttatgtttccatgtctcgtgtgtgatgttgtgtactgttgacatgaaatactccttttttggtaaagatggattggcttaacagattagagctacagaaagtatgacttagcacgctggtaaggccacaaaaacccaagcaagttcccccagtttcgtatcctgtaaatagagataagttagtttttctgtttcagagagtggttatggaaaacgtactaggctttaaaatgattgttaatctcagtgtggggacatttggtttggggacatcagttcaggagtaaatgtatctgatcctgctttgaataaatgcaacttgaaagccttggaattttaccagatcgaatctgggccaaatagaaagcattttaagaaagaaagatggatcaacctagtggaagaagtttcatgcaagtattatgtgaaaaatatagtcctgaaaattttccttatcgccgtggcccggggatgggagtccatgtcccagccacacctcagggctctcctatgaaagatcgccctcaacctccccaaggtactagtgttgaacagcctgtggaataacctgtgcaggagatgaaaaagaaattgctgctttctgcgctcatgtgtcggaactagatctttctgacaacaaactcgaagactggcatgagtgcagcggtgggctgaagggctcctcaagtgccgccaaagtgggagcccaggcagaggaggcgccaagagcgagcgagggctgtgaggactgccagcacgctgtcaccactgccagcacgctgtcacctctcagcatggccacagtcaaaagtagcctcagtggtgaggaccatgagaagagcggagtaaaatgtacaaggtggatgctgcatggatactctgttgacagacttacttctgagctcaggtacctttggggacacccagaaacgcttaagaggctagttgccctgtga

SEQ ID NO: 114128 - DNA, 1622 bp, Homo sapiens
atgattgatgtcactgaggccccgcctttccagaccaagccagtgttcatcttacatacgttgattgatgtcactgaggccctgcctttctggaccaagccaatgttcatcttacataggttgattgatgtcactgaggccctgcctttccggaccaagccaatgttcatcttgcatatgttgattgatgtcactgaggccccgcctttccggaccaagccaatgttcatcttacatatgttaattgatgtcgccgaggccctgcctttccggaccaagccaatgttcatcttgcatatgttgattgatgtcaccgaggccccgcctttccggaccaagccaatgttcatcttacgcagatgcgagtctccggacttgatcaagcgccctctagggggctttcctgtgcctgcagacacaaggcacagcagcgctcccacgtcctccctggcagggtgtgcacacccgatgccaccttccatgtcaggatattggaatcattcgggtccacatccaggggaccacctgcattctcataataataccaatgatgatggccatgatgatggtgatgaagatgacgatgatgatggtgatgatgatggtgatgaagattacgatgacgatgatggtgatgatgatggcattgaagatgatggtgatgatgatggtgatgaagatgatggcaatgaagatgatggtgatgatgatggccatgatgatgcatgggagcatgatccccgcgtcaccaggctgctggctggcccagtggagaagagagcagccgccctgggggagctgttctggggagagggcaaaaaagggacagggaaggctttgaaggggatgctggtgcagtccctcaggcgccccacctctcaggaagatgggccccgctggggggcccgtggtgtggaggccacgctgctgcccgggctgagggacccgaacctgcaggccccagaaaataaaagggtggccaccgttattagtttaaaaaggcgtttgcttgagaagaggtgccttcagtccagtgaagagcgctgggctgctacccgaagcatctgcacgggaaggaaacgagatgagtcggtgactcgttgccacaggggcacgcatggtgtctctgtgtctcctctggtcttagaagtgagaggtgacagcgtgctggcagtcctcacagccctcgcttgctctccccgcctcctctgcctgggctcctactttggcggcacttgaggagcccttcagccctccgctgcactgtgggagcccctttctgggctggccaaggccggagccctctccttcagcttgcggggaggtgtggagggagaggcgcgagcgggaaccggggctgtgcgcggcgcttgcgggccagctggaagttcctggtgggcgtgggcttggcaggccccgcactcggagcagcaggccggccctgccggccccggggaatgaggggcttagcacccgggccagcggctgcggagggtgtactgggtcccccagcagtgcccgcccaccccgcgctgcgctcgatttctcaccgggccttagctgcctccccgcggggcagggctcgggacctgcagcctcgccactgcctgacaccctccgca

SEQ ID NO: 114129 - DNA, 1074 bp, Homo sapiens
atgcagcctccggaggccggtcttggccatgtgctgggtaaggtaacaccatggctgtgtcttgagaccaccccaacctcagttcacttgaatgaagaattttataatctcaactctaagggacctgtcaaattagtccagggctccaagaaatgtgaattccaaggacaaggtagccctgaaatgcctgcctcatgggatcctgccctgtcagtagtaagcatcttcaaagtggctcctgcaggttggtctcctcaatcacagagttcagacagaaccctgacaccagccacgtgtaccatgcggtcagccaaatgtgctttggaggtagcaccagcatctctagggcagccagtcatttctctagaatggtgtagaacaacagcaccaggaactgaaaggaacctgcagtacaacacagcagacgcttcaccttctctgtccccagagagatggatgccatccaatgagcacccctgggccagtggcatcagacagtcactgttccaggctctgttctcggcgctgggggtacaaggcggccaccagattgctccacttagatgtgtcatggacacctgcaccttaactcatctcacacctctgccggcttttcctgcagcttggattatcttcattccccggctgtccatgctgttgggttcttcttctccctcacactcaccatgttcagttcctcaccaagcctgtcagctctgtctccctccgtttccttgttttcctgctgaagtcgccaggagccccttcacgcacacccccaccccgaactctggaaaaaggcaagaaataaaagcggagctcttttggaggttggctagttaccgtatggatgaggagcccactgtgatgggaataaagccccgggaacagcagcagattcctagcatgtttcaaactgtgtggatgcggggaggggtcatggcagcggagccatctagaaagattgtcagcagcccttggatagtggaaatgattaatcacttcagcacaaaagaacacaaagagagatttgttaagaataagcaggggacagagtgccagctccaggggtga

SEQ ID NO: 114130 - DNA, 467 bp, Homo sapiens
gaagagatgaaggttgggcttgcccttggagggtgcgtagcgatggaagggcatcccagagaaagagaagatgtggaatgatgatgagaggggtgcgcatcatgcatatgggggccagttgggagacagcctgtgctagcgtcattctagaggggaagaaagagggggccccggtggagccaaagaacagtaatctttcaggaagaaaggaaaaggccagcaacagcaacaaaaacttcctgcagatgtggaatttgaaggaatccagagaaagcaagcctatttttagcaggaggaataaaattcttaaattgaaagcaaatcggagagggttctatggcgctctctgcgaggggccgagcgtggattcgggtctgatgattactttgactgcagaaacagtgggggctgtaatctccgaagcagcggacactcacagcgacggttggcccagtcctttgatttag

SEQ ID NO: 114131 - DNA, 440 bp, Homo sapiens
tttgttttgaatttgagacattttctagaatattgctgggggaatgaggcttcagtactttacagaatcgttgcctgcacatcttggaaacacttgctgggattacttcttcaggttaacccaacagaaggctaaagaaggtatattgctgttgacagtgagcgactgtaaacatcctcgactggaagctgtgaagccacagatgggctttcagtcggatgtttgcagctgcctactgcctcggacttcaaggggctactttaggagcaattatcttgtttactaaaactgaataccttgctatctctttgatacatttttacaaagctgaattaaaatggtataaattaaatcactttaaaaccatgtctgtacatttttagagggcttcagcagggcattgaggaggcgctctgtgtatgcataaaatttgctatata

SEQ ID NO: 114132 - DNA, 483 bp, Homo sapiens
atgggggtggaactcatgatggaattggagcctttacaagggaatgaagagacaagagctctctttatgccacgtgaggatacagcaaggccccaatctgcaagccaggaagagtcgtcacgagaaccagaccatgcaggaactctgatcgtggacatttcaacctccagaactgtgatccaaaatgcatatgtatctttggaagaaactctgaagtaaaggccggaatattctttgtttaaaacattaaaaacaaaacagaccaaagcatcaagcaagaagtttcctggcaataaactaagcacagcattattttttaaggaacacaaattaagtgttcaacctgtggcaaatttgtactttctccctgaattatgttgttatcaaagaaaaaaattgggaagcatggcaaaatatcatcaaaactgaaactagaattaaacaaaactaaattaaaatgaaataaaatgatgtccattctta

SEQ ID NO: 114133 - DNA, 978 bp, Homo sapiens
atgtctgtgcagaggtgctgctggctcctctttgagtgtgagatccctctgcagtcacacaacctcacccagttacgaagagctagtcacctcaactgcattgtcccaagacaggcagagaagccattccctgtgtccacagaggaaggagaaagtggaggaggtgtttatggagcagctgaagctgtgataagacttctgagcttgcttctgaataccacagccccgggcacagcaaagccaagaaccctgtggatgacgctctccacgggtgtctcacagcctcttccaggacagctgagccgggaccagcagccttgctcatgccaccccctgcagacgcagtccctgagaaagacaaaacaaggtcacaattccaactggcatgacactgctgtcctgtatacaaccgaaaatgcactcatcccttccagaagagaagagattgctttgataactgtgaagaaaatgcaacctgttaagacctttcattgtgagatctgggctggtgttcatgtgctcagagacctgtggagtgttggaaaacacctggaggaggcactgctgtcagacagccagggtgaagcgtgtgcactgaagacgagatcagatcgactcatggaggcatccggcagagcttacggcaggacccatgatgaagggagggcctgtggagggtttattcaagacaaatcaggagcagatgtctccatttcaatcctacacaggcatggaggaccacatgctccctggtcacaggtggccgcagcctaccgtggcagcacagggggcaaggtagaagccagccctggactggcccccatcccattgcaggtgcacttatactcacccacatggggacaattcggacaccccagtgaccctaacatgtgcagtctggggacatgggaggacatgagcgccgcagagaaaacccatgcagacctgccgagaaggtgtaatctgcacagacagtag

SEQ ID NO: 114134 - DNA, 741 bp, Homo sapiens
gctgaggctgatcccggaaccaagctttgagaaccactgtgttagactataaatatccctcttggattcaggttcatgaaggaactgtgttagattatatacatccctcttggattcaggctcatgaaggaactgtgttagactatatacctctctcttggattcaggttcataaaggaactgtgttagactatatacatccctcttggattcaggttcatccctcttggattcaggttcgtgaaggaactgtgttagattatatacatccctcttggattcaggttcgtgaaggaactgtgttagagtatatacatctctcttggattcaggttcgtgaaggaactgtgttagactatatacatctctcttggattcaggttcgtgaaggaactgtgttagactatatacatccctcctggattcaggttcgtgaaggaactgtgttagactatatacatccctcctggattcaggttcgtgaaggaactgtgttagactgtatacatctctcttggattcaggttcgtgaaggaactgtgttagactgtatacatccctcttggattcaggttcgtgaaggaactgtgttagactgtatacatccctcttggattcaggttcgtgaaggaactgtgttagactgtatacatccctcttggattcaggttcgtgaaggaactgtgttagactatatacatcctcttggattcaggttcgtgaaggaactgtgttcccagc

SEQ ID NO: 114135 - DNA, 1296 bp, Homo sapiens
atgttggataagagtgaaaggccacggggaaaccatggcatgacagctggtggggcacgagcactgagagaagccacagaggggccacatcaaacgttccaacaacccatcaggaacggaaaagaagctgctgacattctggagaagaaacaggtagagctcaggctgtcctgctctcctttgcgggtacattcttttaacaaatgcaaggtgagcagatggcaaattggtcttcatctccccaaaacttatcaaaaaaaaacagcggaactcatggcaaactatatacacacacgagcacatgcacgaaccccaggcttcctgaaatctaaactaactgccagtttcctgagacagggtccagacgtatctgcgaacttgaggcattctgggtgctgcaagagctctgggaaaattggtcctggggatgaagggctccctggtgtcctatatacatgccgtgccatctccagtgccccaggtcgacttcagactgctgtgctggcaacgagaaatttccagccagtggatcttagcttgctgggctccgtggggctgggacctgctgagcaagaccacttggctttctggtctcagcccctttccagatcacaccagctcctcagcaatggatccaaaccagaagaagaaatctctgaattgcccaaaatatcacaccaactcatcagtaatggatccaaacaagaagaaatctctgaaatgccagaaaaggaatttaaaaggtttttatgtagaaatatgaaaacttatgatcataaagatttgtatgtgaatgtttatagcagctttattcataactgccccaaactgaaaacaatccaaatatacctgaactggggagtggaaaaacaattggctgactacatcaattctatagctcctgccatgcaaaattcaatcatcagagacgttgatcctatcatcctcctcccgccagcgaaggatattttgttggtccgctgcattagtgacatcacaaagatgggacctgatgctagaaaaatcatcggtaccttagatgccctgggtcacatttataggttccagggattaggacctgttatcttgggtggccattattcagcctactacagaggttccaccaaccacgcagctagcttagcgaagagcagcaattcaactcatgaagagcagatgtgttcctctttccatggtgaagatggtgctgcaggcttgcaggcactggggcgtgtgattgaagacattgctatttccggctgccacggagcatggaggcaccttgtggggctgtag

SEQ ID NO: 114136 - DNA, 329 bp, Homo sapiens
acctgacctttacacggtggaactcctcaggctcaaccttagatcctcttcttccaccctagctgcttaaatcatctcaaccacccatattgccttgcctctatgctgagagctttcagatttatacgacagcccagaatttcctccaatctcctgagccatgtaagtacctgctttgcacaagcacctcatactaaggttgcttagaacatcactgcctttcctaatgtgcttgagatttttgcattttcccttccagatccactctctacccatgaggctgacatagttgactacatccactggcttccttggctttacctttgccg

SEQ ID NO: 114137 - DNA, 576 bp, Homo sapiens
tttttttaattcacattgagtatgagtcatcccctgcatggaggcttctacagaggctctatgagatgccagcccgttctggccagcagagatgaagcggtggataaaagaggccaagttcttcccataccagggggcagagagtgcacccgagacctaaggaatgagcgagcaacagctgagcggggcagagagaggaggacagcagctctgggtggggcggggcggggcaggtggggagggacggctgtgttcggggagggaacggctgtgctcccggaagggccgtgccctgggccctggcgagtccagacgacagagctgtggcaggttctgcttggcttctgcctgaaagtgctcctttttctctccacccccttgcctctgaggaaggcacaacttcatggaaaggacacctaatgactttcaggatcagcctttcacgtcatttttacacagagcaaaggacttgctcagtgacctccctccattccctgcagggctgcgcgtgtggaccgcagtgagagaaagcggggctgtattcgctccacactgctcgggccgagtccagcctgc

SEQ ID NO: 114138 - DNA, 733 bp, Homo sapiens
acaaaacgaaaagaagaaaattaaaccctttcttttgttttcaaagttccaaggaaacttcttttatgacaactgcttggaattgaacgtaacagttcctaggattgacttaggaagtaggaagacaagagagactttctttttcctggggactgcacagccatgtcaggtgaagctcagaaggagcaggtaaagaagagatgatggttttggaagaacagctggccccatctgcactcgccttggatgctgcagagcctgggacaaaggggacagcactctcggctgccttagatctatggaggccagctggcccttttcatagggctgggctaacaaccactgatgcacatatcaccagggcagaaaagtctcacaaactattttttaaaagatcctattacgtaccaagcagtatgctcaatgttgaggactcaaaaattaaggcaaaattcttatttcaaggatcttactgccttgtgaagggagaaaagcaaacaaatggacaactacagtataatatgaaaaaggaccgaaacggtgaagttcattcgactcagcaacctttgctaagagcttactacaaggacacccaggtgaccaggacccagtccctgctaagagcttactaccaggacacccaggtgaccaggacccagtccctgctaagagcttactacaaggacaccagacaaatgacatgcacagatgacctgtttggtcatctcttaag

SEQ ID NO: 114139 - DNA, 575 bp, Homo sapiens
ttcacttatagccaatatttaataggtcccattttaactgatgtgtaaaaaatgtctttatgatctgttaccacccaaaagaatgcatcataactttcaagaatatgttctttgacttctaacctctgctcttctttagaattacctttgctgcggccagtacatgctccttgttaatgactctacatttactcgcacaagcgttcgtcctggactcttctgctaatcgatgaacaaacagtaaacagttcagatggacctctcccgtgccccattcccagcccgagaagggatggaatctcaccaataagtcaccacttttctccagacgaagttggaggcttctttcgcttgaagactcgctttagaaagccacgggggagccttccgctttaatctgtttcctctgggagactatggtcgacagcgccatcctctctgtcaagtaccagctgcctcagcttccgaggtgcttctctgtatcgcacacaagctccggggacactggggccagcggaaaacaatccggtccgtatgacgcttcttcaggcagaaaaacctcagtccgaacgttc

SEQ ID NO: 114140 - DNA, 267 bp, Homo sapiens
atggtggaaggggaagcaaacacgtccttcttcacgtggcagcagcaaggagaagtgccgagcaaagagggaaaagccccttataaaaccatcagctctcgtgagaactcattcactatcatgagaacagcagcgtcagggtcttgtgaactgttcttcctgaagaccttggattcgcccatccctgtcactctgtggtccctgcctccaccctttctcaggacgtcctcacctcctacctgggccactgaaatagcacccccatga

SEQ ID NO: 114141 - DNA, 1095 bp, Homo sapiens
atgaaggactggagacctaggaggaaaaaatggtttcctgggccaggtccagggccccattgctgtgaggaacctagggacttggtgtcctacatcctagctgctccagccatggctaaaaggggccaagctctgaagagggaagaggaagatcagggtgccagcgtggttggcttctactgcacttgtggaggaggaggggtaggagatgaaaaagaagaagaagatgatcatcgattatgtactcactctgtatcaagcactgttctaagtacttttgcatgcatcactacttcgtccagtttttatgataaccctttgagaatctctcacaagacttcagtcaaggtgtttgccagggctgtattcatctgcagcctcaactggggaaggatttgcttctgcactcactgccacggctgccagcagtcctcagttcctcactacgtgggcctctccacaggctgcctcacagcatggcagctggcttctccgagtgaggagtttaagagtgaaaaagaccctgattctcttgaaggagacttacacaggctgagaattaaccttctctggcattctgccactcataagtacaggctgcacctgggcttcagttcagttggccttctggctgccagtgatgagggactttttaaaggcttccatggaggccctttgactctcacacttgggtttaaattggtggttaatagatttgatcctggcatctatacttagtgcatcaatggtgcttagcaataccctcccaattcaacaatctttcaagttacttttccacctgtactctcaaatactagatacatcacagaagttaatgcattcgcttctacttatatgctgtcctgggtcactacaagtaaaagtgttagcaatttcactgcaggagcacatctgagactatcttcagggaagagattctgatggaaccactggtgagtgagcaaactccagaatcccatcctcagactcaggtgtatataattactactgctatcaactgtcttagattgggctcttgcagctgaccctgagaattagattcctgtccaagtgattgcctgagggagtgctctc

SEQ ID NO: 114142 - DNA, 391 bp, Homo sapiens
  misc_feature (1)...(391): n = a,t,c or g
ggcacgaggagtctcgctctgtttcccaggctggagtgcagtggcgctatcttggctcactgcaacgtccgcctcccaggttcaagcgattctcatgcctcagccctccgagtagctgggaccacaggtgtacgacatcatgactggctaatttttgtatatttagtagagacggggtttcatcatgttgaactcctgacctcaagtgatctgcccacctcagcctcccaaagtgctgggattacaggtgtgagccaccatgcctggccgtggtttgctcttaatgtttttaaggatggttgtgaatccccctggccccataataaattggaattttatactgcttactataatttttttaacactggaacaactttgagaccacctctgn

SEQ ID NO: 114143 - DNA, 411 bp, Homo sapiens
ccagatccattttcacttattggagagagcacgatttattgtggtgacaattcagtgtggagtcgtgctgctccagagtgtaaagtggtcaaatgtcgatttccagtagtcgaaaatggaaaacagatatcaggatttggaaaaaaattttactacaaagcaacagttatgtttgaatgcgataagggtttttacctcgatggcagcgacacaattgtctgtgacagtaacagtacttgggatcccccagttccaaagtgtcttaaaggtcctaggcctacttacaagcctccagtctcaaattatccaggatatcctaaacctgaggaaggaatacttgacagtttggatgtttgggtcattgctgtgattgttattgccatagttgttggagttgcagtaatttgtgtt

SEQ ID NO: 114144 - DNA, 479 bp, Homo sapiens
  misc_feature (1)...(479): n = a,t,c or g
atcagtagcaatttggagcggtaagccccaatatgtgaaaaggttttgtgtacaccacctccaaaaataaaaaatggaaaacacacctttagtgaagtagaagtatttgagtatcttgatgcagtaacttatagttgtgatcctgcacctggaccagatccattttcacttattggagagagcacgatttattgtggtgacaattcagtgtggagtcgtgctgctccagagtgtaaagtggtcaaatgtcgatttccagtagtcgaaaatggaaaacagatatcaggatttggaaaaaaattttactacaaagcaacagttatgtttgaatgcgataagggtttttacctcgatggcagcgacacaattgtctgtgacagtaacagtacttggggtcccccagttccaaagtgttcttaaagggtatcctaaacctgagggagggattanttggacagtttgggtgtttgggtccttgc

SEQ ID NO: 114145 - DNA, 1437 bp, Homo sapiens
atggggaaaaaacagaacagaaaaactggaaactctaaaaagcagagcacctctcctcctccaaaggaacgcagttcctcaccagcaatggaacaaagctggacagagaatgactttgacgagctgagagaagaaggcttcagacgatcaaattactctgagctacgggaggacattcaaaccaaaggcaaagaagttgaaaactttgaaaaaaatttagaagaatgtataactagagtaaccaatacagagaagtgcttaaaggagctgatggagctgaaaaccaaggctcgagaactacgtgaagaatgcagaagcctcaggagccgatgcgatctactggaagaaagggtatcagcaatggaagatgaaatgaatgaaatgaaatttcaattaaaaggcagctctgctagttactgtgttttggctggaatggaaagcctttggaatagcagtgttccagtgtgtgaacgtaaatcatgtgaaactcctccagttccagtgaatggcatggtgcatgtgatcacagacatccatgttggatccagaatcaactattcttgtactacagggcaccgactcattggtcactcatctgctgaatgtatcctctcaggcaatactgcccattggagcacgaagccgccaatttgtcaacgaattccttgtgggctacccccaaccatcgccaatggagatttcattagcaccaacagagagaattttcactatggatcagtggtgacctaccgctgcaatcttggaagcagagggagaaaggtgtttgagcttgtggtgtgtcagccgcctccagaaatcctgcatggtgagcataccccaagccatcaggacaacttttcacctgggcaggaagtgttctacagctgtgagcctggctatgacctcagaggggctgcgtctctgcactgcacaccccagggagactggagccctgaagccccgagatgtgcagtgaaatcctgtgatgacttcttgggtcaactccctcatggccgtgtgctatttccacttaatctccagcttggggcaaaggtgtcctttgtctgtgatgaaggccgcgacacagccgtcccccattatgcctttccggccgttgcccttcgacttttccccgtcacatctttgattctgtcctacctcattttttcaggggacctgcagaatggaatcacaggaagtcctcctacagactcatcagggatattaccttggtatgagccagaggacaagctgaaaaccagagtggtttgctctcctaaaagccaaggagtgagaactcttcaggcagaagagagtgagggcagagtgatcagtagctctcacgttatcaagagggtaattcaaactattaaggaagagactgttaggaggagtttaacaaggaggaggccctttaatgactcagaaagtagttga

SEQ ID NO: 114146 - DNA, 434 bp, Homo sapiens
ggaatctcgaaggagttagaaatgaaaaaagtagatcactatggagattatgtgactttgaagtgtgaagatgggtatactctggaaggcagtccctggagccagtgccaggcggatgacagatgggaccctcctctggccaaatgtacctctcgtgcacatgatgctctcatagttgaaaaggcaataatgcacatgaaaaccctaaagaagtggctatccatttacattctcaaggaggcagcagcgttcatccccgaactctgcaaacaaatgaagaaaatagcagggtccttccttgacaaagtactatacagctgaagaacatctcgaatacaattttggtgggaaaggagccaattgatttcaacagaatcagatctgagcttcataaaggctttgaagtgacttcacagagacgccgacatgtgccc

SEQ ID NO: 114147 - DNA, 843 bp, Homo sapiens
atggggcagatcccggtgaaacccgaccttcaagctgaagacagtttaaagcctagctacaagttccaggcattatcaaatgctaagagctattaccatgctgttacaccccctctgggcttcggggtcgtggggacccctgtttgggcaccaacacattcccttcagtgtgacatgcctggtccagccacaagccttgcacggagcccgctcctgtgccagtgcttggcgcggccagctggaacccccacttgctcactcacacaccccctcccagaggctgagcatgtagtcgcggcagccatgggctctgcatcagagcacaagcctggcacggcctgggtgggccaagtagatgaggtgtctcctgcattgatcctggatatcttttgtccaaatcctccagctatccttaatgggagacacacaggaactccctctggagatattccctatggaaaagaaatatcttacacatgtgacccccacccagacagagggatgaccttcaacctcattggggagagcaccatccgctgcacaagtgaccctcatgggaatggggtttggagcagccctgcccctcgctgtgaactttctgttcgtgctgttatcccccagactcatactgtatcaccaagaataatggatacacataagcaacgaataataccacttgacagtggtagaagcaggaggcagacaaatcacaggcagatggggcggatcccggtgaaacccgaccttcaagctgaagacagtttaaagcctagctacaagttccaggggccctctgaacgatccaaaaagccagccctcaggaaggaaaattttgaaacttga

SEQ ID NO: 114148 - DNA, 2798 bp, Homo sapiens
ggttttcagggacaacaacccccactgtcccaagtgcctcagggaatgagccagttaccacagtacaacaattgtcccccgccacaagcggcagtgcagctgtggatttatgtactataaaggcagtctctctgcttccaggggagcccccacaaaaaatctccacaggggtatatggcccactgcctgaggggactgtaggactaatcttaggtagatcaagtctaagtctgaagggagttcaaattcgtactgatgtggttgattcagactataatggcgaaattcaattggttattagctcttcaattccttggagtgccagtccaggagacaggattgcgcaattattactcctgccttatattaaggttggaaatagtgagataaaaagaacaggagggtttggaagcactgatccaacaggaaaggctgcatattgggcaagtcgggtctcagagaacagacctgcgtgtaaggccattattcaaggaaaacagtttgaaggaaatcagactactacttctgcagaacaacattttactggtaaaaagaacagcccacatgaaggaaaactgatttggtggaaagataataaaaataagacatgggaaatagggaaggtggtgacgtgggggagaggttttgcttgtgtttcaccaggagaaaatcagcttcctgtttggatacccactagacatttgaagatctacgatgaacccatcggagatgcaaagaaaagcgccaccgcggagatggaaacaccagtcacatggatggataatcctattgaagtatatgttaatgatagtgtatgggtacctggccccacagatgatcattgccctgccaaacctgaggaagaagggatgatgataaatatttccattgggtatcattatcctcctatctgcctagggagagcaccaggatgtttaatgcctgcagtccaaaattggttggtagaagtacctactgtcagtcccatcagtagattcacttatcacatggtaagcgggatgtcactcaggccacgggtaaattatttacaagacttttcttatcaaagatcattaaaatttagacctaaagggaaaccttgccccaaggaaattcccaaaggatcaaaaaatacagaagttttagtttgggaagaatgtgtggccaatagtgcggtgatattacaaaacagtgaattcggaactattatagattgggcacctcgaggtcaattctaccacaattgcacaggacaaactcagtcgtgtcccagtgcacaatgtattctgctggtgagggcaagagaagccgtgtggatttctatgtccatggaccaaccgtgggaggccttgccatccgtccatattttgactgaagtattaaaagccattttaaatagatccaaaagattcatttttactttaattacagtgattatgggattaattgcagtcacagctacggctgctatggcaggagttgcattgcactcttctgttcagtcagtaaactttgttaatgattggcaaaaaaattctacaagattgtggaattcacaatctggtattgatcaaaaattggcaaaccaaattaatgatcttagacaaactgtcatttggatgggagacaggcttatgaacttagaccatcgtttccagttacagtgtgactggaatatctcagatttttgtattacaccccaagtttataatgagtctgagcatcactgggacatggtcagatgccatctacagggaacagaagataatctcactttagacatttccaaattaaaggaacaaatttttgaaacatcaaaagcccatttaaatttggtgccaggaactgaggcaatcgcaggagttgctgatggcctcacaaatcttaaccctgtcacttgggttaagaccatcggaaatcaatgcaatgtcccggaatggcttccatttgccaggcctaccaacctaactgatgactttgagtttcccattgggacatatctgaactatgaatgccgccctggttattccggaagaccgttttctatcatctgcctaaaaaactcagtctggacaagtgctaaggacaagtgcaaaacgtaaatcaatgtcgtaatccttccagatcctgtgaatggcatggcacatgtgatcaaagacatccagttcagatcccaaattaaatattcttgtcctaaaggacgatcaatgagacagaaagttaacaaggatatccaggaattgaactcagctctgcaccaagcagacctaatagacatctacagaactctccaccccaaatcaacagaatatacattcttttcagcaccacaccacacttattccaaaattgaccacatagttggaagtaaagcgctccacagcaaatgtaaaagaaaagaaattataacaaactgtctctcagaccacagtgcaatcaaactagaactcaggattaagaaactcactcgaaacagctcaactacatggaaactgaacaacccgctcctgaatgactactgggtacataacgaaatgaaagcagaaataaagatgttctttgaaaccaacaagaacaaaaacacaacataccagaatctctgggacacatttaaagcagtgtgtaaagggaaatttatagcactaaatgcccacaaaagaaagcaggaaagatctaaaattgacaccctaacatcacaattaaaagaactagagaagcaagagcaaacacattcaaaagctagcagaaggcaagaaataactaagatcagagcagaactgaaggaaatagagacataa

SEQ ID NO: 114149 - DNA, 9038 bp, Homo sapiens
  misc_feature (1)...(9038): n = a,t,c or g
caaaccaggttgtggaatctattcagcctctctgctctgctggagtggttgatttagtctggtaagtggcatattcagctcccaccatctgctttcccctttcttcttcctcctttgaagatatctgtaggggacaacacaaattactgcaactcccaacaactatggcaaatanacaatccacagccaatgaccccaaacatcccaaactgtccaagtattcccttccctcaggtttaaggatacccctggataatttgagactggaggcttgtaagtaggcctaggacctgaggcactggacgctggagattttgtagtggaagaagtcgacactttaagacactttggaactgggggatcccaagtactgttactgtcacagacaattgtgtcgctgccatcgaggtaaaaacccttatcgcattcaaacataactgttgctttgtagtaaaatttttttccaaatcctgatatctgttttccattttcgactactggaaatcgacatttgaccactttacactctggagcagcacgactccacactgaattgtcaccacaataaatcgtgctctctccaataagtgaaaatggatctggtccaggtgcaggatcacaactattagttactgcatcaagatactcaaatacttctacttcactaaaggtgtgtttttccccattttttatttttggaggtggtgtacacaaaaccttttcacatattggggggcttaccgctccaaattgctactgatcctttaaggttcacaatataggatttcttcaccaattaaggtattaaccctcattacaaataaagtgcatctgataaccaaactcgtaagtcccatttgcagggactgcttggccatttaaaaggatcccgtatatatggacatgtttctctataacaggcgtcatctgagacaggtagccatgtatgattccgatcacaaatagtatgggtggcaagaggaggtatatagaagtgatccttttttacacttataatctactcgttcaccaatctcatagtagggttttggtttaccaatgagctccatagcttcaaatgttggtggctcctcacaggcatcggcagcgcgagcagcaccacgaccgccagcagggatcctccgcagcagaaggggagaccgggcgccggctgcccaacaggctcccggcttctcggagaagagacccccatcctcccgaagcacatctacaaaccagatttgatctcgaagaaaactgaaataagaggaaaagcgcagtgcaaagaggagtgaccaatccttgtgctccgcgcccagagcatggggagggctgcggggttccgggacaaaatgcttttgaccagcttccccttcatgggcaaggccatgtttactccccatttgcattgtttctaacgagtttcgctggcagagcccaccttgctgacccaggtgcagcagcagagcttgacaatgcttgggcttccgatggatcccgcgtgtgaggccctgcgcttccttccagacaaaggcggtggatgatggcaactcacctccaaacaccctgcttgacttttcctcggactcagaagggacttccctgctcggctggctttcggtttctctgctcacctccggataaatcacggggtctcccgcgccgctcatggcgcctcccgtccgtctcgagcgtcccttttccttcccggcgctttcctggggttgcttctggcggccctgggtgttgctgctgtcctccttctccgatcaatggcaatgtcccggaatgggcttccattttgccaggggcttaccaaacctaactgatgaatttgagtttcccattggggacatatcctgaactatgaatgcccgcccctggttattcccggaagaccgttttcctatcatctgccctaaaaaactcagtctgggacaagtgctaaggacaagtgcaaacgttaaatcatgttcgtaatccttccagatcctgtgaatgggcatggcacatgtggattcaaagacatccagtttcggattcccaaatttaaatattcttgttcctaaaggataccgactcattgggtttcctcgtctgccacatggcatcatctcaggcaacactgtcatttgggataataaaacacctgtttgtgacagaattccttgtgggctaccccccaccatcaccaatggagatttcattagcaccaacagagagaattttcactatggatcagtggtgacctaccgctgcaatcctggaagcggagggagaaaggtgtttgagcttgtgggtgagccctccatatactgcaccagcaatgacgatcaagtgggcatctggagcggccccgcccctcagtgcattatacctaacaaatgcacgcctccaaatgtggaaaatggaatattggtatctgacaacagaagcttattttccttaaatgaagttgtggagtttaggtgtcagcctggctttgtcatgaaaggaccccgccgtgtgaagtgccaggccctgaacaaatgggagccggagctaccaagctgctccagggtatgtcagccacctccagatgtcctgcatgctgagcgtacccaaagggacaaggacaacttttcacctgggcaggaagtgttctacagctgtgagcccggctacgacctcagaggggctgcgtctatgcgctgcacaccccagggagactggagccctgcagcccccacatgtgaagtgaaatcctgtgatgacttcatgggccaacttcttaatggccgtgtgctatttccagtaaatctccagcttggagcaaaagtggattttgtttgtgatgaaggatttcaattaaaaggcagctctgctagttactgtgtcttggctggaatggaaagcctttggaatagcagtgttccagtgtgtgaacaaatcttttgtccaagtcctccagttattcctaatgggagacacacaggaaaacctctggaagtctttccctttggaaaagcagtaaattacacatgcgacccccacccagacagagggacgagcttcgacctcattggagagagcaccatccgctgcacaagtgaccctcaagggaatggggtttggagcagccctgcccctcgctgtggaattctgggtcactgtcaagccccagatcattttctgtttgccaagttgaaaacccaaaccaatgcatctgactttcccattgggacatctttaaagtacgaatgccgtcctgagtactacgggaggccattctctatcacatgtctagataacctggtctggtcaagtcccaaagatgtctgtaaacgtaaatcatgtaaaactcctccagatccagtgaatggcatggtgcatgtgatcacagacatccaggttggatccagaatcaactattcttgtactacagggcaccgactcattggtcactcatctgctgaatgtatcctctcgggcaatgctgcccattggagcacgaagccgccaatttgtcaacgaattccttgtgggctaccccccaccatcgccaatggagatttcattagcaccaacagagagaattttcactatggatcagtggtgacctaccgctgcaatcctggaagcggagggagaaaggtgtttgagcttgtgggtgagccctccatatactgcaccagcaatgacgatcaagtgggcatctggagcggcccggcccctcagtgcattatacctaacaaatgcacgcctccaaatgtggaaaatggaatattggtatctgacaacagaagcttattttccttaaatgaagttgtggagtttaggtgtcagcctggctttgtcatgaaaggaccccgccgtgtgaagtgccaggccctgaacaaatgggagccggagctaccaagctgctccagggtatgtcagccacctccagatgtcctgcatgctgagcgtacccaaagggacaaggacaacttttcacccgggcaggaagtgttctacagctgtgagcccggctatgacctcagaggggctgcgtctatgcgctgcacaccccagggagactggagccctgcagcccccacatgtgaagtgaaatcctgtgatgacttcatgggccaacttcttaatggccgtgtgctatttccagtaaatctccagcttggagcaaaagtggattttgtttgtgatgaaggatttcaattaaaaggcagctctgctagttattgtgtcttggctggaatggaaagcctttggaatagcagtgttccagtgtgtgaacaaatcttttgtccaagtcctccagttattcctaatgggagacacacaggaaaacctctggaagtctttccctttggaaaagcagtaaattacacatgcgacccccacccagacagagggacgagcttcgacctcattggagagagcaccatccgctgcacaagtgaccctcaagggaatggggtttggagcagccctgcccctcgctgtggaattctgggtcactgtcaagccccagatcattttctgtttgccaagttgaaaacccaaaccaatgcatctgactttcccattgggacatctttaaagtacgaatgccgtcctgagtactacgggaggccattctctatcacatgtctagataacctggtctggtcaagtcccaaagatgtctgtaaacgtaaatcatgtaaaactcctccagatccagtgaatggcatggtgcatgtgatcacagacatccaggttggatccagaatcaactattcttgtactacagggcaccgactcattggtcactcatctgctgaatgtatcctctcaggcaatactgcccattggagcacgaagccgccaatttgtcaacgaattccttgtgggctacccccaaccatcgccaatggagatttcattagcaccaacagagagaattttcactatggatcagtggtgacctaccgctgcaatcttggaagcagagggagaaaggtgtttgagcttgtgggtgagccctccatatactgcaccagcaatgacgatcaagtgggcatctggagcggccccgcccctcagtgcattatacctaacaaatgcacgcctccaaatgtggaaaatggaatattggtatctgacaacagaagcttattttccttaaatgaagttgtggagtttaggtgtcagcctggctttgtcatgaaaggaccccgccgtgtgaagtgccaggccctgaacaaatgggagccagagttaccaagctgctccagggtgtgtcagccgcctccagaaatcctgcatggtgagcataccccaagccatcaggacaacttttcacctgggcaggaagtgttctacagctgtgagcctggctatgacctcagaggggctgcgtctctgcactgcacaccccagggagactggagccctgaagccccgagatgtgcagtgaaatcctgtgatgacttcttgggtcaactccctcatggccgtgtgctatttccacttaatctccagcttggggcaaaggtgtcctttgtctgtgatgaagggtttcgcttaaagggcagttccgttagtcattgtgtcttggttggaatgagaagcctttggaataacagtgttcctgtgtgtgaacatatcttttgtccaaatcctccagctatccttaatgggagacacacaggaactccctctggagatattccctatggaaaagaaatatcttacacatgtgacccccacccagacagagggatgaccttcaacctcattggggagagcaccatccgctgcacaagtgaccctcatgggaatggggtttggagcagccctgcccctcgctgtgaactttctgttcgtgctggtcactgtaaaaccccagagcagtttccatttgccagtcctacgatcccaattaatgactttgagtttccagtcgggacatctttgaattatgaatgccgtcctgggtattttgggaaaatgttctctatctcctgcctagaaaacttggtctggtcaagtgttgaagacaactgtagacgaaaatcatgtggacctccaccagaacccttcaatggaatggtgcatataaacacagatacacagtttggatcaacagttaattattcttgtaatgaagggtttcgactcattggttccccatctactacttgtctcgtctcaggcaataatgtcacatgggataagaaggcacctatttgtgagatcatatcttgtgagccacctccaaccatatccaatggagacttctacagcaacaatagaacatcttttcacaatggaacggtggtaacttaccagtgccacactggaccagatggagaacagctgtttgagcttgtgggagaacggtcaatatattgcaccagcaaagatgatcaagttggtgtttggagcagccctccccctcggtgtatttctactaataaatgcacagctccagaagttgaaaatgcaattagagtaccaggaaacaggagtttcttttccctcactgagatcatcagatttagatgtcagcccgggtttgtcatggtagggtcccacactgtgcagtgccagaccaatggcagatgggggcccaagctgccacactgctccagggtgtgtcagccgcctccagaaatcctgcatggtgagcataccctaagccatcaggacaacttttcacctgggcaggaagtgttctacagctgtgagcccagctatgacctcagaggggctgcgtctctgcactgcacgccccagggagactggagccctgaagcccctagatgtacagtgaaatcctgtgatgacttcctgggccaactccctcatggccgtgtgctacttccacttaatctccagcttggggcaaaggtgtcctttgtttgcgatgaagggttccgattaaaaggcaggtctgctagtcattgtgtcttggctggaatgaaagccctttggaatagcagtgttccagtgtgtgaacaaatcttttgtccaaatcctccagctatccttaatgggagacacacaggaactccctttggagatattccctatggaaaagaaatatcttacgcatgcgacacccacccagacagagggatgaccttcaacctcattggggagagctccatccgctgcacaagtgaccctcaagggaatggggtttggagcagccctgcccctcgctgtgaactttctgttcctgctgcctgcccacatccacccaagatccaaaacgggcattacattggaggacacgtatctctatatcttcctgggatgacaatcagctacacttgtgaccccggctacctgttagtgggaaagggcttcattttctgtacagaccagggaatctggagccaattggatcattattgcaaagaagtaaattgtagcttcccactgtttatgaatggaatctcgaaggagttagaaatgaaaaaagtatatcactatggagattatgtgactttgaagtgtgaagatgggtatactctggaaggcagtccctggagccagtgccaggcggatgacagatgggaccctcctctggccaaatgtacctctcgtgcacatgatgctctcatagttggcactttatctggtacgatcttctttattttactcatcattttcctctcttggataattctaaagcacagaaaaggcaataatgcacatgaaaaccctaaagaagtggctatccatttacattctcaaggaggcagcagcgttcatccccgaactctgcaaacaaatgaagaaaatagcagggtccttccttgacaaagtactatacagctgaagaacatctcgaatacaattttggtgggaaaggagccaattgatttcaacagaatcagatctgagcttcataaagtctttgaagtgacttcacagagacgcagacatgtgcacttgaagatgctgccccttccctggtacctagcaaagctcctgcctctttgtgtgcgtcactgtgaaacccccacccttctgcctcgtgctaaacgcacacagtatctagtcaggggaaaagactgcatttaggagatagaaaatagtttggattacttaaaggaataaggtgttgcctgggaatttctggtttgtaaggtggtcactgttcttttttaaaatatttgtaatatggaatgggctcagtaagaagagcttgggaaaatgcagaaagttatggaaaaataagtcacttataattatggctacctactggataaccactccctaatattttgattcatttctggcctattcttctttcacatatgtgtttttttacataccgtacttttcccccttacgtttgtttccttttattttatagagcagaaccctagtcttttaaacagtttagagtgaaatatatgctatatcagtttttactttctctagggagaaaaattaatttactagaaaggcatgaaatgatcatgggaagagtggttaagactactgaagagaaatatttggaaaataagatttcgatatcttctttttttttgagatggagtctggctctgtctcccaggctggagtgcagtggcgtaatctcggctcactgcaacgtccgcctcccgggttcaagcaattctcctgcctcagcatccagggttagctgggattacaggcgtgtgccaccacgcccggctatttattttgttttattttattttcatttttagtagagacaggggtttcaccgtgttagccaggatggtctcgatctcctgacctcaagtgacccacccgcctctgcctcccaaagtgctgggattacaggcatgagccaccacaccctgcctagagtagtctttactctaggaggtggttctttcccctaaggtgtggtttttcaattgaatgcctatgatgttaaaaagttctctccactctggctaggtcagaacctcatatttctcagcactgtgcaacctctagtatctccattctttnntttttttttttttttttttttgagacagagtcttgctctgtcacccaggctggag

SEQ ID NO: 114150 - DNA, 1014 bp, Homo sapiens
atggagaacactgatagtccttggcatgagctgtttagggagttatccaaaataaatgcatttgacacacttgattcattgctcatgagaggcaaggagtttagtgactctacacataatacctttgaccatatgtggagaaccaaggaacataataaagctggttggttgcccctaaattcagtggaaaaagtgatgaaagaaaattatgaactcaaggattctgtctcccagcttcagaagcagatattgaacctcaaatctgctaggattgccctgactgagaggcttatctcctgtagaaagagaactgaaattgtggacaaacagacacaagctcttatcatgctagtggctgacctgcaacagaagatgcatgcacagcctcgccagggagacctctggccttttaccagggtaactgtgcattgggaaaagggaaatgatcagacactttggggactactggacactggctctgagctgacgttgattccaggggacccaaaatgtcactgtggtcctccagttaaagtaggagcttatagaggtcagaagacagatggatcttggagaatgacagtggattattgtaagcttaaccaagtggtgactccaattgcagctgttgtaccagatgtgatttcattgcttgagcaaattaacacatttcctggtacctggtatgcagccactggcttggcaagtgcctttttctccatctctatccataaggcccataagaagcaatttgacttcaactggcaaggccagcaatatacctttacagtcctacctcaggggcatatcaactttccagctttgcatcataatcttatttggaaagatcttgattgctttttgctttcacaagatatcacactggtccattacattgatgacattatgctgattggatctggttcaagtgatcctcccacctcatcttccagagtagctgaaactacaggtaccaaggagatggtcaaactgaagagcatccagaatttttga

SEQ ID NO: 114151 - DNA, 1197 bp, Homo sapiens
atggtggcagcaagatgcttggaccgaaagccactctgtcttacatcattagcaaatcctggcagcttggccctgaaaccgtatctagaatctgcccatttttcccaacctctgggtcaagccactggtagctcacacctgggtgatcacagtgtcctacagtcacctgctcccaccttccccactgtggtccgttctcagcccaacaagagtgatcctgttaaggaagctgttcagaggactgtgagggtctggcacacacgggctccagcacgcgggccaagcgccgtggcccccggggaccccacacctgctgctccctctgcaggagagctcctccctgaccccacgtggctcctgaccccggttcctccgggttatgaggactatttccgaaggaaagaaagtgacttgcccaaggtcacctggcgagttccaacaagagcagaaccaagacccaagtgtcctgcccacctctcccgctctgagcagagtcactcctctcagaagtttctatctaactgtgtagttggggcttcgcttgaagaaattacagaggaagaggaagaggaagatgaaaataagtcagctatgctggaagcttcctcaaccaaagtgaaggaaggcacattccagattgtgggcacgctgtccaagcctgacagcccgcggcctgactttgcggtggagacgtactctcattctgaattcagaattccatcggatgaatttaacaaagagattgaaataatttttaaaaatcaagcagaaactccggagctgaaaaatgcaattgccatactgaagaatgaatcagagtcctttaataacaaaattgatcaaagaagaaagaatgagcttgaaaaccccctattaaaaaatacagtcagaggaaaaaaacagagcacctcttcttctccaaaggatcgcagctccttgccagcaacagaacaaagctggacggagaatgactttgacgagttgacagaagtaggcttcagaaggtcggtaataacaaacttctccgagctaaaggaggatgttcgaacacatcgcaaggaagctaaaaaccttgaaaaaagattagatgaatggctaactagaataaacagtgtagagaagaccttaaatgacctgaaggagctgaaaaccatggcacgagaacttcatgatgcatgcacaagcttcagtagctga

SEQ ID NO: 114152 - DNA, 606 bp, Homo sapiens
agcgcggctcccaccatggctgaagaagaggaaactgctgctctcacggagaaggttatccggacccagagggtgtttataaacctgttggattcctacagcagcggaaacatcgggaagtttctatctaactgtgtagttggggcttcgcttgaagaaattacagaggaagaggaagaggaagattataataagtcagctatgctggaagcttcctcaaccaaagtgaaggaaggcacattccagattgtgggcacgctgtccaagcctgacagcccgctgactgactttgcggtggagacgtactctgccatctctcaagaagaccttctcatgcgcctgctggagtgtgatgttattatttataacatcactgagagctcacagcaaatggaggaagccatctgggcagtctctggtcagtgaggtgtactcttttatctccagggatgctattgtagtgctgcctacttcacctaatagtcatctaggaacactagacaaagtagggctatagaaaaactggtctgagacttacctaaagtatgaaataaatgataataatatggatagatacttctgaagaatagaatatttattaattat

SEQ ID NO: 114153 - DNA, 423 bp, Homo sapiens
atgtgtcaaacccaaaatgtgctgctttcagacctagcttttcagggccgttaccccctgaaccggttcagtccacctgtgtcgaagctacttggcacaaatgtgtcaggggctcaagctgaaaaacgcggaaaatcagggatccctggagaaaaggggtcccagacttccgtaaatttcctgtcggttcaggccataaggtgcccaagccggtaccaagcactgaaaggtgaactgccacaagccagacgccaggaacagaagaaccgaaagaaactgcaagagtttgagccaaaaggatggactgttggagtagctgagggtgaagctgccggaactcctcaaagtggaacagcaaagccagcaccagagatggacaagaaaaacaaactatcaacgaaaattcgcagaaatcaaagttag

SEQ ID NO: 114154 - DNA, 651 bp, Homo sapiens
atgggtgttgagaagatcatagcccaaaagattgacagaggccgcagggcatataagaaacatatgggacctactgagcacgtcacacttagagcctgctgtaaggaatctgaaccccatgaaatgataaggctaaccctgcttattcctgtgaaccaaccagtgatctctgactgctgctcagaagaaacaagagggatagacctagcttttcagggccgttaccccctgaaccggttcagtccacctgtgtcgaagctacttggcacaaatgtgtcaggggctcaagctgaaaaacgcggaaaatcagggatccctggagaaaaggggtcccagacttccgtaaatttcctgtcggttcaggccataaggtgcccaagccggtaccaagcactgaaaggtgaactgccacaagccagaaggaaggaggtggtatccatgttccctgaaaaacaggctctgctgacaaatctcagacgccaggaacagaagaaccgaaagaaactgcaagagtttgagccaaaaggatggactgttggagtagctgagggtgaagctgccggaactcctcaaagtggaacagcaaagccagcaccagagatggacaagaaaaacaaactatcaacgaaaattcgcagaaatcaaagttag

SEQ ID NO: 114155 - DNA, 828 bp, Homo sapiens
ccacctctacaaaaaaattagccaggcatggtggtggagcctgtagccccagctactctggtagcttctctgaggctaacctgtcttctaggcagcaaatctctccccatgcctcaggtctcttctctgcggggagatttttctccccaggacatcctctcttccaggtacaagtcaactaactttatgaagtgcctacggagtgtctcctctcctcccctctctgccccagcactcttcgaaaaggagaaggagcaggccttgctggggcagccactcccacaaccagctgatagcattatcacaccagggcaggccagagagctgctggccatggccctcctgattacaggagtaaagtgcatccaagaagcaccttctctccctctcagttcttttttctattctttacagtcccatggtgacctcatcctctcccttaccttcgactatcacttccacgtggaagccttccaagtctttatctccacttctgacctctttctcaagctgcagatccacactgccagctgcctgctaaccagttccattgagggtgaggaccacccttattcctcagggtggtcctcaatagccagagctgctcagcctgctctgcagaacctgaaggtctcatcatcgcataacactcttctagtgtctcttgtagagctgaagagctggagaagccttagaagtctctgcttcaatgttcggaagtttatttttaaaggaccatccgagtggccacacagaataacaaatggccattcacagctgaagaacagagctgagtttgcaccatatatcaaagatgccaaagcttcc

SEQ ID NO: 114156 - DNA, 943 bp, Homo sapiens
ctttacccctttgctttttggcaataacccttgtgcagagccaaccccattctcctgacctaaccagttctcacctggccatgcggcctttccgggtgtcaggcaggtctctccggttaggtaagggaggcctcatccttcttacctgactgctctgagtgcagatctatgctgcttcccatcttctccaggagcctgatctattaccttgggcttggaacgcacctaacaaaggctaccatgaggaggcccctcggtacctgttcatctggacacatcgtgcagacccccgcaccccgtgtggctcccggttaatcttcagggtgcaatcaatttcttcctcagaggccagacttcattgttctaagcctttctcagatccacatcttggggctgctggggtccctgcatctgtgtcctggtggtcagtttgaagcaccagcagacagcagcgctaaaggcaccttacctggatgtgggggcctgctgggtgccagccccctgctaggctctgggaataggacaatggccagaacagataagatccctgtctgctgggagccaaagagagaaaccagcacagctgggccaggtgcatttagaaacctggctgaaaactgcaggtctgatgaggagcacaaaggtcgggtccctagagaacaggagcctttgaaggaagagggtggagctgattgcagactgccgaatcttgaaggggtccacagaggggctgcagggggcagcaagtcagccaggctttcttctctcaagtcagagaagaaaggccagggctactggatcctggaatgtgtgaggtccttggcccagtggatgtctggtggccttggtgtatcttattggcacggccacgttcacaggacccgtggggggccctgctgggaccacacctgcattgatgttcgcctggatgcggccagtctcc

SEQ ID NO: 114157 - DNA, 376 bp, Homo sapiens
agcctaattaggatatgtcacacacaaaaattattggagagagcagttgtaagttgagactaaaatgaagccccttctcttgagtgtttctgccaaaataagaaatacaaacacatcccgattacacagtaacaaggcaagcacggctgaaggaagaaagttatcagtggagacccgctgcatagcatggtcacaaccatggcaggtaaggtggagtgtagacagccttgtcagccagccttctcagctctctctccagcctctcctgacttgacttggtataaagatcttagtgagctgaagccactaatagaagcccaaatcccagttaacttttacgatgctgtccctgctgtagctctctctcatttttctc

SEQ ID NO: 114158 - DNA, 546 bp, Homo sapiens
attcattaagcatctttaaatcagaacacacgcaatattcaagctattctgtaaactccccgaagcagaaatattgtcttatttactactaaatccccagtatctagtataatgagatctatgatggatactaaagagatattataataagtaattacccatttttacagaaaattatgttttttatcatcccgcatccatgcagtcatggctacatcctcttgcctctaccttatgccatgcctactggccagaggcctagcgctaccctgatgtcctaaagagtttctgctgctgctgccactaccaacaccaccacactgctatatgatgaggagacctgtacactgtgccactgacaaggaggggatattagcacctaagcatttccaggcagcagctggggaagccagaacctccacagacagatctggtgcacaggcacaaaggtcagttactccttgtcagtggcacagtgtacaggactcctcaacatatagcagtgtggtggtggtggtagtggcagcagcagcagaaactctttag

SEQ ID NO: 114159 - DNA, 3900 bp, Homo sapiens
ggagaaaatttacagaaacccagagccaaaggtgctctcaggggatcccctgaaacattcaaagccattgcggccccagaagcttgggtaggcggggaagcagctggagtgcgaccgccgcggcagccaccctgcaaccgccagtcggaggtgcagtccgtaggccctggcccccgggtgggcccttggggagtcggcgccgctcccggggagctgcaaggctcgcccctgcccggcgtggagggcgcggggggcgcggaggatattcttggtgatcttggaagtgtccgtatcatggaatcaatctctatgatgggaagccctaagagccttagtgaaacttttttacctaatggcataaatggtatcaaagatgcaaggaaggtcactgtaggtgtgattggaagtggagattttgccaaatccttgaccattcgacttattagatgcggctatcatgtggtcataggaagtagaaatcctaagtttgcttctgaattttttcctcatgtggtagatgtcactcatcatgaagatgctctcacaaaaacaaatataatatttgttgctatacacagagaacattatacctccctgtgggacctgagacatctgcttgtgggtaaaatcctgattgatgtgagcaataacatgaggataaaccagtacccagaatccaatgctgaatatttggcttcattattcccagattctttgattgtcaaaggatttaatgttgtctcagcttgggcacttcagttaggacctaaggatgccagccggcaggtttatatatgcagcaacaatattcaagcgcgacaacaggttattgaacttgcccgccagttgaatttcattcccattgacttgggatccttatcatcagccagagagattgaaaatttacccctacgactctttactctctggagagggccagtggtggtagctataagcttggccacattttttttcctttattcctttgtcagagatgtgattcatccatatgctagaaaccaacagagtgacttttacaaaattcctatagagattgtgaataaaaccttacctatagttgccattactttgctctccctagtatacctcgcaggtcttctggcagctgcttatcaactttattacggcaccaagtataggagatttccaccttggttggaaacctggttacagtgtagaaaacagcttggattactaagttttttcttcgctatggtccatgttgcctacagcctctgcttaccgatgagaaggtcagagagatatttgtttctcaacatggcttatcagcagtctacacttggatatgtcgctctgctcataagtactttccatgttttaatttatggatggaaacgagcttttgaggaagagtactacagattttatacaccaccaaactttgttcttgctcttgttttgccctcaattgtaattctggatctgtctgtggaggttctggcttccccagctgctgcctggaaatgcttaggtgctaatatcctgagaggaggattgtcagagatagtactccccatagagtggcagcaggacaggaagatccccccactctccaccccgccgccaccggccatgtggacagaggaagccggggcgaccgccgaggcccaggaatccggcatcaggaacaagtctagcagttccagtcaaatcccggtggttggggtggtgacggaggacgatgaggcgcaggattccattgatcccccagagagccctgatcgtgccttaaaagccgcgaattcctggaggaaccctgtcctgcctcacactaatggtgtggggccactgtgggaattcctgttgaggcttctcaaatctcaggctgcgtcaggaaccctgtctcttgcgttcacatcctggagccttggagagttccttgggagtgggacatggatgaagctggaaaccataattctcagcaaactaacacaggaacagaaatccaaacactgcatgttctcactgataagtgggagcttgccatttttgaaaaagaaagtgtcggatgaaataacttatgctgaagatactgctaattcaattgcacttctgggtgacttaatgaaaataccaagttctgaattgaggatacaaatttgtaagtgtattgttgatttttatcatgcagaaccaccaaagaagcatattccagaagttaattgtactataatgatgaaagcacaagcagccagtggaatctgtactcacctcaatgacccagatccctctggacagcttttatttcgttcatcagaaatactttggaacttgctggaaaaatcttcaaaagaagaagtcatacaacagcttagtaacttggaatgtttgctggctttgaaggaagtatttaaaaatctgtttatgagaggtttcagtcattatgaccgtcagcttagaaatgacatattagtgatcactacaattatagctcaaaatcctgaagcaccaatgattgaatgtggctttaccaaggatttgatactgtttgccacctttaatgaagttaaaagtcaaaatcttttggtaaaaggacttaagctttctaattcctatgaagattttgagttgaagaaattactattcaacgtaattgtgatcttatgtaaagatttacctactgtacagctattaattgatggcaaagttattttggctttgtttacctatgttaagaagcctgagaagcaaaaaataattgactggtctgcagcacagcatgaagaattacaactgcatgcaattgccactttgtcatcagtggctcctttattaatagaagaatacatgtcatgccagggaaatgctcgagtccttgcatttctagaatggtgtgagagtgaagatccgtttttcagtcatggtaacagttttcatggtacaggtggccgaggcaacaagtttgcccagatgcgttacagtttaagactcctgagagccgtggtctaccttgaagatgagactgtaaacaaagatctttgtgaaaagggaacaattcagcaaatgataggtcttcatgacctgtatcttttgcgacctcctatctcatcctgtgacttagaatgccgtgaccatctgggaatgcagcacagtacccctctttatgacagaacaatacagaaagacaaagtacaccagattggctacaggttaagattaggctttcaaatcatttctcccattaatcaaaactttacagaggagacagtgatttttaccattcattcaactggtttgcacagaggggaagggaagggaaaaagggaagggagcattgcttttggcagtgtggggaagattggagaaatatggaatgaaatatatgaagaaataaaattagaaaaattaagaccagtcactacagataaaaaagctttggaagctattacaacagcatcagaaaatattggaaagatggttgcttctctgcaaagtgatataattgaaagccaagcatgccaagacatgcaaaatgaacaaaaagtatatgcaaaaatacaggccacgcacaagcaaagagagctggctaataaatcatgggaagatttcttggctagaacatcaaacgctaaaacgttaaagaaagcaaaaagccttcaagaaaaagctatagaagcctccagataccataaacgaccacaaaatgcaatatttcaccaaacacatattaaaggccttaacacaacggtgccctctggtggagtagtaacagtggaaagcactcctgcccgattagtaggaggacctctggttgatacggatattgctcttaaaaaactgcccattcgaggaggagccttgcagagggtgaaagcagttaaaattgtggatgcaccaaaaaagagtattcctacgtaa

SEQ ID NO: 114160 - DNA, 951 bp, Homo sapiens
atggtgaacgaagacttgctgagtgatggaacgagtgagaatgaatctggattttgggattccttcaaatggccagggatgagagcgtctacaggggccactcctgagagcctggtgaccgtcactgccaccaagggggaacgtgggcccagagtgttcaagggaaagctggagcagctccgaaggccaacgaagccatcgactctcctgctgctgctccaaggcaggctccagcaagccatgagggcccgggtgctcgccgtcatgaaggctgccattcatatttcacacctgcctgcctggcactttctggcttctgacaccggcagcgagatgtcacttatgcctgaacgcacacactcataccttggggccaggatcgtggcaggtggcaacccagctttgagtgctgcgtcttctggggctgcagcggcccactgtgagcaggagggtggctccagacatgaccagcaggctctaaggctcatcagcgtcttctggagcctgcacgatacacacacaggcacaggctacaccatggagacccatctgcagggtgccaagcccttgcatgcttgggcctctgacggatctgtccccgctgctaaccaggcacagggcagctctcgcaggtcttccagtcagctagcacagaccctggccagtgtcatgactctgtgccctgggaatcacacaccctctctggccatggcagaggagctcatgatggaggcatccttgggcttcaggggatggtccctgaatgggtgtggggctggggctgaaggaccgcctgtgggctggggcgctgaaaatgggagaggaactgagccatttgtgtttcccagatggggcctgctgcactgtgcacagcgtgtccttgccctcagagtcacccttggggccagagtccttgtggctgtaactcacagggtcattggctggggctag

SEQ ID NO: 114161 - DNA, 279 bp, Homo sapiens
atgggcgatactatagctgtgctccggtgcgtgccttcgctgaagtcaagtgcagtgtcagcggctcaagattctgatctcagcttgtacctgggcagtaaagtagcattcctggtggcagtagattggtcatctggagaaccactactggctgagcatgccctacctgaccacagggcaggagtaggctacactgtagtgcacagggcagaggcctttgaggccatgaagacagccaacacttccaagttcccctcacatagatttgttgtagactag

SEQ ID NO: 114162 - DNA, 381 bp, Homo sapiens
tcagcctgtcacactttgataagatatatttgggggaatatcatgagtttttggcttatttgttaaacacctggatttttatggcctaactttagttgttgactaagcaaagtatttgttgactaatgtgactgagttgtgaaacgtctcgaaatggcatttcaattgtcagtgaagggggtggcatagacatatgattccttcatatccactcaactgagtctggcgtctccttgaatgcaggcatgcggaatgtccatgtgcctggcatcttggcggtggtcagtaaatgtttgtcaaaaggagctgaagtgtataccgtttctttgacttcttctgtgagtcaagcaccaggttcatctgagtgaaaaaatgcaatgt

SEQ ID NO: 114163 - DNA, 819 bp, Homo sapiens
atgacgtcttgggtggttcctcaattaaccaaagatcaacccattcctgaggccattacagtgttcactgatggctccagtaatggcaatgctggttacataggtcctacagacaaacttatttctacctcttatgcttctgctcaaaaggtggagttaattgctgtgattactgccttacaggatttcctcaaacctttaaatattgtctcagattctgcttatgttgtacatgccactaaaaatatagaaactgctgctatcaaacacattgataattctgaattggcttctttattttcaaggttacaacaggtggttcaccaacgtagacaccctttctatattacacatattgggtctcataccactttaccaggacccatgtctgctggtaaccataaagtcaactgtttggtctcttttacaacccaagaagctcaggagttccataatctcactcatgtcaatgccgctggattaaaagataaatttgctcttacctggaaacaggctaagtttattgttcacggctgctctcagtgccaggtcttcgtacttccaaatcaggaaccttgtgttaatcctagaggcctaactcctaatgctttatggaaaatggatgtgactcatgttagctcctttggcatactgtcatatgtgcatgtctctgcagataccttctcagtttcctctcacactgatttacctgctacacataattattcttattgggcttatgtgcctcttcctccacttattcgacctctcaccagggtagatgctcctgcacaaatctacactaacgatagtgtgtga

SEQ ID NO: 114164 - DNA, 960 bp, Homo sapiens
atgggtcacaaagagtctaaacatcatgcttatctctgctatattaaactcccgttaaaacagggaagtgtccagtcagaggaggcccgtttgcaggctcagctaaatcggactaatggcattctaattactcaggctcagctcacaggctctgatagtttctctgatacttatgcccaattaaactttgatgctcttaccacagaacaagtaacaaaggtgtgtatgagagcttgggataaattacgtgccccaggccaagctcctgtttcttttactacagttaaacaaggtcatgctgaactataccctgattttttagctaaattacaagatgctgttgaaaaatttgtctctgatgagagtgctcaaggtttggtgggcctggtgttaggtggggcatccacctctgctaaaggaatcaccattcatactggtctcattaattctgattccactgatgagattaaattaatcgtgtctgccaaggttcctgtttccgttccggccatttcctctcacactgatttacctgctccacaaaattattcttattgggcttatgtgccttttcctccacttattcgacctctcacctggctggatgctcctgcagaaatctacactaatgacagtgtgtggattcctggagctacagatgactgttgccctgctaaaccaggagaagaaggccctgcatttaatgttactatgggttacagatacccccctctgtgcctcagacatgcacctggttgtatccatctagaaacccaaatctgggctgcttatcttccggagagatcagctacagaggaaccgggacatttggtctccagcatctccctttctcctttaagaaaaatgaaagggggagtaatgggagataccccacactttcaatataaacctggggaaaaccatgccctaaaaattttgaggccccatctaaaactttaa

SEQ ID NO: 114165 - DNA, 705 bp, Homo sapiens
atggaccggaaattaactctcacagataaagttcaaggcagcaaatctctgcagattaaattccaacccagcaaggccgcacgtctggatctgttccttcgtctcagtgcgctcgtgggctcgctgccttcagcagtgaagctgcagacctccgcagtgagtgttacagcttataaagccagttgtacgcatcagagtgagcagcagcaagatctcttgcaaagagctaaagaacatagcttccacagtgtggaagtttcctctcacactgatttacctgctccacaaaattattcttattgggcttatgtgccttttcctccacttattcgacctctcacctggctggatgctcctgcagaaatctacactaatgacagtgtgtggattcctggagctacagatgactgttgccctgctaaaccaggagaagaaggccctgcatttaatgttactatgggttacagatacccccctctgtgcctcagacatgcacctggttgtatccatctagaaacccaaatctgggctgcttatcttccggagagatcagctacagaggaaccgggacatttggtctccagcatctccctttctcctttaagaaaaatgaaagggggagtaatgggagataccccacactttcaatataaacctggggaaaaccatgccctaaaaattttgaggccccatctaaaactttaa

SEQ ID NO: 114166 - DNA, 2747 bp, Homo sapiens
gttacaacaggtggcttgccaatgtagacaccctttctatattacacatattagatctcataccactttaccaggatccatgtctgccggtaaccataaagtcgactgtttggtctcttttacaacccaagaagctcaggagttccataatctcactcatgtcaatgctgctggattaaaagataaattttctcttatctggaaacaggctaagtttattgttcacagctgccctcagtgccaggtcttcgtacttccaaatcaggaaactggcattaatcctagaggcctaactcctaatgctttatggcaaatggatgtgactcatgttagctcctttggcagactgtcatatgtgcatgtctctgtagataccttctcaggttttatctgggctacttgccaaacaggggaaggcacggcccatgttaaaaaacatctgtattcttgctttgcagttatggggcttccatatcaaataaagacagacaatgcccctgcatatgttagtaaggcttttgatacatttatgcaacagtggggaatttcccatattactggaatcccttgcaatcctcagggacaagctgtggtggaatgggccaatcgcactttaaaaacccaactgtccaaacagtctgaacaaccaaaacatgatttaactactccccacttccaattacatttggcattgtttactttaaattttttaaatgttcctaaagataatattctaactgcagctgaatgccattatacaggcaaaaaattcttcttaaatgaaggcaagccagtgttatggaaaaactcccaaaccaatacctgggaacctggcacaattataacgtggggaagaggatatgcttgtgtttcaccaggagatcatcaatcccctgtgtgggtacccaccagaagactcaagcttcgggtgaatactgacaatgaaaaccacagaggaaagacgtctgtgtcagagactgccctcagacatgtttcctctcacactgatttacctgctacacatgattattcttattgggcttatgtgccttttcctccacttattcgacctctcacctggatagatgctcctgcagaaatctacactaatgatagtgtgtggatgcctggagctacagatgaccactgccccactcaaccaggagaagaaggcactgcatttaatgttaccatgggttataaatacccctctctgtgcctcggacatacacctggttgtatccatctacaaactcaagtctgggctgcttatcttctggagagatcagctacagaggaaccgggacatttagtctctggcctctccctttcttgtttaaaacaaatgaaagggggagtaatgggagataccccatactttcaatataaacctgcaggaaaaccatgccctaaaaattttgagggcccatctaaaactttaatttgggaagactgtgttaactcacatgcagtaatattaaaaaatgactcatatggtttagtaatagactgggcaccaaagggctattttaaaaaacaattgctcctctggtggaagggaatgcctggaggctacttattttatttctcattgggaggacaaggatcatcatcctactttgcataggagggtcagctcattctttcccttataatgggaagataaaggcattacccacccccccaccccgaggcctcatatgatactccccattctgagcccagaacacccagaactttggaaattggctattgccatgtctggactgcaagtatgggaaggggaaactattctgtctgttgtccccaataccgttgctctccctcagtatcaacataaatgcagactttctgctttgcttacttccaacctgactgttcccatacagagttgtgttaagcctccttacatgctgttagtgggaaatatcaaaatttggacgagcaatcaaactgtccaatgcattaacagtcatttatacacttgtattaactcccattttgactctgggaaaagtgtaatgttggttcgagctcaagaaggaatctggattccggtaactttgcccagactttgggaatcctccccgtcaatacatttaattaatgaagtgttacagcaaattctaaaaagatctaagagatttgttttcactttaattgctgtgatcatgggcctaattacagtcactgcactggccactactgctggaatggcattacaccaatctattcaaacggctcattttgttaatgattggcaagccaattccacccaaatgtggaattctcaacaaggcattgatcaaaaatttgctaatcaaattaatgatttaagacagtctgttatttggcttggagattgggtagtgagtcttgaacatcgcatgcaaatgcagtgcgattggaatacttctgatttctgtatcaccccgtattcctgtaatgaaactgatcattcatgggaaatggtcaaaggacaccttctaggtagggaagataatttatcattggacataactgaattaaagaaacaaatttttgaagcctctcaagctcatttatccattgtgcctggagctgaggcattagatcaggcagcagaaaatctttctggactaaaccccacgacttggattaagtctattgggggctccactgtagtaaattttggaattatgtttctctgtttaactggcttgtctttagtgtgccagaccagtcaaagaatcctgcatcaaaattga

SEQ ID NO: 114167 - DNA, 1022 bp, Homo sapiens
tttccacctgcagaagcaagggactgggggtgaaccatggactgaagccacagcgcacatttctcagtgtgcaattgcagcccagggaaagggtgaaaggagcagtggtcactgaatgtactgtctcttttccacaacatgcatgtctttcttgaaaatgaaaatgactacttggagcatctcctaaccaggttaggcaaagaatgtgtggacacgagactcagagggccattcagagaggatggtcatggtcctactatccaacaacagcctgacgcctgctcactggagacaccgccaagcaggtgcaggcatccagtgggaacctggagcaaggcgggcaggtcagggcagcgggaagggaccttaacagaccttctagtcggcgactttgaagattcttcaagacaatagccagttctgaagattcatccccgtttcttcactgtaaaagtaacacgttttttgtagatgacttggaaaatacagacagccatatgttagaagtaaacaaaaccactcctaacccgtctacttcttaaaagccagtacttaacatttgaagcgtatttcttttcatcgctttgttttaaggtttttgtggaatatttttcatcatttctatttagagggtccctttttcttcacttaacatcaataccgtaagcatttcttcctgttgctaagttcacgtgcaccccttccctaactgcataatactgggtcatatgggggtatcataattgacataaccaatgcccaaatatgggaacatttaggattggctctctctcttcaatttttcattttaggactggcattaccatctactttcccgaggcacgggacttttgttcctgttccaggattgtttctctaggggatcaattcctaggaagtggggatttgcttggattctcagggtgatacatatgccaaatagtataccagagtattgaaggtacttgtttctaggaatcccactttgacatatcgacgatgagaataattaatattcaaat

SEQ ID NO: 114168 - DNA, 330 bp, Homo sapiens
atggctctgcagaccttcagtaacacgaacaatcacaataggtctgggattgttggatttctggtggaagctggcgaggaggctgccttttctgtaggagatagcacaggaacagagtcagctgaatggatgaagtctctaacacctggctcacatttgattacgccggcacccctacagtacatgagtcataaaatagctcctggaagagccagttccatcaagtcttctcagcaactctccattaccttccccagagacctggagagatggcgccagagaacagcccagcaggaatctgtgggagtgaaaagcaaacaggaagcctga

SEQ ID NO: 114169 - DNA, 618 bp, Homo sapiens
attcagtcatataagcagaggcagcaggaccatgctgattctgtgggaccaggcccgggctctaccagccaggcctctgaacatgtcaacttgagaactgaacagaagtatcccctgcacaccgcagaggctgtagaaccaatactgcctgcactggccaactgtgggggcagtggcttcacaccccccagtgtcaccctgaaagacatcctcatgcacaacctgcagtgtgtagggaacatgaacgcaccagatagtatccccacctcagcagacggtggaggcccctgctcggccctggacctgcaggccttcttccaacaactgtcagaccccacaggaatggaaaggaaggcttctggagacacatactggagggaacaaggggacaaaaaaggcaagctgacatcaaccccaaaccccaataattcggaggagagtatccctggcagtccagtgcccctacatgaagtggtgtccatgctgtgcgtgaacatgctccgcagtcttgagaccattacacggctggacaaaggaatgcctggccaagccaccaatgggaaatactttgcaatgcaaatgagtcctccaaagccaagcattcccctctcctgctaa

SEQ ID NO: 114170 - DNA, 426 bp, Homo sapiens
atggtagaaggcaaaggagaagcaggcaccttcttcacagggcagcaggacgacggaaacaatcgagctttccaggaaagcagcgaggcaccctctctgctgtggcagatgcagcaggtgcaggcaggccctccattcccccggtccttgccatgccccatgagggacgcagaggtgggacactgtccctactgcatggatgagaaacccaagccccagggcccgcctcgggccacacagccggcggggacagaagaggcgcccagtgccattctgggtgacagcactcctaccgacgcagacaacagctccagcagcacacccaccctgagctcctcttcagccggaaacctgctgctcccacagacttccgtgttcaaagaaacagcaactccacccatcagccgcccaggccaaaagacttag

SEQ ID NO: 114171 - DNA, 410 bp, Homo sapiens
ttcttgggggcttacaagcaccatgagatattgcatattaggttgaccgcatggaatcagtcttcttaactgcaacatagccaggtttggaggcaaagacagttgttattcctgctaaatggtcagtgaggaaaatgccaacaggcccttccttaggaagtcctcactggatgccaaaggacaagacaaccagtgcagccccgatgcaccggtggtgcacaggctcatgtgagtggatactgcgttgtccatggatgctgggtctgctcatgcccctggagtttcttcagatctgaccttctcgccccagtccccatcagttctcctccccactggatatccacaatccttgaagctcaggtggtaggactagtaaggaatttggttctcactcacaatacttcttccag

SEQ ID NO: 114172 - DNA, 432 bp, Homo sapiens
acttccgggtcgacccacgcgtccgatccgccactacgtgtccatcctgctgcagagcgacaagaagctcacccaggaacaagtatctgacagtcaagtcctaattcgaagcagagtcctcagggaaaatggaaaatacattcccaaacagtctttcttgacacgaaaatattatttcaacaacccagaggatggatttttcaaaaaaactaaacggaaggtagtgccaccttctcctatgactgatcctactatgttgacagacatgatgaaagggaatgtaacaaatgtcctccctatgattcttattgggggatggatcaacatgacattctcaggctttgtcacaaccaaggtcccatttccactgaccctccgttttaagcctatgttacagcaaggaatcgagctactcacattagatgcatcctg

SEQ ID NO: 114173 - DNA, 1162 bp, Homo sapiens
gcacgagcccagctgaaggcaataagcttggtctcaccgctgcagcagaggttctgtgctagccgggcataggggcgagagaaggcccagaggcgacagtcagagagaagcaactgcgccccggtgaagagaagctcgcccattcaccggctgggagccagctttcagtgaagatgggcagggccagaaactgttgcttgactccaacatctgcctctgggtggtcctacccatcgttatcactcttcgtagacatgatccgccactacgtgtccatcctgctaggagagcgacaataatctcacccagggaacaagtatctgacaggggacgaggcacccacagtccctcttcccattaagccctgccaagaagatttgatgtgggcccgtgttaacctttttgacctgttacaagttgaacccacagggatttcattgggttgcctgaacattgaagggcgattttttatggattacgtaattccctttcctattgatcttgcattgttgttgggggccaaacgcatcatgaaaggaagctctccactgggcccttttcagcatgcaaaccacggggccacgtactgcttggcacctcctgttacctgcagcagctcctcgatgctacggaggaagggcagccccccaagggcaaggcctcatcccttatcccgacctgtcttgaaggatacttgcagtgaaagcccaagtccttggaagctttccccagtggaagggactaggactagggggccccacgcttcaactgggtagtggccacaagcctgggcagcttttaggagccgctaaccttcccgacacctccctcaccacaccaggaccctgaagtgaggaggaggggctggaaacctggggtgggttggcccaaaggagaacctcaggctccctgggcctggccccaaggtcctttcctggcccaagggtagcttagccccatcccagactggtcctgaagtctgtccctccattggcatgaagtctgcccctcagcagtccggcctcacaggctgtactttcatggtgctctctaccttctggcccccatcccaggaacattgcgtgagtgaattgcgcaagcatactagcatgtgatattagggagtttgcaataaattattgatgctgatgtaaaaaaaaaa

SEQ ID NO: 114174 - DNA, 381 bp, Homo sapiens
atgctggcagctgtgccaatggaaaagggctacctggaagccaggtatgttcaacatggaggctccaccttcccttttctttgtcacgacatgtacattaaagaacaagggagcaccattacccaagaatacagtaccagtgatgcccctggcattgtggaaacagtgcctctgctctctgcactgggtacagggggagaagaagctcacggggtccttgcagaccatgagagcctggcctggataaaacctcctggggccctagttctctggcccagtctcctgggcagcagctccccaggcatggagcagctcctgctggcctctgacagctgctctgacagtgccaggagggctgtgaaggttatggatgtggcctag

SEQ ID NO: 114175 - DNA, 175 bp, Homo sapiens
tcaccctagcctctggttggttgctttttgcaaccaatcagatgcttgcacaggagtgtgacctttgtaacttctcttcatcttccggttggctgctttctgcaaccaatcagactgatggcagactaccacttcagtttcatgagatgaacgtgaagtggccaatgggaaacct

SEQ ID NO: 114176 - DNA, 399 bp, Homo sapiens
atgactcacagagaatggaggagagcagcaggacaatcatccacctgggagtggtgcagagccaaggcaggccccccacccctgagaaacagtcaaaataatacagatgacttcagtatgtcagcccatggacctttcaaagaacttttttcgcagtggcctcctgcatttcatgaagagcaagaagcaactgagtttaaatacatacaccaccacggctacttaggcaatgtaattgcaaaaacaaacgaaacatgccatgatgaccttgtacccgaagtccgaaatggcagattgtttgccctaaaggctgtaccgtacatacttgccttaacccacctacattgtgtgcccaagaatcccagtgcagacagccccaagccacttcctttaggctaa

SEQ ID NO: 114177 - DNA, 1106 bp, Homo sapiens
atggaggtgggtactctggggcacgcccaggaggccgaatatgtgatgggtgaagaagacgtccgtcatctcaagtactgcattttgattgggtcgcgcctgaagaagcctcacttcctgtccttggtcagctgccacatctttacagaggaaagagcatgtgcaaaggccctgaggtgggagtatgagaccaaggaaggcaagtgcctgggatacagtgagaaaggggaaaggagagctcaggaggaggagggcatccgcaaaagcagccagagaaaaacagagtcttccggggcttctccaagctttccagggttctatcctgcaaaatcctccccaactggccgggcacctgagttgcagacagtgcagggagccttccactacaatgtacagcagagtgagtccacagatggcttcaaagaagaaccacccttgacctggtccttgaaggatcagcacaagtttatcagccctggaggcataagggagagaatccagagagttgagcacatcaaagttaaccctggtcagggagacagggccatccttgagggtcttccagagaccctaaaacagaggtttctggaggctagagaaaggaaggaaggaagtgaagaagagaatggagagaccaacaactgtgctgattgtcccaagaaggaccgcatctggaagaatgcctgcagttggggttcttccagaataaagaggcgttttgccatgttgcccaggcctcctagtcacctggacccacaggtcatgagcagaggccatggctcatggctgtgatagcgaccccccagcccaatcctgggacaatcctggttcccacagcactcaccgaaagtgttgactccaagctcacagcaggaaccccaggagcagcagagccctcatggcgtccgtccgttggccagctgcctatccaggagtccagatcaataggactggccaaaggtcttgaaatagagattggtcaagctgccctcctgagcctgatagtgggactggaagcagaagaagggacattcttagctctgggtcctgtggagatcaggaggttaaggagatcaaagatcatgggatcttggagtccactgtga

SEQ ID NO: 114178 - DNA, 894 bp, Homo sapiens
atggtggtaaaagactcttccagattgtggcttactagttcccgcccagggcctcagaatcttctacctgtagttggaaaacaagagctgccagcagcagatgtagtaagaatgcgtagggccgccaagactcttactcaagtccttgtgattgttgtggccgtcatgtcaagtttcagattcagaaacacgactttattaactcatccacaaatgatcggggtagctgattgtaaaccagaagtggtttgggttgtttatcggttgcaaagagtggaaactcactcaggcttgtttgagttaaaggggattcacggaaaaataatggacacattcagaaataaaagacttcagggttttagagtcacctgtaaaggtggattttcacctcctcaaggctcttgtatgccagctgcttcccccaaattgttgaatcagacatttctggttcccaaatcccttccaaaagatatggaaaatggatataaaatatgcgtgcagatccagaaaaaggctccacctctgtctcctctgaatcatggggactttgtgaaatttattgcccacaagggacaaaagagcaaaacagatgcccaggttgctcagagagcaaaacttgcagcaaatgaatgtgcactagttctttgtcttggagcatccttggagatgctggagtatgaggagagaagagtgaggcctggggagggtgaaggcacatctaacatgggttatggagaaaggaaattggataaagatcacagagaagaagattatgatggtgccggtgtcactgagagatctactgacccgatgttgccttcttttgctgccttgtgtgtgctgtacgtatcctgcgttaggacccttgctttggcagcgttagctacaaagtag

SEQ ID NO: 114179 - DNA, 3498 bp, Homo sapiens
atggctgggggtgtgtggggccggagccgggcccgggaggctcccgtgggggctctaaccctgacagcactgactgaaggaatccgggccaggcaggggcagccccagggacccccttccgcaggccctcagcccaagtcctgggaggtcaaacctgaggctgagccacagacccaggcactcaccgccccctctgaggcagagcctggacgtggggccaccgtccctgaagctggcagcgagccctgctccctcaacagtgccctggaaccagcccctgaggggccccaccaggttccccagagttcctgggaggagggagttcttgccgacctcgcgttgtacacggctgcctgcctggaggaggctggctttgcagggacccaggcgacagtgctcaccctgtcctcagccctggaggcccggggcgagcggttggaggaccaggtgcatgctctggtgcgtgggctgctggcgcagccccctccaaaccctcagggtagcagccgagctctgcgcagcctaagccgtaaccagcgtgtaaatgggcaggtgctggtgcaactgctgtgggcgctgaagggtgtcttcgaggccggagccccaggcactggcggtaggtgctccagccattaccagggggccacacgtgctcttggggagatgctggctgtttcgggctgcgtgggagccacgaggggcttctacccacatctgctgcttgcgctggtcacacagctgcacaagctggcccgcagcccgtgctcccccgacatgcccaagatttgggttctgtcccaccgagggccaccacatagccatgccagctgtgctgtggaggccttgaaggcgctgctcaccggggatggaggccgcatggtggtcacgtgcatggagcaggcaggaggctggaggaggctggtgggagcccacacccacctggagggcgtcctgctgctggccagaccttcgtacaccacgtctttgtcaagcaccagttactgcacgcatcagctgagcacggaggggataggcacggacgcaacacttttggaacttagacgctaccttctgggggctgaggacaggaaatgtggcattgaggatttgtgggtcatcatcctgtgccagtgtgttaaggtgacatcagcgtgttggaagctggtggcaatgaggagcgggaaggcctcctgcaccctggagaccgtgtgggaagacaagcacaagtatgaggaggccgagcggcgcttctacgaacacgaggccacacaggcggccgcctccgcccagcagctgccagccgaggggccagccatgaatgggcccggccaggacgaccctgaggacgctgatgaggcggaagccctgacggcagcagcaggcgtgatcccaggaagagccaggacagcaggaagcccctgcagaaaaagaggaagcgctccccaagaggggctcggccccgcggaccctgcctcctggctctcggccgaacgcgtgtggctggacaagttacttttcgaccaggcagagagctcctaccgccagaagctggcagatgtggctgcccgggcagcctggcctcctgccttggccccttggggtctctgcacccatggaaaccaggtggcctgccaccacgtgacctgggggatctgggtcaacaagtcctccttcgaccaggctgagcgggccttcgtggagtggtctcaggccctgttgctggcccccgacggcagccgcaggcagggactcccaacacaggccagcaggtggccgtccccgacctggcccaccagcccagcccaccggtcaatggccagcccccgctggcagcctgcaggcactggttcgggaggtgtggctggagaagcccggtatgatgcagccgagaggggcttctacgaggccctgtttgacggccatcccccagggaagaaggatgcagaggccccctggctcagcaagcctgcctacgacagcgccgagtgccgccaccacgctgccgaggccctgcgggtggcctggtgcctcgaagctgcctccctgtctcaccgacccggtcctcggtctggcctgtccgtgtccagcctgagacccaacagaaaaatggctacaaacttcctagcacatgagaagatctggttcgacaagttcaaatatgacgacgcagaaaggagattctacgagcagatgaacgggcctgtgcaggagaacggcgccagcgtgatcctccgtgacattgcgagagccagagagaacatccagaaatccctggctggatgctgggatcacaggcctgagccaccgcgcatggccgtgactgcttttaaacgcctttcgatggaagacgatgacggtggcctctcgatgtcagggccgcgctgccaccccctcccgccccaggcagcaggactgggctctgagctgagggcaggagcagctggcggctcgcagcgcgaccgtgggaaccactggatccatgcggattctagtgacagggggctctgggctggtaggcaaagcatccagaaggtggtagcagatggagctggacttcctggagaggactgggtgtttgtctcctctaaagacgccgatctcacggatacagcacagacccgcgccctgtttgagaaggtccaacccacacacgtcatccatcttgctgcaatggtggggggcctgttccggaatatcaaatacaatttggacttctggaggaaaaacgtgcacatgaacgacaacgtcctgcactcggccttcgaggtgggcgcccgcaaggtggtgtcctgcctgtccacctgtatcttccctgacaagacgacctacccgatagatgagaccatgatccacaatgggcctccccacaacagcaattttgggtactcgtatgccaagaggatgatcgacgtgcagaacagggcctacttccagcagtacggctgcaccttcaccgctgtcatccccaccaacgtcttcgggccccacgacaacttcaacatcgaggatggccacgtgctgcctggcctcatccacaaggtgcacctggccaagagcagcggctcagccctgacggtgtggggtacagggaatccgcggaggcagttcatatactcgctggacctggcccagctctttatctgggtcctgcgggagtacaatgaagtggagcccatcatcctctccgtgggcgaggaagatgaggtctccatcaaggaggcagccgaggcggtggtggaggccatggacttccatggggaagtcaccgtatcctctggctccagtgctgggggttgggcggggctccccttgggcgggctcagtggccacccggtcctccagtttgatacaaccaagtcggatgggcagtttaagaagacagccagtaacagcaagctgaggacctacctgcccgacttccggttcacacccttcaagcaggcggtgaaggagacctgtgcttggttcactgacaactacgagcaggcccggaagtga

SEQ ID NO: 114180 - DNA, 1912 bp, Homo sapiens
tttttttttttttttttttgccggtctcaagtctttaatcgtggctttggacctcacgcacgcgcgcacgctacacacactcaggcttcagatcttgttgaaagctgcgatatcgacactctgcacgttgctccccaaacttggtgatcccctcccccagcaagtcggtccccaccttggcgtcctccatcatacactgaatctgtagctttccggatacccgtagcccacggggcaccaggttgggaagccccccagagacaaccctttcaagttggatagagcgcacaaaggcctccagctgagccatgtccgtctcatcatcccaaggctttgacatccagcaaggatggagggacttggccaccaagtggcaggctttcttgggccttcttctcccgcgtaatgaccgtaggccgctccttccgctagctgtggcccgcctctcttgtccttccttcctcattgtcactgccaaaacaggtcaagtgtcatcatccctcgcattccctctgctggtgtgggtgggcttcttgggctggggggctccacttgggcgcatgggagataacgtgctgggttctgttggcccgttgcccggttggccaggcgaggctcttctccagcactgttcagcccgggcttccaggcttggagatggcctgctgcaagctcctgtaccacgccacgcagactctggttctccacttccagactggcaatccggacgacgagctcaccgtggtctccgctggtgccgcttggaggccccggggccctgagcttccagccagggatttctggatgttctctctgcgtctcgcaatgtcacggaggatcacgctggcgccgttctcctggcgggaaggcaacctgcaacaggcccgttcatctgctcgtagaatctcctttctgcgtcgtcatatttgaacttgtcgaaccagatcttctcatgtgctaggaagtttgtagccatttttctgttgggtctcaggctggacacggacaggccagaccgaggaccgggtcggtgagacagggaggcagcttcgaggcaccaggccacacgcagggcctcggcagcgtggtggcggcactcggcgctgtcgtaggcaggcttgctgagccagggggcctctgcatccttcttccctgggggatggccgtcaaacagggcctcgtagaagcccctctcggctgcatcataccgggcttctccagccacacctcccgaaccagtgcctgcaggctgccagcgggggctggccattgaccggtgggctgggctggtgggccaggtcggggacggccacctgctggcctgtgttgggagtccctgcctgcggctgccgtcgggggccagcaacagggcctgagaccactccacgaaggcccgctcagcctggtcgaaggaggacttgttgacccagatcccccaggtcacgtggtggcaggccacctggtttccatgggtgcagagaccccaaggggccaaggcaggaggccaggctgcccgggcagccacatctgccagcttctggcggtaggagctctctgcctggtcgaaaagtaacttgtccagccacacgcgttcggccgagagccaggaggcagggtccgcggggccgagcccctcttggggagcgcttcctctttttctgcaggggcttcctgctgtcctggctcttcctgggatcacgcctgctgctgccgtcagggcttccgcctcatcagcgtcctcagggtcgtcctggccgggcccattcatggctggcccctcggctggcagctgctgggcggaggcggccgcctgtgtggcctcgtgttcgtagaagcgccgctcggcctcctcatacttgtgcttgtcttcccacacggtctccagggtgcaggaggccttcccgctcctcat

SEQ ID NO: 114181 - DNA, 2160 bp, Homo sapiens
atgaaggcagaaataaagatgttctttgaaaccaacgagaacaaagacaccacataccagaatctctgggacgcattcaaagcagtgtgtagagggaaatttatagcactaaacgcctacaagagaaagcaggaaagatccaaaattgacaccctaacatcacaattaaaagaactagaaaagcaagagcaatcacattcaaaagctggcagaaggcaagaaataactaaaatcagagcagaactgaaggaaatagagacacaaaaaacccttcaaaaaatcaatgaatccaggagctggttttttgaaaggatcaacaaaattgatagaccgctagcaagactaataaagaaaaaaagagagaagaatcaaatagacacaataaaaaatgataaaggggatatcaccaccgatcccacagaaatacaaactaccatcagagaatactacaaacacctctacgcaaataaactagaaaatctagaagaaatggatacattcctcgacacatacaccctcccaagactaaaccaggaagaagttggatctctgaatacaccaataacaggctctgaaattgtggcaataatcaatagtttaccaaccaaaaagagtccaggaccagatggattcacagccgaattctaccagaggtacaaggaggaactggtaccattccttctgaaactattccaatcaatagaaaaagagggaatcctccctaactcattttatgaggccagcatcattctgataccaaagccgggcagagacacaacgaaaaaagagaattttagaccaatatccttgatgaacattgatgcaaaaatcctcaataaaatactggcaaaccgaatccagcagcacatcaaaaagcttatccaccatgatcaagtgggcttcatccctgggatgcaaggctggttcaatatacgcaaatcaataaatgtaatccagcatataaacagagccaaagacaaaaaccacatgattatctcaatagatgcagaaaaagcctttgacaaaattcaacaacccttcatgctaaaaactctcaataaattaggtattgatgggacgtatttcagaataataagagctatctatgacaaacccacagccaatatcatactgaatgggcaaaaactggaagcattccctttgaaaactggcacaagacagggatgccctctctcaccgctcctattcaacatagtgttggaagttctggccagggcaatcaggcaggagaaggaaataaagggtattcaattaggaaaagaggaagtcaaattgtccctgtttgcagacgacatgattgtttatctagaaaaccccattgtctcagcccaaaatctccttaagccgataagcaacttcagcaaagtctcaggatacaaaatcaatgtacaaaaatcacaagcattcttatacaccaacaacagacaaacagagagccaaatcatgagtgaactcccattcacaattgcttcaaagagaataaaatacctaggaatccaacttacaagggatgtgaaggacctcttcaaggagaactacaaaccactgctcaaggaaataaaagaggacacaaacaaatggaagaacattccgtgctcatgggtaggaagaatcaatatcgtgaaaatggccatactgcccaagaatgggccagccaactgtgacatcccttggatcggagatttagaactagaaagtattctttctacattattagggaagaaaaggagttacttggcggtaagaattataatgggaaagcccaaagaagcctctgatactactccatcaactctggacaacacattaaatcaaaaacaatattgcatcctggaggaaatgacagagattagagtccatcttgaagatcaaaaggatgcagggttagaagccacaccctatccctatttaattgaccagtcttacatctataaaagccatgtggcttcttggtatgaatttttgggcaaccgacaattctaccaagtagcagccccaattgtagctgctgtacaaattgtggtgtctttgctagagcaagttaacacggtgtctaatacatgctgtgaaactgataagaaatacacatattggtttctgccagcagtccttggcacagagctcctcaagccttcataa

SEQ ID NO: 114182 - DNA, 1776 bp, Homo sapiens
atgcctcagggcctgcagatgccaaagaaaggaccactcctcaggcaccaccacatcatggcaacatctcagcagctcaaagacgtggcagctcctcatcctgaggcacttgaatctgtgacctctgttgtacacaaagccagggatatagggaaaggggagaggaaatatcctcctcaacacactgcaaaagaacaactctgcactgctgctgtgtttcctggcacactggaggcctttggccaacttccccgaaccctgtctcagcagcttctggctcattgctcgctgacacggccacctctgctcctgccaaggaaatctgctggcctttgcttcccctccccacctccatctcactcagttcctcctcaggccacaggcatgcctgagtggcaaatggcagcaaagaggaaggtgaaaaaggaaggaagaacgggaggaagggagcccgagagaaaacattcagaggagggagtttatgtacattatccaaatggatgtcaggtccctgtcgacaaagattttaattgtgtgtggccctttctccttataacttatggaactggtccaaatgaggctgacttggtagccaatctggcatccgctattgaacctgcatacctaaggaagttactgcttaactcaactctcctgcttctgcctggagggaacactgcccatcctgtacactgccggaggctggaaaaggtgtcaagagatttgtgcctggccaagaccttggaggatgatggtgttgcacttcgtctagttattcagcacagaactgtactcaacctgattgaactcccacggaggggtaggcttccaaacgcaactgaatttcattttggtgcagcacctttctgcctcaaggccttagctttgatagctttagaaaataatggatatggtaacactacgcagggtttaaagtgccctgtttgggccaggtgtcttcacactgagaaaagcggcgttccacggtcacagccaggtgagtgcactcgcccatcggcatgggcatccgaggagagcagggctgtggggagcagccccttcactggcagtgagaaaggtgctcatttgaatatcaagcaacggaccagtgaaaattggcaaaggccagaaaagcgaccttcagaaggagccagcaccccagctcctgcctcagggcgatatgaagaccccaggaaggaaattatgctgagaaaaggagatcacacctctgtccagcctgcaccggccccttggcatgccctgaagacacaaggcctaaatcaaggtcaaagacacagccctcctggttgtgaagattccaaaggctcccagctgcatgaggagggttacccagaatgtcagatttggagcaattcagcgagaacccttcaaaattcagtgtggtatgtggaagagggtcaccctcatctagcagatgtgggcaggaagagaagtccacttgtgcttgctgccagaggagatggccactgccaattgaggctgatcatgaagagtgggttcctggagtcctcagcagagcactggctattcatggacaaggacagaaacagaagaaaaaaagacccagagaaggcaagaaggtcatatggagacagagatcggatttgtagagccacaaaccaaggaacgcctggagccaccgaagctgggagaggcaaggaaggatgctcccttagagcctttaaaggaaacgcagccctgctgaacactgatttcaaacttctggcctctggaactgtacagaatacattatag

SEQ ID NO: 114183 - DNA, 567 bp, Homo sapiens
atgtcagatttggagcaattcagcgagaacccttcaaaattcagtgtggtatgtggaagcagatgtgggcaggaagagaagtccacttgtgcttgctgccagaggagatggccactgccaattgaggctgatcatgaagagtgggttcctggagtcctcagcagagcactggctattcatggacaaggacagaatgggccagccaactgtgacatcccttggatcggagatttagaactagaaagtattctttctacattattagggaagaaaaggagttacttggcggtaacaatgtttaccaccgtgaatggaacttgtttgattaaccctgatcagaggatgaaaacactaaagaaccaagtgagaaagagggaagagaaccgcatagggaagagcagagcgagtagacgagccgaacgcagagcccgcgaggggcgagtggaagctccctgcgggcaggtacccgaccaccgccctgccctgggcgtggcggcctcgggctcagggaccgcttcggcgctagacggccgcgtccggaggaaacgggcgctggtgaaagcctag

SEQ ID NO: 114184 - DNA, 728 bp, Homo sapiens
ccctccaggggagccagacttcgagtcttccttgtgtcaaacatgcctgggtgaacatgctttccaaagaggggttctccctcaggagaacgagtcatgttcatgggaaactcaatctgggtgtgaagtgagagagccatgtaatcatgccaacatcctgaccaagcccgatccaagaaccttctggactaatgatgatccaggtattaattggaaaaatacaacctgtttcctgttatgtacaggatacattctgtagtaaagctctacacaaaggcaaggaaagcaaatccctgggtctgcattcagcagcagatgaaaaactcagcgtgcattgtaagggtaatgttgctccaaaaatctttaagcactggaatcacacaagagatgaggatctgtttcatgtttcaatcacaaaagtggtatcagtaggaataaagaatagacgagagagagttgaattccagagattttttctgcaggaggtttatggttttggattaaggtttctgactttgaccttgttaaggataaatatgcttgagatttcgtacaatacgcttgattcttcttctgcaaaaaagacgaggattccaggtttgggaaagcataatattaactcaggagctctcattactgacatgagaaaaatgattaaaaagaggagcctgaaaccacgaacaatcttggttatttaccaagtttgttcttgtggaggaaaaaaataa

SEQ ID NO: 114185 - DNA, 615 bp, Homo sapiens
atgctgctcgacacagttcaaatcacccatgaattattttatgtaattgaggaatatgggcataaatacaatatactaacaggtgactgcaatattaaattttctgttttaaaaggaaactcttcaaactgggtcttcgaaatagaaaaacagtcttgtaatgttttaaagaggtggagacactctctacatacaaagggcagagtgtccttgcctgctgtaaatgttttagcagctgtggaaactttcaacaaaattgacttcagcaactcagagcgatgtgcaaaaactgggcttttcatcgtgaagactaagcacttactaaagagatggagactctgtggcatagctcggagctgggggctccttctcacagctctgcccaatgaacttttcgatggcaactctgttagattacaaatctcagcatcctttagggtttgctttctaaatgagctgcccgtgggagagatggctatttatctgtttgactttccgaagagtcttagagaaagcctcactgagagggttaagactcagggctgtgacctcggaatcgtccgcatcggggtctgggctgtcacagccattaaggccctttttctcaacgtctga

SEQ ID NO: 114186 - DNA, 420 bp, Homo sapiens
atggcgatggtccggcggcaaggtagacgctacgatggaggtattcaaggcctttgtctaggtttgaactttccaaattatgtatttcagacgttgagaaagaagggccttaatggctgtgacagcccagaccccgatgcggacgattccgtaggtcacagccctgagtctgaggacaagtacaggaaaattaacgaagatattgatctaatgatcagcaggcaaagattgtgtgcattgaacaagaaagaaaacaaaggctgtgaaagccccgatcccgactcctcttatgcactcaccccacgcactgaagaaaaatacaaaaaaattaatgaagaatttgataatatgatcaagagtcataaaattcctaatgggcaggcacaggaaaaggatgatgatgaaaatatacattcttga

SEQ ID NO: 114187 - DNA, 4336 bp, Homo sapiens
  misc_feature (1)...(4336): n = a,t,c or g
aagatgcatggtgaaatggtgagatcagaaaggggccctgcatttgataaaaatgcaaaaaacaaaataaaaatagcatgaaagaaactagtatatacaatggatgtcagttgacccaatagattgctaatgtattaaaaacaatttagggtgttgcaatgtgatatgttctaaccccacaggttatccttttgacagctgaccttaaacttataaaatgtaagcagagtaaaagaaaacaganagaanatagttactcaaatgtgcaactgcacaaatatacccccctcccgctattaagataacaaaacttctgctattaccataatattatatatattagaaagctatacacaagcatgttaatttcacagatttttttaaaagattcttaatattttatataattagaaatacacacatttcaaaaacaaacttctacaaagagaaaacagttatcttggttagcaaagcatggagttcttcatggcttagggtagtgctttctatacacaaagtcctttttggttttttacaggactgtttaaaatattagcgacgctatcaaggaaaaaatacataatttcagggacgagagaaagaaaaggaaggaaaaaatacataatttcagggacgagagagagaagaaaaacggggactatggggagaaaaaagattcagattacgaggattatggatgaacgtaacagacaggtgacatttacaaagaggaaatttgggttgatgaagaaggcttatgagctgagcgtgctgtgtgactgtgagattgcgctgatcatcttcaacagcaccaacaagctgttccagtatgccagcaccgacatggacaaagtgcttctcaagtacacggagtacaacgagccgcatgagagccggacaaactcagacatcgtggagacgttgagaaagaagggccttaatggctgtgacagcccagaccccgatgcggacgattccgtaggtcacagccctgagtctgaggacaagtacaggaaaattaacgaagatattgatctaatgatcagcaggcaaagattgtgtgctgttccacctcccaacttcgagatgccagtctccatcccagtgtccagccacaacagtttggtgtacagcaaccctgtcagctcactgggaaaccccaacctattgccactggctcacccttctctgcagaggaatagtatgtctcctggtgtaacacatcgacctccaagtgcaggtaacacaggtggtctgatgggtggagacctcacgtctggtgcaggcaccagtgcagggaacgggtatggcaatccccgaaactcaccaggtctgctggtctcacctggtaacttgaacaagaatatgcaagcaaaatctcctcccccaatgaatttaggaatgaataaccgtaaaccagatctccgagttcttattccaccaggcagcaagaatacgatgccatcagtgtctgaggatgtcgacctgcttttgaatcaaaggataaataactcccagtcggctcagtcattggctaccccagtggtttccgtagcaactcctactttaccaggacaaggaatgggaggatatccatcagccatttcaacaacatatggtaccgagtactctctgagtagtgcagacctgtcatctctgtctgggtttaacaccgccagcgctcttcaccttggttcagtaactggctggcaacagcaacacctacataacatgccaccatctgccctcagtcagttgggagcttgcactagcactcatttatctcagagttcaaatctctccctgccttctactcaaagcctcaacatcaagtcagaacctgtttctcctcctagagaccgtaccaccaccccttcgagatacccacaacacacgcgccacgaggcggggagatctcctgttgacagcttgagcagctgtagcagttcgtacgacgggagcgaccgagaggatcaccggaacgaattccactcccccattggactcaccagaccttcgccggacgaaagggaaagtccctcagtcaagcgcatgcgactttctgaaggatgggcaacatgatcagattattacttactagtttttttttttttcttgcagtgtgtgtgtgtgctataccttaatggggaaggggggtcgatatgcattatatgtgccgtgtgtggaaaaaaaaaaagtcaggtactctgttttgtaaaagtacttttaaattgcctcagtgatacagtataaagataaacagaaatgctgagataagcttagcacttgagttgtacaacagaacacttgtacaaaatagattttaaggctaacttcttttcactgttgtgctcctttgcaaaatgtatgttacaatagatagtgtcatgttgcaggttcaacgttatttacatgtaaatagacaaaaggaaacatttgccaaaagcggcagatctttactgaaagagagagcagctgttatgcaacatatagaaaaatgtatagatgcttggacagacccggtaatgggtggccattggtaaatgttaggaacacaccaggtcacctgacatcccaagaatgctcacaaacctgcaggcatatcattggcgtatggcactcattaaaaaggatcagagaccattaaaagaggaccatacctattaaaaaaaaatgtggagttggagggctaacatatttaattaaataaataaataaatctgggtctgcatctcttattaaataaaaatataaaaatatgtacattacattttgcttattttcatataaaaggtaagacagagtttgcaaagcatttgtggctttttgtagtttacttaagccaaaatgtgtttttttccccttgatagcttcgctaatattttaaacagtcctgtaaaaaaccaaaaaggactttttgtatagaaagcactaccctaagccatgaagaactccatgctttgctaaccaagataactgttttctctttgtagaagttttgtttttgaaatgtgtatttctaattatataaaatattaagaatcttttaaaaaaatctgtgaaattaacatgcttgtgtatagctttctaatatatataatattatggtaatagcagaagttttgttatcttaatagcgggaggggggtatatttgtgcagttgcacatttgagtaactattttctttctgttttcttttactctgcttacattttataagtttaaggtcagctgtcaaaaggataacctgtggggttagaacatatcacattgcaacaccctaaattgtttttaatacattagcaatctattgggtcaactgacatccattgtatatactagtttctttcatgctatttttattttgttttttgcatttttatcaaatgcagggcccctttctgatctcaccatttcaccatgcatcttggaattcagtaagtgcatatcctaacttgcccatattctaaatcatctggttggttttcagcctagaatttgatacgctttttagaaatatgcccagaatagaaaagctatgttggggcacatgtcctgcaaatatggccctagaaacaagtgatatggaatttacttggtgaataagttataaattcccacagaagaaaaatgtgaaagactgggtgctagacaagaaggaagcaggtaaagggatagttgctttgtcatccgtttttaattattttaactgacccttgacaatcttgtcagcaatataggactgttgaacaatcccggtgtgtcaggacccccaaatgtcacttctgcataaagcatgtatgtcatctattttttcttcaataaagagatttaatagccatttcaagaaatcccataaagaacctctctatgtccctttttttaatttaaaaaaatgactcttgtctaatattcgtctataagggattaattttcagaccctttaataagtgagtgccataagaaagtcaatatatattgtttaaaagatatttcagtctaggaaagattttccttctcttggaatgtgaagatctgtcgattcatctccaatcatatgcattgacatacacagcaaagaagatataggcagtaatatcaacactgctatatcatgtgtaggacatttcttatccattttttctcttttacttgcatagttgctatgtgtttctcattgtaaaaggctgccgctgggtggcagaagccaagagaccttattaactaggctatatttttcttaacttgatctgaaatccacaattagaccacaatgcacctttggttgtatccataaaggatgctagcctgccttgtactaatgttttatatatt

SEQ ID NO: 114188 - DNA, 1123 bp, Homo sapiens
atgacgcctaactggcgcgcgaatggacttgtgcccctacccacatggctgagtcatgaggggactgcccgagatgcgcctgggaccccgtctgttcttgctacacgcagcgagagaaagcggcatatatctgtgctgttctctgaagcatccccgctcacgcgatggcaccgctatccgcgcaactacaccagagagatactcaccgtcactggtcagaccgacgcatcggctctctctacagcacctcgttctgagcagtctccagatatgccgcacacatctacgttgctgcgagcgaaagcgctatctgcacgctttccacacgagactactgtcgtgacagctgaaataataactcgaccaaagcgcaacgagacacagcagcataataaacgaaaagagctcatcactaccccgatgagccgagcacagcagactgaccccaacaacagaccagagcgagcagagcaacggaaaagctggactgaacagcagagaacatcaaccagcagaggcacaaacaggacacatccatataacaacaaacatcccgaaaaggaatttatatgggttggtaaacctgggccttgtggtactcaatcatccttgcttcagtgattcactaagtaaccccttgcgagttgatttctccagcctctgggatttatttgcattgttatgcaatggggtgggaacacctcacttgctgttctggctcctcagcaggagcaagggcgaagctgacagcacggactgtcagtatgaggaggcaccagtcgcagagcccccgcgatgcgtgccgccaccgacgctgcacagagcacggtcatgcggcgctactggcgcgcgaatggggttgagcccctaccctcatggactgatgtcatgtaggggattgcccctgagaagcgccggaggaccccgtcggaacttgctacacgcagcgagagtaagcggcatatatctgtggtgttctctgaagcatgcccgctcaggcgagggctacgctagccgcgctactacgccgagagaactgcccgacactagtcagccgatgcatggctctctctacagccctcgttctgtggaatctcctgatatgcgagacacatattcgtag

SEQ ID NO: 114189 - DNA, 346 bp, Homo sapiens
gggaaaagaaggaggaaatggtatgtccaaagggtcatggagggcacagagctctcaaatgatgagcaggtgatggagttgtaataggagcctgaagaggcagactatagctaaaaaccatgtgaggactatgacctcaccttgagagcatgggaaatacccttgaactgctgaaagcaggtacctatggtgccagttttcagtgtggagaaggatggagaggagctcggtagcttcaggccacgctgggccgattggctgactggattactggagtgggtttcagtagagagcctttctatctattgcatttctcaacctgtttatatgtgggtggaataaggct

SEQ ID NO: 114190 - DNA, 583 bp, Homo sapiens
atgggccttagatgcgactctgagacttcctggcttcaggtgagattcagcacaataccagctgtggtggctacagggacagacttcttctgcccaagaaaagtggaggaaaaagtaaagaggactctatcatgcacctcaggtaccagctcagccacagagagcatcaagtgggctcttggggcccccgattctaggacttggctcttggatggcatttctggacctgccctgggtcagaggggagcccactgccctcaaagacacagacaaacatctacaagtatcaagaccatccaggaaaacatgacctcatcaaataaactaaataaagcaccagggaccaatcctggagaaacagagatatgtgacttttcagacagagaaatcaaaatggctgtgctgaggaaagtcaaagaaattcaagataacacagagaaggaattcagaatcctatctgattagcttaacaaagagattgaaataattacaaagaatcaagcagaaattctggagctgaaaaatgcaactgccatattgaaaaatgcatcaaagtccattaatagcaggtgtgatcaagctg

SEQ ID NO: 114191 - DNA, 502 bp, Homo sapiens
agcagttgcagggaccagtgttccatgggcacacgttcggtcatgtgggctcaggagtcacacagacctgaattcctattacagctcagaggagctgtgcgtccttgagagaatgattgaagcacatggggttgaaaagcagcgcatacaacagaagttgcacaaagccgtccttgtcatcttccacacaggaggacagagaacaaaaacgtcccaaccaatatggaatgtgaacctcagagagggtaggcaacttggcggaaaacagaagaaacagatccacttggaccccaagcctggcctccttccatcaggccacccaatcctgaatttgaaacacagtgaattgcatcatgctccgcagtcttcatcatggaagagggagggactggaccttgaagaaagggtagaatttgggcagatcaagaagaatgcagggacacttcagaagaggagaggatgcgagccaaggcatggagacacaaacattggggacatattt

SEQ ID NO: 114192 - DNA, 362 bp, Homo sapiens; identical to SEQ ID NO: 16745

SEQ ID NO: 114193 - DNA, 434 bp, Homo sapiens
  misc_feature (1)...(434): n = a,t,c or g
gcgtggtggaattcggcaagagtccctctgaagtatttgaacacactgtgttgtatgtcactgtggagccgtgcattatgtgtgcagctgctctccgcctgatgaaaatcccgctggttgtatatggctgtcagaatgaacgatttggtggttgtggctctgttctaaatattgcctctgctgacctaccaaacactgggagaccatttcagaatcacctggaggcttctgtgcctgactctgctcagtccctgccccagaccatctgaatcagaaggcagggggccaacagtgctgtgtttccagagagttccaactggttctcctgagcagcaatggttgagaaccactgctctcatcccactgtatccctggatatcgggctgaggaagcagtggaaatgttaaagaccttctacaaacaagaaaatccan

SEQ ID NO: 114194 - DNA, 575 bp, Homo sapiens
  misc_feature (1)...(575): n = a,t,c or g
cattgtcagacttctaaaaagtgctaatttgttcccttaacagagcaaatgatgagagaccccattttcctgcagattaaaaacaatatataaacatatgattcaacgatgtcaacagctttcagtctatgaatcttgtccaggtcactttgggtcacttggttctttcatcagaacatgttcaagatctgctgacattcctttttccgaactttcgattttggtgcatttggattttcttgtttgtagaaggtctttaacatttccactgcttcctcagcccgatatccagggatacagtgggatgagagcagtggttctcaaccattgctgctcaggagaaccagttggaactctctggaaacacagcactgttggccccctgccttctgattcagatggtctggggcagggactgagcagagtcaggcacagaagcctccaggtgattctaacgggcagtccgggatgagaactgctgagttacaggcctcgaaggaaactgcaccgccctgaaatggtctcccagtgtttggtaggtcagcagaggcaatatttagaacagagccncaacc

SEQ ID NO: 114195 - DNA, 758 bp, Homo sapiens
cggactgcccgttagaatcacctggaggcttctgtgcctgactctgctcagtccctgccccagaccatctgaatcagaaggcagggggccaacagtgctgtgtttccagagagttccaactggttctcctgagcagcaatggttgagaaccactgctctcatcccacgtaagaggagagggctctgagtgtgcgagtggagtggagggggacctctggggagctccagcacttaacacagcaggaagcagggggcagctgtgacgggactggctggcagtggttaggatggtaaaatgcctgcttggtcgggtaacatactgagaggatttgagatgagcaagataattggggctcatcgtggcattgtggctgatgtaatcaatgtcctgatctgtttcagcagcttctgggggccacaacaaagacacattgatgaagaccctctctgggccccagaagaagattgaggacaaagcaccagtagcgcagattggggtgaagaaaattatagaggtaggaggcaaaccccaggtaagtaccgtaactggagtcacagttggctagaacatcaagataagaaggtgagaagtggtggccgtgccctgggggccctgaaaggatgctagtttgtcttgcagagccaatgggaaattgacacgttgcctgagctgtaatgtgggcttcagcctccttgcccacctgagaccaggcgttagcatttttggtagaaatgttcagtagttttgttcggggcat

SEQ ID NO: 114196 - DNA, 487 bp, Homo sapiens
aaaccctggcgctccagcagtttctcagcttcctgtgcggttttcttgatctgtccccatgttatggggattgcacccacacggttcgttcatctccatgaggtagaactttccactgataatgagaaacaggccccttctaatagaaggcacagagaaagcaaatggaggcttctcaaaccttcaatttgcactgtacaggtgggtccgctagatgctgtggctcatgatagatcttcagatgtttggtgggcacccacacaggcacctgattgtcacctggagagacacaagcaaatcttcttccccatataattatctttcctttttcccagctctttgtatgtgcattcctccaccatgtatcttgtccagcctttttattttccttttgtcctgttaggtgttgtttcactgcagttatgggttgatctttttgtaaatttaaaaattttaatgttaataaagctaaatgcaattaaaaaaa

SEQ ID NO: 114197 - DNA, 852 bp, Homo sapiens
  misc_feature (1)...(852): n = a,t,c or g
atgctaaacttacaacctggattcccggagcaggccctgatgggatccataaacatgttaaagtttggtcaaggaaagtccctaggatccccatctggctctgaagggctacgtgttttgctcgtggaaggtaacgacccccagggaacagcctcaatgtatcacggatgggtaccagatcttcatattcatgcagaagacactctcctgcctttctatcttggggaaaaggacgatgtcacttatgcaataaagcccacttgctggccggggcttgacattattccttcctgtctggctctgcaccgtattgaaactgagttaatgggcaaatttgatgaaggtaaactgcccaccgatccacacctgatgctccgactggccattgaaactgttgctcatgactatgatgtcatagttattgacagcgcgcctaacctgggtatcggcacgattaatgtcgtatgtgctgctgatgtgctgattgttcccacgcctgctgagttgtttgactacacctccgcactgcagtttttcgatatgcttcgtgatctgctcaagaacgttgatcttaaagggttcgagcctgatgtacgtattttgcttaccaaatacagcantagtaatggctctcagtccccgtggatggaggagcaaattcgggatgcctggggaagcatggttctaaaaaatgttgtacgtgaaacggatgaaagtggtaaagggatggcggctgcagccatgtcaactcaaattcagcctgtggggcacaacccaacattaaactcccaaaagtggcaccttgtgcctatgaccaaggatggtgggttccctccaaggcaagtggcatga

SEQ ID NO: 114198 - DNA, 1151 bp, Homo sapiens
atgggtccctccagtctcctgttccgtggtcatacacatcttgagggcatcctcacggttcattcatctcctgcaaaaatacaagcattccctcacccatacattagtaaatctactgaaacagaagcaaaaacttgtggctgtagctgggaggctactgataatgagaaacaggccccttctaagagaaggcacaaggaaagcaaatcgaggcttttcaaaccttcaattcgcactgtacagacattcgggtgtcctttgacgatgcatccttcactttcacgtgctcttgcattccttcaccgaggtctttgtcgccccacattgagcagccaggaatgttggtgtgatcagacccaacaccaggtcgtgtgggtgacaaagtccggtggagtcaaaggattgagaaaaagacagtttgagagagaaaggtgggacaccaggggagccatcacaatcatggaggctacgaaggccctgagctctgggagcccacgctatttattggtaatccaacaaagaaacatatgggtccggagcagcttacactggctctggtattcgtgggtcctagagggctgattcttggaccttcaggtggctgcttagaagctagtagtgaaagcagtgggccagatttgtgggcagcatgggttgtgtgggtgattgcaataacagtggtggagcaacccactgggacccaagccatcccagatagaggtccagctggatggtggctgcagctatatcatcttgaacttggtttgagagtggggcacagcccagtgttaaactatcaaagtgatgccagctgtgggcctgtgacaagagaaatcagcatgggctgcttatgcatgccccttaggcaaacagcatgggcagaagctgtaaggagtgtgatccactcaattttcagtctcacagaagcccatagcagggcagtgggtattgtccaagggatggcggctgcagccatgtcaactcaaattcagcctgtggggcacaacccaacattaaactcccaaaagtggcaccttgggcctatgaccagggatggttgggagtacaatatggaatgtacacaggcagaagagcctgtccatgtggccactactaccactggcccatggcgagttctgccaggtttctga

SEQ ID NO: 114199 - DNA, 414 bp, Homo sapiens
atgttaactgctgaacttgagagtgattcacacagtgtttccactgagcacaccaagcccgatgaaattcaattctacaaacagaaatcacggatgggtgatggaggtgatgagaagttacttgctggtgtcattgtctttgcctcacaaaacccagtggggtatgaccaggacaggattgaggaatcacaggggattcagtgggcagagtccctgttgtggtgtgttggccgaagttcacatgtgggcacggggctgaggtctgagatgagctggggtctgatatctgcaagcaggcgaggagcacctgaaagggaagagacaacagtggccaatgagaaggcagtttctgtggacctggatttctcttcaaattctaacttcctagctgagtattttgagtggagggtctag

SEQ ID NO: 114200 - DNA, 962 bp, Homo sapiens
atgcaagccttggaaccccagccaggcctgcatgagtactctcagacagttgcaaagcagttctactccccttaccttggggtcgacacctaccctcactatgcccttgatcagcaggaagaagttagagcagtctttgctctttttccatcttcaattgccaacatcttgaggcccagtcccaaggctcaagaccacttgcaccagcagcgtgcatcagcaggacagcagaagcaggacgagagctgccaggaagacacctaccctggccggaagacacctactctggcaggaagacatgtacccctgaagattgagaaagaggccgtctgggcatttcaaggaaatcacttctcttctaacaacaagcagccagaaagagcagacagtaaaacacagataagacagctcaggcacagaagaatctggagcaggagcctcagtctcctatcaaaaggagaagaacctgaagaaaacacttctcttccttctctctgcctaggggcagtgaccttggattcaaccaccatcatcccttccagacaccagaggggggagtcccacaaggcagaaggtgcccctgtgacccatccacttctcttccatgttctttacctccttgctcaggaagccataaagttgagctgagtggaaggtgaatttcattgcaaagtttacacaggctctgctgacaggttcatgaaaacactactgaatatgttacataccaccaaggctcacagcacatcctgtgttggaagtgatacttttccattaccagtaaacctccttttgtcctaggagctcactgaacagctaaaatcaggtgatatttttatgtggaacatgcaacgtattaagtccttttgctcagtgacccaaaaaggaactaaacggtacccagactagaaatcaatgtcaaattattcaaataaattccacttaaagaaaaaaaaaaaaaa

SEQ ID NO: 114201 - DNA, 403 bp, Homo sapiens
  misc_feature (1)...(403): n = a,t,c or g
cnnnnnnnnnnntataaagcttggtttttttcacaaaaaaataaaaccttttgggaaaaaaaaactcccccttttgttttaaaaaaaacaatgcnnnnnnnnnnnnnnnnaaaggaaaaactcttgcatgctgagacaaacctatgtgtaatgggagagaacagaccaaaatgtgggcagagtcttaggtcctagctaatggcagagccagggttctagggggtcagctgtcccgggccaggtgatctgagggctgacctgtttcttcctaaccatcagaaccaaaaccagtttgacctaaccacaaccactttgacagtcttgacaaggtatggcatgggcttggcctggtgtggcaaagccatcgacataacaagatgaaaaactgagtccactgaacagc

SEQ ID NO: 114202 - DNA, 730 bp, Homo sapiens
  misc_feature (1)...(730): n = a,t,c or g
ccctgggaaacggaggtggtccccccctccaaaattaaaaaagaaaattttaaggcttggtttttttaccaaaaaaaataaaccccctgggaaaaaaagaaccccccttttattttaaaaaaaaccctggcnnnnnnnnnnnnnnnnnnnnnnnnnnnaaaggaaaaacttcttgcatggctgagacaaaaccctatgtgtaatgggagagaacagaccaaaatgtgggcagagtcttaggtcctagctaatggcagagccaggcgttctagggggtcagctgtcccgggccaggtgatctgagggctgacctgtttcttccctaaccatcagaaccaaaaccagtttgacctaaccacaaccactttgacagtcttgacaaggtatgggcatgggcttggcctgggtgtgggcaaagccatccgacattacaagatgaagaactgagtccactgaacagcctgggtgaccagaagagcctgcccctcactgctggggccctcccggtcttcagacacccaggctctcacattctactgtgtgcttctaagatctctcttcatgttcctctattctggagggcctgtgcatttgaaccagagatctgtgcaggccctagaatcaaaaggggccagggctgtgtgttctgggatcctccatttccatccccaggagctgagaaaatgcaacataaccccacattgagcaaatgacaagacccattattctt

SEQ ID NO: 114203 - DNA, 415 bp, Homo sapiens
gtttttttcattcaagagaattaaatcgtttattgattacacatgataatggatacacaagcttcattcccatctataattttatctggtaccattattcaatttagatatattgcataggatgtgccaacaaagaacctggcatcaccctgaaggaattctaacttcacactgttggggaaatttaccaagatggcttaagagtagactaactttacacagcacattaaaaagacatttattcagcgtcacgatcagactgttacatttagcaatcaacagcatggggtgcaaaaaaaaaaatctacattaaaaccctttgttggaatgctttacactttccacagaacagaaactaaaataacctgttatacaattagtcacaaatacagtcctcgagttttttgcccataca

SEQ ID NO: 114204 - DNA, 2052 bp, Homo sapiens
ctattccctggcagagctttgaacttgaattgtgagagaagcattcaacattattatcagggggagtgggtaaggaaagtccaaatctctgccagtcccaaatccatacaggtgtcatttcattcaagagaattaaatcggttattggattacacattgataatggatgatacacaaggcttcattccccatctataattttaatctggtaccattattcaaatttaggatataattgccatgggatgtgcccaaacaatccacttttaataaccaataattccatgattttcgcttggggtaatccccttttaatgggtgaaacttcaggtcacaacagtaactatcagttcgaactacacccaggggtttcccgaaagaacaatgggcttcctcccaccccaagcagggttggtataataaaatccccaaataggaaccggggcatcacccctgaaaggaatttcctaacttccacactgttggggggaaattttacccaagatgggcttaaggagtaggactaacttttacacaggcaccatttaaaaaaaaggacatttatttcaggcgtcacgatcaggacttgttacatttaggcaatcaaacaggcatgggggtgcaaaaaaaaaaaaaaaaatctacattaaaaaccctttggttggaaatgctttacaactttcccaccagaaacagaaaacttaaaataacctggttatacaattaggtcacaaaatacaggtcctcggagtttttttgcccatacaccatgagtatttggtctaaatacatgttcttctttggtagcagctaaggccctggcacccactgtgtctggggcgagtttcacaaaatctggttgtaaacctgtaggcttccctggtcacttctctggctcttcatcttctggctaaggctttggtttcctaattaaaatctttctggccactggccataagctaactgggtggctggctgggaaccggccatagcccaccttgtggtttcgtggtttttgcaaaagtattgggcctggcaccggccatagggggccagaggcttctgccctccaaaaatttcctccccttcatggggtccaaaattttgaagaactgatttgttggtattttcccaaaaatcattggtagcttccaccacctcctccaaaattgcttccatcattacccaaatccattatagccatcccccactgccaccatatccacccaccaccacggggtgccacccaaagccaccacgaaccactgaagtttcctccacgaccgaagttgtcattcccaccgaaaccacctccacgaccaccaccaaagtttccagaaccacttcgacctctttggctggatgaagcactagccatctcttgctttgacagggcttttctaacttcacagttgtgggccattcacaggatggcatttctgaatgacagtcttatccacggagtcatggtcgtcaaaagttacaaaggcaaagccccttttcttgccactgcctcggtcagtcatgatttcagtcacttcagtttttccaaactgttcaaaataatctcttcaaaataatctcttaggtgatgttcttcagtgtcttctttaatgccaccaacaaatatctttttcacagttaagtgggcacctggtctttgagaatcttctctggagacagctctctttggttccacaactcttccatccaccttgtgtggccttgcattcatagctgcatccacctcctccacagtggcatatgtgacaaacccaaagcccctagagcgcttggtgtttggatctctcattaccacacagtccgtgagcgttccccattgctcaaaatggctcctcaggctctcatcagttgtttcaaagctcaaccctccaatgaagagcttcctcagctgttcgggctctttaggagactctgacttagacatgacggcagggtgaagagagactttaacgatgcttcttcggcggcgtccacgggcagaaaggagcaagctgacgaacgtatctgccagcctaccttcgccctctc

SEQ ID NO: 114205 - DNA, 255 bp, Homo sapiens
agtggtcactaaccaaaatggaaattcagaaataacagataaagaatttaaaacatggattacaaggaagctcaatgagatccaagacaaggttaaaaacctgcacaaagaaacttctaaagcaatccagaaaaggaagacataggagagatacaactgctttgtcgaggacccaagggaaaaccgagccgtggctgtctgagtcttatcaaaggaaaaacggtaacagtacttttattttcttttaatgagtaa

SEQ ID NO: 114206 - DNA, 624 bp, Homo sapiens
atggacggcttcatcagaagttgtcagcgaggagcatggacggcttcatcagaagttgacgtgacgcttaatttgcccatcacattcggttggatgaggctaggaagaatgtccaggttggagaacatcactttggaaaagaatggagatgagaaggagcacggctcaaagttccaggaactgtcaatatttaccagccttggggtgggagtagcagcgtgggagggggcaggaaacagagcagggccagcctctgaagagcctcgagtgttaagtaccatttgggaatttgttctggggaaacagaaggccactgaagagtttaatgaaagaagtggcattagctggcaagcttgtggagaaatggttagcagggctactgggttagcagggagagttgctgggggtattcggatagtcccggttgggagctctgaggcctttaaacagatcactgggatgaaagtggctacagtcagcccaatgatgatcattactcagaagatcactagtttggcttgcgaaattcatgatgaagatgatttaataccttctctcatcccatctgccgcacatcctctccactcaatcatcaataagataaacagaagctgctgctgctaa

SEQ ID NO: 114207 - DNA, 688 bp, Homo sapiens
acctttttctaggggctctctgtctaatctcataattctgagtaatgagacctggttttatgttgggttgttttgttttaacagtaagctaacagaaaatcatttagcctcactcggctcagagctgccagactgcatctaatgctgagattttgcaaagtcctgggggtcaggaagtagtgtccgatccccttaaacaaagcattagcccctctctgttatgcccttcagggttacagaccccacctcattagcacaaggagatgttagtgtcttttaaaggccaaagtagtttctttattctgggagagtgttttacttttactccagcaggaaaatgccctgccttgacctaagccctgtgtaccttgaacccagcactttttacatcctgagccacggcaatgtggaatgatagccacagtttattacagttcactattaagggaagttatttcttatatttcatgttgagtttttaagaaaacacagagaactagccagcaacttgcattttctttttcctcctagaccctgactaaagcttgaaatgctacatttccaaggtgaagatgtgtgggcacatgtttatggcagattgaaaaggatctcattccatgggaaaaaaaaaaatcctgtcttgttcataaattgacaatgtcaataaattgaaatatggttcactgtt

SEQ ID NO: 114208 - DNA, 517 bp, Homo sapiens
  misc_feature (1)...(517): n = a,t,c or g
gtggtctgatctttcctgcggctgaacccgccccgctgaagccgaccatttgcccggcgtcttggccgattccggcccccgaccgacttccgctttcgctaccagcatgggtggcctactggagacagrgctggactcagctacatccgatactcccagatttgtgccaaaagcagtgagagatgcactgaaagacagaattcaaagcaaatgctgcagaagacttctggcagcaacgtaaaaattgtggaagtaaagaagggataatctaccctgactaaaagcttgaaatgctaccatttccaaggtgaaagatgttttgggcacactgttatgggcagatttggaaaaggatctcattccatgggaaaaaaaaaaaaatcctgttcttgttcataaaattgacaatgtcaataaatttgaaatatggttcnnnnnnnnnnnnnnggggcgccctttttaaagagtaccttgggggcccaacttttcagcgttgattgggaggtgatattctttt

SEQ ID NO: 114209 - DNA, 554 bp, Homo sapiens
gagcggccgcccttttttttttttttttcatgatttgaaatttttattttctgaaatgaaacaattgtacattgtacaaaccatatctactgatggaataaataagtgaaaaattatactgctgtacaacacaccaaaaaaaaaaaaaaaattcttgaaagggggaaaaatttaggccaacggtgaaaaaaggtctttctggcctctaaccagggttcttgggcgataatgaacattccaaacccatgacaccgtttgctaatggggagggtcaccaccctagagggaatcgggtccacagcccttccgggttgtgggtgtaaggtgccagcactttgtggggaatgtgtaggcccgcagctttcccccgactttcacgttttgggggggggaattagggtttgccctgggagccctttgaggccacggggcctggatgttccacggaaggcttttgctcgggatcccccgccccctggctcgaagctgaaaggtcttagattctgtggtgggggggagggcgaggggtgcagggtgggtggggggcaccgctc

SEQ ID NO: 114210 - DNA, 282 bp, Homo sapiens
atgtgggagcaactttggaactgggtaacaggcagaggttggaacagtttggagggctcagaagaagacagaaaaatgtgggaaagtttggaacttcctagagacttgttcaatggctttgaccaaaatgctgataattatatggacgatgaaatccaggctgatgtggtctcagatggagatgaggaacttattgggaactggagcaaagatgactcttgttatgttttagcccctgccctagagatctgtggagcattgaacttgagagtgatgatttag

SEQ ID NO: 114211 - DNA, 774 bp, Homo sapiens
atgcagaacaacgtgtattttcatggattactgacggaaatacacaatgttacaagagcccctttgacaacagtttggttgcttcttataaagcagtgtgaaaacaaactatacaataaattggtatcagtagagtggggcacggctgaaaagatacctgaaaatgtggaagcgactttggaactgggtaacaggcagaggtcgaacagtttggagggcttagaagaagacaggaaaatggacttgctgaatggctttgacaaaaatgctgatagtgataagaacaataaggtccaggttgaggtagtctcagatggagatgaggaacttgctggggactggagcaaagcgcagagaacggaggtggagatgggctccggtgctcccgctgaacagggacggacttacctgcaaccctcaattgcacgattcaaccccacacttctggctgggatgctggtcacatctaaccctgacagagtcattcctagaccccaggactttggaggtgggagtgaggaagaaccagtctctgtaggtgactgtaaatctgaacgaagaacctgggcactgtgggccaccatttcccaccagccaggcagaataagtgtgctgggtgggatgcgtgaagagaggatggagaaatcagaatgtaaagatgtgaagaggttgctcccagggctcccagtaacaatatttgtatgggggattgtggtggcagctgagtctcttaaagctctgcttaaatcagataagccactgaaaagtttctga

SEQ ID NO: 114212 - DNA, 545 bp, Homo sapiens
ccacttttgcttcttcctcattttctcttgctgccaccatgtaagaagtgtctttttgcctcccaccatgattctgaggcctccccagcccatgtggaactttaagtccaattacagttctttttctttacacctctttttcttctcagacttgagtatgtctttatcagcagggtgaaagcagactaatacagtaaattgataccagtggagtgaggtgctccttaaaaaagtacccaaaaatgtggaagcgactttggaactgggtaacaggcagaggttggaacagtttggaaggctcagaagaagacaggaaaatgtgggaaagtttggaacctcctagagacttgttgaatggctttgcccaaaatgctgataatgatatagacaatgaaatccaggctgaggtggtctcagatggagatgaggaacttgttggcaattggagtagaggtgactcttgttgtgttttagcaaagagactggcagcatttgcccctgccctagagatttctggaactttgaacttgagagagatgatttag

SEQ ID NO: 114213 - DNA, 691 bp, Homo sapiens
  misc_feature (1)...(691): n = a,t,c or g
tttttttttttttttttttcaaatccattttaatcctttaaataaccttgtagttaatttcaaaatatgagaaaaaaaaaagtccaaatgtgttcccctttatggggtgattgcccacccatggattgccctccacaccaagccataaatccaatccgccaccgaggagactcggatgcccaaaagagtatggctcggcaaaaaaggcatngcatcagggcctcaccagtcccgaagagtttggtttacggagtctccgagggggtaacaggtgggcagaaaagacatcaggtttaagggaccctcagagcgacagggcgtcggttgctggggtcatgaggcaccttgaaggcgtttcttgatgggtgatttccggtgtcggagagttatttggtcatctgggggagaaccggagcagggatggggcttgagccagggtctgttggtcccatccggggtcaaattttctttcaggcgtatagacttcgatctccccgctcctttgaggtaatactgggagaaacatgattactcttaagccagaggttccaatttggtccgcagctccgtctgtcgctgtctgccgaatatgatcttttagaaggtcatttgcatttaaaattttctggccaataaagccctttatatgatatgtgttgttgctcttgtccacaaccacagtcatgttcat

SEQ ID NO: 114214 - DNA, 371 bp, Homo sapiens
gaatcgttgtacatttcattggctttggcagaatggcatgcaccgtcgcgcgtctctgtcttcatcatcccatggcattctcccatgaagctttaaggaattctaatgcttcaagggcatgcatgacgtggcaaagaagattgagatggagatttctccaatctgtgggtctccaagccccgggagagcggtagaatcctttatacacttcacagtctcacagttttatttctctcacagctgacgtgataaggatgctgctgagggaccagcatgctgcctcatcccaaatatctgccatggcttctcccaggggccagggagctgggtggcagagtcccaggcttttctctcagatcttttctctgaag

SEQ ID NO: 114215 - DNA, 378 bp, Homo sapiens
ccgccctagctgccgtcgccgccgccggggctctatggtctctccctagagctttgccgttggaggcggctgctgcggtcttgtgagtttgaccagcgtcgagcggcagcaacatggaggaattcgactccgaagacttctctacgtcggaggaggacgaggactacgtgccgtcgggaagagaagacaaggtggcctctcattagaagaagaggaagaggaggatgccaattcagaatctgagggaagcagtagtgaggaggaagatgacgctgcagagcaggaaaaaggcattggatcagaggatgccaggaaaaagaaggaggacgaactctgggccagcttcctcaatgatgtgggaccaaaatcaaaagtgcc

SEQ ID NO: 114216 - DNA, 1263 bp, Homo sapiens
agcgctgtcgggggccgccctagctgccgtcgccgccgccggggctctatggtctctccctagagctttgccgttggaggcggctgctgcggtcttgtgagtttgaccagcgtcgagcggcagcaacatggaggaattcgactccgaagacttctctacgtcggaggaggacgaggactacgtgccgtcgggtggagagtatagtgaagatgatgtaaatgaattagtgaaggaagatgaagtggatggtgaagagcagacacagaaaacccaagggaaaaaaagaaaggcccagagcattccagccaggaagagaagacaaggtggcctctcattagaagaagaggaagaggaggatgccaattcagaatctgagggaagcagtagtgaggaggaagatgacgctgcagagcaggaaaaaggcattggatcagaggatgccaggaaaaagaaggaggacaaactctgggccagcttgctcaatgatgtgggaaccaaaatcaaaagtgcccccaagtacacaagttaagaaaggagaagatactgaagaaacaagtgcaagtgaattgttggtaaaagcagaagagctagagaaacctaaagaaacagaaaaagttaaaatcaccaaggtgtttgattttgctggtgaagaagtaagggtaactaaggaagtggatgctacatctaaagaggccaaatccttcttcaagcagaatgagaaagaaaaaccacaggctaatgttccttcagctctgccatcactccctgccgggtcagggttaaaaagatcaagtggcatgagcagccttttggggaaaattggtgccaagaagcagaaaatgagcacccttgagaagtccaaactggactgggagagcttcaaggaggaagaggggattggtgaagaactggccatccataatcgagggaaagaggggtacattgaacggaaagccttcctcgaccgagtggatcacaggcagtttgaaattgagcgagatctcaggctgagcaaaatgaaaccttgatgttacgggctaaatcaagagcagcttaatcctgtttacaatgtgagctttttgtgcgtctgtgaaatgttttacagtgtttctcatcatctgtttcccagcaaggtcttttttttttctacattgaagttctgtctatgtatcttaatcacaaatggtttcattcactttacttttaaaaatttgtccttaaatgaataaataaaataaaagttggtcctgtgagaggataatg

SEQ ID NO: 114217 - DNA, 710 bp, Homo sapiens
ggctcagcgaccttaacaccccagcccaccaagcagctgtgaccacagacaattctttgaggaggatactttctttacttatggaacttaaagtagcagcccagaaaaacttcattctgaaaaggcttttctggaaggaccctccctcgacagtggggattacaattcaagatgagatttgggtgggaacacagaaccagaacatatcaggctaccatctggataaggtgggcactgggaaaatgaatccagatgtagatgctcatggaaaaggcacagtgcccaaaggtgagagtgatctctacataagaattacttttgtggccagtattgtgaaacaagtggtgaggggtctttcagcttcatttcagctgctaagtccctgccaagcagttctgttgtaccagcaattttacatcctcaagagctgtctgcggcacagcaggactctagctgagtatattaggaataactacagagaagaattcagtaccctagaaacagaccttgttatcaaaagcagattgaaaaaatatgcagacaaggcattaatgaaaccttacggatttacaccatatcaagagaagtctccaaaggcagaaatgcacatcaagcctatttcttctgactcatttcctctggagaagcagcttagaataattcaggcaaaaggccacgaaataattgcattggtaacaggaacctggtag

SEQ ID NO: 114218 - DNA, 1090 bp, Homo sapiens
atggtaggtgcaaagggtatacgcatcctgtggcctgggaagggggtgagaggaaggaaagaaaaaggagggtccctcatgaactttgcctgtgaagacgatgcactcagggaaggaaacatgattcctgcccatgggatcaggatcccgccacgtctgaacaccgttgtacagcttaacagtccctcatctgtttttcattttggccctttcagcaaccctgtgagggactcagggtacaataaacaaggagacagatttggtgatggcaaaccttacccaggcccatccgcctcttccctgggcagcattgcagaaactccttcacccttctctcaggccccatcccccctgcagcctccccagaactacagagggaagctgacacaagaaaggcttcatgaaaaggagcccttaaaagaccaaagaactgtgctggagaatgcagaagtttacagggctagagggcacctctggttggagagagtagaaggtcctggaagaagtcatcccttggtccccctcccctgcagtcgcccagtgcccaggcttcccaaccatggggcaggcaatcagccatcaccagctaattatggagcagctgagttgatgagcgactcccaggcccagccaatgtttaacctggagcccacttcaccctattgcccaacacactcttggatcaagtccttgtcacacagttacctggatcccagggagcacacagaatcctctgaagcaggtatcagcaccctcacttacaatggagggaacaaatgcagaagagttatatggctggtagatcccaccacctttgcgggttggccgatgacatcctctctggtggcagacatacccaaaaataccttttgccacaggcttgggactactatcctgtgaatgtcagcaagcctgtcctctacagggatccgtggagaagataaactctacaagaaacagaaaaatgtctacctgtctccagaaccatgcagactccctccccttcaggatctcctagcccctgatgaatgaacagcacttccaagatgcttgagacaccgggcacagctactatcagtcatggcgctcc

SEQ ID NO: 114219 - DNA, 498 bp, Homo sapiens
actccacgcgcacgcatatatattaataaatctatatcccctcacacacacctccacgtgcacacgcacacacatcccccacgggcttctcggtgagtcttcacgctcgaaagcatctccatgtcaccactcgcacactgccacgtccgcacctgtgtaaatcattcgtggggggtcagaggactgcggggaggcgtttctcatcctcgctggggaaaggactcacctggttcccaaagccagtttgctcttcctctacttcctgccagagggtaagggattccaagagaaagacaaggtctttagggcggagaaggggaaatgactcagagaggaggcggccaatctgattaagatatgcccaattctagccctgagggacctcctggcttcctcccagtctcctcctgcaggccagctgttttaacagtaagtcagctcacttgcttctggtgctaccctaatcttaatcaatgggttccagcactgggattttat

SEQ ID NO: 114220 - DNA, 503 bp, Homo sapiens
atgggtgttaaatgtgattctggtgagggctcagacagagacaaacacagtgggattgctgtgtgctctcctccaagacactatggccaactgaagcccaaagccagctgagaggggagtctgggaactgcagggtgcatcatcaacccagtgaaatgcagaccagagcagaggaaggccaggatctgcacagctcattcgctttttatggacttactttccaaggaagaagatgttgtagttacaatgggcactgggttatgatgctggcaaagtcagaggttgcccttgacctcatcaaatttacattgcactgggaaagacagccattggctgcaagtgattttgtaacagctgtcgctgggattgcagaggtgcacaaggtaactgcaaacatggagtcaagtggcctgccttttgtgattacgtgctttgttccaagctctgccctggataccatggcttttgataaacgagagattatcctggcaattactatatga

SEQ ID NO: 114221 - DNA, 2497 bp, Homo sapiens
ttccatcattctatatatgtgatggtgaaagatatgcctggaaaagttttgttttgaaaagtttattttctgcttcgtcttcagttggcaaaagctctcaattctttagcttccagtttcttttctctctttttctttgttaggtaattaaaggtatgtaaacaaattatctcatgtagcaggggattttcatgttgagaggaatcttccgtgtgagttgtttggtcacacaaataaccctttctcaattttaggagtttggattgtcaaatgtaggtttttctcaaagggggcatataactacatattgactgccaagaactatgactgtagcactaatcagcacacatagagccacacaattatttaatttctaactctctgtggtccctagaaaaattcccgttgatgtgcttaggttaaagttctgaagatacccgttgtacccttacttggaaagtttccaatcctaaagtttttatggaaatgccaataatatggtaatcagctagcaatatttctgtgatcaccaacaactctcagtttgatcttaaagtctgaataataaaacaaatcccagcagtaatacatttcttaaacctcacagtgcatgatatatcttttcattctgatcctgtgtttgcaaaaatatacacatgtatatcatagttcctcactttttattcatttgttttcctattacctgtagtaaatatattagttagtacatggaatttatagcatcagctacccccaggaacagcacctgacaggcgggggattttttttcaagttgttctacatttgcataaattatttctattattattcatgtatgttatttatttctgaatcacactagtcctgtgaaagtacaactgaaggcagaaagtgttaggattttgcatctaatgttcattatcatggtattgatggacctaagaaaataaaaattagactaagcccccaaataagctgcatgcatttgtaacatgattagtagatttgaatatatagatgtagtattttgggtatctaggtgttttatcattatgtaaaggaattaaagtaaaggactttgtagttgtttttattaaatatgcatatagtagagtgcaaaaatataggcaaaaataaaaactaaaggtagaaaagcattttagatatgccttaatttagaaactgtgccagggtggccctcgggaatagatgccagggcagagacccagtgcctggggtggtgcctcctcttgtctgccctcatggaaggaagcttccctcacgtggatgtagtgccctcgtagggtgtcatgtggaagtaagtgggaacacggcagtacctgttgaagaaggaagagcagtgtgaagaagtttttcctgtaagaagcagaactgtccagcttgttgccctttgaagcttcccaagaaccgtgtccagaatggaagaaagtcccaagttttccaatgccttcaggcaaccttagcctgtgtaccagaagcaatcccagtgtgggtaataaaaaagccaaggattgcccctgtaataaatttaattaataaaaataaaaaggggattttaaaccaaccccaacaatccccccaacaccctcaaaagccttgttgccattttttgggtatttgaaggtttttatcctgaaggttaaaagggcaagtgtttggtatagaagagcagtatgtgtttaagaaaaggaaaaatattgggttcgcgtagagtgcaaaattagaactagaaagttttatacggattatcattttggagatgtgttaaagtaggttttcactggtaaaatgtattagtgtttctgcattgccatagggcctggttaaaactttctcttaggtttcaggaagactgtcacatacaggagagctttttggcttctgacttataatagaaaatgttttgaaagtaaaaaaaaaaaaaaatctaatttggaaatttgacttgttagtttctgtgtttgaaatcatggttctagaaatgtagaaattgtgtatatcagatactcatctaggctgtgtgaaccagcccaagatgaccaacaatccccacacctctacatctctgtcccctgtatctcttcctttctaccactaaagtgttccctgctacccatcctgggcttgtccacatggtgctctccatcttcctccacatcatgggaccacaggtgtggcctgtctaggcctgggccaccacttcccaacttggacctaggccacattcatctaggaggatggggtcctggatgctggggcacagactgtgcttcatgggcacccattaggaaaatggcctctaggcattctttgtatggcatcttggattttttaaaccaagttcattgttacagaggcatttcagttttgggtgtgggtaccaaggaggaaaaattaatcaaggattattaaaccacattccagggctggctgttttctctccatcttacagggccacaatttttactgtattttt

SEQ ID NO: 114222 - DNA, 444 bp, Homo sapiens
atgacccaaggccgcatcttccgaactcaaacagtgatagaacccaagtggtcctggggaggaatgatcaattggaatcgtctttttcctcctttacgtcagcgacaaaacgtaaactatcagggcggtcggcagtctgagccagcagcgccccctctagaagtttctgaggaacaggttctgctttccactttcctgcctaggaaactcagcttgtgcaacactgctcagctcttcccacaagacttctctgactcctcctggcagctggtggctctcctcgtggcccccaagctatgtcagtttcaccactgcaatgaatcagtgaatcaaatgcgtgccaaggatgtcacgcccttctacctgaaccccaagtctattcatggcattgtccagcccttctacctgaaccccaagtctatccgtggcattgttacaatgtag

SEQ ID NO: 114223 - DNA, 721 bp, Homo sapiens
gagtagacgaatgttccgggagcatcaggagctctgcatccccagctggatgggcaacttctcatcttggacacttgaacccatcttctgttcttcataacccaccaatgaagccagaattgggatgggagccactctggacattcatagacagcacagaatggagctgcaggaccggcgcctgacgttctctcagaccgcacaaggtaggcgacagatactgcaacagcgaagactgatccattggaatcgtctttttcctccttttacgtcagcgacaaaacagtaaacttatcagggcggtcggcagtctgagccagcaggcgccccctctagaagtttctgaggaaacaggttcgccccggcttcatgggagatggggattttccagaggtgatgctttgggaaggccctgaggagctttcaaacaatgacctcaatgtcgccaccaacttcctgctgcagcactgatagtcccagggcaacattgggacccggaccggcagccgagttgacagtgcgttggtccccaccattcagatcagcccggggaccgagcatctctggtgctgatgttcttgtgggaagagggaggttccaccggactccctggcctcgggcggaagactgttgccgttttagtgtggagataagtttgccattacattagcatgtattttctatctatattttttattgggcattttccctaggttggagt

SEQ ID NO: 114224 - DNA, 1318 bp, Homo sapiens
  misc_feature (1)...(1318): n = a,t,c or g
gtcgaccaagacactccttgcttcaggccactccagacagcgtgtgctgaagggtgccctgggtggtcagaaacaagtgcatgaactttctctttgaagtgtttttgtccctgtttcctagagttcttggcattttacacgtctttctttctttttttttttttttcatattaaacttgtagttttattcaggtttgattttaacaaatgtgtcggggagagcagcccgcagggaagcggtaacagcccactggaagcaggggcctcccaagatgcctgaggagnggggcaggtcccctcccactctcctcctcttccctccccatctaaaggggttttggggagagacacatggcatggcgaggggggctggtcccccantcttttggggtgggtgctccagggtaaagggctataggcaacaaggggaccagaccaagggatgagtggggggagggcacaaggaccatttgccagaatccacccgctttctgattccatgattgaatttaaaaaaaaaaaaaaaaaaaaaaaaaaagactaaacccacaagcaagcacccacccccttctcccccaccagggctgtagtgtgaggggagaagaggagggcagcttcatcaaggccacagtttcgctcgctcctggccaagggagctaggtgaagggcaggggctccccgacagattgaggggggtgggaaaaccaaaataaaacgtcaaataaattgtgtaggaggagtccagcttaggaccgggccagagcccaggcccaggctcggggagggggccttttgaggtttcagaggatcactgttgccaaccaccgccacccctggggagccagttcttttgccatgggccttgattgcaacaagctgcctcctctgtcattggcagacagcacccgggatcaggatctcttctccacagtcgtacttctgctcaatctccttgccaaggtctccctcagggagacgaagaaggtcctctcgcacctccctgctgtcctggagcagtgataggtacccatcctggatgccaatcagctggaagtcattcccttttgatgttggggacatccatattatgagttgacgggcagatatcttcatatttcttcccagtaaagatgtcaataccaaccaggtggaccttgacgcggctgtgcttgccagtcttccaagcagacatctcaaagaccttacagggccagcctttgagcaccacgaagccagtgttacataatgctgagcactgcattgggaaggaggccgaggcccctgcatctcttgtctcgaagtccaaatcatctgccat

SEQ ID NO: 114225 - DNA, 685 bp, Homo sapiens
atgaggaggcgcttccttctgcctgtccatggcccacagcaaaggaatgtctgcttctgggggttggatgggggactgctggcagaactggaaaccttcttcagaaccaatcggaactcgaggcgcagcggctgggtattccaggagagcgcatgcgcagacgcatggccacagactgccggtcagtgtcagcaggcgggtccgcaggcccagaccaggccgccgacaccaataagctacaaggaggagctttaccgctgcctgtactactactgcctgcgctacttcccagcctgcggcgtagggcgcagcaagggcctgacgcttagcgagcaggcgctgcgcaccaagcgggctgtcgcctggagggcacgttcaggcagaagctcctcagtggccacaagtccgctagctccggctacagcccttgccgcacactcgcgtcacctgagcctgtgtaggatgccgaaggacctgttcaaagtattttctgtaactccaactgtaacttggttctaggaggagagaatccatgtttggtcaacagaacttttcgccgccacttaagtttactgcttcaatatcttttccttactaattgattgttaattaagtagtgtccaagtgagttagcctttttagggttgattaattaaaagagcagcaagaatggcattttaaaaaa

SEQ ID NO: 114226 - DNA, 590 bp, Homo sapiens
atggtggtcaagattgggttcaactctgaatacagcaaaagcaacaaggtgtctatagcctatgagaagagtgagggggtcatgaatggagaattgctaagaggagacatcaaagggagaatttcaagccagtggatcctggcttgctgggctccgtgctggtgggatctgccgagcaagaccacttggctccctggcttcagccgcctttccaggggcatgaacagttctgtctcagtggtgtcccaggcgtcactggggtatgaaaaaaaactcctgcagctagctcagtgtctgcccaaacgaatgcccggttttgtgcgtgaaacccagggcccttgtggtgtaggcacctgagggaatcctctgggtctgtgggatgaagattgagaaaagcatagtatgtgagccaagtgcatgattcctcatggtacagtccctcacggcttccatgggctcagcaagggagttccctggccccttcccgtataagacgacgccccaatgtgctaaggatccgcctctgtagggtgcaccacctttataaccagtcccagtgagatgaggagcgtggacgcggcctcggtcat

SEQ ID NO: 114227 - DNA, 757 bp, Homo sapiens
  misc_feature (1)...(757): n = a,t,c or g
ttttttttttgcagnttttaaaaggaggatttatttgacaagtttcacttagcgcaatatacctaaaaggaaatcacaatacaatgaaagatttaaatcagggcctcagaatttcatacaaacaccaagaccaaaatcctaagtattggtattgcgtctcaaatttttcccattaacttaaaaaaaaaaaaagcttaaacttacgtgccttacaggttattaaatgaaactagaattaacaaacatgccaaaatgtttcacttttaatagtagacacagctcctatattgttttacaaaaaaataaaagcatgtctttcaacatgcatccaaaacagtgttcaatttaacgtggcaaagggcaacatttaacataattcaactgcttttacctaaatacgcttactgcttaagtacatcctataactaacttgagaaaagctggaacttaagtttaacagttatagtttactcagcttcactggtaccatcctagatgagtatttgatccaaaatacttgcgctttaggcttcataacaattctgatttccacttagagtaagcataaatcacaagcttgtatggcagaaactngtaacctgaagtttctatgcaatgtttgattgaaaatcactggagttttcctgtaaaacttgtcgtatccactcatgctgctctggccaccgtagccgccttcgtaacccccaactcacntgtgtttggntgggcccccgtagctggactggtttgacaagcc

SEQ ID NO: 114228 - DNA, 3353 bp, Homo sapiens
gcttgcggccgccgccatttcctttcctctacgctggctctcggcccgggcccccacggttcggggcgccgacagctgttgctcaggacagctttgggggtccggtcgccggacgcaggaggtgttggagtcgccggggtgggtgcatccgcccggtttttgctccgtgggggggcggtgcgggcccgggcgcgcctcggaggcgaaggacagcttaattggcgctctcagttctggtcctccccgctttgcagtttgtttcgacgccggaccgcgtaagagacgatgatgttgggcacggaaggtggagagggattcgtggtgaaggtccggggcttgccctggtcttgctcggccgatgaagtgcagaggtttttttctgactgcaaaattcaaaatggggctcaaggtattcgtttcatctacaccagagaaggcagaccaagtggcgaggcttttgtttgaacttgaatcagaagatgaagtcaaattggccctgaaaaaagacagagaaactatgggacacagatatgttgaagtattcaagtcaaacaacgttgaaatggattgggtgttgaagcatactggtccaaatagtcctgacacggccaatgatggctttgtacggcttagaggacttccctttggatgtagcaaggaagaaattgttcagttcttctcagggttggaaatcgtgccaaatgggataacattgccggtggacttccaggggaggagtacgggggaggccttcgtgcagtttgcttcacaggaaacccctgaaaaggctctaaagaaactctaggattttttttgggcacaggtatattgaaatctttaagagcagtagagctgaagttagaactcattatgatccaccacgaaagcttatggccatgcagcggccaggtccttatgacagacctggggctggtagagggtataacagcattggcagaggagctggctttgagaggatgaggcgtggtgcttatggtggaggctatggaggctatgatgattacaatggctataatgatggctatggatttgggtcagatagatttggaagagacctcaaatactggtttttcaggaagtgtctgatcacagatacggggatggtggctctactttccagagcacaacaggacactgtgtacacatgcggggattaccttacagagctacttgagaatgacatttataattttttttcaccgctcaaccctgtttagagtacacattgaaattggtcctgcatggcagagtaactggtgaagcagatgtcgagttcgcaactcatgaagatgctgtggcagcttatgtcaaaagacaaagcaaatatgcaacacagatatgtagaactcttcttgaattctacagcaggagcaaaccgtgggtgctttacgaacacccgatatgtagaactcttccttggattctacagcaggagcaagcggtggtgcttacaggtagccaaatgattgggaggcatgggcttgtcaaaccagtccagctacgggggcccagccagccagcagctgagtgggggttacggaggcggctacggtggccagagcagcatgagtggatacgaccaagttttacaggaaaacttccagtgatttttcaatcaaacattgcataggtaaccaaggagcagtgaacagcagctactacagtagttggaagcccgtgcatctatggggcgtgaacggaatggggagggttgtctagcatgtccagtatgagtggtggatggggaatgtaattgatcgatcctgatcactgactcttggtcaacccttttttttttttttttttttttctttaagaaaacttcagtttaacacgtttctgcaatacaagcttgtgatttatgcttactctaagtcggaaatcaggattgttatgaagacttaaggccccagtaatttttggaatacaatactcatcctaggatgtaacagtgaaagctgagtaaactataactgttaaaccttaagttcccagcttttcctccaagttaggttatagggatgtaccttaagccagtaagcgttatttagggtaaaaggcaggttggaatttatggttaaatggttggccccttggccacgttaaattgaaccactggttttgggatgccatgtttgaaaagaccatgccttttaatttttttggtaaaaccaatattaggagctgtgtcctacttattaaaaggtggaaccattttgggccatgtttggttaattctagtttcatttaataacctgtaagggcaccgtaagtttaagctttttttttttttttaagttaatgggaaaaattttgagacggcaatacccaatacttaggattttggtcttggtgtttgtatgaaattctgaggccttgatttaaatctttcattgtattgtgatttccttttaggtatattggcgctaagtggaaacttggtccaataaatcctccttttaaaaactgcactctgtcttggctgtgcttcagtgtcatgtggactgagtcttggtgctctgtgcccacctggggcctagggccacatctctggcttggcagttgaggctgttgcgtaaatgtcttcagtcttccctccagtgcaactgaagccaggcgtggccctgaagaggaaaggacattctataatccactttctgtctaagcccctgatgagtgggtagctgcgttctggccacatccatatgccctcatagcacctggttcctagggaggcactgtttcttccataaaaggggcctcacaggactgtcatcaaggggctctttccccgtctggccgcagccgggatttctgcatcctagctccgtgctccacctcttggcctctgcaggctgccctggggcctccaggcggtctccagcatctgctcactcaggcacactcccactttcaatcagttccctttggctgaagtaagcagagtgagcttctggtgcctgcaaccctagaccctgcctgagacactggccgaagtgctagctgaactggcaggcgcggaagaagggccaaatctgagtgagactaagacacttgttgacgctgatccttgtggagagacagaaggtgatggacagcgggcactgcgtcccacaggcctgaggaagcccttctccgtgcgggccaaagccctgattcttgaccagccctggggagcacatggactccattccacaggggaggcggctgaggctttgaaaggtggcccctcagagggctttctcagggcgaagcagcacctgtgatttatttgggcttagggactggggtgttccagagaagtcaaaggcatgaggtacttttctggcctg

SEQ ID NO: 114229 - DNA, 646 bp, Homo sapiens
gccgccgaggcagccgcagacgcaaaccccgcgccgccccaccgaggcaggggcgcgaggcggcacccgacagcccgcgcccaaagaccaggcccgcaggggcgaagcgggcgccaacccaagggagacccagccacgagagagaggcaccacacaacgagaagatagaatacgactgcaaactggtgcccctgcaagtggccatcttcatcgagaagaccaaaaattgacagatgctgcctgtaccaaacgtggttgtgcaagatgtggccagtggcaccaaccacactctggttgtggactcccagaagcaagtcttctctggggctccagtggctatggctggctgggccatgcagagcagaaggatgagatggtcccccgcctggtgaagctgtttgacttttctgcacgtggggtgtcccagatctatgctggttatacctgcttctttgccatcagtgaagtgggtggtctgtttttctgggggtcaccaacacctcccatgaatctaccgtgtacccgaaagcagtgcaggacctctgtggctggagaatacgcagcctggcttgtggaaagagcagcatcactgtggccaccaatgagagcggggatctatagagtcgcgcagaaggctgcaagctga

SEQ ID NO: 114230 - DNA, 1455 bp, Homo sapiens
atgggcagcctcatgttggccctgcaagtgaaggtcctcttgaacacccttgtaacaggcaggatcacccttggaggtggccatggaagagaaaatcacttggggtgctcctgtaccctccggaaagctctcttccttcgtcttcaccaggctaaatcctacccattgtttaaggttcgagtcaaaagcaacttctcctatgaagtcttcaccgccacctctccccctctcaggtatttcttaatagcaatgcaagaacggactaatacacaaactcaaagcctttgtatgtgccctgagagaatccatccagaagacaagtttgattctatgactctcctgcttgagattggcaagttaacagtttcctattgctatatgatcagaaatgtaatactctcctacggccaaggaggaaagaacatctgcgatgggaaagaaaagttggccagcactgcaagggagctcagcatccagaatggacctcctctgcatgacaaagcccaaaattttcaacaaaagtttcagacccattcaacactgtgcacccctcatagacaggctagagaaaccatgaaaacacataagatgatttcacataaaaattataaaagcttaataggaaatccacatcctctcaagcagctgctcagtggaagaccacctgtgaggcacctcaaaggctcccctgatgccccctcgggaggctttgcagcaggctactgcaggaagcagagtctctttttcaaaagtgtagctcaaaccatttcagtgtttggcagcaaggaggacacaggggagagaaagctgcttggacgtaaaagtaatgtggtcctgattcttcagttagcatcttcacctcatcccctagccttggaaccaatcttccttcaagaaggctttaaggcaaataaggaaggatccaatggagaaagtaggcagaagaaactggaaaacttatctaaggagggcccctcttcaccccataagagcttcgctgacggagggtcacataaggccaaaacagttatggagagagccaggaagcagcatgctaccctcttcataggttcaagacaagacacagagggaacagctaaagtctttaagaacaccaaagccggatctttcctctatttgctgaaagccagtcacagcgataacaagaggaagatgacaagttttatccttatagagaacagcatattcttggggcatcccaacctgaggatctgggttagagggaaatgggctctcaagaaccctccagagctgcagagtgcagggcagccctgtcaaaccagtgagggctgctgtggggtcatagtgggcagagtgggggagagagatcaagagatgaccgctttagggaatgctcatcttaaacaaaaagttggcaaaatggaaaaagaaaacaaagaggagccagaggcggccctgaaaaatgatggctaa

SEQ ID NO: 114231 - DNA, 339 bp, Homo sapiens
atggcctttcaagccaatggatgtgaccacctggagaaaacgaagtccagggctgaggccaggctagtggtaaggcagaagcaggggcagaggatgcagcagaagagacagagagaaagagccagtgaaggaggagaaaaattgaaagaagggagtgtcctggaaggaagtgaagaaggtatttcagaagagtggccaactggcagatgctgcgaggttcagcatcatgtaaaaaggctgacagtgaaatcggccaagattaagggcaatcttgaaagaatgagttcagaccaagagtgggcacaaaaacctgaatgcagggggctgaggggagaatga

SEQ ID NO: 114232 - DNA, 1458 bp, Homo sapiens
atggaaagctcggatttcagcacaggagagcagaggaaggctctggagcagagaaatgggtataatgaaatgcaaagccagctgcttcaggatgatagggaacagttggcatatgaaagatatgcctgcaggatctttgtcattggatttggggtctacctgaataatccaggattatctccacattgtaggatcattgatcatattttaaaagaccgctttatcaacaagtcggtgacagaatcagcaatgaattggccgtctccttcaaagtctgtgctctttaaagtggtcaggactgcaggaggtgacctcaagtcagagctgggtggggaccttggtgtagttgtttctaccactaagttggtggttaggcacctgagtgtctacaagcaggagaagagcaaatctgatgggttacaagtaaaattctgggagcccccagatgagctgggtggagtcaggcaacttccaatagagcagtttccaccaaaacaagattttaccttctctgctaactgggataagaagctctccaaccgcacaggtctgggaaggggagaaaaagaagccaaatccctgctgtctcctccccatctggccccgcccatccaagatcacagccatggaagccactacgagacccatggaaagaaagttcttctgatacagtgggactggaagacagcagacagtgaaatgtgcagagaaacctgcaccggccgccctgcagtcatggagaagcagctgcgggaaaaaatggcagtgtggctcccacttgcgtgtctgctggagacaatttgcctagtgcccatgggctggagtggtgttgacggagtggaaaagttcccgtggccctccgagagggaacccaggttatttaagacaaggacctacaaagtgtctcccagccatcaatatcagaaagactaccagagattatggaccaggaatcttgcttcccacgaggttgcaattcaaggatccattatgactgaaaatgaggaaagagacttggatgctaatcgtttctttacctttcggatcaatattgtcatgggagaggttaggagcaggactctggggcccaccaatctggatttgaaacctagctcctcctggtctagctgtttgctgaagggacatgcggtgggtgtggctttgtttggccgctgtgcactcaaccccttatgggagggggagcacgcagacgggcaggtgcaagagccaaggggagcacttttgggctctggccccactgtagcatctaggggtggatgcctgcaactcccaaagccccagtggatgtattacagtgctcttttagctctgccatccacagacggcttaagtattaaccaactcagtgccctcttggtatccaggtccttgtctggcatccaagaagaattgggtcacacagacaaattgaaggagggcaaatgtgggggattttaa

SEQ ID NO: 114233 - DNA, 828 bp, Homo sapiens
atgctggatgctttcccatacagtcctcactgtacacctgggagccaaacaaactatgagcgtgaaaaccaacctcaatctggcgtggagatgcacctatgttccagaagggtttggatcacacatttatggagagctggtgaggacgagctggattctttcctctcagtgacacttatagggcccttgcttcttttctggatttctccttatcttcatcccaatatcggtcagcacaaggcaaaggcatttggcatctcttctttcccatttgcagactttactgtacgtactttactttacgtacaggatgcgtacgtaccccatcctgctggtagacgtggggcaggttatcagaggagaagtgggggtgtgagggcatccttgggaagctttggatacagtctcagtgccaccatccagtccacacttgcatcattgctggccctgaacttcggcagtgacttcctaactcatctttcagtttctgctcctgctgggtccagggacacgagcccaactagtgcccagctgttcactcgcccaactcacttttgggtcacccacagtaatgacacagtagccaatgccatcggaaaattccagctccgctaccacagaggcaatttcttatttagaaatgcagatacatgtttattagaagaggagtcctcatcccctcagccgcagacctggtactgggcagcacagctggagacttcggtcatgtatgtcttcctctcagagttctttctagatcccttcagtgagctgagtgcctccatttggcgtgttatagttgggttgggtggctgtgcctctccctga

SEQ ID NO: 114234 - DNA, 426 bp, Homo sapiens
atgtctcgccgcaagcaaggcaaaccccagcacttaagcaaacgggaattctcgcctcgggaccgcgaggaggtcaccacgtgctttccctgcccaccccccaccccgcccggtctggtcaccagtccccctgcgccccgagcacgactaggccagccttgttcagccagaaatgaaaacctcctcgaagcagattatgaccccccagaacccatcgtcctaagaaacaccactgccacgcacactcactcacactcagtctctccctccctgtataattctgattctccccagcctttgaagcatcttggagccgtgtcagctgcagagactggagtccggggcatgatggggatgtacctgaaacctagtgagagtccattcctgactctggggaagagccgctcaaagatggggatcctctag

SEQ ID NO: 114235 - DNA, 771 bp, Homo sapiens
  misc_feature (1)...(771): n = a,t,c or g
ctctgggatgtggagagttagtgtgtgtcggtgctttcaggctggattggcctgtagaacctcagtttcagccatgatgggaaaatgctggcgtcagcatcggaagatcattttattgacattgctgaagtggagacaggggacaaactatgggaggtacagtgtgagtctccgactttcacagtggcgtggcaccccaaaaggcctctgctggcatttgcctgtgatgacaaagacggcaaatatgaccagcagccgggaagccggaactgtgaagctgtttgggcttcctaatgattcctgagaggaagttgtagggaagaggaggccccggccagaggtcttccttccatgtggtttaagtttggtctgttctctcggaagttggtgggccaccccttaaatatttgtaagttggtataaattgtaaacgtctctgggtcaggctgcgcattttcgttctttttgcntttgtctgtgtattaagctctttcccattctttggcccccagcatggagttaacttcgcgtgggactcttgcagtgccaagttagtgaccccagcataccttggtcctctggaacctcctggtcttctcctggcttctggggtgcatggtagactttgtggcatttgatacaacttggacaatacctagtttggagggaggggaatggaagggcatggaagtttttttaaataattaaaaaaatatatatataattttgagaattgagcatttaataaactgacttttgttattatggaaa

SEQ ID NO: 114236 - DNA, 972 bp, Homo sapiens
gaacactaaaggggagaacattaatatctgctggagtcctgatgggcagaccattgctgtaggcaacaaggatgatgtggtgacctttattgatgccaagacacaccgttccaaagcagaagagcagttcaagttcgaggtcaacgaaatctcctggaacaatgacaataatatgttcttcctgacaaatggcaatggttgtatcaacatcctcagctacccagaactgaagcctgtgcagtccatcaacgcccatccttccaactgcatctgtatcaagtttgaccccatggggaagtactttgccacaggcaagtgcagatgctttggtcagcctctgggatgtggatgagttagtgtgtgttcggtgcttttccaggctggattggcctgtaagaaccctcagtttcagccatgatgggaaaatgctggcgtcagcatcggaagatcattttattgacattgctgaagtggagacaggggacaaactatggggaggtacagtgtgagtctccgaccttcacaagtggcgtgggcaccccaaaaggcctctgctgggcatttgcctcgttgattgacaaagacgggcaaatatgacagcagccgggaagccggaacctgtgaagctgtttgggcttcctaatgattcttgagaggaggttgtagggagaggaggccccggcagaggtcttccttcatgtggttagtttggtctgttctctcggagttggtgggcaccctaaatatttgtaagttggtataaattgtaaacgtctctggtcaggctgcgcatttcgttcttttgctttgtctgggtgcatggtagactttgtggcatttgatacaacttggacaatacctagtttggagggaggggaatggaagggcatggaagtttttttaaataattaaaaatatatacatataattttgagaattgagcatttaataaactgacttttgttattatgg

SEQ ID NO: 114237 - DNA, 522 bp, Homo sapiens
atgacgtatattcgttgggcaagtgccgctctggttcgtccttactgtcttctcgctgttgtgaaaacatctccctcagaagacaggcaggaagagcatgtgaacgagaatgaagtgtcagatggagctgcagaatggtgctgtgaagaagtgaagaaagagtgcagaggcaacaatagagaggttttctgtgaagggaagcagagatatgctttggaagtgggaggggatgctttacaccctgccatagaatattgggttcccagggagatactacttccaccagcagacataatcaagttccaactaaattttagattcctcatacttgtggaccaacaggtcacggcctgcagtttaaaatctatctcagcagccactatttccaaaaacagaccagccactgcacagcaaggacccaggaaggtccagatgatgtggactggttatgtggccactatttctcctgctaagagttcatggaggaaggccctttcccccacacaaccagatgtcacttga

SEQ ID NO: 114238 - DNA, 505 bp, Homo sapiens
cggacgcgtgggatctctgccgggtgactagctgcttcctttctctctcgcgcgcggtgtggtggcagcaggcgcagcccagcctcgaaatgcagaacgacgccggcgagttcgtggacctgtacgtgccgcggaaatgctccgctagcaatcgcatcatcggtgccaaggaccacgcatccatccagatgaacgtggccgaggttgacaaggtcacaggcaggtttaatggccagtttaaaacttatgctatctgcggggccattccgtaggatgggtgagtcacatgattcctttctccgaatggcaaaggccgatggcatcgtctcaaagtaaggttgggggctcacatttgggcagagtgagtggacttaggactgcttccagaggcgtggtctttaacgttgtccttttcccctggtttctaggaacttttggacttggagagaatcacagattgtggaatatttgtcataaataaataatgaaaaacctaaaaaaaaaa

SEQ ID NO: 114239 - DNA, 592 bp, Homo sapiens
  misc_feature (1)...(592): n = a,t,c or g
ctcgccgaggcccctccttgcccgccgatatctctgccgggtgactagctgcttcctttctctctcgcgcgcggtgtggtggcagcaggcgcagcccacgccctccgaaattgcagaacgacggccggcgcagttcgtcggacctgttacgtgcccgcggaaaaatgctccgctagcaaatcgcatctatcggtggccaaggaccacggcatccatccagatgaacgtgcgccgaggttgacaaggtcacaaggcaggtttaatggccgagtttaagaacttatggctatcctgcgggggccattccgtaggatggggtgagtcagattgattccacctctcccgactgggcaagggccgattggcatccgtctcaaagttctaggaacttttggactggagagaaatcacaggatgtgggaatattttgtcattaaataaataattgaaaacctaaaaaaaaaaaaaaaaaagtcgagggggggcccgggtaccccaatttcgccctatagtgagtcgtatttaccaatttcactgggccgttcgtttttacaaccgtcgttgantggggaaaacccggggggtttacccc

SEQ ID NO: 114240 - DNA, 669 bp, Homo sapiens
atggtgatgtcattcgtcaagccaggagtaaaggagaaggagcaggttaagaagagagatggtgagttcaattctgaacatgcagaattggatgtgcctgccagggacaccaagaggaaattctgggagcccaccaggctcagcagtaccctgcggacatcgagcgaccctttattttctgtccccatcagcattacgatggtttgtgagccaggctccaagtccctgcaaagctgctgtctgacagcagggggcgccaatgtctgggaaaaatctacctgccgcaaaaaatccagacaattggtgctgaggaatgtaaaggttccagggaaaagcccatgtggtgaactgctgcccatcctcaaaaaaaaccagttaaacatccttctcttgcaaccagtggacacagagactttggaagggcctccaggccttggcctggatgcagagggccctgagaagagacacagctggatcctcctgccctgccctgggattgaccacacctctggcttggaggttatgtctgatctttatcacaggaagggaaactcgctccatccccaaggaaagagaaccaaggatgccagaaaggaaagcttcccccagaagatgggacaatttcccttacaaagtctggcagtcatctaccccgaagcagggacctag

SEQ ID NO: 114241 - DNA, 308 bp, Homo sapiens
cggagctccaggtctcctcttcactactctgtgtcctgtgctcctacaggcccagcctctgtggccctgtgacctgcaggtattgggagatccacagctaagacaccaggacccctggaagcctagaaatgggaccattgcaatttagagatgtggccatagaattctctctggaggagtggcattgcctggacactgcacagcggaatctatataggaatgtgatgttagagaactacagtaacctggtcttccttggtattgttgtctctaagccagacctgatcgcccatctggagcaaggaaaa

SEQ ID NO: 114242 - DNA, 414 bp, Homo sapiens
atgtcaatgtttttggcccgagaaggatattttgtcaaacatccagcagaggccagaccttatctgcagattccaggtaggatccacctggctctgcatcctttggtgttacagcaagtggaatacaatcaaaggagagatcccctcatagagactactctagcacattctaaatggtcacagggccacagaggctgggcctgtaggagcacaggacacagagtagtgaagaggagacctggagctccggctgcaccgagagacaaaggacccgccaaaccagaagccgccctgttcggtccggctgcttgcctgattggacgtttccagcccagcgtccctgattggataattcttaaggtcccgccccctcaggacctgagtgacagaagatgtgatcacatgctgggctga

SEQ ID NO: 114243 - DNA, 349 bp, Homo sapiens
gcccacgcaatcattgatttcccttggtggcccattgtcccagggctgtctggagcatgaggccagcagtgcctacgaatggctgtggagtctttgcgcgctgcttgacatgtacactgccgggccgaccaagacgcagacgctccagcccatgggccaacctaacctgaaaggagatggaggcttcaccagagaatcaaccggtttcatgcaacttcctgctgacttcatctccagcctcatttgtcatgaaacatgggttccaggaaagcccagtactgctatgcacagaggccgatactgggcagagccgattatgcttccaaagggtagcggctttcggaaggag

SEQ ID NO: 114244 - DNA, 378 bp, Homo sapiens
atgcctgagaacaaactggaactgatggagacaaactggaacccaagtctgttttcaatcttatctaaacctgatgctgtagatgacctgcagaagaatctgtttccctttcctatggagctatacattcatttggcccatgactcacagaagctaacagaacagaggcaagtcaatagatttaagcagtatctaggaagcaaaactgacagtacctcattggatcgtcagcgccactgggttggggtctccatgaccgagctggtcttggcagaaacctgtaaaggagccaaaaggcaattagaaggagaaaagaactgcaccccaagaattctatatccaggcacactggaagtaaaacataatcaagaatgttaa

SEQ ID NO: 114245 - DNA, 431 bp, Homo sapiens
caatgtcggagaaaaatacccctcttgttttgagtggagaaaatcagaagaaagggagagagatcggggtgtgccgaaagcaaagccaatgtgatcatcaagataataatagccatacattaagattcagctcctactcctcctcctctggtccagtcactctggtctccttccattcccacaactatccaagcaaagtcctgcttcagggaaatttggacacagagacatgtacagagagaagacaaagagaaatttggacacagagacatgaagggaaatgtggacacagagacatgtacagagagaagacgaagagaaaatacagagagaaggccatctacaagctaagaaaaggacctgaaacagatccttcctcacagccctcggaaagaaccaaccctgccaacaccttgatctcagactcctag

SEQ ID NO: 114246 - DNA, 315 bp, Homo sapiens
tcgtacaggagaattgaagtagatagaaccgacctgattactcggtctgactcagatcacgtagacttaacgtgaacaaacgaaccttaatagcggctgcaccattggatgtcctgatccaacatcgagtcgtaaccctaatgtgatatgactctagaataggatgcgctgttatcctaggtaacttgtccgttggtcaagttatggatcaattgagtatagtagttcgctttgactggtgaagtcttagcatgtactgctcggaggttgggtttctgctccgaggtcgccccaaccgaaatttttaatgcaggc

SEQ ID NO: 114247 - DNA, 576 bp, Homo sapiens
atgacagcacaatcctattctagagtccaaatcgacaatagggtttacgacctcgatgttggatcaggtcatcctaatggtgtaactgctattaaaggttcgtttgttcgacaattgaagtcctacatgatcggccagtctgcatgtccactagaagaaaagggacctgggttcttcatcagcccatccttagatcttagtgcacatatgcacctaagagagcactgcagtaactgcaaacgcttctgttttgattgtggtaattggaacaatcagggcacaaactgcaaggtcactggcaagggtagcagcaggcatgattcctcccttagtaattttaaagcagcagatttcaaaagggaaaaccaagcagatgaaagtgagcagatttgttcttcagcacataactctgccaccatcatgcctctcttcttcatgtggtttctcatccaccatcagtctaaaccagccagcagcagaccctacatacatgatcagctcagaaaaaacatccagctgagctcagtccagactgccagtttgcagatatgtaggctaaaagaggagctgctttaa

SEQ ID NO: 114248 - DNA, 1364 bp, Homo sapiens
  misc_feature (1)...(1364): n = a,t,c or g
aggtttaaaaaaangtaaaaaggaactcggcaaatccttaccccgccttgtttaccaaaaacatcaccttctagcatcaccagtatttagaggcaccgcctgcccaagtgacacatgtttaaacggccggcggtaccctaaccgtgcaaagggtagcataatcacttgttccttaattagggacctgtatgaatggctccacgagggttcagctgtctcttactttttaaccagtgaaatttgacctgcccgtgaagaggcgggcataacacagcaagacgagaagaccctatggagctttaatttattaatgcaaacagtacctaacaaaccctgttcttgggtgggttttgggtataatactaagttgagatggataccattttccgggggaaagccgctttgtgaaagtaggcccttaatttctcttggtccttttccgtaccaggggagggaattttgaaagtagattagaaaccgaacctgggattactcccggtctgaactcaagatcaacgtaggacttttaacccgttgaaacaaacgaaccctttaaatagcgggatctgcacccatcggggatgtccctgatccaacatcggaggtcggtaaacccctaaattgttgatatggacatctttagaataggatttgcgcttgttaatcccctaggggtaaccttgttccgttggtcaagttattgggatccaattggagtaaaagtagttacgactttgactgggtgaagtccttagcaatgtactgctcggaaggttggggtttctgcttccgaggttcgccccaacccgaaattttttaaatgcaaggtttggtaagttttaggaccctgtggggttttgttaggtacttgtttgcattaataaattaaaagcctccaatagggtcttctcggtcttgcttgtgtcaatggcccggcctctttcacggggcagggtcaattttcactggttaaaaagtaagagacagcttgaacccctcgtgggagccatttcatacagggtccctaattaagggaacaagtgattaatggctacccttggcacggntaggggtacccgcggccgttaaaacatgttgtcactgggcagggggggccctttaatactggtgatgctagaggtgatgttttttggtaaacaaggcggggtaagatttgccgagttccttttactttttttaacctttccttatgagcatgcctgtgttgggttgacatgtgagggtaataatgacttgttggttgattgtagatattgggctgttaattgtcagttcagtgttttaatctgacgcaggcttatgcggaggagaatgtttgcatgttacttatactaacattagtt

SEQ ID NO: 114249 - DNA, 532 bp, Homo sapiens
ccccattacactcacacgcacgctcacactttttatttgccataatgaaccgtccagcccctgtggagatctcctatgagaacatgcgttttctgataactcacaaccctaccaatgctactctcaacaagttcacagaggaacttaagaagtatggagcggcgactttggttcgagtttgtgatgctacatatgataaagctccagttgaaaaagaaggaatccacgttctagattggccatttgatgatggagctccaccccctaatcagatagtagatgattggttaaacctgttaaaaaccaaatttcgtgaagagccaggttgctgtgttgcagtgcattgtgttgcaggattgggaagaaaaagaaggggagcgttcaattccaaacagctgctttatttggagaaataccgacctaagatgcgattacgcttcagagataccaatgggcattgctgtgttcagtagaaggaaatgtaaacgaaggctgacttgattgtgccatttagagggaactcttggtacct

SEQ ID NO: 114250 - DNA, 249 bp, Homo sapiens
atgaaccgtccagcccctgtggagatctcctatgagaacatgcgttttctgataactcacaaccctaccaatgctactctcaacaagttcacagaggaacttaagaagtatggagtgacgactttggttcgagtttgtgatgctacatatgataaagctccagttgaaaaagaaggaatccacgttctaaaaaagaaggggagcgttcaattccaaacagctgctttatttggagaaataccgacctaa

SEQ ID NO: 114251 - DNA, 546 bp, Homo sapiens
ctactcttctaagaattcccgcagcactgagagcgtgatatgagtgccaccaaatagccacaggtatatcacagacacgcttagtctttccttcacccaagtttctggacccttgtatactattattacaacgaagtagtctgggggtgcctttacatcaaaggtggttagaatatctgaagtacatacagaatggggtttagtgtcagacacctaggcaagtacattatttccaccacatactatgtgccattaggcaaattactaaatggctctgaacctgtttcctcattggtaagagggaaataatggcagctacacctcatagggtttttgtatttgtgaccttaagcacaaacactgctcgttgcataatgtgtaacattggttgttataatgctaagcgcatatcgaggtcaataaatgttaattatcattactgaatggttgaccaaaaaaacctgtcaataaatgtagaaagaacacagagaaaacagtactagatatctctacaggccccaaatttcacaaaatgttcttgaaaaa

SEQ ID NO: 114252 - DNA, 1570 bp, Homo sapiens
atctaaaagtgcccaggtgggcttaaggctgccagactgcacgcacatctacagcaacaagggcttctattccatctacaacttggatcgggggaaaagggagatgtaggagaggaaggaaaaaagaggggaaaaatataccaccaaccctcccccacaaaaaaagggaaaaaaaaaatcccaccacagggagatctatgtgccaagcataatggaagagtgtgctccccaaacagtaggttttgcacaggctaatgttctgctggttttccttagagacctattttgaaaaagtttaaaaagacaggagatttcaaaataattcaatcctggcagaaattcaaactccaaaactaggagcaaaatcatccttcactgaattaattccttttctctttctcttttcttaaacattttattcattttatagagggatttcttttttgtttgcttttgttccaatcattaggagagtggttgaggagtactgaatccatcactactttgatgacacaggtaatattccagattcacatttccaggtaccaagagttccctctaaatggcacaatcaagtcagccttcgtttacatttccttctactgaacacagcaatgcccattggtatctctgaagcgtatcgcaatcttaggtcggtatttctccaaataaagcagctgtttggaattgaacgctccccttcttttttgtcttataaactgaaactgcatcttcgttacttcattcccacattccaatccaaagcaagtgccaacccagcaccggtgccccttccccaaccctgccaacacaatgcactgccaacacagcaaccgtggctcttacacgaaaatttggttttttaaacaggtttaaacccaatccatcctactatctgaattaagggggtggagctcccatcatccaaatggcccaatcctagaacgtggaatccctcctttttccaaactggagcctttatccatatgtagccatccacaaactccgaacccaaagtccgtcactcccatacttccttaagttccctctgtgaacttgttgagagtagcattggtagggttgtgagttatcagaaaacgcatgttcttcataggagatctccacaggggctgaacggcccatttaggaaaataaaaaagtgtgagcgtgcgtgtgagtgtgatggggaaagtgaaaaaaaaaaaatcaataaatcttgaaactgtttcacagcagaaaacattaaaaagaccactaaaatgcatattaatcaatcagtgttttctctattcaacttgtttattccttatgaagcttctctcttcaagataagcaaagtatttagaatccacttgaatccaaattcaatttgggcctcaatttctgcagatggataccttcggactccaaaaaatccaactacatacaaaacttaagcagcctttactacatttaggcactagtgagacaagttaaaagtgtaggtcactttccacttgtttacttgatgcttaattttactggagtcattaaaagaaatatgcttgcaattaaaaaaaaaaaaaaaaac

SEQ ID NO: 114253 - DNA, 1804 bp, Homo sapiens
ctactactactaaatttgcggccgcgtcgaattttttttttccctttctctctttttttttttttgaatcaaaagcagggtttatttttctatcaaatcccccaatccatgttccacccaatggatgaagggtcgaatcaagccccacatagactcttggtaaaaacaattctaactttctaaaaaaaaaaaaaaagccaacccactttttttttttttttcaaaaagctcccaggcctttgggaacagctgaaacaaattcatatcctgactaggtcctgttttctcttaggtatttgggatggtccctctctggctgccacttctgcacagatgagggcactgataatgcgcctcgcaggtcactcacaatcctaggctccacatcactccagggtttgataacctagaaccacgttatggatttccattttataatggccctaagaacaggctgaaaagatctggtattaaattctggcaaatcctttattgaggtgccaacctatttgctggggcacaggctagggcactggattctgctggttctgagaaacataaatggtacccatagggaaggtgtttccctccctaagtggccaggaggaatgtttgcctgggaagttaaagtgaaccaattccctccctctgccttacacccacgtgggggtaggtcccagaactcaggccttgggaacatatgctgtgctctcttcctacaggcgctgtgtggaagaacccaatagccagttgttaaatagctgtggaatttcctccacaatccacatagtgatgtgtctccaaggagctctggggtcatgaggcccaatgtatgaaatcttcactgaaggttcgcatgaagatcactatggtggggcaccaggatctcaggtaccgtgcagaagaagtacacataggaaaacggtcctcccatctcggccttcccggtaaaattcaccagttgcttcactccgaggtggaataagggagacgttagtagtcacatatgtactgaccactgtgttcatgtacttgaatctggctggacaaggctgggtcactgcccaccgtgtaaaaagttggagttccctgaattttccagggtggcccatgatggtgaagaattaacaagggaagtcttgccttattaaatgtgactttcacccactttgatgccgtcatcatcccacaaggactgaatgcggaaacaggaagaaaaccaccaaaccagatgcccaggagacaaagcaggatggacaggaggacatattgcttagttcgctgagggcgcaatctctgatcactgtgtgggatcaaagccaccaactcatttacttgctcttgttgggattgtaggctgtcccctggaacgtgagacaggtgatgctatctctcccggtgaattccacatatgggaactgagcaatggcttcttcctgctctcgttcagccagcaaaccgtccctgtcatcttcttgctttcgccagcctcttcggtcggcggagcggcacgcactcagcgcgcaggcgccaaataccaagcccgccaggagaacgcgggcgcgcgctcgcgcgtgcgctcttcgcggctccggaggccttcccaatatcgcagctgtctggctccctcggttccggtagagggcggcagagagcgccggggagccgcgacccttgcgttttggcactgtgagcagcacatcaatgccgctctgctcctctggaagctggctcacaggtgcacctggaacagccaataagtgtcctggctgcagttggagggatgaatcttcctccataaatc

SEQ ID NO: 114254 - DNA, 375 bp, Homo sapiens
ggcacgagttaaaaccgagggcccgcaggggtccccgcggccgccgcgatgcagaaatacgagaaactggaaaagattggggaaggcacctacggaactgtgttcaaggccaaaaaccgggagactcatgagatcgtggctctgaaacgggtgaggctggatgacgatgatgagggtgtgccgagttccgccctccgggagatctgcctactcaaggagctgaagcacaagaacatcgtcaggcttcatgacgtcctgcacagcgacaagaagctgactttggtttttgaattctgtgaccaggacctgaagaagtattttgacagttgcaatggtgacctcgatcctgagattgtaaagtcattcctcttccag

SEQ ID NO: 114255 - DNA, 638 bp, Homo sapiens
  misc_feature (1)...(638): n = a,t,c or g
ccctcttcggccgcgggtcgttcggccccctggcctttgcctctcccctggtccgcgcggnaggacaaatcctcttccgcggtcccttctcgctcttccgcgggggctgggagctgccgcacgcctacaagcgcagcgaccagcggggcgccctagcagcgcgctgggggcgcacagtgctgctgctggccgccctgaacctggcgctgagcccgctggtgctggcctggcaggttctgcacgtcttctatagccacgtggagctgctgcggcgcgagcctggcgcgctgggggcgcgcggctggtcccgcctggcgcgcttgcagctgcgccacttcaacgagctgccgcacgagctgcgcgcgcgcctggcccgcgcctaccgccccgccgccgccttcctgcgcaccgctgcgccccccgcgcccctgcgcacgctgctggcccgccagctcgttttcttcgcgggcgcactcttcgccgcgctgcttgtgctcaccgtctacgacgaggacgtgctagccgtggagcacgtgctcaccgccatgaccgcgctcggggtcaccgccaccgtcgccagtttctcgtatttctgcatcgcggcggccgcggggacccctgcgggccctcggttttaa

SEQ ID NO: 114256 - DNA, 475 bp, Homo sapiens
caaaagagtttaataaattttgtagggccttccttaagaaggatgttgtaagaggttggcccacttaaggaattatttgaatgcctagtgtgatcttctgggcagagttatctattggtgtagattgaatgccttggcccactgttaagaactaagggggctccatattttggattagtagatataaggagaacatggctgccagctccaagaccttgtggtggaacaataaaccgggttccgttaatcataatctgagtaccaggtgccaaaggtgtactggtattgatgactattttttgctgaatacaaggttcactgaactgactcccgactagactagttacattggatggtgccgaatccgtgtgaatggtagtgccacctggagcagaactgtaactgggggtttttactaaagcttgctgatttggcagagaagcaaaattggacgtattagttattttctcgtgcc

SEQ ID NO: 114257 - DNA, 357 bp, Homo sapiens
atggctgccagctccaagaccttgtgggggaacaataaaccggcttccgttaatcataatctgagtaccaagcgccaaatgtgtactggcattgatgactatttttcctcgcaggtgctgggattacaggtatccaatgtccccagcatcagtagattgccaactccctctccttgccacactccagccagtgttatgctggtgctgtcatacccatcccagattactgtagcagaatgcagttgttctttagttgtgagcaatccctatggggttataaaacctccagtgtttggtagttgggccatcttatggaaagggagctggcaatctgcagctgccgtggacattggatga

SEQ ID NO: 114258 - DNA, 693 bp, Homo sapiens
atggatgaagtcaaccggaaaagatatggaaaacggtttattaaacagcctgctttcgactctaaagatcccctgcccggtgcctctggctgccctcccgaagacccctgtgaggacaggcagaaatggtttgttagggaacccagcgagctgacagggctttccctgctgcttcctctacccctgtgttttgctcagctctctcaagtgactcagttccaggaaaagtatatccagttagtgaggcagagggccctggagggagccctaggaaacaccattatctacaagtcccagacagcaaaaggtactccacaagaaacagaaggaacttccagtggtagcaaaagcaatgtgaggagtgggaagagagttccaagtggcaggatggtcaacattcgcattttccagcagaagtcacgtaagaatagacaagagtccattggatttggcaatcctgatgtcagggtgaatcttggaagcaaccagtaccttttctctgtcatagtggatcctaaagaaatgccctgcttctgtttgcgccatgatgttgatgccctactctggcaaccacactccagcaaacaagatgatatgtgggagcacatcgcaactttcaatgctttaggccatcaaactccagtcatacaaccagagcctgggacgatggtcccttctgctgggaacacttaa

SEQ ID NO: 114259 - DNA, 385 bp, Homo sapiens
gggcttaggtgcccgagctactgagggtctaagtccgggcagccgaagagtgtggtaggtaacggtcctcagcgcaagggtcatttcgtcgctgggaagggacggccctcgcccgcggtgatggtggttagcaagatgaacaaagatgcgcagatgagagcagcgattaaccaaaagttgatagaaactggagaaagagaacgcctcaaagagttgctgagagctaaattaattgaatgtggctggaaggatcagttgaaggcacactgtaaagataatgattttaaatgatatgatttgttttttgcttttgcataagaggtaattaaagaaaaaggactaggaacacgttactgttgatgacttggtggctgaaatcactcca

SEQ ID NO: 114260 - DNA, 488 bp, Homo sapiens
gctcgacgttctagctttctgtgtgcttaggtgtccgagctactgagggtctaagtccgggcagccgaagagtgtggtaggtaacggtcctcagcgcaagggtcatttcgtcgctgggaagggacggccctcgcccgcggtgatggtggtgagctatgcccgtggtcctcagggccgggacccgggcccagcccaggctcctttcgatgtactgtctttcgttagcgtccccgacccgcgctcgcgggcctgtagggctctccgacagggcgtgctaccggagttggcctgaaaccaggcctcgctttgttttctggctcctcctctcccgcctctcccgctgttttccgccctgttctattttccctaagaatgtctgaactgggagggataccctaccgcccttgttttaccagagagaaaactgagggcttttaagaattaagtgacttggccaaggtcactatccgtattttaggagccaagag

SEQ ID NO: 114261 - DNA, 1944 bp, Homo sapiens
ctagctttctgtgtgcttaggtgcccgagctactgagggtctaagttcgggcagccgaagagtgtggtaggttaacggtcctcagcgcaagggtcatttcgtcgctgggaagggacggccctcgccccgcggtgatggtggttagcaagaatgaacaaagatgcgcagatgagagcagcggattaacccaaaagttgatagaaactggagaaaagagaaccgcctcaaagagttgctgagagcctaaattaattggaatgtgggctggaaggatccagttgaaggcaccacctgtaaaggagggtaattaaagacaaaggacttagaacaccgttacttgtttgattgactttggtggcctgaaaatcacttccaaaaaggcaggagccctgggtacctgacagtgtaaaagaaggagctccttacaaaggattaaggaacattcctttgcctccagcatgccaagccctttaagattgaattagattgtgttgttgtggttttattttctgaaaagtaaaacttgccagtaaattagaaaacaatttcccaaaataaaaatccttttttgtatgatggtatacgagttttgagtaatgatgtatacattgtattgattttaaaaacccccctgtgttattttaataaatatctcatgaatgagtttgaagtttgcttggattttgaaatgaatgggactttgtctttattactaattcaccaaatttgttgagcgcaaaagcaattaatgtagtttaagtatttagtatgtacagttctctgtgttaacagctgagaagtaagcaaccttttctgactgcatatgggtgtattcctcttttgagtccccataatattttataaattgtaatgccccatcttgtactacagttgtcttattcgtattgtttataaactttgagggttaggactgggtcttactcatctttaatgtgccttccttatgcttcaaagaatttaccatcttaatgggaagagaacatttgcaagttggctccattaccaagctcccttccacatactctaactcatctgaactttgaatgcagaatctcttaaattgcaaccccacatactaaggtccaagaaagaacttaatgggaattaatctccaacccattagctttaccctgacatcaggattgccaaatccaatggactcttgtcatattcttacgtgacttcatgcatggaaaatgcgaatgttgaccatcctgccacttggaactctcttcccactcctcacattgcttttgctaccactggaagttccttctgtttcttgtggagtaccttttgctgtctgggacttgtagataatggtgtttccctagggctccctcccagggccctctgcctcactaactggatatacttttccctgagcaaatcccagggaaacttgcgtcagaccgtgacttcaaatacaggttgataaatgctaaactgtctccaaaccagactttcatcctaggcctccacacccagacacccaactgctatggatcaactttttagaatatcctcacttcaaactgaccttacctaaaataatgactttttcccccaataattgcccctgctatattccttatttctgaatggtacctcctaggctatataggattatctgagggagcttactggaaatgctggattctggaaggataagggggcatggctttaagattctgtatttctggcgagtacccaactggtgctcatgctgctgattgagaaccacttctgaatatagcaaggctgtaaattatccactacgtgccctcgtaattgtcttagttcaagcccagattattgtagtagacttagtatttctttgccttagttgatctgtgacccctccaatatctattccacactgttgcctaagtggccttagtaaaattcaagtctggttatttt

SEQ ID NO: 114262 - DNA, 387 bp, Homo sapiens
atgaaggatgtttttaagtttcaggaattccgtttgctcatcatattctgttttgccatagctaggacacaggctgaagaaatgtcaacaattgggagttttgaaggattccaggctgtgtctctgaagcaagagggagatgaccaaccctctgagactgaccacctatcgatggaggaagaggacccgatgccaagacagatttcaaggcagtcaagtgtgaccgaatcaactctttaccccaatccttatcatcagccttatatctcacggaagtactttgctacacggccgggggccattgagactgccatggaagacttgaaaggtcacgtagctgagacttctggagagaccattcaaggcttctggctcttgacaaagtga

SEQ ID NO: 114263 - DNA, 381 bp, Homo sapiens
  misc_feature (1)...(381): n = a,t,c or g
cggacgcgtgggcggacgcgtgggctaaagtcagaattactagaggtaaaaataactagtttgttacagtattactcagagaagtcagggagaaaacttgtaccatgattcaaatatttgcatggtgtggaggaaaaattgctccttggtactctgttatttatacatactgtttttagttaaataattttttttgttgttaaagggtatatttgtaacaagggtacaacctgaaggaccagcatcaaaattactgcagccaggtgataaaattattcaggtaattaaaataaatcnnnnnnnnnnncattttataacactctaatgttttcacagtttaaaatgttttcactttaactttgaaaattgtgggtgggaggc

SEQ ID NO: 114264 - DNA, 1854 bp, Homo sapiens
  misc_feature (1)...(1854): n = a,t,c or g
ggcacgagcacagaataactggaagtgtacatggtaattttatagatctttttctttatggaatcctgtatttcttggcattagacgtcaacttcagattttgagaaggaatgtatttgctaagagtaatacagaaatgcttgttatgatatttctgtattaataacaagccatgctcaaaatgtggtttcatccagtttgaccattaagccctcagcactcagggacatgactaaaggcactcacatggaagaacggcagttcataacactgggaataaacaagtggaacagcgggaatcaggcaatgcctttgagtaatggacagatgggccagcctctcaggcctcaggcaaattatagtcaaatacatcacccccctcaggcatctgtggcaaggcatccctctagagaacaactaattgattacttgatgctgaaagtggcccaccagcctccatatacacagccccattgttctcctagacaaggccatgaactggcaaaacaagagattcgagtgagggttgaaaaggatccagaacttggatttagcatatcaggtggtgtcgggggtagaggaaacccattcagacctgatgatgatggatatatttgtaacaagggtacaacctgaaggaccagcatcaaaattactgcagccaggtgataaaattattcaggctaatggctacagttttataaatattgaacatggacaagcagtgtccttgctaaaaactttccagaatacagttgaactcatcattgtacgagaagtttcctcataagcactgtggacaaaaaaagcggggaagacagcaagatttattggaagatacttacaggggaaattaatattttgactatttttatatataaagaagaactcaaaaaattatgttcaaatttgtacattaatgaaataatggaacttgtggttagagggaaagaaccactgtacagaatattaaagggagactgttgaattcataccatataaaacttgttaggtttttaaacatagcaatcaaggctacaaaaacaaacctgtgttgtttttgtatagattgtaggtttatttttggatttcatatacatgactgaactgtgtgcaaggcaatagttagccttgattttagcccagagacagatggcagagctatctctctcatagcttttatgcccttatttttattcaactggtattaatgtttttctcctgaaactactttttttgatgtgggcaagagatttgaagtgttggcttttgctatgtgcatattgaattgaagagtgagtaggtgaaggtggtgctggtgggttcactttccaaggccagactaaaacagttattttctattaaaaatctgggaaggcaaagaatgggggatggggagagctacgtgggtagtatgttttttattagggagaataatggcaattaaaatatgttaatgtccttttttattaaaggcaaaaaagacaatatattgcatttatgagctcggcaggatctgttcttgtcatagccattgactatacatttgctactggtgattcagtttttaattttttaagtcacaggaaatttttaactctactgtagatgcatgtccatgcattttctgtgttatggaaatccactgatttttttttttttttcaaatggtggtacttgcaatctgttttataattagtgctccattttaatcttatttataatttttattttaagcagctattgttacattaatggcctagtttaatantttgttgtctgattccataatgtacttaggttatgtaatcctctttgattttgttggcctgcatttccttgttaagaaaatgt

SEQ ID NO: 114265 - DNA, 855 bp, Homo sapiens
atgaccaccgggccacgatcgtcaagccgacccacgcgacaccataacaataacgcgactatcaccttcaccttccacaatacgaacgaagtcgacaaggaccgtttgatgagaaaggagagagaagttctgatggctcataacctcacaccagggcagcttcagctgtttcattccctcatgttagctcccagatccctggcgatgctggaatctgagagcctggaaggctcacacagtcgacaaaagaaaacgtttttcttgggagatgggcagaagctgaaggactggcatgacaaggaggccatccggagggacgctcagcgcgtagcaggagctgaggtttatgtttgccttttgttccttcaaactgaattttggcaacagcatgtcaagaacaagattgaggggctgtttgtttgtgccagctgcctttgcttccaccagaagctgcactggggactgcgtagccagagaacggaagcgaggcagtttggcccagactcactggacctgcaaatgggagtcagccagctggctctgagtgggcctgccctctgcacctcctgccaagtgagcgtgaacagtggctggctggtgggctggcccactttccctactccctgggagccctgctgggctgcttggcaactgagcgtggaggcccctccagagcacagggctgatggcacaacagagacccaactgctaaagtgcctgggatctgcagtttccggtgcaaaccccaggttaggtggtcagtttctcctatgcaaagattatccatggatatccaggatatccagagatatcctgacctgctttctccattccatagttttagcttcacaatga

SEQ ID NO: 114266 - DNA, 718 bp, Homo sapiens
atgcaaaaagaagatgaggagcctacacaggcatctgataagcagcagccaaaattacccagccgcaagtatgtctttatagctacacaaaacaaaccaagacagtctaatccttttggtggtggcagtggcccatctggaacagctgctgaaggaacgccagttgcagtggaggaggcgaagccgggctgtgcgctccatggagactgcaggagccgggaacagggactacctgcctgtggaaaggagctacccactttgggttccctgagagctgttctgttgctcaatgaaggtcctctctgccttggtcaccctccagttgtctgcatacctcattcttcctggacatgggacaagaactccagatccaccaaatggcgggactgaaagagccataacacaaacagggccgaaacacacagccccccatttgccatgttgtgggagatgaagagagaagagctgtaccctttggggagcccagacctaggggctccctaagccagggctgtgacaccctctttggggctctatagttcctggtgtctccaagcttctgggtgccactgtgttccccttgtccagacgtgagtgcctgcagcagaagctgtgtgtggtacatctggtccagctgtagccttgcacagagctggcacctgtgccggcacccggagctgtccaccccaccacagcagctggcatgcctggctgtgtc

SEQ ID NO: 114267 - DNA, 367 bp, Homo sapiens
cgtctgagggctgggaggggcccacggtctgtccccaccgggtccagctcagcctggctggggggctgctgtgggtgacacagaccaggcgcaggctttggccctccaggaccggcagggatgtgccgttcccgaggttttccaggactgtcctgtttgcttgggaaaccatcactctcaggttctctggaggatcccacgcagctccagccccagggttctggggccccaggggtgggacgaggagaggactctgtcctgcaggacccagctcagcgtggcagggggctggctgtcagcagcacagaggagccgcaggaactggcctttctgaacttccagatatatgacgtttccctctcgtgcc

SEQ ID NO: 114268 - DNA, 570 bp, Homo sapiens
tgttcgcgagctcgcatgcactaataacggacgccgggcgctagaatttgccatttcccggttcgacgatttagggctactgacactgctgctgacctcgctggtgggcggactggacagggtctaccccatcttatggctactggttcaaagcagtgactgagacaaccaagggtgctcctgtggccacaaaccaccagagtcgagaggtggaaatgagcacccggggccgattccagctcactggggatcccgccaaggggaactgctccttggtgatcagagacgcgcagatgcaggatgagtcacagtacttctttcgggtggagagaggaagctatgtgagatataatttcatgaacgatgggttctttctaaaagtaacagccctgactcagaagcctgatgtctacatccccgagaccctggagcccgggcagccggtgacgggcatctgtgcgtttaactgcgcctttgaggaatgtccacccccttctttctcctggacgggggctgccctctcctcccaaggaaccaaaccaacgacctcccacttttcagggctcagct

SEQ ID NO: 114269 - DNA, 2631 bp, Homo sapiens
atggacaccccacaggctctgccactcttcctactcctggcctccttggtagggatcctcaccctcagagcctcttctggacttcagcaaaccaacttctcctctgccttctcttcagactcaaagagctcttcccaggggctgggtgtggaagttccctccatcaaacctcccagctggaaagttccagatcagttcctggattcaaaagcctctgctggaatctctgattccagctggtttcctgaggccctgagttccaacatgtctgggtccttctggtcaaatgtttctgctgagggccaagatttgagcccggtttcacccttctctgaaacccctggttctgaagaccatggacagcgcgggctctggggcccgaggctccgcggtgccgcctgctctgaaggtggagcgccccctgggggcggcgtcctgaactgcagcacagcccgaggtgggaggaacccaggaccaggtccggagctcaaaggacacaaagacgctgccctgactcagaagcctgatgtctacatccccgagaccctggagcccgggcagccggtgacggtcatctgtgtgtttaactgggcctttgaggaatgtccacccccttctttctcctggacgggggctgccctctcctcccaaggaaccaaaccaacgacctcccacttctcagtgctcagcttcacgcccagaccccaggaccacaacaccgacctcacctgccatgtggacttctccagaaagggtgtgagcgtacagaggaccgtccgactccgtgtggcctgtgagtgtggcctgggagggtggggtgtgcagacagccccggctatcagagatgccgagaaagcagggcgactaccgcacccggatatggaaattcgaggacgggttgagcaacgtgttggttatacaattgaacaaattaatcatatgcgtgatgtgtttggtacgcgattgcgacgtgctgaagacgtatttccaccggtgatcggggttgctgcccataaaggtggcgtttacaaaacctcagtttctgttcatcttgctcaggatctggctctgaaggggctacgtgttttgctcgtggaagaggccccccgagaggtgctgctgcatccgctggtggcagagacacggttgggggaggcagaggtggcactggaggcctctggttgtcccccaccctcacgggcatcctgggcccgggaagggaggcccctggctccaggaggcgggagtcgcctgcggctcagtcaagatgggcggaaactccacatcggcaacttcagcctggattgggacctgggaaattactccgtgctgtgcagtggggcgctgggtgctggcggtgaccagatcaccctcattgaacggagtaacctcggtgtgcggttgtatgcctgctgtggattgctgctgtgtcctgcttatccacaacattttgcgcacggttatgtggacaaaatacctggttacccaggccgtgccggcacgttaaccgggctgcatccgatgcaagtgtgtcgctgtcgacgtcaggcaccgtgtatgaaatctaacaatgcgctcatcgtcatcctcggcaccgtcaccctggatgctgtaggcataggcttggttatgccggtactgccgggcctcttgcgggatatcgtccattccgacagcatcgccagtcactatggcgtgctgctagcgctatatgcgttgatgcaatttctatgcgcacccgttctcggagcactgtccgaccgctttggccgccgcccagtcctgctcgcttcgctacttggagccactatcgactacgcgatcatggcgaccacacccctccagccccaggggtctagggccccagggatgggacgaggagaggactctgttctgcaggacccagctcagtgtggcagggggctggctgtcagcagcacagaggagccgcaggaactggcctttttgggcttccagccccgcccccggccccgcccaccttcccggccccgccccgcccgaagacgcacgcaggagccgcatggaggcgctggacgctcccagtcggttggcggcgcgacacgtatagttgccgtaatgccgggcgctcacgttggcaaagagaagcatcgagcggcccctcggtgcgactctaaaagaccccccatccgagtgaagcctgacaggaccggtgtggtcacggatggtgtgaagcactccatgaaccccttctgtgagatcgcggtggaggaggctgtgcggctcaaggagaagaagctggtgaaggaggtcatcgccgtcagctgtgggcctgcacagtgccaggggacgccccccacgatcacctggatgggggcctccgtgtcctccctggaccccactatcactcgctcctcgatgctcagcctcatcccacagccccaggaccatggcaccagcctcacctgtcaggtgaccttgcctggggccggtgtgaccatgaccagggctgtccgactcaacatatcctatcctcctaagaaattgaccatgaactggcttccaggggatgggcccaggaaaaatggagtcctttccctgggggctggagaagcagagccttcactcaaggggaaagcacggacgggctag

SEQ ID NO: 114270 - DNA, 732 bp, Homo sapiens
agacctcgtcatcagcatttcacgtgacaacacgccagccctggagccccagccccagggaaatgtcccatacctggcaagcccaaaaaggccagttcctgcggctcctctgtgctgctgacagccagccccctgccacactgagctgggtcctgcagaacagagtcctctcctcgtcccatccctggggccctagacccctggggctggagctgcccggggtgaaggctggggattcagggcgctacacctgccgagcggagaacaggcttggctcccaacagcgagccctggacctctctgtgcagaatcctccagagaacctgagagtgatggtttcccaagcaaacaggacagtcctggaaaaccttgggaacggaacgtctctcccagtactggagggccaaagcctgtgcctggtctgtgtcacacacagcagccccccagccaggctgagctggacccagaggggacaggttctgagcccctcccagccctcagaccccgggggtcctggagctggctcgtgggttcaagtggagcacgaaggagagttcacctgccacgctcggcacccactggggctccccgcaggactctcctaccctctccgtgcactataagaagggactcatctcaacggcattctccaacggagcgtttctgggaatcggcatcacggctcttcttttcctctgcctggccctgatcatcatgaaagattctaccgag

SEQ ID NO: 114271 - DNA, 656 bp, Homo sapiens
  misc_feature (1)...(656): n = a,t,c or g
ttgttacgcagctcctatgcactagtaacggccgacgggcgctggaattcgcccttttcccgggtcgacgatttcgtcctgtggccacaaaccaccagagtcgagaggtggaaatgagcacccggggccgattccagctcactggggatcccgccaaggggaactgctccttggtgatcagagacgcgcagatgcaggatgagtcacagtacttctttcgggtggagagaggaagctatgtgagatataatttcatgaacgatgggttctttctaaaagtaacaggtatggaatggggtgggaacccctgcctctcacactggggagggaccctggggacagcctatgggctgagcagagagggctctcagggacccctgcagcacaagaatctcccaccacggtctctgtcccagccctgactcagaagcctgatgtctacatccccgagaccctggagcccgggcagccggtgacggtcatctgtgtgtttaactgggcctttgaggaatgtccacccccttctttctcctggacgggggctgccctctcctcccaaggaaccaaaccaacgacctcccacttctcagtgctcagcttcacgcccagaccccaggaccacaacaccgacctcacctgncatgtggacttctcag

SEQ ID NO: 114272 - DNA, 1859 bp, Homo sapiens
ctctgcttttccgatgacccagggcccagagggagagcccccaccccactaccccacccccagccaggcccccaggatagacacaagcctgccctctcctcctacacagggagctctggaaggaccagctcaacaagcccaaggccaggctgggcccccaggagacccagaggacaactgggcaaggtgggccggagagtgtgggggaaggcaaaggagttctgtgagctcagcgtctgaagctcatttcatgcatcaggccccagggctcagcttccgccttcggcttccccttctgccaagagccctgagccactcacagcacgaccagagaacaggcctgtctcaggcaggccctgcgcctcctattctgtagatgttactgccactgctgctgtcctcgctgctgggggggtcccaggctatggatgggagattctggatacgagtgcaggagtcagtgatggtgccggagggcctgtgcatctctgtgccctgctctttctcctacccccgacaagactggacagggtctaccccagcttatggctactggttcaaagcagtgactgagacaaccaagggtgcttcttgtggccccaaaccccccagagtcgagaggtggaaatgagcacccggggccgattccagctcactggggatcccgccaaggggaactgctccttggtgatcagagacgtgcagatgcaggatgagtcacagtacttctttcgggtggagagaggaagctatgtgagatataatttcatgaacgatcgggttctttctaaaagtaacagccctgactcagaagcctgatgtctacatccccgagaccctggagcccgggcagccggtgacggtcatctgtgtgtttaactgggcctttgaggaatgtccacccccttctttctcctggacgggggctgccctctcctcccaaggaaccaaaccaacgacctcccacttctcagtgctcagcttcacgcccagaccccaggaccacaacaccgacctcacctgccatgtggacttctccagaaagggtgtgagcgcacagaggaccgtccgactccgtgtggcctccctggagccccagccccagggaaatgtcccatacctggaagcccaaaaaggccagttcctgcggctcctctgtgctgctgacagccagccccctgccacactgagctgggtcctgcagaacagagtcctctcctcgtcccatccctggggccctagacccctggggctggagctgcccggggtgaaggctggggattcagggcgctacacctgccgagcggagaacaggcttggctcccagcagcgagccctggacctctctgtgcagttgtccaggatggttccctttacccagagggaagcccctggtccgtctagagccggtcccctgtctccatttcagatcctccagagaacctgagagtgatggtttcccaagcaaacaggacagctgcctggattcgacctggaccctctacttgctggcctgtgtggtgctgagcagcttacccgggctcctctgtgacctgggtagagccagccctcttgaaagtcactctgaggcctgcagagacaggatgggtccagttcccagtgcacagcaggtgccagcagcccctccctctgtccctcctgagctgctgaatgtcatctctacaggacatcctggatactctcgaaaggccagcatgggaatccaacctcattgttcctatctcagccctgccccaaatcctagagagaaatggaaacatctcaatacactatcatacaaatatgttcacagcagctgtcttgataattgccacaaccaaaacagtatcaatgaatag

SEQ ID NO: 114273 - DNA, 400 bp, Homo sapiens; identical to SEQ ID NO: 112913
  misc_feature (1)...(400): n = a,t,c or g

SEQ ID NO: 114274 - DNA, 1032 bp, Homo sapiens
atggtcaaccccaccaggttcttagacatcatcgtggatggtgagctcttgggacgtgtctcctttgagctgtttgcagacaagattccaaagacagcagaaaatttttgtgctctaatcattggagagaaaggatttggttataaaggttcctactttcacagaattgttcctgggtttatgtgtcagggtggtgacttcacacagcataatggcactggtggcaagtccatctacgggaagaaatttgatgatgagaacttcgtcctaaattatacaggtcctggcatcttgtccgtggagaatgtgctggacccaacacaaatggttcccagtttttcatctgcactgccatgtctgagtggttggatggcatgcaggtggtctttggcaagggaaggaaggcctactccctctgctggcctcaccgatgacttacctcatgatgagaccgagaccatcatccctgagggtgtgacttcctgttcatcacagcttctctggccagattgccgtatctgtctttttgcaattgtcacaattggtgctcctacatccaggcaagagttgaaagaagagcatggggtgttgaaagccacagatttctggcacaacatgaagaataactcaatgatttgccgaaaagaagagaaatatattatcccttcagttcctaaacttacttgttttctcatcttcaagaacgaaaatgcacatgtacaaggctggtattcatcccggtgtactggtatggctgcgaaggtgtcaactgcactaacaagccatttaaagctgctgtcacaccctttaagtaccttccgtctggactggcagttctccagctctggtgtgatggaccttccaaccttacagcagttaagtttctttctccctccctgctgcttgcactcttgcaatttggatgttgagttacatgatctcctcaagtctcttaacctcttcctccaagctttccagtcccctttccctttgagagtaaaggggacaagaaccccatttaagctgaactaa

SEQ ID NO: 114275 - DNA, 454 bp, Homo sapiens
tttcgtgcagccgcagaagcggcagcggcggcggcgcggtgcaggcaccgttccggggagaggcaccatgagcggatcacagaacaatgacaaaagacaatttctgctggagcgactgctggatgcagtgaaacagtgccagatccgctttggagggagaaaggagattgcctcggattccgacagcagggtcacctgtctgtgtgcccagtttgaagccgtcctgcagcatggcttgaagaggagtcgaggattggcactcacagcggcagcgatcaagcaggcagcgggctttgccagcaaaaccgaaacagcactttttatgaagactggtcttttgtgatggatgaagaaaggtccagtatgcttcctaccatggcagcaggtaagcctggcccagaccagggtgcagggccttgtgacacttggcagaggggctgccttggggcagttc

SEQ ID NO: 114276 - DNA, 911 bp, Homo sapiens
aaaaagagcagaaggaagacaagctcctccaagctacagccaggcagagcagtacctgtttcggttttgctggcaaagcccgctgcctgcttgatcgctgccgctgtgagtgccaatcctcgactcctcttcaagccatgctgcaggacggcttcaaactgggcacacagacagcaccatgcctggttgctacagagaatgtgaccgacatggtctctccagtcagggaactcaagatcatgaacctgatgtacattttggtgggagatgcatctcaggagatttcgtataaacggtcatttgaatccagcacaagacttaagaaggtgcgcaccccagccttgaagctgccacttaaaggaaacccttatctcccacttgtacagaagcaagccttgtgggaaaacattgctaacagaaaaacaaaagcacacagccatctgtgcattatccaggaagctgctcctgcctgtcggcagctgactgtctaccacacacagctcttcacgggcgataattacaacttctataagcctgtgctgaatggatccctttggacgagccccagagttgtcatgactggctatgacgttacaacagcacaaatcaagcctcatatgagtcatctggttgtgcggaatgacaatttactgagggcaagtgttccttccacacaccacactgtcatcctggtggggaccagggcaagctcactgaacaattgggaacctgagccgtgcttgcaaaactgggaaggacagaacaggccccacatacagagtcttgcagggaacaaggacatcatcaacctgttgtcactgcagaattcattctcagttacactggcgggcatctgggatgcccggcgctaccagcccaatgatgactttagtgttgctgctattgtttaa

SEQ ID NO: 114277 - DNA, 1131 bp, Homo sapiens
ggcacgagggacattgattggacgacatatacctgtgtgctaggatttcaagtatttggtgtctggccagaaggatctgatgggacagatatcaatgcactggtgcgatcccacaatagaaaggtgatagctgttgccgatgacttttgtaaagtccatctgtttcagtatccctgctccaaagcaaaggctcccagtcacaagtacagtgcccacagcagccatgtcaccaatgtcagttttactcacaatgacagtcacctgatatcaactggtggaaaagacatgagcatcattcagtggaaacttgtggaaaaagttatctttgcctcagaatgagactgtaagcggatactactctaaccaaagcccccgtctcttccactgaaagtgtcatccaatctaatactcccacaccgcctccttctcagcccttaaatgagacagctgaagaggaaagtagaataagcagttctcccacacttctggagaacaggcctggaacaaactgtgggagccaagttgaagaccacagcgaggaggagagtgaagagggcagcggagaccttggtggagcctctttatgaagagccatgcaacgagataagcaaggagcaggccaaagccacccttctggaggaccagcaagacccttcgccctcgtcctaacaccctggcttcagtgcaactcttttccttcagctgcatgtgattttgtggtaaagttcaggtaacagggtgggcagtgatggagaatcactgttgattgagattttggtttccatcgtcgatttagttttgcttcmaataagtcttattttcaagcccctcaaaatacagccaaactttaaagtttttagtttggtctttatttgaaattaaccaaacttaatactagggagaagactgaatcatttaatggatgtcttcacaaattactgtgtacctaagtggtgtgatgtaaatactggaaacaaaaacagcagttgcattgattttgaaaacaaacccccttgttatctgaacatgttttcttcaggaacaaccagaggtatcacaaacactgttactcatctactgggctcagactgtactacttttttttttttttttttcctgaaaaagaaacca

SEQ ID NO: 114278 - DNA, 523 bp, Homo sapiens
atgaagaaccttgcttctgcttcagttttggagcagtggagatccaagaccaaggctctagcagattcgatgtctggtgaggtcctgcttcctcatacacggtgccttcttgctatgtaccacaagttcctgcaagtgaaatggcagatgtatgagtcacttcataagatgggaacaggaagacatcctgttgatgccaagccattttcagttcagtgatgagaatctaccccccgcaagaaagtgtgtttgtatcttcctcctttccccagtgcacagggggtcagcacctggctctttcccttgtgagaactcctccacttggtttagcgcccaggaaatcagccctgtctttcatttgcatctgctatgttatcagaagatcctctttgccaaagatactttctgtctgaactatttttaaaaaaatattttcccttggtctgttcttctttagaataatattgtactctgtgatgttttaggattttttttcatggagaatttttgtatggctcccgac

SEQ ID NO: 114279 - DNA, 434 bp, Homo sapiens
  misc_feature (1)...(434): n = a,t,c or g
gacagagacgctggctaggcgccctccccactgttaccaacatgaagctgctcgcagaaacntgtgctactcctcaccatctgcagccttgaaggagctttggttcggagacaggcaaaggagccatgtgtggagagcctggtttctcagtacttccagaccgtgactgactatggcaaggacctgatggagaaggtcaagagcccagagcttcaggccgaggcaaagtcttactttgaaaagtcaaaggagcagctgacacccctggatccaaggaaggctgggaacgggaactggtttaactttctttgagcttattttcgtgggaactttgggaacacagcctgcccacccagttgaaagttttcccaggaccatttgtctttcccaaccccagctgggccttttaggaacaacccattggccagtccttg

SEQ ID NO: 114280 - DNA, 632 bp, Homo sapiens
cgcactagtgcttgtagcatagatgtcgactgactgaaccaacatgatgtttcatgctgctatttattgtagcaaagaagtgggtaagggaacaggaaacctcctaggaactggcccaatgggttgttccctaaaaggcccagcctggggtttggaaagaccaaatggtcctgggaacaacttcaactgggttgggcaggcttgttgttcccaaaagttcccacggaaaaatagctcaaagaaagttaaaccaagttcccgttcccaagccttccttgaatcaaggggtgtcaagctgctccctttgaacttttcaaaagtaaagactttgcctcaggcctgaaagctctggggttcttggaccttctcccatcaggtccttgccataagtcagtcacgggtctgggaagtacttgaggaaaccaggggctcttccacacatgggctcccttttgccttgtcttcccgaacccaaagcttcctttcaaggctttcaagatggggttagggagtaggcacagtttcttgccgagcagttttcatgtttgggtaaccagtgggggaggggcggcctaagcaagcgtcctctggtccttggtgtctgtcagtcgacatctatgctacaatcccgg

SEQ ID NO: 114281 - DNA, 374 bp, Homo sapiens
ggggcagctgtgtcaatgatgcagctatgcgggggctgagatggactctaggagctgttccctgagattgagagctcatcacaatttctccacatctgtagaggctgcagaagaactgaaggagcagctgaggtcagtgcctctttacagctcttatgttcacaacacaatcagagttgtttattctggcattcaacatggtctgactctgctgaaacatctcctttctaaggctttccagaagggctgtttaggaaaaggaggaaatggagttggtgctgtgtgacttctaatgggataatccaacagcaagtgattagtcacctatagaatctaaagctaagcaattaggatttggcgttatttctcgtgcc

SEQ ID NO: 114282 - DNA, 1628 bp, Homo sapiens
gggagtgaagatgcttaaatattttaaaatttttatttgaatgaaatcattgtaataatcattaaagtgatttgaaatagaatgatctctgtgaaaggaagtttatagcatcactatttataggagagaaagcagcagaggtatgcatctggaagtgaatataacattgtaaaatcagcccacattaaataccaaaaaagtaagaaccatcaaaatgcagcattatttacaggattaaaaagtgtgaacaggaccaaagttaaactttcttatgtgtgaattttgacctgctatgttgttagcaaaaagctttagtgtttgtataaaatgagtgtgtacccttgatcccaaccaccaccagattcaagacacaaactggacaatggattccttcccctattttacagctttattactggatttcccccctaaaaagagactcaagtgtggagctgactcatctatagattaaggaatcacaaagtaccatagtcacttaacaaatgcaaaaaaaaaaaaaaaaagcaattgttttacctttcaactggctcgatcgttatgtacaattctatcacaaaaagcaatagctgtgcattccatgagctgattatatcaaccctctagaattttagaaacgagcacatctaagcatatggatactctcttaccttacaaagtaaaagcattttctattttaaaatttttatttctgtgtaaaacaaagaattcctagaggtcaaataatataccaaacttaaagcactattaagtcatgaaacaaagaagattctgaggtagaagtcaagcaataataatcccacagtttcaggtattcccagcaaccatccgcatttccgcaaggtaaggacctattttttttaaagtctcaacttcccaaaaaatcaataatccattctgtaaaattcagatgtaaaacctatgacccaacagaagacaccccaaacttttcctcatggtaacagagtaaatgctttttcttaaaagctggcaaacattttctatcagtagtaacccgtaaggagggcccgctgggttgtaacccataaatgtccaaaattgctggggggtaggtaagggttcttgtctgtggttgcggggtagttgttacccccagggatcgtccatgccactggattgggatcgattgtcaacttggccaccccccatcttgttgtccctggcttctggaactggtctggttgtcttggaaaccggattgcctctggtttcttttggttcccaacccaggtctgctatttccatttcctcaacaatttggagggagacttcaggaggggcgtttcagggtattcctgatacttcctttgtcattttctgtgaaatctactagcaaacatctcttcaaactttggaacagcttcgggcagtgtcagtcattctgaaaatcccaaaggtttgaggcagctgtactgcttaatgtttaggttgtttaaatccgccaagggctatgtcaatccagctcaggccgaaccccgccggcgagacactgagaagcccaggagaggtggcctctggtccactaaaacgtgaaactccagaccactccagttctccaatgtaaccgagcgcctgtcctctaaaatccg

SEQ ID NO: 114283 - DNA, 720 bp, Homo sapiens
atgctctcccctctcggcatcttcacagcccagctggggtgctcagccaggctcctgctggatgtggaagggctgagaaaggcacaaaccagcttgtctcctttttcctcatatccacccaaccagctcaacgttctcattccttttatcctctgtggtcgtgagaacattccagagaaagcaagtgaatgcacacaagacaatcgtcagttatttctggaagcagcaaattccaacagatctcttgcttttaactttagggctataaattccaatttactgaccaatttgaagtgtaataaattatattccagtggcagagaccaagtgacagccagttggacctgccccaaacgcactcacactgagatgcagacgcacaccgtggcgactcgaggggctctgcgaaggcctgctgccagtgatctagcagaaagaaagaggagagataaagataaaaatgaggcccaaggggtagaaatgaggataatgatgtacggtcatcagttatgcaaaacattaagagttactttatcaaaaggtcagactgcaggtctaccaggtttctgcagcgcctctccaccttctcttcatggctctgatgccacgaatacctcacaagcttgctccaagtcacattcagtgggacttgctttcactttccaggacgaggttcctctgtacaacccacttcagtgtggaaccttcagcaaggaatga

SEQ ID NO: 114284 - DNA, 430 bp, Homo sapiens
atggcacgttcatttcctggagctgctataacaaattactacaaactcagtggcttaaaacagcagaaattaattctctcgcagttgtggacgctggaggttggaaatcaaggtgaaggcaaggccacactccctctgaagatgctagggatgagcccatcctggcctcttccagcttctggtgttccttgggttgcggccgcatcgctccagcttctgcttccttgttcaaacagctttctccatgggtctccgtcctctcttcttataggactgtcagtcattgcttttcgggcctacctcatcttaactgaattacacctgcaaagactccatttccaaataaggtcccattcacaggaagtgaatgatgaatgtgagagagttcatacgggtttccaaacaggattgtcctggctgcaagacccag

SEQ ID NO: 114285 - DNA, 656 bp, Homo sapiens
ctgtggacgctggaggttggaaatcaaggtgaaggcaaggccacactccctctgaagatgctagggatgagcccatcctggcctcttccagcttatggtgttccttgggttgcggccgcatcgctccagcttctgcttccttgttcaaacagctttctccatgggtctccgtcctctcttcttataggactgtcagtcattgcttttcgggcctacctcatcttaactgaattacacctgcaaagactccatttccaaataaggtcccattcacaggtaggaggggtcaggacttgagcctgtgttcttgggaggacagaattcaagccaccatgatggatatgatctctattataaattattcagtatagagactctggcctaggaatctgggaaccaccgaatgattaaaagctgctctgtaaagtttacaaaatctgtctctccaggaagtgaatgatgaatgtgagagagttcatacgggtttccaaacaggattgtcctggctgcaagacccaggttcaggctcctccgtgactatctcccgtccaaacaaggaacggtcccagtggttaaaagaactggagaagggggaagaaatcaatgaagctgtcccaagattatcccaccatatgagccaatgcaacacagagtga

SEQ ID NO: 114286 - DNA, 925 bp, Homo sapiens
gcggccgcggagaggcacttaaaagccccgtgttaccctagaccttaaaaaaaaaaaaaaaaaaactgcgtgtttccacccccgtcggcctgcagtggaagggcccgagcagaaccaacgggggaggggacgctgagcgcgccgtgtttctcctcccgtctgcctggagtagaacggcccgggcggaaccaacgggcagccgcgggggcgttgtgggccgcggcgcgtttccccgggctccgtggctctggggcactgaggagcggcgcccgcggggcagcgaggagcccgatgcagggttctgcgcgtcatttccggtcccgcgggcgccccgtgaagcccacctggatccgccagcgctgtgccactccccagtgccgagctccgagctgtctccgggggcttgcggcccggccctttcaccgggcacttcttaggccccgcccgccagcgtccctttgttgtgaaggcgccggggcctagcgctatgcctgcggcggagactgcatcaggctctcggtgggttctgcgtgcggggtgctctgctcggtgatcggtgcttggtgctgcgtgctcggtgctcggtgctgggtgctgggtgccggtactgatgctgagtgtgaggcagtattttagaaggggtcgctgaggcaggagtaggaaggctttccactccactcacgcattttcagtgtaggcgaatcgtaaaacggagggcagaacgaaaatgagcggatctgggagtgcaggctgcgcttcgtccacatcgataacagatgtttcctggtgaagatgtgtagggcgcagcgggtcacctggtcgggggagggcacagggcgtccctccacggggtgcctttggcgttgggcacttgtgtggtctccagcttccgggttttggaagcggagtgtcccctgcagcctga

SEQ ID NO: 114287 - DNA, 930 bp, Homo sapiens
gcggccgcggagaggcacttaaaagccccgtgttaccctagaccttaaaaaaaaaaaaaaaaaaactgcgtgtttccacccccgtcggcctgcagtggaagggcccgagcagaaccaacgggggaggggacgctgagcgcgccgtgtttctcctcccgtctgcctggagtagaacggcccgggcggaaccaacgggcagccgcgggggcgttgtgggccgcggcgcgtttccccgggctccgtggctctggggcactgaggagcggcgcccgcggggcagcgaggagcccgatgcagggttctgcgcgtcatttccggtcccgcgggcgccccgtgaagcccacctggatccgccagcgctgtgccactccccagtgccgagctccgagctgtctccgggggcttgcggcccggccctttcaccgggcacttcttaggccccgcccgccagcgtccctttgttgtgaaggcgccggggcctagcgctatgcctgcggcggagactgcatcaggctctcggtgggttctgcgtgcggggtgctctgctcggtgatcggtgcttggtgctgcgtgctcggtgctcggtgctgggtgctgggtgccggtactgatgctgagtgtgcgggagtattttagaaggggtcgctgaggcaggagtaggaaggctttccactccactcacgcattttcagtgtaggcgaatcgtaaaacggagggcagaacgaaaatgagcggatctgggagtgcaggctgcgcttcgtccacatcgataacagatgtttcctggtgaagatgtgtagggcgcagcgggtcacctggtcgggggagggcacagggcgtccctccacggggtgcctttggcgttgggcacttgtgtggtctccagcttccgggttttggaagcggagtgtcccctgcagcctgagcctc

SEQ ID NO: 114288 - DNA, 455 bp, Homo sapiens
  misc_feature (1)...(455): n = a,t,c or g
gaagagccgnntcctnnacccaggggactgctatctgcgagnaacnnnnnnnctagngcaggcaggcttcatacgctattgtcctgcccgttagagcagcctgcgggttcagaatggattttggaagagggagtcaccactggacctccaaggaagccacgtgcagacatctacaaccttcgatctcctgacgagtttattgttggccaaaaccaggctttgattgaaccaggatgaatgcgggtgttggaagtagaatatatatatacatataaaattggttgggagccacgtgtaccagtgtgtgttgatcttggcttgattcagtctgccttgnnnnnnnnnnnnnnnnnnnnnnnnnnnnnnnnnnnnnnnnnnnnnnnnnnnnnnnnnnnnnnnnnnnnnnnnnnnnnnnnnnnnnnnnnnnnnnnnnnnnnnnnnnnnnnnnnnnngct

SEQ ID NO: 114289 - DNA, 716 bp, Homo sapiens
ccggagtgtggtacttctcctagttgcagtcaggcttcatacgctattgtcctgcccgtaagttcccgttttgtgtgtggtgagtggaaactccatgttcttcgttggagacctctggtcctcccttcccttctttgtgccgtcgtctctgcggccagccctaatctccttctcgtggcttctccgtctctgaccccaaataggccttaagggcgtgggagaaatgagtttctggagctggaaaagccactgccttctgcacgggcctgagaagcccttggctggtgtaaatgatgacttcacttttttccccatcagatcgacaatgctgacgtcttatattttgccagttagttctgatacatcggcctcaaaaggcccggccttgttcgtttctgaccgtgggaagatggcggttaacgccctttatttgttggttcacaggttagagcagccagcgggtacagaatggattttggaagagggagtcaccactggacctccaaggaagccacgtgcagacatctacaaccttcgatctcctgacgaggtgtcggacttcaggggacttcaggaaacagcagcgagagagtttggcatagcttattgccccaggttgtggggtcttggaagagagctgccatacaacttaatgcctgatcggctggaggacgatccgagtggaaagggaacaatctggggctctggcttaccac

SEQ ID NO: 114290 - DNA, 550 bp, Homo sapiens
tttttttttttgatttaaaaggattttattttctttatgccaggtaggcagttagaaatttccaaaggtcttaaccaatgacattcttggaaagtggggcaccagccttttaaaactcagggctatgtaatacagtaaccttgtggaactgggttcagcccagatcttcaactttcattgaaagcacaggggtctgtcctttttctttccaagagggctcctctcataatcccatcgcccagtttcaattttatatgtatatatatatatattctacttccaacacccgcattcaccctggttcaatcaaaagcctggttttggccaacaatataactcgtcaggagatccgaaaggttgtagatgtctgcacgtggcttccttgggaggtccagtgggtgacttcccctcttccaaaaatcccattctgtagcccgctggctgctctaaccacacacaaaacggggacttacgggcaggacaatagcgtatgaagcctgactgcaactaggagaagtaccacactccgagcagaattccaccacacgga

SEQ ID NO: 114291 - DNA, 626 bp, Homo sapiens
agcgcagtgcggtggaatttcccggagtgtggcacttctcctagttgcagtcaggcttcatacgctattgtcctgcccgtaagttcccgttttgtgtgtggttagagcagcccagcggtgtacagaaatggattttggaagagggagtcacccactggacctccaaggaagcccacgtgcagacatcttacaaccttcggatctccctgacgagtttattgttggcccaaaacccaggctttgattcgaaccagggatgaatgcggggtgttggaagtagaatatatatatacatataaaaattgggtttgggagccacgtgtaccacgtgtgtgttgatcttggctttgattccagtctgcctttgtaaccagaaactggccgatgggaattattgaggagggagccctctggggaaaggaaaagggacagaccctgttgcttttcatggaaagttgaaggttcttggcttgaaccagtttccacaaggttactggtatacatagcctgagtttaaaaaggctgtgcccactttcaagaaatgtcattgttagactttgaaattttctaaactgcctaccctggcataaagaaaataaaaaccttttaaatcaaaaaaaaaaaaa

SEQ ID NO: 114292 - DNA, 654 bp, Homo sapiens
atgctcaacaaggacatactgggttttgagaacacagacttggagactaaggatttgggcagtgaggattccattccagaagaagatgattttggtgatgttctgtgggacatacatgatgaacaagagcaaatggaaacttttcagcaggcttctaattcagcccatgagttgggatttgagaaatattaccaacgccttaatgatctagtggcagcaccagccccgattccacctcttctcgtgtctggaggaccaggttctgggaagtctcttcttttatcaaagtggattcaattacaacagaagaattcccccaacacactgattctttcccattttgtgggaaggcccatgtcaaccagctcagagtcctccttgattattaaacgactaactctaaagtatagcacacaaaatgctgatttccaatctagccttttattggaagactgtgaagaagcttttctgaaaaaccctgaaggaaaacctcgattaatctttcatcgtttggaagatggaaaagtcagttctgactctgtccagcaattgattgatcaagtttctaatctaaacaagaccagcaaagccaaggtgagagatgctggtgactccaagcagggtggtggtagaggaaatgatgagaagtggtag

SEQ ID NO: 114293 - DNA, 654 bp, Homo sapiens
atgggagtaagtgagctctactacaaagggaaatgcaatgaaatcacaacaagataccacttcatatccaccagggtagtcaaaattaaaaaggcaatagcaagtgatagtaaggatatggagaaattggaacccttgttagtgggattacaaaatgttgtagccacttcggaaaacagtttggcagttcctcgaaagaagaaccaaaataacaagcagataatcacacctcaaatagatcatctaagagagaacactgaaattcaacaggaaagtgataggaaacccctaaacaaggaaggagaaatgctccttcctgattcatcatttggtctcttagatcctaggttagtgacaccagttgttatgagaaaaatctgtaatgtcccttcccaaactgggaaggagccaagagacaaaaagaatgatttgaggaagacagacgaagttgctaaatacccatggaaatccaaccctacgcggaaatccaatcctagtccatcatttcaagaccttacaggtgttgagattacaggcttgagccactgtgactggccaagggaccagatctatccaacagcagtaaatggaaaaaggagtttgattactgctttgcctgaacactctgattcagtcaaaacaagaggatactga

SEQ ID NO: 114294 - DNA, 399 bp, Homo sapiens
ggcacgaggggacgggcctcgccagtcacactccagcgcccccacgagccagcacagtgcctgctctcagtgaaaggccactgttctccttgggtgacccccatgatgcctgaccgctcctcgtgcctcctggaacagccagggtccttatgaagtggtgaccactccagtcagcaggggtggaaaatggtaccagtcaaacccgaggcggaggaggagcagcccgcagtcgctgccgcgagatggaggagcccacgcccgagcccgtctatgtcgacgtagacaaagggctgaccttggcctgcttcgtcttcctctgcctcttccttgtcgagatgatcatccgctgtgccaaggtcatcatggacccttacagcgccatccccacatccacctggg

SEQ ID NO: 114295 - DNA, 1182 bp, Homo sapiens
  misc_feature (1)...(1182): n = a,t,c or g
atggaggagtatgactctgtcttctacttcgcgaattcactagactcactcaatgcctcaccaactaaacaacaatgcggtgcgtacagactgtggatctgtactctaacaacaaagagttattcgcccaaaaatgttaccgacaccgatatatctccagacttaagagcatactttcccaacagtgaatatcctaattttagcatcttttgcaacccagatatgcagagaatcgttgaggaaccagctgatgattgcacatggtcaactcggattcttcttaccctgagtgaatttataatgtcgctgcagcgtactgtttatccccacagtgagaagtggcgtgctctctcagtcccttcatcttcctattttcaggagctggtgggcaccagaccaggaactggctctcaccttctggcatttactgtctatgtttggattcttcatcgtgtcctatggctttctcacagcatttggcaggactcttttccacttggatctgctacaacccaaccttacaccttcacgctttgacaagtacactggtctcttcatctatgaaatagagggagatgggttagatccatgttttcaaagcatggtccaaggaatcctagaggttttgtggatgtccaaagtggagagtgcataccacactaatgatggtgatactgctggagagggggtggaaaatggtaccagtcaaacccgaggcggaggaggagcagcccgcagtcgctgccgcgagatggaggatctccactcccgagcccgtctatgtcgatgtagacaaagggctgaccttggcctgcttcgtcttcctctgcctcttccttgtcgtgatgatcatccgctgtgccaaggtcatcatggacccttacagcgccatccccacatccacctgggaggagcagcacctggacgactgaggcacagcggctgtggggactggacctggcgctctgtgggtggctgtgccccaggatgcatccgtgtgttccctgccagcctgccatcccacagaggcaaggaatgaatctggccacccagggaaacagaaggtgcagcttagccctctcagccctccctcgagcaccagcttgggaatgcccgggtgccgtgggtgtcgcaaccatggaccagccaggggaaaagagcctnggaccagggacccaggga

SEQ ID NO: 114296 - DNA, 366 bp, Homo sapiens
ggcacgaggtgggaaagagtgtaaatgcaggccccatgattgtcggggctggcacccgtgatcctactgaacacaaggcttctcctcaggactccggcgcaccacacaggttcccagtgttcccagtatttggctggggcagggcacgccatagcaggcagtttcccttccatcccccttgggccatactggatcggtccttctggaaacaatgactgataaagcagagaaggttgctgtagaacctgaaaatgtgtttaaacgtcccagggaatctgagactccttcatctcagaaaaggcagaagatggccctgttgttaaggaaacaaagagcaggagacagccttattggaagcctctgcct

SEQ ID NO: 114297 - DNA, 534 bp, Homo sapiens
atgccccaggatcttccacaggaggagctggtgagtgccacgaaccaggagccaccggcagttataggacttatcaatgccccatgtaaccggtggcatgaccagcctgattctgcagatgaggaaaaaaggcagggagaggctgctcagcctctggccagtgcccgattcacccaggtgtttgtgtggctggagacgccctttgttcacggtttccataggtcctgggtccggcccatccagggagcttgttatgtttcaaagttggcgccctcggacctgccgtagtggcagagggcacagcccatgcaaaggccctgagagaggacctcgcctggggtgttggagaaacaggaggaggccagtgtgactggggcagagccacagcgagatgaggaactgaggctccgcagaattgaaaaactggttcaagatatcatgcgggtgcagagctcaaacctagattggtccaagctccgccaccactgggctggccccctggggcctcccaaggcgttcatcgcctccagctga

SEQ ID NO: 114298 - DNA, 409 bp, Homo sapiens
ttctgccttctgctgtaggcagaaatgatctgtgcaagccaggatagaaaaatggccaagggctttggctctgagcaagactgcatgggttcgaattctgtttcctgtgtatgctggagactgtccgaacttgtaagtcactgtatgaagtctcagcttccttatcgggccaccagggatagataataaagtacccgcgcttcacagaatgttgtgagaatgagatgaaataatttatgtgaagcaggtacaatgtacaacggtatttggcatatggtaaggactcaggaaatagtaatagtcgttactcatgttattggttaagttgaattttcccaaagtctttgaataataaatcctttccctgtttttcaaagctaccttttaaaacgactcgtcttctcgtgcc

SEQ ID NO: 114299 - DNA, 606 bp, Homo sapiens
atggccaagggctttggctctgaggcagactgcatgggttcgaatcctgtttcctgtgtttgctggaggctgtccgaacttaaggctaatgattttaaaacgcccaaatccaataatagatatcacttactttcggggatgcacataccagaggaagtgctggggataaaggaaatctgtgaatcagagaaagatgttgaaactgagattggccctcaaatactcactggatcaggtctagacgtatcaaaggacccagtacaaggctgcatgcagaatggtaggaaagctggcttcccacaccagagccccccaggggaggatgcaccaagtaaagttcacgccacagatagcagacaaagcatgcctgccagcataacactggtgtggctgccagggtacctggctgtgaaaccaaaatatcaagtttctagccccgggtctctcactagccagccatgggtttctggtagcaaacggctgtcaaacaatctcatcagcaagcagagtgaattatctgccaacactgaaaactcaaaaagtgtcacactggcggctttcaccgaaaaatctagtcttgcaatcctgggcccacacctctgtaag

SEQ ID NO: 114300 - DNA, 1257 bp, Homo sapiens
atggccaagggctttggctctgaggcagactgcatgggttcgaatcctgtttcctgtgtttgctggaggctgtccgaacttaaggctaatgattttaaaacgcccaaatccaataatagatatcacttactttcggggatgcacataccagaggaagtgctggggataaaggaaatctgtgaatcagagaaagatgttgggtatgcacaaaggtcactacaacagtcaaaaatagactccagttcctcattgctatgtttctccacttctctagaaggttgggcaggtgctaggaaggagttgcagtgtgagggcagatgtgatgtctatggagctacaaccatcctgcaaccagaaggaaagaggctaaagtttccaggagccatgaggaacataagaatagagccaactgagagggcttatgagcataaagttcacgccacagatagcagacaaagcatgcctgccagcataacactggtgtggctgccagggtacctggctgtgaaaccaaaatatcaagtttctagccccgggtctctcactagccagccatgggtttctggtagcaaacggctgtcaaacaatctcatcagcaagcagagtgaattatctgccaacactgaaaactcaaaaagtgtcacactggcggctttcaccgaaaaatctagtcttgcaatcctgggcccacacctctgtaaggggctgccaagcactatcagaaataaaacaagttggcagctccaacgataccattgcaccagtgccacgcacggcaggcattttctaagtgtacacttacaccatatctcccatctctctccttctacgagtagagaaatcactctgcctcctctgtttgacaaaaagccatggagccacagcagcctgcctgccactgcagaaactctcggggacagtcatgtgggcgaccgctggaatgttcaggctgctgtgggaaaagatggcctgccccatacgtttaagctcggatgctggggcaatgtacgaaagctagacctcagagctccagttggcaacgctggtgtttcagatgatggtgaaaaacagccccatgtacttgtcaaggaaagaaaaaaaaaaatagaaagaaagaaaaagtgggggagaaagactagggttcacagacagtctccactggtggaagaagtggtgactggacttctggtgactgagactccaatcagggactctccccgactacagtctcacttggacacacagacagacacctga

SEQ ID NO: 114301 - DNA, 452 bp, Homo sapiens; identical to SEQ ID NO: 88658
  misc_feature (1)...(452): n = a,t,c or g

SEQ ID NO: 114302 - DNA, 511 bp, Homo sapiens
cgcacgacgaagctaggatcctgtagagcggccgcatacagtgtctctactcttttctctgggcttgcctccttcgctatgggcaagcttccaccttccattcctccttcttctcccttagcctgtattcttaagaacttaaaacctcttcaattctcacctgacctaaaatctaagcgcctcattttcttctgcaacaccgcttgaccccaatacaaactcgacagtagttccaaatagccggaaaacggcactttcaatttttccatcctacaagatctaaataattcttgtcgtaaaatgggcaaatggtctgaggtgcctgacgtccaggcattcttttacacatcagtcccttcctagtctctgtgcccagtgcaactcgtcccaaatctcccgcctgtcccctcagtcccaaccccaagcgtcgctgagtctttctaatcttccttttctacagacccatctgacctctcccttcctccccagactgctccttgccaggccaaag

SEQ ID NO: 114303 - DNA, 374 bp, Homo sapiens
cacggacgccgagcttcaggtaagtctcacagtggaaggtaagcccgtccccttcttaatcaatatggaggctacccactccacattaccttcttttcaagggcctgtttccctcaaaccccacaacaggacttaattaacctcaccttcaaggtgtacaataataaaaaaaaaagttgcaattccttcccagatcttctcggcttatcggctgaagactgacactgcccgatcgcctcggaagccccgtagaccatcacggacgccgagcttcaggtaagtctcacagtggaaggtaagcccgtccccttcttaatcaatatggaggctacccacaacaggacttaattaacctcaccttcaaggtgtgcaat

SEQ ID NO: 114304 - DNA, 1671 bp, Homo sapiens
atggagagcgaggaaaaacagggtagagtgacagcctacccggaagccacacaggaccattcccgccagcatcaggttggtgtccctttgggacagagcttccagaagaaggagcaggcagccatctttgatattctgctgcctccactggtgacatcgtcagcccgcctacacccaggtgaaataaacagccatgttgctcacacaaagcctgtttggtggtctcttcacacggacacgcatgaaatttggtgctgtgattcggatcgggggacctcctttgggagatcaatcccctgtcctcctgttctttgctccatgagaaagatccacctacgacctcaggtcctcagaccgaccagcccaagaaacatctcaccaatttcaaatccagctgctcctcgccaggctgagctaggtcccaattcttcctcagcctctgctcctccaccctataatccttttatcacctcccctcctcacacctggtccggcttacagtttcattccgtgactagccctcccccacctgcccagcaatttactcttaaaagggtggctgaagctaaaggcatagtcaagaccgtcacggacgccgagcttcgggtaactctcacagtggaagcacgctttaaaaagattaaagcctgttatcacttgcctgctacagcatggctttttaaagcctataaactctccttacaattccctcattttacctgtcctaaaaccagacaagccttacaagttagttcaggatctgcgccttatcaaccaaattgttttgcctatccaccccatggtgagccaggcgtgaagcagcaaagagtgtgtgagcaagtggacgtggggaccagccatagcacacagccaggagcaccagcacaggcgcgagcaatgtgggaggctgtggctggaccaggtgtgcctcaagtggcttccgccttgggcgccagcatctggatgaggggcagactgacacctcacacggccagatactcctctgagacaaaacttccagaggaacgatcaggcagcaacattggctgttcagcaatactcgctgttctgcagcctctgcagctgatacccaggcaaacagggtctggagtggacctccggcaaactccaacaaacctgcagctgagggtcatgactgttagaaggaaaactaacaaacagaaaggacatccacaccaaaaccccatctgtacgtcaccatcatcaaagaccaaagaaatacaaactaccatcagagaatactataaacacctctatgcaaataaactagaaaatctaggagaaatggataaattcctcgacacatacaccctcccaagactaaaccaggaagaagttgaatctctgaatagaccaataacaggctctgaaattgaggcaataattaatagcttaccaaccaaaaaaagtccaggaccagacagattcacagccgaattctaccagaggtacaaggaggagctggtaccattccttctgaaactattccaatcaatacaaaaagagggaatcctctctaactcattttatgaggccagcatcaacctgataccaaagcctggcagagacacagcaaaaaaagagaattgtagaccaatatccccgatgaacatcaatgcaaaaatcctcaataaaatactggcaaactga

SEQ ID NO: 114305 - DNA, 311 bp, Homo sapiens
gctgctcctcaccaggccaagctaggtcccaattcttcctcagcctctgctcctccaccctataatccttttatcacctcccctcctcacaccgggtccggcttacagtttcgttccatgactagccctcccccacctgcccagcaatttactcttaaaaaggtggctggagctaaaggcatagtcaagcatgctttgaaaggattaaagcctgttatcactcgcctgctacagcatggccttttaaagcctacaaactctccttacaattcccccattttacctgtcctaaaaccagacaagccttacag

SEQ ID NO: 114306 - DNA, 1485 bp, Homo sapiens
tgctctgagtatgaggactcctccccagctccagtaccagccacagatctcagctcaacactctcgagctctgtaccacaaccccaggatacagggaccagccagcagcttcatcccctggacccttggcatgagctgcttcgtgcccaggagctccaaggtgccaccaaccacaagggctacagccatgcagagcatgagcatgcaggcctaggtgtccagggtgggaatggggctctggctttttcgaacagtgggcacaggcatgctgttcccaccatcagctcaggcactggcaggaggaggactccaagttcttcggcttttggactcttgaacttacaccagtggtttgtcagtggctttcaagccttcagcgacagactgaaggctgcattgtcagcttccctacttttgaggtttggggactcagactggcttcctagctcttcagcttgcaaatgtcttatgctgggacttcactttgtgattgtaggtaacatctgtgctacactcaaggagaaatactcctcaatgctccatttagatgtgaccatgaagaaaaatggggagaaaagaacaaggctccaaaaaagaaagaagggaatgcctccacatccggcttatgaggacctaaacatagctgccatcactctccctgccaatgttgtccttcatcagccaagtggcttcagaacttcagggcagctggaccccgtttggtggtctcttgacacggacgcgcatgaaatttggtgccaagacccgggacttggatcaggggacttcccttgggagatcactcccctgtcctcctactctttgctccatgagaaagatccacctacgacctcaggtcctcagaccgaccagcccaagaaacatctcaccaatttcaaatccaagacaaaggagacaggttttatccatggacccaaaactccggcaccggtcacggactgggaaggcagccttcccttggtgtttaatcattgcagggacacctctctgattattcacccatgtttcaagggtgtcagaccacgcagggatgcctgccttggtccttcacccttagcggcaagtcccgcttttctggagaaggggcaagatttaattaacctcgccttcaaggtgtacaataatagaaaaaagttgcaattccttgcctccactgtgagacaaaccgcagccacatctccagcacacaagaacttccaaatgcctgaaccgcagcggccaggcgttcctccagaacctcctcccacaggagcttgctacatgtgccggaaatctggccactgggccaaggaatgcccgcagcccgggattcctcctaagccgcgtcccatctgtgtaggaccccaccgaaaatcggactgttcaacttacctggcagccactcccagagcccctggaaatctggcccaaggctctctgactgactccttcccagatcttctcggcttagcagctgaagactga

SEQ ID NO: 114307 - DNA, 462 bp, Homo sapiens
cccgcctacacccaggtgaaataaacagccatgttgctcacacaaagcctgtttggtggtctcttcacacggacacgcatgaaatttggtgctgtgattcggatcgggggacctcctttgggagatcaatcccctgtcctcctgttctttgctccatgagaaagatccacctacgacctcaggtcctcagaccgaccagcccaagaaacatctcaccaatttcaaatccagctgctcctcgccaggctgagctaggtcccaattcttcctcagcctctgctcctccaccctataatccttttatcacctcccctcctcacacctggtccggcttacagtttcattccgtgactagccctcccccacctgcccagcaatttactcttaaaagggtggctgaagctaaaggcatagtcaagaccgtcacggacgccgagcttcgggtaactctcacagtggaag

SEQ ID NO: 114308 - DNA, 1236 bp, Homo sapiens
atggacccgctgagcatgagcattcatcaggtggtgctcaggcctgatgaacagggcccaggccaggaacaacagcctcccctttatgtgatggagcctggtgaaataaacagctttattgctcacacaaagcctgtttggtggtctcttcacacggacgcgcatgaaatttggtgccatgactcggatcgggggacctcccttgggagatcaatcccctgtcctcctgctctttgctctgtgagaaacatccgcctacgacctcaggtcctcagaccgaccagcccaagaaacatctcaccaatttcaaatccgagacaaaagagacatgttttatccatgaacccaaaactctggcgccggtcacggactgggaaggcagccttcccttggtgtttaatcattgcagggacggcctctctgatcattcagccacatttcaagggtgtcagaccatgcagggatgcctgccttggtccttcacccttagcggcaagtcccgcttttctggggaaggagcaagctgctccttgccaggctgagctaggtcccaattcttcctcagcctctgctcctccaccctataatccttttatcacctcccctcctcacacccggtccggcttacagtttcgttccgtgactagccctccccctcctgcccagcaatttactctgaaaaaggtggctggagctaaagacatagtcaagaccatcacggacaccgagcttcgggtaactctcacagtggaagctgataacactttggccctgggagctgcatcccgcatcacagggcctacatggaggaagtccaagatcaaggcactggcagattcagtgtctggagcccaacagagcaaagcaagtgggcacaaggagtatggttctaacgtgattggggtcatgaagacgttgctgttggacttggctttgtggtcactgctcttccagcccgggtggctgtcctttagttcccaggtgagtcagaactgccacaatggcagctatgaaatcagcgtcctgatgatgggcaactcagcctttgcagagcccctgaaaaacttggaagatgcggtgaatgaggggctggaaatagtgagaggacgtctgcaaaatgctggcctaaatgtgactgtgaacgctactttcatgtattcggatggtctgattcataactcaggcgactgccggagtagcacctgtgaaggcctcgacctactcaggaaaatttca

SEQ ID NO: 114309 - DNA, 1177 bp, Homo sapiens
atgcctttcagccccaaggctgccacctgctcccttgagaggctacactctatacttcaggtggtcctaagggagaaagtgacccaagagctaatatccattagacattttagcagacatagccatagtgggtatcttggtttatctccagaaagtactaaaacccaggcccagaataaaactgaaggatgtcggaccggcactctcactgtttctaggcttccaggaggtcctggtgtcttagctgtggatctcccaatacctgcagaatatttttggcgtcacgaacaggattcaaaaaccaaactgtgccactttttggccacaaggacagggctggaaactcgaggaaatcccaaatccagggatgggaactccccaatatcactgtcaattcctacaggattgaacgaaggggacgaatgcagaaatgaagacaaagacaaaagatttgttttaaaagaagggagacaaaggagacacgttttatccatggacccaactccggcaccggtcatggactgggaaggcagccttcccttggtgtttaatcattgcagggacacctctctgattatacactcacgtttcaagggtgtcagaccacacagggacacctgccttggtccttcacccttagcggcaagtcccgattttctgaggaagggacaaagggggatgtgtcagggtcacaagacaattgtggggagagggtcagccgacaaacacgtgaacaaaggtctttgcatcatagacaaggagcttgctacacgtgccggaaatctggccactgggccaagcgaatgcccgctgcccaggattcctcctaagctgcgtcccatctgtgtgggaccccacttgaaaattcggacttgttcaactcaccttgggcaagccactcccagagcccctggaactccggcccaaggctctctgactgactccttcccagatcttctcggcttagcggctgaagactgacactgcccgatcgcctcggaagccgcctagaccatcacggacaccgagcttcgggtaactctcacagtggaaggtaagcccgtccccttcttaatcaatacggaggctactcactccacattaccttcttttcaagggcctgtttcccttgcctccataactgttgtgggtattgacgggcaggcttctaaaactc

SEQ ID NO: 114310 - DNA, 3131 bp, Homo sapiens
atgaataatgatccttacattcctgcatctgcttttggggctcgccctgttaaaaccacagaagctcccccactgagcaccttgagacccctgcccctgcccaccaaagaacaaccccctttgactgtaattttccattaccttcccaaatcctataaaacggccccacccctatctccctttgctgactctcttttcggactcagcccgcctgcacccaatgaaataaacagccatgttgctcacacaaagcctgtttggtggtctcttcacacggacgcgtatgaaatttggtgccgtgactcggatcgggggacctcccttgggagatcaatcccctgtcctcctgttctttgctccgtgagaaagatccacctacgacctcaggtcctcagacccaccagcccaaggaacatctcaccaattttaaatcaggagagacaaaggagatgcattttattcgtggacccaaaactccggtgccagtcacggactgggaaggcagccttctcttggtgtttaatcattgcagggacacctctctgattatacacccacatttcaagggtgtcagaccacgcagggacacctgccttggtccttcacccttagcggcaagtcccgcttttctgaggaagggacaagctgctcctcgccaggccgagctaggtcccaattcttcctcagcctctgctcctccaccctataatctttttatcacctcccctcctcacacctggtccggcttacagtttcgttccgtgactagccctcccccacctgcccagcaatttactcttaaaaaggtggctggagccaaaggcatagtcaagcggctgaagactgacactgcccgatcgccttggaagacccctagaccatcacggacgccgagcttcagaaaagcagaacggactaaaggtcttttaaaaatacacctcaccaagctcagccaccaacttaaaaaggactggacaatacttttaccactttcccttctcagaattcaggcctgtcctcggaatgctacaagactggctactggccaattgggatatccttttatcagtcaaagctatgtcctggtcaatggatttcaaactgttgaggatctatgtgaagctgcagaccttcgagtgagtgttgcagaccttcgagtgagtgttacagctcttaaggtggcgcgtctggagttgttcgttcctcccggtgggctcgtggtctcgctggcttcagcagtgaagctgcagaccttcgcggtgttacagctcataaaagcaaaaagatgggactggggcaccttggagcagggggcggcgctcatcggggaggctcgggacgcacaggagcccacggagggggtgggaggctcaggcatggcgggctgcaggtccagagacctgccccgcgggaaggcagctaaggcccggcgagaaatcgagcgcagcgccgggctgacgatcaagaaggaaagatgcatacgaaatggatacagcaaagaaaaaatgaaactcatagttgtttctcatggcctccatgtaaatgacttgcagcataaactgacgcttttcaccaaggaaacatacacatacctagccagggattcagagaagcagaagcaggggtatctagcaggacttgaaggagcccatgccaacagggtgaaccagcagatcagtgacaacttagtagttaaaacaggggccttaccccctccttatagaaccaagggagaaaagctctatttttatatgtccagacagaactgccttttcagcgtatcagggcaactcctccaaggtttctttcctaatggaggacaagctgcacctaacccttatgctctgctttcccaaataccagaagaagcagaatggtttacagtcctggaccttaaggatgactttttctgcatcccttacatcctgactctcaattcttctttgcctttgaagatccttcgaacccaacgtctcaactcacctggactgttttaccccaaggtttcaggccatctatttggccaagcattagcccaagacttgagccagttctcatacttggacactctcgtcctttgtggggtgttaaagtctcccattattattgtgtgggagttgaatcaaatagacacaataaaaaatgataaaggggatatcaccaccgatcccacagaaatacaaactaccatcagagaatactataaacatctctacacaaataaactagaaaatctagaagaaatggataaattcctcaacacatacaccctcccaagactaaaccaggaagaagttgaatctctgaatagaccaataacaggagctgaaattgaggcaataattaatagcttaccaaccaaaaaaagtccaggaccagatggattcacagccgaattctaccagagggttgctgatgtaaaactgagagaagaaaaagatgaaaatatgctgttggtgcccctctcagatcttctttaccaggtccatgctcccatcccccagctgccagaggtgttggctgctaacagccccacctgccacttggatcctcccactatcacagaatccaagagcaatgaagccaccacaggacgacaagcttcactcaaatgtgaggcctcggcagtgcctgcacctgactttgagtggtaccgggatgacactaggataaatagtgccaatggccttgagattaagagcacggagggccagtcttccctgacggtgaccaacgtcactgaggagcactacggcaactacacctgtgtggctgccaacaagctgggggtcaccaatgccagcctagtccttttcacggggtgctctgctgaccaagccaatccagagaagaacaggcagctcgtgagcctctgccagccagcggcagcagcaggtagagacccagagccagagcccctgaagagttggcgattattcatcttcattgacaaaaccaaagaaaaggttttgatagtattgacattcacttctaaacactggttactagccatgcaagcaccaccaagcccttatcccacctatctggagaaagctttgacttctgaagaggcaagatacaaattaagcttagttaacaatttcccttatacagtcattgcagcctcatga

SEQ ID NO: 114311 - DNA, 2347 bp, Homo sapiens
  misc_feature (1)...(2347): n = a,t,c or g
cgaattcggcacgagcaaccccttttcccacttttctggaaggtaagaaccccccaccccttctccgtgtctctactcttttctctgggcttgcctctttcactatgggcaagcttccaccttccattcctctttcttctcccttagcctgtatccttaagaacttaaaacctcttcaattctcacctgacctaaaatctaagcgtcttattttcttctgcaaagctgcttgaccccaatacaaacttaacagtatttccaaatagctagaaaatggcactttcaatttttccatcctacaagatctaaataattcttgtcgtaaaatgggcaaatggtgtgaggtgcctgacgtccaggcattcttttacacatcagtcccttcctagtctctgtgcccagtgcaactcgtcccaaatcttccttctttccctcccgcctgtcccctcagtaccaaccccaaagcngtcactgagtctttctaatcttccttttctacagaacccatctggacctcttcccctccttccccaggctggcttccttggccaggctgagctaggtcccaattcttccatcagcctctgctcctccaccctataatctttttatcacctcccctccctcacacctggtccggcttacagtttcgttccgtgactagccctcccccaacttgctcagcaatttactcttaaaaaggtggctggagccaaaggcatagtcaaggttaatgctcctttttctttatcccaaatcagatagcgtttaggctctttttttatcaaatataaaaacccagcccagttcatggctcgttcggcagcaatcctgagacgttttacagccctagaccctaaaaggtcaaaaggccatcttattctcaatatacattttattacccaatctgctcctgacattaaataaaactccaaaaattagaatctggccctcaaaccccacaacaggacttaattaacctcaccttcaaggtgtacaataataaaaaaaaagttgcaattcctccttgcctccactgtgagacaaaccccagccacatctccagcacacaagaacttccaaacgcctgaactgcagcggccaggcgttcctccagaacctcctcccacaggagcttgctacacttgccggaaatctggccactgggcaagggaatgcccgcagcctgggattcctcctaagccacgtcccatctgtgtgggaccccactgaaaatctgactgttcaacttcacctgggcagccactcccagagccccgtggaacctctggcccaaggctctcttgacttgactccttcccaagatctttgggcttagcaagctgaagactgacactgcttgatccgcctcggaagccccctgggtatattgcatgatgttgaggtttggggtatgattgattctgtcacccagatactgagtatagtacacaatagttaatttttcaattgtctcttctccctctctccctccatagtagtccccagtgtcttttgttgccatcagcagctgtatgacactgtccccaggtctcatgtctgtataaacatacacatcataggatatttcagggaaggttggcgtgttatcatttgcatccatcacttgaatattgacgatgactggctcactttcttgtacaccatcaaatgctgttatcgaaaaggtgtaagtttgctgttcttccctgtccactggttgaagtaaggtgaggtagcgagtaataccagtctgtgtgacggtgaagactgaggtgtagtcattcagaaaaaggtgaagctctgggtcttttgtatcttctatgtccttgtccagagctactattcttaaaggtgaagtcaaattgagactgtccgaaatggttgctcccactggggcagattccaggatatagccttgataactgggcattgtaaaatatggactttgattgttttcatccagtatttcaatgtgtagaccggcaaaggcaggaagaggatgaccattgtcttgttcagccttaataaccaaatcaaatttctggtgaaagtctctgtttactggctccaggagactaagttctgctgtcctaggatgcatatggaaaaatcgtgggtaatcctcaggagtccctttgctccagttaccaacaagttcctcatctctatctgagaccacctcagcctggttttcatcattaatatcattatcagcattttggtcaaagccattcggtaagtctctagagagttccaaactttctcgcatcttcctatcttctacagagccctgcaaactgttccaatctctgcctgttacccagttccaaagtcgtttctgcat

SEQ ID NO: 114312 - DNA, 505 bp, Homo sapiens
gcagatgatcaaagttttatttaacattatagaacacttaaaaataaacaatatgattgcatttctgttgtgtaactttgaaaaatgttttcaagcacacataaaagcaacaagttttacccccaacaagtatgctatgcaagccagtcccttaacttgctggggtcagcactgctctcaacagacagcttggggtagggaggtaggctgctgctacggaaggaaagcatgtttttaccccaattggcttagtttttccagaccaaaataaaacaaatagatcagcctagatacatagcccccagccttgtgtgtgtgcagcgtgacaaaacttgcagaagatctccacagagaaaaaaggatggagatggatatctttggagcgccctcagaactggtacctgccacacaacctgccccagtgctttgaaagtcagcaaaacaggctccctagaagctcatcaactttacgaagaaagctacttgccaaagatttccacacttt

SEQ ID NO: 114313 - DNA, 723 bp, Homo sapiens
  misc_feature (1)...(723): n = a,t,c or g
gattcctcccactgtcactgtgcctccagtcattttaagaagtccttgtatcctaatgatacagagaagaagaaagtgatagcctacaggaaatttgacacctatcccccaatttatggtggtcttcaagctgacagagaagctgacggaacagaaggagtggatgaagatataattgtgacccaaagtcagaccaacttcacctgccccattacaaaggaggaaatgaaggaagccagtgaaaaataaagtgtgtggccacacctttggaagaggacgccattgttcgcatgattgagtccaggcaaaagcgggaagaaaaaggcccctattgcccctcaaaattggctgtaggcccacacggatataagaaaagtccagatccttatccagggatgaagcaccttagaagggcaattgagaacccataacaagaaaagacatcgtcattcccgagttagggaaaagccaccctgcctgcagggacacccagccagcctacctcctaccccagctgtttttttgnaggagcagtgttgaccccaggcagttagggactggcttgcatagcatacttgttgggggtaaaacttgttgcttttatgtgtgcttgaaaacatttttcaaagttacacaacagaaatgcaatcatattgtttatttttaagtgttctataatgttaaataaaactttgatcatctgcagtgtcaaaaaaaaaaaaa

SEQ ID NO: 114314 - DNA, 321 bp, Homo sapiens
atggctgacttgaagaagatggcagagatggagcagatccagggcacgtttgctccagaggcacccactggaggcggccttcaggcatctcatcaaattgtttttaccaaaatggattataatgatagctttatatggctgccttcaaacaagactgtgcactctctgaggcaacctggaaggctccaggggagctgttgccagtcacagccctcagccctgaagactgccctgcgtcttgacttcctacagccatggcctgtccgccacctttctggtggtacacaagattgcagcagtacaaatgaagttcccggttag

SEQ ID NO: 114315 - DNA, 174 bp, Homo sapiens
atgcgggctggggacgccttggggcggctgcaggctggggcgcgcccctgcacccggcgggcctccgctgcgtccactgcggacaggggtcggcgggttccagcaactgctgatgcggatgagaaggcctttggcgggtggaggaaaatcttggggtatcgcacatttttataa

SEQ ID NO: 114316 - DNA, 531 bp, Homo sapiens
tttttttttttttgtgaccttggataagtttattaacctgttttataaatctgtattcacacagatataaagtgcctagcccatcacagcagagctctccgtagctcagtggttgttccaataagacatcagggattcttcagaagccagccttcagacctctcactgtgttttgagatcattattatcaatttggatttaaaaaacaagggccctgtaaaacccttgaagtcttcctcatctcaggttttagggatgccacttgcataaaaatgagtggttcacaaggtcactgcccccagaagcaggcactgggctggggcaggatcctgaacctctcgggggcgtagcccgcggaacgtggtcggcttgttggtgaaggggtgccactggccctggatgctagggttgtcggtgtggaagggcttgcggatgcggatcacgtccaagcccgactggtcggccagcttctgcaccagcggtcagatctcctcgaccgacttgcagtggatgctctcctcgcgcacaggc

SEQ ID NO: 114317 - DNA, 1103 bp, Homo sapiens
tttttttttttttttttttgaaatgggaccttggaaaaattttattaacctgttttataaatctgtattcacacagatataaagtgcctagcccatcacagcagagctcatccgtagctcagtggttgttccaataagacatcagggattcattcagaagccagccttcagaccatcatcactgtgttttcgagatcattattatcaatttgggatttaaaaaaacaagggcacctgtaaaacaccattgaagtcatccatcatcatcaggttttaggggatgccacattgcataaaaaatgagggtggttcacaagggtcactggcccccagaagcaggcactgggaaagaaacaggcagctcttcattatcccaagcaggaacctcttgtcaacttggccccattggatgggttcccaatttgccttgggctttggaaatcccaaagggggaaagaacccacccttttaccggagttaaacagtccaaaaaccttggggcttgcaagttggtggggcaaactcttcaactgtgcttgcaccttgggcttggggcaggaacctgaaaccttctccggggccgtagcccgcggaacgtggtcgggcttgtttggtgaaggggtgccacttgtcccttggatgttaaggggttgtcggtgatgaaaggcgcttgccggatgcggaatcaccgtccaaagcccgacttggtcggcccagctttctgcaccaggcgtcgaaaatctcctcgaaccgactttgcaagtggatgctcttcctcgcgcacagccccgttaaggtattcggccactacttctgggcacgcagcacggacgcgagtttacatatattactgacccctggattccgtcgggggaagtcgatcacctcccgctccacgaactccctggcgccgcgagacgaggcgccgtcgcggctgacgctgaagctcagaacgctgcagctgctgcacatagcgacccagtccgttgtggagaacgctgcgccaagaagcggctcggagtcccgcgcgccgtcatagctacagcttcgaggccccggagcctaagcagcgaggagaggggggcgggactaaacctcgtgcc

SEQ ID NO: 114318 - DNA, 522 bp, Homo sapiens
tgtcctaaaacgagacaagccttacaagttagttcaggatctgcgccttatcaaccaaattgttttgcctatccaccccgtggtgccaaacccatatactctcctatcctcaatacctccctctactacccatttattctgttctggatctcagacatgctttctttactattgctttgcacccttcatcccagcctctctttgccttcacttagactgaccctgacacccattaggctcaacaaattacctgggctgcactgccacaaggcttcacagacagcccccattacgttcagtgaagcccaaatttcatcctcatctgttagtcatactcccgttcaccgttctcaactactcatacatgccctggctccttctttacactggccgggtttacactggtttctccaaggacatcacagctggatatctcctgggtgctatccccaaactggccacttctaaactcttgaagtaaataaataatctttgctggcaggactctgctgaatctcctta

SEQ ID NO: 114319 - DNA, 1533 bp, Homo sapiens
atggaaatgcaagaaaatggtgaaggagagagcagaaggcaggcagcatctgcgtgctcaaggacaggaggaaggaggaaggcgggagtgggcggaaacagcagtcagattctcagcagcactaaaattgtccctgccacttggcaggaggcagttcagacatcgcagatccaagagccttgtcctttcctcattcatgtaactgcacagggagccaattgtctggcagaattctgtgctaaatcagctaaaggagacaggaatggtggctgtggaatgcctccacagaggggccgtcagtcctgccagatcctcaccaaggattctgcagggccagtcttctcatcccctcccacccctacccttgatcagtaccagggcgtactgggtcacacagaaggaggtgagcggcagatgggacagtctagttccaggaaaacaagctcagggctcccactgattctacattatgcccgcctgcacccaggtgaaataaacagctttattgctcacacaaatcctgtttggtggtctcttcatatggacacgagtgaaatttggtgccctgacttggatcgggggacctcccttgggagatcaatcccctgtcctcctgctctttgctccatgagaaagatccacctacgacctcaggtcctcagaccgaccagcccaagaaacacctcaccaatttcaaatctgcatgctttgaaaggattaaagcctgctatcactcgcctgctacagcatggccttttaaagcctataaactctccttacaattcccccattttacctgtcctaaaaccagataagccttacaagttagttcaggatctatgccttatcaaccaaattgtttttcctatccaccccgtggtgccaaacccatatactctcctatcctcaatacctccctccacaatccattattctgttctggatctcaaacttgctttctttactattcctttgcatgcttcatcccagcctctctccgctttcacttgggctgaccctgacacccattaggctcagcaaattaccaaggctgtactgctgcaaagcttcacagacagcctccattacttcaatcaagcccaaatttcatcctcatctgttacctatctcggcataattctcataaaaacacacgtgctctccctgccaatcgtgtctgactgatctctcaaaccccagcaccttctacaaaacaacaactcctttccttcctaggcatggttagcgtggtcagaattcttacacaagagccaggaccacaccctgtagcctttctgtgcaaacaatttgaccttactgttttagcctagccctcatgtctgcgtgcagcggctgccactgctttaatacttttagaggccctaaaaatcacaaactatgctcaactcactctctacagttctcataacttccaaaatctattttcttcctcatacctaacgcatatactttctgctccccagctccttcagctgtactcactctttgttgagtctgccacaatcaccattg

SEQ ID NO: 114320 - DNA, 481 bp, Homo sapiens
cgtgtatgcctacatttttgtgtaattggaaatggactttttctttccaattatatacttctttatagtttttaaaagtggctttatataggtgatactgatagctatatatttatcttgtaaaagaccaatttaagttgttcattagagccaataatttgtcagctgattctcatgaggtgtatataaccaatctgatttgcgttcttctgaaactgcttatcaaatagatggccattagccctaaatggcaaaatccactggacagttttctgtattgtactcagtaaggtctgacatattttgcatgtttgaccactccttcatttttaaaatagtttttttattgccttcaagtgaaacatgctcttgggttttcctcctatctcatttgctgttctggtcatatttctggtttgctgttcttcctctcacttttcttcaaatattggtgtacttttttttcttttctagactccat

SEQ ID NO: 114321 - DNA, 1110 bp, Homo sapiens
  misc_feature (1)...(1110): n = a,t,c or g
cccagcgtggtggaattcgacaaatgggaaactaaggcctgtgggggatgcgagggtttggtgggaggccgtccaggtgggggtcgccaggtttagcgtgaggcgctccaggtcgagggttgcaaggtgccccttctgctcccgggctcaccctcctcccttgcgcgcaggctcctcacggcctccctgggaccccaggcgcgtcgggaggcgtcgtcctccagccccgaggccggcgaagggcagatccgcctcacagacagttgcgtccagaggcttttggaaatcaccgaaggggtcagaattcctcaggctgcaaagtggagggaggtggatgcctccggattccaatacaatttttcactggatacagttatcaaccccgacgacagggtatttgaacagggtggggcaagagtggtggttgactctgatagcttggccttcgtgaaaggtgtcccacgtggactttcagcccaggaactgatccgaagctcatttcaaagtgttgaaccaaaccctacaaagcaacagcaaggcttgccccctggnggggtcatctttctctatcaaactttggatngtggatggactggtgactcctgggattgtccacccaggttgtacccaatttgaaggaaacctggaattagtagaattctaagaaggtttacttctaatcatgtccctctcaattttatttcccgcagtccaggagtggttatggttttgccactattattttcagaatgtgaagattttactcttggcttaatttttccctccactcagtgcttaaggctgagcctccagatgctgttacctcagatttaatcactggttgaaactccgtataatctgtagagcctccatggctcataaaaatttggaattaaccttttcattgccttaagagctgcttgtacatatgtggatagctatgtataaaagcttcattctacagaagcaganacctcaaaaataatcactggatgaaaactcccaaaaatctgaaaagcctccatggcttaaaaattgggaanaacttttcttgccttaagagctgcttggacataatgggatagctatgtataaaaagctcattttaat

SEQ ID NO: 114322 - DNA, 1551 bp, Homo sapiens
atgaggaggagggggaaacttgttaattcagttaattcaggggtgtccaacccgcgggtcatggacccatacccggagtgtctgttgactgttgggaagcagggagcacagcaggagttaacaagatatgaagagatgctcaaacacaatagtgaaaagagaggaaataaaaaccacaatgaaatcctccttagacctgcaaatattcagtttataataccagggcatgtccaccccagaggccacctgcagaaatttcctatccatgctgaagtttccctgagtctctctaccacaaggtgtcctctggctgttggggaatgcatggccaagtgtggagttgccaggaaattaactcctgggagcaacgcacaaccaagaaagcttggagttgaaataatatctgctattaatgtgctctgtggtcttaggaaaaaacactgtgcctacctgagtcttagttacacaatctacaaggtgaaaaggagcagtcttccaaatgccaggatcatggaccatgaatctccagttattctctgctggttccagggagctgcaggtgtgatagatgtgacatcacccatttgtgattacagagctgtcactctgggtaccaggatggccctgccaagaggcctggagaattggtgggttcttggtctcactgacttcaagaatgaagccgcggaccctcgcggagtgaagctgcagaccttcacggtgagtgttacagctcttaagacagcgcgtctggagttgttcgttcctcctggtgggctcgtggtctcgctgggctcaggagtgaagctgcagatcttcacgactcaggagcccagctggcttcacctagtggatcccgcaccggggctgcaggtggagctgcctgccagtcctgtgcgcccttgggtggtcgatgggactgggcgctgtggagcagggggtggtgctcgtcagggaggctcggccgcacaggagcccatggagtgggtgggaggctcaggcatggcgggctgcaggtcccaagccctgccccgtgggaaggcagctaaggcccggcgagaaatcgagcacagcgccggtgggccggcactgctgggggactcagtacaccctccgcagccactggcccaggtgctaagttccccattgcccggggccagcagggctggctgggtgctccgagtgcggggcccaccaagcccacgcccacccggaactccagctggcccgcaagcaccgcatgcagccccggttcccacttgtgcctctccctccacacctccctgcaagctgagggagtgggctccagccttggccagcccagaaaggggctcccacagtgcagcgggggggctgaagggctcctcaaatgccaccaaagtgggagcccaggcaggggaggtgccgagagcaagcgagggctctgaggactgccagcatgctgtcacctctcactttgggtatatacccagtaatgggatggctgggtcaaatggtatttctagttctagatccctgaggaatcgccacactgacttccacaatggttga

SEQ ID NO: 114323 - DNA, 612 bp, Homo sapiens
atggtctttagcaacctgaagggccactggctccaaccaatcagattagactctggctcacgtaacacagccattggctgtgacaaccagtataagccaactggagtgaagctgcagaccttcgcggtgagtgttacagctcttaaggccgcgcgtctggggttgttcgttcctcccggtgggctcgtggtctccctgggctcaggagtgaagctgcagatcttcgcgagccaagtggtctgttttgacagggcgctgattggagcgtttacaatccctgagctagacacaaaggttctccacgtccccatcagattagttagatacagagtatggacacaaaggttctccaaggccccaccagactcaggagcccagctggcttcacccagtgaatcccacaccagggctgcaggtggagctgcctgccagtcccagtgccgtgcgcccgcactcctcagcccttgggtggtcgatgggactgggcgccgtggagcagggggcggcgctcatcggggaggctcgggctgcacaggaacccacggagtgggtgggagactcaggcatagcgggctgcaggtcccgagctctgccccacaggaaggcagctaa

SEQ ID NO: 114324 - DNA, 1455 bp, Homo sapiens
atgaagggcaaaggagacagcggggaggaaatagaattcctggagtcggaggcgacatcctgttatgttcctttgacatctgccttctggttgggtttgaccatgggtaccaccggcgagagattggaggaaggagagcaaggagaaaatataatcttctcccacctctcccccactctgggctgcaggttgacagtgacgccccactacctaagccgctttctaccccataacgcatctgcagggaagacccaggagtatccaaactgcctatttcatcatctgttacgcatgcggcagagagtggagacccagcagctggaggaacggccctgcagatgccagaaacttgctttccagctgcccttgcagctaagatgtagacacgtgatctgggctctgccattagaagagagagaggtggagaagcaattgtcttctggaagccattttgcaaaggcagttacagacacccaacttcaggagacaacagctgagcagcccgacaggcgagaacaacgaaccaaggtccgcaacaccaccacgaatgatagaaaccaccccacaaccacgaacgaaacgagcagcaaaaagacgcaaccagagccgaaccaacaagaaaacaaacgcgacacaacaacacaacctacgaccacacacgacaccacccaacacaacacaaagacacacaacaacacaacactccaccgcatcagcaagaagcgcaaaacaacgaacaaacacgaaagcacgaaccaaagaaacaaacaacagacgcaaagacagaacaaaaagaaaacaacaacacaacacacgaacgacttgtgtttttttgtcgggccagaggaacagattgggcagtggctcctcctcactttggaaatcactattttctgcaaagagacacagaaaaagtctaaaagagaacatgaggacatgtcaacaaaaaacagacacccttccccaaaggcttctgaagtgaactgggtaggaaccatggaagtgctacactctgctctcaagatagaagcagcttcactcctgaagccagcgagaccacgagcccacgggaggaacgaacaactccagacgcgccgccttaagagctgtaacactcccgcgaaggtctgcagcttcactcctgagccagcgacaccacgaacccacagaaggaagaaactccgaatgcatccgaacgtcagaaggaacaaactcggacacgccaactttaagaactgtaacactcaccatgagggtccgcggctcattcttgaagtcagtgagaccaagaacccaccaattctggacacaagccagagcctaggctcctctgtggtgccactgctgtccatgccctacactctgctagactcgcccgtactttttactgctttgtgttggtattggcagtgcatcatggtcatcatcatcatcatcatgggtagcattcactga

SEQ ID NO: 114325 - DNA, 602 bp, Homo sapiens
acagaagtcagagaaaactgtgtgacttaggcatcatcaccagggatgttaagcaggctggcccattgcaagagccatggagtgtacaaagtgcagagagcgtaaggaaagagctctggtcccgggctcacggtaatagaaattgggggcacctgggattcggttttgccatgttgcccaggcagaacactgtcctgatatttgggcagcaggagggtgccctgcttcgagaaggaaaattaccagggacccgtgtgctctgtgaaatatggacttctgctggaaaaatccactttgctagagcaggcacggggaccgctgataggagacattgctggaagatgccaagtgggcgtttccagatcacttttcattttaatcagttgtcagagtttatattcaggagccctcccctcaatatctggattttcagcttctctggaagaccgagaagacctgggcacgtggggccagcgtttctgaaggctgtggtagtagacatggacgtgggcacagatatttccaagaggacgcctctgctccaccacagcagggacggtccacccacccaagtgatcagttctcatcttcgtgcttcttaa

SEQ ID NO: 114326 - DNA, 1056 bp, Homo sapiens
atggtggaaggcaaaggcaagctggcatgtacagacgacatgaacactgtcctgatatttgggcagcaggagggtgccctgcttcgagaaggaaaattaccagggacccgtgtgctctgtgaaatattgaaaccaatacacaacaccgaaagtgagtgtcaagtggtgcaggctttattcgatggccatggaattgagaagcgggagcttggctcacaaatcaacttctcaattagagtgaagctgcagaccttcgcggtgagtgttacagctcttaaggcagcacgtctggagttgttcgttcctcctggtgggctcgtggtctcgctgggctcagaagtgaagcggcagattttcgctggattttgtgtttcctccggcatgcgggaagagccacctgtggcctgtggcctgtggcctgatgcgacggtacaggactgccgagatcgggctgcgagcctcagcactctgggctctggcccagctggccagctggccaccctgccccggacacgtgggctgccgctcagccagcaggacagacattcagccggtgtgcgccccatgagagcagcggtggggaagaccctgtgctgctccgtccggcatgtgagactcaagctagctgacacgcggggcctgctgggcacgtacgcccctctggaaggtgacagccatcacacccactctgaatttcctgacaggcataatagaattgaagacacagtggataacgacagagcctcgtgtactgctaacaggtgcaatacgatgtacagcaaagggagccttggtgtcacagatcagatggaaattctctcccgtcttgtcagtgctcatgacgtccatgaatccagcaggaaggtcacctgtggttacattgggcccactggggtcatccagaataatctccaatctcaagatcctcagttcaatcacatctgcaaagtccttattccacataaaattctcagggaggcctcccgggagctctatgctgacagcaccaatgagctgatcgtgatggaaaagcagcccccgatggggttcgcataa

SEQ ID NO: 114327 - DNA, 1101 bp, Homo sapiens
atgaaatctaacaatgcgctcatcgtcatcctcggcaccgtcaccctggatgctgtaggcataggcttggttatgccggtactgccgggcctcttgcgggatatcgtccattccgacagcatcgccagtcactatggcgtgctgctagcgctatatgcgttgatgcaatttctatgcgcacccgttctcggagcactgtccgaccgctttggccgccgcccagtcctgctcgcttcgctacttggagccactatcgactacgcgatcatggcgaccacacccgtcctgtggatctacccactagaatgccccccattcacaagtcaacagacacgagtgaccatcctggaaaggagacccgataagggcagtgtcccatccaatgccacaacatggcccccgcagtttcattggtccaagtgtgtccagaattggtgggttcttggtctcactgacttcaagaatgaagccatggaccctcgcggagtgaagctgcagaccttcacggtgagtgttacagctcttaaggcagtgcgtctggagttgttcgttcctcccggtgggctcgtggtctcgctgggctcaggagtgaagctgcagaccttccgggtgagtattacagcttataaaaacagcgtggacccaaagattattgacagcgcgcctaacctgggtatcggcacgattaatgtcgtatgtgctgctgatgtgctgattgttcccacgcctgctgagttgtttgactacacctccgcactgcagtttttcgatatgcttcgtgatctgctcaagaacgttgatcttaaagggttcgagcctgatgtacgtattttgcttaccaaatacagcaatagtaatggctctcagtccccgtggatggaggagcaaattcgggatgcctggggaagcatggttctaaaaaatgttgtacgtgaaacggatgaagttggtaaaggtcagatccggatgagaactgtttttgaacaggccattgatcaacgctcttcaactggtgcctggagaaatgctctttctatttgggaacctgtctgcaatgaaattttcgatcgtctgattaaaccacgctgggagattagataa

SEQ ID NO: 114328 - DNA, 2335 bp, Homo sapiens
atgactgaaggacataagaataggaagaaaaagcctcctacctccttcaccccaacattgcattttccagaagtttcccatacatacacacacgcctctatgtcctcgtctgaagaatgggtgaatgtcagtactgacttcagggccgatctgagccctcatgaactcacctcccagccaccagcatccccaggtgcacatagatcaagggaacaagctgtggtcatgggacatgagtttattggactctggaaggcctggcatcccagagatgaggtggtccgtttaactacagacagccaaacaggggcccagagaggcaaaacacctcagtgtagcagccaggcaggcctgtggctttctgtatcggctctgacgatcatgatgtaccctcgccctaaactctttgagcccccaaccaatggccaaggggtatcagctcatggtatcccttatggacacttgtcattggatttggggcccacccagataatccaggatgatctcatctcaagatccttaataatatctgcaaagatccttttttcaaataaggtcacattcacaggttccagggattttacatggatatcttgttggggaggagtgaagctgcagaccttcgcggttagtgttacagctcttaaagcagcgtgtctggagttgttcgttcctcctggtgggcttgtggtctcgctgggctcaggagtgaagctgcagatcttcgcgataaatgttacagctcataaaggcagcatggacccaaagaactcaggagcccagctggcttcacctagtggatcccgcactggggctgcaggtggagctgcctgccagtcccgtgccatgcgctcgcattcctcagcccttgggtggttgatgggactgggcaccgtggagcagggggtggtgctcgtcggggaggctcggaccgcacaggagcccatggagtgggccgtagctgccctcccgcggcgcagggctccagacctgcagcccgccatgcctgagcctcccacccactccatgggctcctgtgtggcccgagcctccccaacaagcaccaccccctactccatggcgcccagttccatcgaccacccaaggtgctgagaagtgcaggtgcacagcactgggactggcaggcagctccacctgcagccccggtgcgggatccactgggtgaagccagctgggctcctgagtctggtggggatgcggagagtctttatgtcgagctcaggtattgtaaacacaccaatcagcaccctgtgtttagctcaagctcatggattgtaaatgcaccaatcagcgccctgacaaaacaggccactcggctctaccaatcagcaggatgtgggtggggccagatctgcagcttcactcctgaagccagcaacagcaggaacgcactgggagggacgaataactccggctgggaggaacgaacaactccagacgtgctgcgtttaagagctgtaacactcactgcgaaggtctgcagcttcactcccgagccagcgagaccagagaccacgaaccccaccagaaggaagaaactctgaagacatccgaatatcatgaagaaacaaactccagtcacgtgtcctttaagaactgtaacactcacagcgagggggaggcagctaaggcccggcgagaaattgagcacagcgctggtgggccagcactgctgggggacctggcgcaccctctgcagctgctggcccgggtgctaagcacctcactgcccatggccactctgagtgtggggcctgccaagcccatgcccatctggagctccagctggcccacaagtgccacacgcagccccagttcccacctgcgcctctcccgccacacctcctggcaagctgagggagccggcttcagcctcaaccagcccagagaggggtccccacagtgcagtggtgggctgaacggctccccgagcatggccagagctgacgccgaggccgatgaggtgccaatatgtgacaatctaaaaacttgtcacacttcacatggatctgtcatggcggaaacagcggttatcaatcacaagaaacgtaaaaatagcccgcgaatcgtccagtcaaacgacctcactgaggcggcatatagtctctcccgggatcaaaaacgtatgctgtatctgttcgttgaccagatcagaaaatctgatggcaccctacaggaacatgacggtatctgcgagatccatgttgctaaatatgctgaaatattcggattgacctctgcggaagccagtaaggatatacggcaggcattgaagaagttcgcggggaaggaagtggttttttatcgcccttga

SEQ ID NO: 114329 - DNA, 737 bp, Homo sapiens
  misc_feature (1)...(737): n = a,t,c or g
tttgtagacattagtccatgcggnggaattcaacgcgagccatggctcgtggtcccaagaagcatctgattctgtgtggcagctccaaagcatgtggatgctggataaattgaccggggtgtttgctcctcgtccatccaccggtccccacaagttgagagagtgtctccccctcatcattttcctgaggaacagacttaagtatgccctgacaggagatgaagtaaagaagatttgcatgcagcgggtccattaaatccgatggcaaggtccgaactgatataaactaccctgctggattcatggatgtcatcagcattgacaagacgggagagaatttccgtctgatctatgacaccaagggtcgctttgctgtacatcgtattacacctgaggaggccaagtacaagttgtgcaaagtgagaaagatctttgtgggcacaaaagggaatccctcatctggtgactcatgatgcccgcaccatccgctaccccgatcccctcatcaaggtgaatgataccattcagattgatttagagactggccaagaattactggattcatcaagttcgaacacttgtaaacctgtgtatggtgacttggaggtgctaacctaaggaagaattggtgtgatcaccaacagagagaggcaccctggatcttttgacgtggttcacgtgaaagatgccaatggcaacagctttgccactcgactttccaacatttttgttattgg

SEQ ID NO: 114330 - DNA, 615 bp, Homo sapiens
atgtggaagcgactttggaactgggtaacaagcagaggctggaacagtttggagggctcagaagaagacagaaaaatgtgggaaagtttggaacttcctagagacttgttgaatggcttttcccaaaatgctgatagcaatatgaacaataaggtccaggctgaggtggactcagatggagatgaggaacttgttgggaactggagcaaaggcactctagcagtggctgaaaggggccaaaatacagcccgggctgtggcttcagagggtggaagccccaagccttggcagcttccccattgtgttgagcctgcgggtgcacagaagtcaagaattgaggtttgggaacttctgcctaaatttcagaagatgtatggaaatgcctggatgcccaggaaaaagtttgctgcaggggcccggccctcatggagaacctctgctagggcagtgcagaagggagatgtggggtcagagcccccacatagagttcctactggggtactgcctagtggagctgtgaaaagagggccaccatcctccagaccccagaatggtagatctactggcagtgtgcaccatgcacctggaaaagccacactcaatgccagtccatga

SEQ ID NO: 114331 - DNA, 543 bp, Homo sapiens
atgtggaagcgactttggaactgggtaacaggcagaggttggaacagtttggagggctcagaaaaagacatgaagatgtgggaaagtttggaactccctagagacttgttgaatggctttgaccaaaatgctgatagtgatatggacaaagaagtccaggctgaggtggcctcagatggagatgaggaacttttgggaactggagcaaagaatggtaaatccaccaacagcttgcactgtgcacctaaaaaagctgccgacattcaccgccagcccatgaaagcagccaggagggaggctgtaccccgcaaaaccacagaggtggagctgcccaagaccatgggaacccacctcttgcatcagcatgacctggatgtgagacatggagtcaacagagataatttgggagctttaagatttgactgccccactggatttcagactcgcatggggcctgtagccccttcattttggccaatttctcccgtttggaatggctgttgtttactcaatgcctgtatccgcattgtgtctagaaagtaa

SEQ ID NO: 114332 - DNA, 1602 bp, Homo sapiens
atgtgggaaagtttggaacttcctagagacttgttgaatggctttgaccaaaatgctgatagtgatatggacaataaggtccaggctgaggttgtctcagatggagatgaggaactttttgggaactggagtaaaggtcactcttgctgtgaaaagagactagcagcatttttcccctgccctagaaatctgtggaactttgaacttgagagagatgatttaaggtatctgggggaagaaatttctaagtggcaaagtgttcaagatgaagcagagcataaaagtttggacaatttgcaacatgacggtgcaatagaaaagaaaaccccattttctatggagaaattcaagccggctgcagaaatttgcataagtaatccggatgttaatccccgatacaatggggaaaatgtctccagggcatgtcagagaccttcacaccagcccagccccttccatcacagacctggaggcctagaaggaaaaaatgctacttcagctccagccctagctaaaaggggccaaggtacagctcaggctattgcttcagaggatgcaaaccccaaggctttgtggcttacatgtggtgttgggcctgcaggtgcactgaagtcaggaattgaggtttgggaacctctgcctatatttcagagggtgtatggaaatgcctggatgtccagacagagaacccagaatagtagatccactgacagcttgcaccatgcgctggcaaaagccatagacactcaatgccagcccatgaaagcagccaggagagtgaatgtaccctgcaaagccacaggggtggagctgcccaagaccatgggaatccacctcttgcatcagcatgacctggatcagtgtaaaagcattcctgttgtgtccagagttgattcctgccgggggggtttgtggccttctgacttcaagaatggagccacggaccttcgtggtgttacaactcttaaaaatggcacggacccaaagttgttccatttctgtcctatcagagtgccctttattcagtcatccccacgattggctacttttagaatcctgctgattggtgcgttttacagagcactgattggtgcattttacaaagctcttgaaggcccctctgctgcaggtctgctagagtttgctggagcatcaagggttataaggcaaagccttggttttacagtggaatccctttactgtgctcagaccaagaaaccaactagcccacttcctgtgatctggactattatatcccactttgcccatgtaaatgaagcaacttgtatttatcgcattgtgattggtattgtgaaccatctacagctgtctatttccttcaactcggaaaaaataaaagttaaaagaacaatcacaaaagaaaatcctcaggcacaaataaagcgccacctagagccaaagtacacgctttccagccacctgcctgtggctgctgccactgaaagcaacaccacactcccaaggagcagggccatagtgcagctgctgctgcctccacctgagcatttcactggggacctggtgatcaccccacccctgcctaccacagccaacatttgcacacatcaacagggggtctga

SEQ ID NO: 114333 - DNA, 1054 bp, Homo sapiens
caagttgtcctgtgtgtacaagtatctcatggacattgatgtgaacacatgaacaactttctttaccttctggttctcatccccaccccatctgatagggtttggctgtgtccccattcaaatctcagcctgaattgtatctcccagaattcccacaaattgtgggagggaaccagggggaggtaattgaatgatagcagctggtctttcctgtgctattctcgtgatagtgaattagtctcatgagatctgatgggtttatcaggggtttcctgcttttgccttccttccctcattttctcttgctgccaccatgtaagaagtgtctttttgcctcccaccatgattctgaggcctccccagcccatgtggaactttaagtccaattaaatctctttcttttgtaaattgctcagtctcaggtatgtctttatcagcagcatgaagatggactaatacagtaaattggtgctgcagagagtggggtgctactgtaaaaatacctgaaaatgtggaagcgactttggaactgggtaacaggcagaggttggaacagtttgtaggactcagaagaagacaggaagatgtgggaaagtttggaacttcctagagacttgttgaatggctttgaccaaaagcctgatagcaatatggacaacaaggtccaggctgaggtggtctcagatggagatgaggaacttgttgggaactggagcaaaggtcactcttgttatgttttagcaaagagactggtggcattttgcccctgccctagtgattcctggaactttgaacttgagagagatgatttagggtatctggaggaagaaatttctaagcagcaaagcattcaaaagatgacttgggtgctgttaaaggcgttcagttttaaaagggaaacagggcataacagtttggaaaatgtgcagcctgacaatgtgatagaaagaaaattccattttctgaggcaaaattcaagctggctgcagaaatttacatgagtaacaaggagccaaatgttaatcaccaagacaatggggaaaaggtttccagg

SEQ ID NO: 114334 - DNA, 391 bp, Homo sapiens; identical to SEQ ID NO: 114142
  misc_feature (1)...(391): n = a,t,c or g

SEQ ID NO: 114335 - DNA, 1437 bp, Homo sapiens; identical to SEQ ID NO: 114145

SEQ ID NO: 114336 - DNA, 434 bp, Homo sapiens; identical to SEQ ID NO: 114146

SEQ ID NO: 114337 - DNA, 843 bp, Homo sapiens; identical to SEQ ID NO: 114147

SEQ ID NO: 114338 - DNA, 2796 bp, Homo sapiens
ggttttcagggacaacaacccccactgtcccaagtgcctcagggaatgagccagttaccacagtacaacaattgtcccccgccacaagcggcagtgcagctgtggatttatgtactataaaggcagtctctctgcttccaggggagcccccacaaaaaatctccacaggggtatatggcccactgcctgaggggactgtaggactaatcttaggtagatcaagtctaagtctgaagggagttcaaattcgtactgatgtggttgattcagactataatggcgaaattcaattggttattagctcttcaattccttggagtgccagtccaggagacaggattgcgcaattattactcctgccttatattaaggttggaaatagtgagataaaaagaacaggagggtttggaagcactgatccaacaggaaaggctgcatattgggcaagtcgggtctcagagaacagacctgcgtgtaaggccattattcaaggaaaacagtttgaaggaaatcagactactacttctgcagaacaacattttactggtaaaaagaacagcccacatgaaggaaaactgatttggtggaaagataataaaaataagacatgggaaatagggaaggtggtgacgtgggggagaggttttgcttgtgtttcaccaggagaaaatcagcttcctgtttggatacccactagacatttgaagatctacgatgaacccatcggagatgcaaagaaaagcgccaccgcggagatggaaacaccagtcacatggatggataatcctattgaagtatatgttaatgatagtgtatgggtacctggccccacagatgatcattgccctgccaaacctgaggaagaagggatgatgataaatatttccattgggtatcattatcctcctatctgcctagggagagcaccaggatgtttaatgcctgcagtccaaaattggttggtagaagtacctactgtcagtcccatcagtagattcacttatcacatggtaagcgggatgtcactcaggccacgggtaaattatttacaagacttttcttatcaaagatcattaaaatttagacctaaagggaaaccttgccccaaggaaattcccaaaggatcaaaaaatacagaagttttagtttgggaagaatgtgtggccaatagtgcggtgatattacaaaacagtgaattcggaactattatagattgggcacctcgaggtcaattctaccacaattgcacaggacaaactcagtcgtgtcccagtgcacaatgtattctgctggtgagggcaagagaagccgtgtggatttctatgtccatggaccaaccgtgggaggccttgccatccgtccatattttgactgaagtattaaaagccattttaaatagatccaaaagattcatttttactttaattacagtgattatgggattaattgcagtcacagctacggctgctatggcaggagttgcattgcactcttctgttcagtcagtaaactttgttaatgattggcaaaaaaattctacaagattgtggaattcacaatctggtattgatcaaaaattggcaaaccaaattaatgatcttagacaaactgtcatttggatgggagacaggcttatgaacttagaccatcgtttccagttacagtgtgactggaatatctcagatttttgtattacaccccaagtttataatgagtctgagcatcactgggacatggtcagatgccatctacagggaacagaagataatctcactttagacatttccaaattaaaggaacaaatttttgaaacatcaaaagcccatttaaatttggtgccaggaactgaggcaatcgcaggagttgctgatggcctcacaaatcttaaccctgtcacttgggttaagaccatcggaaatcaatgcaatgtcccggaatgggcttccatttgccaggcctaccaacctaactgatgactttgagtttcccattgggacatatctgaactatgaatgccgccctggttattccggaagaccgttttctatcatctgcctaaaaaactcagtctggacaagtgctaaggacaagtgcaaacgtaaatcatgtcgtaatcctccagatcctgtgaatggcatggcacatgtgatcaaagacatccagttcagatcccaaattaaatattcttgtcctaaaggacgatcaatgagacagaaagttaacaaggatatccaggaattgaactcagctctgcaccaagcagacctaatagacatctacagaactctccaccccaaatcaacagaatatacattcttttcagcaccacaccacacttattccaaaattgaccacatagttggaagtaaagcgctccacagcaaatgtaaaagaaaagaaattataacaaactgtctctcagaccacagtgcaatcaaactagaactcaggattaagaaactcactcgaaacagctcaactacatggaaactgaacaacccgctcctgaatgactactgggtacataacgaaatgaaagcagaaataaagatgttctttgaaaccaacaagaacaaaaacacaacataccagaatctctgggacacatttaaagcagtgtgtaaagggaaatttatagcactaaatgcccacaaaagaaagcaggaaagatctaaaattgacaccctaacatcacaattaaaagaactagagaagcaagagcaaacacattcaaaagctagcagaaggcaagaaataactaagatcagagcagaactgaaggaaatagagacataa

SEQ ID NO: 114339 - DNA, 7821 bp, Homo sapiens
  misc_feature (1)...(7821): n = a,t,c or g
atgagcggcgcgggagaccccgtgatttatccggaggtgagcagagaaaccgaaagccagccgagcagggaagtcccttctgagtccgaggaaaagtcaagcagggtgtttggaggtgagttgccatcatccaccgcctttgtctggaaggaagcgcagggcctcacacgcgggatccatcggaagcccaagcattgtcaagctctgctgctgcacctgggtcagcaaggtgggctctgccagcgaaactcgttagaaacaatgcaaatggggagtaaacatggccttgcccatgaaggggaagctggtcaaaagcattttgtcccggaaccccgcagccctccccatgctctgggcgcggagcacaaggattggtcactcctctttgcactgcgcttttcctcttatttcagttttcttcgagatcaaatctggtttgtagatgtgcttcgggaggatgggggtctcttctccgagaagccgggagcctgttgggcagccggcgcccggtctccccttctgctgcggaggatccctgctggcggtcgtggtgctgctcgcgctgccggtggcctggggtcaatgcaatgccccagaatggcttccatttgccaggcctaccaacctaactgatgagtttgagtttcccattgggacatatctgaactatgaatgccgccctggttattccggaagaccgttttctatcatctgcctaaaaaactcagtctggactggtgctaaggacaggtgcagacgtaaatcatgtcgtaatcctccagatcctgtgaatggcatggtgcatgtgatcaaaggcatccagttcggatcccaaattaaatattcttgtactaaaggataccgactcattggttcctcgtctgccacatgcatcatctcaggtgatactgtcatttgggataatgaaacacctatttgtgacagaattccttgtgggctaccccccaccatcaccaatggagatttcattagcaccaacagagagaattttcactatggatcagtggtgacctaccgctgcaatcctggaagcggagggagaaaggtgtttgagcttgtgggtgagccctccatatactgcaccagcaatgacgatcaagtgggcatctggagcggccccgcccctcagtgcattatacctaacaaatgcacgcctccaaatgtggaaaatggaatattggtatctgacaacagaagcttattttccttaaatgaagttgtggagtttaggtgtcagcctggctttgtcatgaaaggaccccgccgtgtgaagtgccaggccctgaacaaatgggagccggagctaccaagctgctccagggtatgtcagccacctccagatgtcctgcatgctgagcgtacccaaagggacaaggacaacttttcacctgggcaggaagtgttctacagctgtgagcccggctacgacctcagaggggctgcgtctatgcgctgcacaccccagggagactggagccctgcagcccccacatgtgaagtgaaatcctgtgatgacttcatgggccaacttcttaatggccgtgtgctatttccagtaaatctccagcttggagcaaaagtggattttgtttgtgatgaaggatttcaattaaaaggcagctctgctagttactgtgtcttggctggaatggaaagcctttggaatagcagtgttccagtgtgtgaacaaatcttttgtccaagtcctccagttattcctaatgggagacacacaggaaaacctctggaagtctttccctttggaaaagcagtaaattacacatgcgacccccacccagacagagggacgagcttcgacctcattggagagagcaccatccgctgcacaagtgaccctcaagggaatggggtttggagcagccctgcccctcgctgtggaattctgggtcactgtcaagccccagatcattttctgtttgccaagttgaaaacccaaaccaatgcatctgactttcccattgggacatctttaaagtacgaatgccgtcctgagtactacgggaggccattctctatcacatgtctagataacctggtctggtcaagtcccaaagatgtctgtaaacgtaaatcatgtaaaactcctccagatccagtgaatggcatggtgcatgtgatcacagacatccaggttggatccagaatcaactattcttgtactacagggcaccgactcattggtcactcatctgctgaatgtatcctctcgggcaatgctgcccattggagcacgaagccgccaatttgtcaacgaattccttgtgggctaccccccaccatcgccaatggagatttcattagcaccaacagagagaattttcactatggatcagtggtgacctaccgctgcaatcctggaagcggagggagaaaggtgtttgagcttgtgggtgagccctccatatactgcaccagcaatgacgatcaagtgggcatctggagcggcccggcccctcagtgcattatacctaacaaatgcacgcctccaaatgtggaaaatggaatattggtatctgacaacagaagcttattttccttaaatgaagttgtggagtttaggtgtcagcctggctttgtcatgaaaggaccccgccgtgtgaagtgccaggccctgaacaaatgggagccggagctaccaagctgctccagggtatgtcagccacctccagatgtcctgcatgctgagcgtacccaaagggacaaggacaacttttcacccgggcaggaagtgttctacagctgtgagcccggctatgacctcagaggggctgcgtctatgcgctgcacaccccagggagactggagccctgcagcccccacatgtgaagtgaaatcctgtgatgacttcatgggccaacttcttaatggccgtgtgctatttccagtaaatctccagcttggagcaaaagtggattttgtttgtgatgaaggatttcaattaaaaggcagctctgctagttattgtgtcttggctggaatggaaagcctttggaatagcagtgttccagtgtgtgaacaaatcttttgtccaagtcctccagttattcctaatgggagacacacaggaaaacctctggaagtctttccctttggaaaagcagtaaattacacatgcgacccccacccagacagagggacgagcttcgacctcattggagagagcaccatccgctgcacaagtgaccctcaagggaatggggtttggagcagccctgcccctcgctgtggaattctgggtcactgtcaagccccagatcattttctgtttgccaagttgaaaacccaaaccaatgcatctgactttcccattgggacatctttaaagtacgaatgccgtcctgagtactacgggaggccattctctatcacatgtctagataacctggtctggtcaagtcccaaagatgtctgtaaacgtaaatcatgtaaaactcctccagatccagtgaatggcatggtgcatgtgatcacagacatccaggttggatccagaatcaactattcttgtactacagggcaccgactcattggtcactcatctgctgaatgtatcctctcaggcaatactgcccattggagcacgaagccgccaatttgtcaacgaattccttgtgggctacccccaaccatcgccaatggagatttcattagcaccaacagagagaattttcactatggatcagtggtgacctaccgctgcaatcttggaagcagagggagaaaggtgtttgagcttgtgggtgagccctccatatactgcaccagcaatgacgatcaagtgggcatctggagcggccccgcccctcagtgcattatacctaacaaatgcacgcctccaaatgtggaaaatggaatattggtatctgacaacagaagcttattttccttaaatgaagttgtggagtttaggtgtcagcctggctttgtcatgaaaggaccccgccgtgtgaagtgccaggccctgaacaaatgggagccagagttaccaagctgctccagggtgtgtcagccgcctccagaaatcctgcatggtgagcataccccaagccatcaggacaacttttcacctgggcaggaagtgttctacagctgtgagcctggctatgacctcagaggggctgcgtctctgcactgcacaccccagggagactggagccctgaagccccgagatgtgcagtgaaatcctgtgatgacttcttgggtcaactccctcatggccgtgtgctatttccacttaatctccagcttggggcaaaggtgtcctttgtctgtgatgaagggtttcgcttaaagggcagttccgttagtcattgtgtcttggttggaatgagaagcctttggaataacagtgttcctgtgtgtgaacatatcttttgtccaaatcctccagctatccttaatgggagacacacaggaactccctctggagatattccctatggaaaagaaatatcttacacatgtgacccccacccagacagagggatgaccttcaacctcattggggagagcaccatccgctgcacaagtgaccctcatgggaatggggtttggagcagccctgcccctcgctgtgaactttctgttcgtgctggtcactgtaaaaccccagagcagtttccatttgccagtcctacgatcccaattaatgactttgagtttccagtcgggacatctttgaattatgaatgccgtcctgggtattttgggaaaatgttctctatctcctgcctagaaaacttggtctggtcaagtgttgaagacaactgtagacgaaaatcatgtggacctccaccagaacccttcaatggaatggtgcatataaacacagatacacagtttggatcaacagttaattattcttgtaatgaagggtttcgactcattggttccccatctactacttgtctcgtctcaggcaataatgtcacatgggataagaaggcacctatttgtgagatcatatcttgtgagccacctccaaccatatccaatggagacttctacagcaacaatagaacatcttttcacaatggaacggtggtaacttaccagtgccacactggaccagatggagaacagctgtttgagcttgtgggagaacggtcaatatattgcaccagcaaagatgatcaagttggtgtttggagcagccctccccctcggtgtatttctactaataaatgcacagctccagaagttgaaaatgcaattagagtaccaggaaacaggagtttcttttccctcactgagatcatcagatttagatgtcagcccgggtttgtcatggtagggtcccacactgtgcagtgccagaccaatggcagatgggggcccaagctgccacactgctccagggtgtgtcagccgcctccagaaatcctgcatggtgagcataccctaagccatcaggacaacttttcacctgggcaggaagtgttctacagctgtgagcccagctatgacctcagaggggctgcgtctctgcactgcacgccccagggagactggagccctgaagcccctagatgtacagtgaaatcctgtgatgacttcctgggccaactccctcatggccgtgtgctacttccacttaatctccagcttggggcaaaggtgtcctttgtttgcgatgaagggttccgattaaaaggcaggtctgctagtcattgtgtcttggctggaatgaaagccctttggaatagcagtgttccagtgtgtgaacaaatcttttgtccaaatcctccagctatccttaatgggagacacacaggaactccctttggagatattccctatggaaaagaaatatcttacgcatgcgacacccacccagacagagggatgaccttcaacctcattggggagagctccatccgctgcacaagtgaccctcaagggaatggggtttggagcagccctgcccctcgctgtgaactttctgttcctgctgcctgcccacatccacccaagatccaaaacgggcattacattggaggacacgtatctctatatcttcctgggatgacaatcagctacacttgtgaccccggctacctgttagtgggaaagggcttcattttctgtacagaccagggaatctggagccaattggatcattattgcaaagaagtaaattgtagcttcccactgtttatgaatggaatctcgaaggagttagaaatgaaaaaagtatatcactatggagattatgtgactttgaagtgtgaagatgggtatactctggaaggcagtccctggagccagtgccaggcggatgacagatgggaccctcctctggccaaatgtacctctcgtgcacatgatgctctcatagttggcactttatctggtacgatcttctttattttactcatcattttcctctcttggataattctaaagcacagaaaaggcaataatgcacatgaaaaccctaaagaagtggctatccatttacattctcaaggaggcagcagcgttcatccccgaactctgcaaacaaatgaagaaaatagcagggtccttccttgacaaagtactatacagctgaagaacatctcgaatacaattttggtgggaaaggagccaattgatttcaacagaatcagatctgagcttcataaagtctttgaagtgacttcacagagacgcagacatgtgcacttgaagatgctgccccttccctggtacctagcaaagctcctgcctctttgtgtgcgtcactgtgaaacccccacccttctgcctcgtgctaaacgcacacagtatctagtcaggggaaaagactgcatttaggagatagaaaatagtttggattacttaaaggaataaggtgttgcctgggaatttctggtttgtaaggtggtcactgttcttttttaaaatatttgtaatatggaatgggctcagtaagaagagcttgggaaaatgcagaaagttatggaaaaataagtcacttataattatggctacctactggataaccactccctaatattttgattcatttctggcctattcttctttcacatatgtgtttttttacataccgtacttttcccccttacgtttgtttccttttattttatagagcagaaccctagtcttttaaacagtttagagtgaaatatatgctatatcagtttttactttctctagggagaaaaattaatttactagaaaggcatgaaatgatcatgggaagagtggttaagactactgaagagaaatatttggaaaataagatttcgatatcttctttttttttgagatggagtctggctctgtctcccaggctggagtgcagtggcgtaatctcggctcactgcaacgtccgcctcccgggttcaagcaattctcctgcctcagcatccagggttagctgggattacaggcgtgtgccaccacgcccggctatttattttgttttattttattttcatttttagtagagacaggggtttcaccgtgttagccaggatggtctcgatctcctgacctcaagtgacccacccgcctctgcctcccaaagtgctgggattacaggcatgagccaccacaccctgcctagagtagtctttactctaggaggtggttctttcccctaaggtgtggtttttcaattgaatgcctatgatgttaaaaagttctctccactctggctaggtcagaacctcatatttctcagcactgtgcaacctctagtatctccattctttnntttttttttttttttttttttgagacagagtcttgctctgtcacccaggctggag

SEQ ID NO: 114340 - DNA, 437 bp, Homo sapiens
ctcggcccggcatcggcccagcatccgaggcctccgagtcctgcacaccgtccatctctcttgctccatgcccgcacctataggtcctctcaactgacaaagcccagacatccaggtctctgcatgtgctggaacacacccattcgggcccggatggaatccagctaatctacgacacccatcctggtgtgccctcctataggaagccttccttacatgccacataattttacggcctgcctttagtcacatcatagatcacccgatactgcagctgtcaagcttctctccgcaccctgtgcagccctccaagagagacaccaaggcgtctgaccgtaggtcacacaaggcctaggaaccatctgctgagtactcagtgcactggtggcctggcagggccatgcagcggggctctccgcttcctgcctgagttctcg

SEQ ID NO: 114341 - DNA, 229 bp, Homo sapiens
cttagggcctggtctgcagtcaaggttcattaaacaacacctgttcgtagcggccgttacctctgtatgcttctgcagcaggtgtttgttgagtatctgctttgttccagtatgtgcgtgcaagtgcaggatgggtgtcgtagtttagctggattccatccgggccggaatgggtgtgttccagcacatgcagagacctggatgtctgggctttgtcagttgagaggac

SEQ ID NO: 114342 - DNA, 351 bp, Homo sapiens
ggcacgaggttagcatgccctcacacaactggggggttgttttgcagcaaagtgctgtgaagcaggttgagcctcatgcagtgccagttcctgtatctaaatgtgaaagtggcttgttaaagattaaagggactgcctggtccttctggccccaagatggaatgatctctgccatggcgacagcctctatctcccaggagaggccattttatacagcacatttgtgcttccaaatgttactgtaagcctgcactggctgatactctggcgataagttgacatttgggcactctcaagacatatgagctatatagcatcccatggtttgaatttctgggcaaaattggctca

SEQ ID NO: 114343 - DNA, 489 bp, Homo sapiens
gctttacaaaaaattactctttaattagtgaaaaaattcaaattcaagccttacctaatgcttattgcccttccttgcaggtctaaatgctagacctagtgactgtggcaactatctctcattgatgttccaaaaggcgaagagctccttcctgctagactttcttcgatatttcagttgtggaaagttgctcactatcatcatagtatcttatgccttcacttctctgtagttgaagctcttgctgctgccttgtcattctttatttatgctgacttgtccaaacacaaaaggctgctgaagtcctgtcttagtgagtttctgtgatccacactgtgcttaaaaagcacatcttaggtcctttaaaggtggttaaatcgctctcctcatggcttacttttccacactgttcacaagagctaagctaatacaacttataaacaggtcacatacacagatttcacctgcttataggttgtaacatcaact

SEQ ID NO: 114344 - DNA, 594 bp, Homo sapiens
atgggcttacatggagattccactcgtgtgagtggagaggctttttcttcactgagccctgtgcggttcttggcgggccggtgggaagcaactgagtggctgctgggcggcgggagctccttcggagcaggcccgagctctgggagttggcaaccagaacgccaggttccatttaatgaagttagattaccaccaccacctgatataaaaaaagaaattagtgaaggagatgaagtagaggaactgagggagctgaagaaaggcatccattctcccatctattcccgaatgcagacactaggtgtccatgaattattaactctatgttgtcctcacccatccttagccagcttcttatccaaggctacacaaggacccgggaacaggagtgggaaatgggtctgcccaagagtagctccctaccttggaatccagctgacatgggaaaaagccaaatctactggtttaggaactctgctaccaaaaggaatttccatcagtgaaatttcaaaatcctcattaaggaaaccagaaggagattttacaaacagaagagaaggacaatgtgaagatggaaaagttggagcagagtga

SEQ ID NO: 114345 - DNA, 821 bp, Homo sapiens
  misc_feature (1)...(821): n = a,t,c or g
tttttttttttgcaggggaatttttaaaactaaggtttaaaacgtgtaggacatggtaccaaggtagttttcagttgaagaattttttcaatgtgcctactagagagggacaaagttgtgaaatatgtaatgtagacttgcagggaaacaaatggtgtcatcaggttttactgtcaactacaaaccttacccagccagaaaccttcgtattttagatggtaggaaagacattcctcatttaggcaagtagggttctcattcaacctgcaaatcaaaaagattactcttaccttgctttacaaaaaattactctttaattagtgaaaaaattcaaattcaagccttaccctaatgcttattgccccntccttgcaggtctaaatgctagacctagtgactgtggcaactatctctcattgatgttccaaaaggcgaagagctccttcctgctagactttcttcgatatttcagttgtaataagcagatttaactagcttttggaaagttgctcactatcatcatagtatcttatgccttcacttctctgtagttgaagctcttgctgctgccttgtcattctttatttatgctgacttgtccaaacacaaaaggctgctgaagtcctgtcttagtgagtttctggtggatccacactggggctttaaaaaagcacatcttaggtcctttaaaggtggttaaatcgctctcctcatgggcttacttttccacactggttcacaagagctaagctaatacaacttataaacaggtcacatacacagatttcacctgcttataggttgtaaacatcaacttactg

SEQ ID NO: 114346 - DNA, 405 bp, Homo sapiens
ggctctgaagtagtagtcgttcaggccagtaagggcaaaggtgtgatcctggaagaggcaaaagactgtgtgattctttggatgtggaaactacttgatgtttttgaggaactgaaagaaagccggtgtagactgaacttagtaagcaaaaatgaatttcaggtcatgggaagcttttggattcttggacctacaccagtggtttgccagtggctctcaggccttcagccacagactgaagcctgcactgttggcttccctgcttttgaggttttgggactcggactggcttccttgctcctcagcttgaagatggcctattgtgggacttcaccttgtgatcctgtcccttttagtggaaagaaagcctcagttgaaaaggaagaagccaatgtaaaaatgtga

SEQ ID NO: 114347 - DNA, 757 bp, Homo sapiens
gtgtgatgtggcagcctctccagcagagagcctcatgtccacctacagcagtgagatttccagcagcaaaggctttagcacaatccttccagaagttccaaagctgacagggaccgacagacttgacaacggtgacagcactgggggacaaaattgccaggtcgagagcactgctttaaagaagcagctgacacgtactctggcttactctgtgccttgcaccattggcaactctcagataaggaaactaagtcagaaaggtgaaatgacttcccccgttgggacaactattgtaaaaagaatcagccctcaaggacaggatgttcgcattagggggacaccaacagcaaaaagtggaaccctaaaatgttcatttttcgagaccgctggaggagctatccatgaatgtcactgctccaggccttgccttcctaatcagatgctggatgctgctgccccgcccctcagcttgaagggccagctgattagcaccgggagtgccacatacagtgacatgacaagggctggtgaaaataacatcgcacaaggatatgcctcgctgtcctggcaccctcctctcactccaaataacacatacctgtttacagaagtttctacactacaacacaaccatgaaaaatggagccacaggttagcagagcaagtggcatcgtggacaactgatgggaggaccaaaaagggatctgaaaagctggccaatggcacccagtctaaagagtcccactctggattcctg

SEQ ID NO: 114348 - DNA, 487 bp, Homo sapiens
ggcacgagtcttactgctgtctgccctcgggctcatcatttgctgtgtgaaaaagaagaaaaagaagacaaacaagggccccgctgtgggtatctacaatggcaacatcaatactgagatgccgaggcagccaaaaaagtttcagaaagggcgaaaggacaatgactcccatgtgtatgcagtcatcgaggacaccatggtatatgggcatctgctacaggattccagcggctccttcctgcagccagaggtggacacctaccggccgttccagggcaccatgggggtctgtcctccctccccacccaccatatgctccagggccccaactgcaaagttggccactgaggagccacctcctcgctcccctcctgagtctgagagtgaaccgtacaccttctcccatcccaacaatggggatgtaagcagcaaggacacagacattcccttactgaacactcaggagcccatggagccagcagaataa

SEQ ID NO: 114349 - DNA, 522 bp, Homo sapiens
aaaaacctctggaaccactgaatcaaactggatatcattattgatccctcattcaatccttcaatacccatttagtgtcgtctgtccagatgctgcagatacgcctagcacacagtgactgctcagcgaacagtgtcacaatgaacatgtgcaaatgccttgaaaggccacattgggacttgccctgatcagcaggttggaggtgctccaggcccgaagcttagctgtgagtggggacatgggagggaggttggaactaccactgcagaaggggctctgaacctaggttcaggagagaggctttgaacttgcatgtgtggggagccatggaagtttccaggaaggactgcaggtcccacctggagatgtgcagttcctccttcaggtacctgggaatgtcagtcacaccccagacctgctcagctcctccaaactgctgttcctgtatctgagagcttcaagtccccaaatggcctatctaatacatggggaaactgaggcctggggaggcctggggactga

SEQ ID NO: 114350 - DNA, 357 bp, Homo sapiens
  misc_feature (1)...(357): n = a,t,c or g
agcccactttcacaaagcagcaaattgcaaacttggacaagcaagccaaattgtcccgggcatatgatggtaccacttacctgccgggtattgtgggactgaataacataaaggccaatgattatgccaacgctgtccttcaggctctatctaatgttcctcctctccggaactactttctggaagaagacaattataagaacatcaaacgtcctccaggggatatcatgttcttgttggtccagcgttttggagagctgatgagaaagctctggaaccctcgaaatttcaaggcacaaagaagaanaagaagactattgtgactgatgttttccaggggtccatgaggatcttcac

SEQ ID NO: 114351 - DNA, 1883 bp, Homo sapiens
gccactgcccgtacctggacaccattaacaggagtgtgctggactttgactttgagaaactgtgttctatctccctctcacacatcaatgcttatgcctgtctggtgtgtggcaagtactttcaagcttttcacccttccctacaggccggggtttgaagtctcacgcctacattcacagtgtccagtttagccaccatgttttcctcaacctccacaccctcaagttttactgccttccagacaactatgagatcatcgattcctcattggaggatatcacgtatgtgtttgaagcccactttcacaaagcagcaaattgcaaacttggacaagcaagccaaattgtcccgggcatatgatggtaccacttacctgccgggtattgtgggactgaataacataaaggccaatgattatgccaacgctgtccttcaggctctatctaatgttcctcctctccggaactactttctggaagaagacaattataagaacatcaaacgtcctccaggggatatcatgttcttgttggtccagcgttttggagagctgatgagaaagctctggaaccctcgaaatttcaaggcacatgtgtctccccatgagatgcttcaggcagttgtactttgcagtaagaagacttttcagatcaccaaacaaggagatgggcgttgactttctgtcttggtttctgaatgctctgcactcagctctggggggcacaaagaagaaaaagaagactattgtgactgatgttttccaggggtccatgaggatcttcactaaaaagcttccccatcctgatctgccagcagaagaaaaagagcagttgctccataatgacgagtaccaggagacaatggtggagtccacttttatgtacctgacgctggaccttcctactgcccccctctacaaggacgagaaggagcagctcatcattccccaagtgccactcttcaacatcctggctaagttcaatggcatcactgagaaggaatataagacttacaaggagaactttctgaagcgcttccagcttaccaagttgcctccatatctaatcttttgtatcaagatattcactaagaacaacttctttgttgagaagaatccaactagttgtcaatttccctattacaaatgtggatctgagagaatacttgtctgaagaagtacaagcagtacacaagaataccacctatgacctcattgccaacatcgtgcatgacggcaagccctccgagggctcctaccggatccacgtgcttcatcatgggacaggcaaatggtatgaattacaagacctccaggtgactgacatccttccccagatgatcacactgtcagaggcttacattcagatttggaagaggcgagataatgatgaaaccaaccagcagggggcttgaaggaggcgtctagggctttgctcccaagggctgtggctgatgatggtaaataagaacacagaagctgtagctgaacacaggctggctggtgggcttcctaggccagcccagcttgtatgggttctggctacaccagagcaccaagagcccacttgcctgggatggccccacactgtcactcagttgttctttgatcatttttttctagattgatgctcctttctcccatgcattgagctcccatctagcttcagcagggcagaacccttctccagatgtgtgtaacttatgtcttgagtatctgggagtagttgaagaacagataattccttccaaacatcaagccttgggattcttggagcaagcagaaagccagtaacttcgctctgttagaggtggaggattttcctatggttccccccatttcctgatttgtatttttagatggattaaatagtctcctgttttt

SEQ ID NO: 114352 - DNA, 1665 bp, Homo sapiens
atggagccaaaccacgacgtggagggcctgctaaccacaggccctgtccaggacaatgagggcctgctcatgtccaccctcttacccccaccagccccacacccaccgcaaggtgggaacaacagctcacccccagcgtggggcattgtgagggtcgagctggcccaggcgaagctgcaggcagctgctgcggcttcccatctgcttccatcctgcgatgctgtccggtcatcgcacttggcttcactgctcttccagatgccagcagctcaaaaggcccatggccgcactgcagagccagaagaggcatccaggctcaagggggcacccaggctggagggggcacccaggctggaggaggcacccaggctggaggaggcacccgggctggagtacccagactggaggagtccttaccgcaaagtgacagcagggattgatgggcaccaaccaaccagacaagccaagtcacaccaaagtgctggccagcaagcctttgcagagatcacagtgcttctccaggagactcccaggacggagcccggctgtggatacttcaggaccactggggcacccgtggcttggagaggcccccgacattactggatgtactttagcttcctcttgacaactcaaggtcaagtccacgaacatcagtgcacacacaattccaagatgcaggggacccaggggaggactctgagccctccaagcaagcagaagggggactccgagcacctgaatgacggtacggacctgagtctcaccacccggagccaacctgtgctgcactgtaaccgactattgagtaccctctatgtacctgacacagtgcagcaggatatcaattttgttcgaagtgtcaatgaaggccaggtgccgtgctactcatatgggcagaagctgtccaaactggccatcctgaggatcgcctgtaactacatcctgtccctggcgcggctggctgaccttgactacagtgccgaccacagcaacctcagcttctccgagtgtgtgcagcgctgcacccgcaccctgcaggccgagggacgtgccaagaagcgcaagacccctttccagcaggcccctctgtgggttctccgggtttcccggaggtcccccacggactccagactcatgccagggagggtcacgacaccttctcagggctccccgctgcgctgccacggtaactgcacgttgcattcctgggagtgctttaacgtggaccaattagacaaaatcctcatcaagtggtgctgcatttcagaggccctgcgttttggttggtttggggaaagaagaggaccacagtgggtagtgggagccagggccgctggaagctcggggacacatggggctgacaccacaattaagggtcaagctgccgcaccgggtccgaccctggtgcccagacaggctctatctaatgttcctcctctccggaactactttctggaagaagacaattataagaacatcaaacgtcctccaggggatatcatgttcttgttggtccagcgttttggagagctgatgagaaagctctggaaccctcgaaatttcaaggcacatgtgtctccccatgagatgcttcaggcagttgtactttgcagtaagaagacttttcagatcaccaaacaagagacagtcttgctcttttga

SEQ ID NO: 114353 - DNA, 196 bp, Homo sapiens
aaaagcattctaagcagaaggcacagcaagtgcaaaagctctaaagcaggagcgttcctggtgtattgagagatgattctggacctcagcacagctggcgtacgctgagcaaacagcgagaggtgcggtcgatcggcgaagaaaccaggccagaccgtagtgccttatgagagctctggaaggattctggctttta

SEQ ID NO: 114354 - DNA, 408 bp, Homo sapiens
atggctcctctgggcatgctgcttgggctgctgatggccgcctgcttcaccttctgcctcagtcatcagaacctgaaatttattgctaacaattctaaaggcttggaagtccaagaacaagatgccaacagattcaacgtcagacatgtaagacgtgccagcttccccttcgccttccgccatgatggttccgatgtccagtctggggacacctgggccaacacagcagccccagctgtgaagatggaaggtccaagaggcaccagagaagcagatgataaatggaccacctcaaaatccaaagactggaagaaaattaaaacaataaagaataaacttggctggacagggtctcgctatgttgcccaggctggtgtcaacgcagttgtaattctgctgtaccagtga

SEQ ID NO: 114355 - DNA, 444 bp, Homo sapiens
atgctgcagaagatcataagtaaacaagatgacttgatgacagtgaaaactaatgaaactggatatcaggaagcaatagtgaaagaacctgaaattaacacaactcttcagatgcgtttctttggaaaaagaggacaaagaaaacttcattataaagaatttcgaagtagtggctcaaatcaaccttttcctatcaaaccacttagtgaatcaaaaaaccgcttgttggacagtgaatctcagtggctggagaatggagctgaagaaggcatcgtcaaatcaggaagctgccccaggaatgtgggctgcttccctgacagtttcctgatgctgggtggcaggctttttgctgttgctgctacatcacaaaaggctgaagttcaccaaaatttactagcaacttcatcaaactctccctcaaatgtcagaaatgttccaaaataa

SEQ ID NO: 114356 - DNA, 759 bp, Homo sapiens
ttttttttttatcaaaaaatacatatgcatgttaaaatgtgatgacagctcatattatagcaactcataacaggtaagtattatttccagaataacattaagtcacttttgtagctctaagtcaatgctgcacaaatggacacttaagattaaggcatcattctgctctggagtagtgcttctgtgaatcccaggaactgtacaaaggctttccgttttaaaaaatatatcttctgttatacttcagttatttcattccactgatcattttcttgcaaatgaaaattgaaaataccagtctataatgttttcatacacctgatttgacgatgccttcttcagctccattctccagccactgagattcactggtccaacaagcggttttttgattcactaagtggtttgataggaaaaggttgatttgagccactactgtcatttgccaagttttctgctttctacctctgcagtttagatcttctggcatactcattctggtttgtaacagaagcttgttctggatccatccccacaaggcgagttggaaaactgcaaccatcacccaagcttgaaaatattggaagtagccaatatttcttttcatcaccaaagacttgtctccaatttttactgcatccaagagagaaaccatttccatcaggtccgtatgaaaacgtgggtgcgcggaatgattctggcagatatatggctgcagattgcaggtggattttaacttttttttacaaaacactaccg

SEQ ID NO: 114357 - DNA, 859 bp, Homo sapiens
atcgacgccctgcagatttgtacggacctccagggtcgacccacgcgtccggtctcttcgtaagcagcgcttcatgcagttttcttcactcgaacatgaaggagaatattatatgacaccacgagacgttcctcttctcagtgatgtttgagcaaatggaacgtaaaacttcagtcaagaagctgacaaaaaaggacatcgaggatacactgtcagggatccaaacagctggctgtggatcaacttttttcagagaccttggcgataaagggctaatttcatataccgagtatcttttcttgcttacaatcctcactaaaccccattcctggatttcatgttgcttttaaaatgctggatacagatggtaatgagatgattgaaaaaaagggaattttttaagctgcagaagatcataagtaaacaagatgacttgattgacagtgaaaactaatgaaacctggatatcaggaagcaataagtgaaagaacctgaaattaacacaactcttcagatgcgtttctttggaaaaagaggaccaagaaaacttcattataaagaatttcgaagatttatgggaaaatttacaaacagagattcaaggaaatgggaattccttcagttttctaaaggtttgagtttcatgaggaaaaggaggactttgcagagtggctactttttttccactaacactggaaaataaaggtatttattgggaaaaatgtgaggggggaagttgtcagcaggggagggccttagtttggatgaagtcaaggcattttgtcattgtacaaggcagattggaacactttgctatttgccatgcagatgttcacgttagctcatcgtcctgtcagac

SEQ ID NO: 114358 - DNA, 669 bp, Homo sapiens
atggttgtagatgaaaactggaaagcagaatatggcagggccagccattgcaaaagactgtgtgatgatttgcctttgaatcccttctattctcttgggacaggaggtccccctgacccactcaagacctccagaccaacatggagagcagctcagggcaaagccactgctcaggcccacatggagccccatgaaccttgggtccatgagcaacctggagccagctgctgtagacctgccaacaagagaggctacactcttgcatacccccagcataggggccacatccacggtgctgaggagaagatagccttcaggcttcatctctgctgcacctcgccaggtgtattagtctattttcacactgctgataaagacatatccaagactgggcaatttacaaaagaaagaggtttaattggacttacagttccacatggctgtggaagcctcacaatcaaggcagaagacaaggaggaggaagtcatgtcttatacggatggcagcaggcaaagagagagaacttgtgcagggcaactcctcttttcaaaaccatcagatcttgtgagacttgttcactatcatgagaacaccatgggaaagacttgcccctatgattcaattacctctcaccaggtccctcccacaacacatgggaattcaagatga

SEQ ID NO: 114359 - DNA, 820 bp, Homo sapiens
tggattttttaaattttatttttattttttttttagaaaagagagagaacatcatcacaatgaagaaagcctggtgcagtaaatcaaggtggtgccagggatgacttgcgtatatacaacgtttgccatggagtcctgtgctctttgccagaggtgagattcaggtttcgactctgaacttctcagcagcatgaactgggaaactgttgaaaccaagctgatatgtggttgctagctgattccaataagaggctcagaattagaatacttgatccagagtttttacattaattcatccctcccgtcttgtttcttctgaggcagcagccagagatcacagggtttgctatagtcgccacttcacttcggcacccaaaatgggaactgggcaagggctccaaacttggctccctggatgggacccctgtcagctttcatccaacctctgaccaagagtttcaacatgatgtttctggggcaagatgatcgccccaaagttggcccattggtgctgcagtctatttccttagggtcaggggtctcttcagtattgtcccttcatggtcaccaggaagatgttaccagaaaagggtcccaatccagaccctacaagaaggttcttggatctcacacaagaaaggatacaggattgaaaatggctcaggaatcagtcagcaagttgacttcagagaagaaagtggagacaaagaaaatcaatcccactgctagcctgaaggcagtccctgaggaggaagctcggagaatgaagagcataacatccatggcaaatcgggaacttctgccattctgcagagactaa

SEQ ID NO: 114360 - DNA, 5718 bp, Homo sapiens
attaagctttagcgtaacagattcttttcaatcaagtactggaatcagttgtccaggtggagtaatacagaaaagctaaggtctagaaaccaggggaccattttagatacaaagcagaattgcggaattgccagattataacttgaggtttgttcgggggattttttttaaccatctaaaataaatgtatataagatggactgagtcttctaaagagattctaaaactatattcttacttaagtctgaacaggaattaagaataactcaaagtgaatttgatcgtcaagcagagattaccagacttctgctagagggaatcagcagtacacatgcccatcaccttcgctgtctgaatgactttgtagaagcccagatgacttactatgcacagtgttaccagtatatgttggacctccagaaacaactgggaagttttccatccaattatcttagtaacaacaatcagacttctgtgacacctgtaccatcagttttaccaaatgcgattggttcttctgccatggcttcaacaagtggcctagtaatcacctctccttccaacctcagtgaccttaaggagtgtagtggcagcagaaaggccagggttctctatgattatgatgcagcaaacagtactgaattatcacttctggcagatgaggtgatcactgtgttcagtgttgttggaatggattcagactggctaatgggggaaaggggaaaccagaagggcaaggtgccaattacctacttagaactgctcaattaagtaggtggactatggaaaggttgcccatcatgactttgtatttatatacaattaactctaaataaagcaggttaagtatcttccatgttaatgtgttaagagactgaaaataccagccatcagaaactggcctttctgccaataaagttgcatggtaaatatttcattacagaatttatgttagagctttcatgccaagaatgttttcttacaaaattctctttttattgaggtttcactaataagcagcttctacttttgagcctcaacttaaagcagaactgttttctactggatttttcattaacagcaagctttttcttttatgtaaaataaatctattgtgaattgatatcagcgactcatttattaggtataaataatagccaaagaataaaattaaaatttattttaaactttcggtcttaaaaagagctgtaggatataaacctcttttgtgaaaagtagaattttctgaatgctttcatagacaaaaacgcatttaaactatgtttacctggttttccaacagaaatcaaatgattttaatattatgttttgatgggttattttcagagttgtttggttttttaaacactactgaatggtttcttttaaatttaagaacaactagttcttgaaaagcaataccgtatttctctgataaatttgtagttaaggttctagaaaatctaggacaaatttacttcattaaacataaagtttttaagattattcagttggcacaatttaatgcataattgggattggatccatttactgtactgtggtacagtaaagagaatgtgttcttattgaacagcagatttgtatacaaatacggaataatgcaactacattataaattgtatacgaacaaaataaattgggtcactctgagcttactattaaaacattgaaaatttattaatgaacacaggctatcttgatgaggatctctgcttatgaaacacatactaatgaaattattagtgacacattggaagctagaaaattgctgttggggccattgctataaatcattgtttccatgttaagacttctgttctaattcattcattcaacaaacatttgttgagggccagatactgtgctggtcaactggggatactgtcctgaacaatatgcacacagttcttgcccctgcagagcttaaagaccattaaaggatacagaaaattaagcaattatcctatagtaggattcgtggtgtgatggggaaaatacaaggtactgtatttgggagtcatgtaactccagttttgggagtgagagagggtctggggaagaactgttccagataaaaagatgtgtaaccaagatagcatagcacattctgacaactaaagcaatttactctaacttaagcatgaagtacaaaagtatagttcatttattgagggaatgttaagctattaaaatgatactttttggtacttttaaaaaaatgaatacttaaacaccgttttaaaattttgtgttaagagctcctaataagaacttggtaaacatgttgacaatttaactcacagtctaaactttaaaagtagtagttacccttttatttctgtgccatgagacaaattcttctgcagttttatagttgtacaagatgttttgactcactctcaattgccatattcttaaagaaaccctgaaaagctgctcaagctggtcagttttctgtaaaaccaagtaaatgaaattttctctcccctcagaaaggaagttctacagcctagagtaccatctattgtgttttataagtccagatttaggctttgaaagatcataccaaaacttcagatcgacttaaacagcaactatgaattaggtttatgggaaatgtagtaatacaggggaaagaatatcggtaatggagtgaaatggtcctgggttcaaatccagtcttcctcacatattgtgctctttaagcttcaaatgagatgtataactgccttttccttaccagtaaaatgaggacaataattatgacaccatagggtggttgtgaggattagcaaatgttatcttgtatttcaggtgcctttcagggaaaggcttggcacatagtaaacacatcctgtaaatatcagtttccccttgttagcccctgtagcatcctgacctaccaagtctataggccttgcatatcactgtgcaccagagatacctcttttacatctgggctctgttttctctctatcaatcctatcctccaccctctttaaatcagaccccaggtttaaccttcccacagtcagtataaatcatttttcagaactttcagctttccatcaagtgaaagttgattttagttacccagtaatgtacagaaaccttcaataatgttaagcttcaaaggcttctggtacgtttgtctaccacagaaccaccacaatatatatgcttgttcttaggtttattgctttttattttaatggggtttggttgtttgggttttattttggttttggcttattttaaagtcaagtttagtttttactcaggtaaaggcctgaagtttcttgggcgtggaagaaaaagcttgggaagcctattaattcatggtgcagttcagaattgtttaaataagctctgtgccactgagcttaatctgaaagtatagtgacatgtgaaggatgcacatatgaatgaaaaactaaaataattgtaggctcttctataaatgaaaaaaaaagtgattggattgtgtctacctttttcctcaaagtaatctaacctaaacggtcatggtgttaaaactttttatggtgctaatcagaaaaattgatgttgcaagaaatgaggtctcaaaaatgggaatgtgcctcctcactctgcgtcacatgggaaataaatcctgaggccaggatcaccagtggggtagagtcatcttcatagtctcctgttatcctccccctgaacaaagaacaaagtgaggactgggaagctagtgttggggaaacatttctgggataaactgtggagtggagaagacaatggagggcaaggcaaaaacccacagacttgtttacccatagaggccccactcacctccatgctgacagaattccagaaaaattccttccctatctcccaaacacctgaaattctgaaatattgccctactatttagcactttaagcttcagtgaggtgctgtaatggagagatagcttcatagtttagcctatagccaactttgcctcaagacctccagataagatgaagtggcttttacctcatgtgagtctcaaacgctggagagagagttccacaaccacccctgccctttctcccatattacgctcattagaaagtctactcagggctgggtgccgtggctcatgcctgtaatcccagcactttggaggctgaggcgggtggatcatctgaggtcaggagttcgagaccagcctggccaacatggggaaaccctgtctctactgaaaatataaaaattagccgggcatggtggcgtgcacctgtaattccagctactcgggaggctgaggcaggagaatcacttgaaccccagaggcagaggctacagtgagccaagattgcaccactgcactccaacctgggtgatagaataagactcttgtctcaaggaaagaaaaaatgtctactcagtagagcagtgattggcaaagtgtgagaccccagaccggcaatattggcatctcctggagacttgtttaaaatgctgattactattttcaagaactttctaccttcatttttacttatttttttgttttcaagggctcatggaatcagtcttccatgtgacagctttttaaatattttaagacaaaaactgagtcttctaatcttaattgtgttctagcagtagtcattgtaattatagttatttttataatttatttgtttagtgtatatctgtcactctagaatgtaggctccctgagataaaaactataattcttttgatggcagttacattcccaactcttagcacaagatctaggacatagtatgaactcaataaatttttgttgaatgaaagaaaaatgcaaatttataagccttttcagagacctactgaatcaaactctgagagtggagcccagcaatctgttgtaaaagctgtttgagtaatactgttgcactctaagcttgagaaccactgcaatagaactaagagaacattcatttcaccttcaggcctattctctgacatcacttgaaaaatcctctctgccttctgtaacccttaaccaacaacagtgccctgtccatgtaggggaaacttctgggctgtattacaagtgggtaggaaggtataaggatatcatagtgggaagtattgcttagaatgccagtacttgtttgctgtggaaggtttctaggaatggattgcttagtctaaagtaagcactaccaccatccacgttttcactcaacacagtgccttttaattggtgactaacatcaaaacaccttgacaaaccgttaaaacagtatcagaaaccatgtgtacatccctgtgcctcttagattgctaagttctgctctcattcttacttcaaaggacactttttaaagaattgttaatgcttttttataatacaagtcatagccctgttggcaaaaagaaaaaagattcagtgagaaagaaaaatcactgataattccatcatccagggagaaccactgttatttaagtatatggccttccagacctttctgtgcatttatagatatttttaatgggatcaaagtgtacatactgttttgtaactttttttcactcaacaataccatgactgtcttgctgtgtcaagtatatttctacatctcttaatggctgcatgatattccatcatatgtgccacattttattaaactactgttcaatttttaggtttccaactttcattaataaagtgctttaaag

SEQ ID NO: 114361 - DNA, 747 bp, Homo sapiens
atgcactcagcctctgcagaccttactcctcctcatccttcaggcctcagattagactgcattgatttcaggaaaactttcttaaacctcagcaatccctaccccatccgcattcccgtaggctggatccttgcatggaaggttgtattttccaaagatggctgtaacaatatctcctactccacatgctcctcttataatgtggctttgatgtgcctctcatcaagaggtgggatctatgctccctcacttaaaatgtggccctccacgttggcccatgccaatgccttgtttgattctccatccttgtcagtccgctccatttcacaacacttaactgtctgtgccagccgtatccagctacgacaagaaaatctgatgaaaatcttcttagccctagctgctgagagtagagaagcggaaatgaagaggtgggactcaagccagtttattacgcctcttgttggtggtgctggtaagggcttggcagggaaaggaaactggaactacggccctcatcagcagaggcaagggagggtttctgattcagcagcggcccgagactgcatgtctaataaatttctaggtgatgctgatgctgctggtctgagaagtactgtttgctacaaacctaggagggggaggataacaggagactatgaagatgactctaccccactggtgatcctggcctcaggatttatttcccatgtgacgcagagtgaggaggcacattcccatttttga

SEQ ID NO: 114362 - DNA, 887 bp, Homo sapiens
ggcacgagggcgcccagcatgagggtcgcggctctgatcagtggtgggaaggacagctgctataatatgatgcagtgcattgctgctgggcatcagatcgttgctttagcaaatctaagaccagctgaaaaccaagtggggtctgatgaactggatagctacatgtatcagacagtggggcaccatgccattgacttgtatgcagaagcaatggctctctcccctctatcgccgaaccataagaggaaggagcttggatacaagacaagtgtacaccaaatgtgaaggtgatgaggttgaagatctctatgagcttttgaaacttgttaaggaaaaagaagaagtagaggggatatcagtaggtgctatactttctgactatcagcgtattcgagtggaaaatgtgtgtaaaaggcttaatctccagcctttagcttatctttggcagagaaaccaggaagatttgctcagagagatgatatcatctaacattcaagcaatgatcatcaaagtagcagctttgggtttagatcctgataagcatcttgggaaaaccctggatcaaatggagccttatctcatagagctttctaagaagtatggagtacatgtttgtggagaaggtggagagtatgaaactttcactttggattgccctctatttaagaagaaaataattgtggattcatcagaagtagtcatacattcagctgatgcatttgcacctgtggcttatctacgctttttagaattgcacttggaggacaaggtgtcctcagtgcctgacaactacagaacatctaattatatatataatttttgaaaagtgttttggaacattgttcattaaacccccatttctatccaaaaaaaaaaaaaaaaaaaaa

SEQ ID NO: 114363 - DNA, 886 bp, Homo sapiens
ggctgtccttttgcgtttagagagaaaatatttaatctatttcacgaaaaaaatgtacaaagctttagaaaagaggcattaggtttccatatacagtataaacacatcctcaccctcctaggatcacttgtattacaccttcctctttgcctagtaaagaagcccactgcactcctcgttcccaaacaatccttcctgttaacacatgcacttgaaaaagtcactgaaaaggtacagtcttgaaataaatgtaggaaatacaatgttgtacaaaaatatattaatctggtctacatggaaacacttaaaaatggcacaccaaggtacattcttttagaactagactatgtctagaaataccaatatatgaacttgtagattggattttcgctgcatttttaatcactggagaaaaaaatataatcaagcctttggaataagaaacatgaagttagcacagcagaccaactctattctcagaaatgaaaccataaactttatcccatacaaaagatggggaaagagtttgagtttcctaaaattggacatatttatggaaatgttataatttaaaactgcaatccacacagcaaactttcatttgttccataatcccacatgtaaagatatgacaattacaacatttcctaattgcctctcaatgcaacttaacagtgagaatttaaacttaaaaaaaacagccctatgtacaaatataattaggaaggtatccctcaaagtagagaaaattaattagaactcatggggtattgttcccctcctttaaaaactgagctattattaagaaatgctacggaaaaaaatactacaacaaaattgttctgccatatctgttatttatataaccataatttctcactgaaac

SEQ ID NO: 114364 - DNA, 393 bp, Homo sapiens
atgcccctacatatcactccgctgggcctgctgctcctcatcctggactgcctcatctcaagcctgtcgtcactgcatacagagctgatcatgaagagacggcagctgcccctggcacttcagaatgtcttcctctacacctttggtgtgctcctgaatctagatctgcatgccgatagtggccccggcccaggcatcatggaaggcttgtcagcatgggcagaacttgtgcacagcagcagcatcccatgcctcttcgttgtgtcctgctcactggtggtcaatgccgtgctctcagcagtcctgctgtggctgcagctcacatccaccttcttcctggccatgctgctcatcattagcctggccgtgtgcccgtgctatggcagacgctag

SEQ ID NO: 114365 - DNA, 1491 bp, Homo sapiens
atgggcctctttgaaggtacatttagagaagaacagaaatgtacataccaatttctgatgcaaggattcatctgcaaacagactgaccaagtggtcctaattcttgatagcgctgatgccatttgggcaattcagaagttatatccagttgtatctgtgactagtggttttgttgatgtctttagcagtgtaaatgccaatattccctgctctacttctgggtcagtgtctactttctattctatcttacccatcaggcaaatcaccaaagtctgcttcatggatcaaactcctcaagttttgcgcttttttctattggggaacaaaagtacctccaagcttctcttggctgtattctaccatgagctccagagcccccacgtcttcttaggggaaagttttattccacccactctggttcagtcagcttccttattgctgaatgaatctattggtgccaactatttcaacatcatggataacctcttgtatgttgtcctacaaggagaggagcccattgaaatacgctcaggtgtttccattcacttggccctcactgtgatggtttcagtcttagaaaaaggctgggaaatagtaatactcgaaagactaactaacttcttacagattggccaaaaccaaatcaggtttattcacgagatgcctggccatgaagagaccttaaaggccattgctgacagtagagcaaaaagaaagcgcaattgccctactgtgacttgcactagtcattatagaagagttggtcaacgtaggcctctcatgatggaaatgaactcacatagggcttcacccccaatgactgtggaaactatctcaaaagtgattgtcattgaaattggtgattcgccaacagtaaggagcactggaatgatttcatccttatcaagtaacaaattacagaatttggctcatcgagtcatcactgctcaacagactggggtactagagaatgttctgaatatgactatcggggccttactagttactcagtcaaagggagtcattggctatggaaatacaagcagttttaaaactgggaacttgatatatattcggccctatgcactttccatcctagtccagccttcagatggagaagtgggaaatgagcttccagtgcagccacaattggtatttttggatgagcagaatcgaagagtagagtccctgggacctccttcagagccatggacaatttcagcttccctggaaggagcatcagactcagtgctaaaagggtgcacccaggcagaaactcaagatggttatgttagcttctacaacttggcagtcttgatctctgggtcaaactggcactttatttttactgtcacttctcctccaggagtcaattttacagctcgatccaagccatttgctgtcttgcctgtgactaggaaggagaagtcgaccatcatcctggctgcttccctgtcctctgtggcctcatggctggctctgagctgtctg

SEQ ID NO: 114366 - DNA, 434 bp, Homo sapiens
gatcgtgtcgtgaatttcgaagcatgcagagaaatggaaagcttatctgcaccgagaaaataaccctgttcgaggcccatatggcaagatgcacatcaataatgtgctatgtgtcaaagcatcttaaaatgggcctgatgctcatgcagttggatttccatagattctggcattgttatgagaaatacttaggaaatggattgtttgatggtgaaacttgcaagccaactaaagagaaaggggctgatgtcataagtcaaatttcacattattttgatgcttttgctggcttctttttaatttgtaaagagaaggaacaggagcccaaaggtgattaccagtcagagcagctcatcattaaaaggtctgagcttgtgctctttccagccaattcaaccgaagaaccaggaactgaggaggaaggaagtaattga

SEQ ID NO: 114367 - DNA, 3278 bp, Homo sapiens
tatgcatggagtggacctgtaggcgacttgcatcgtcttcaacatgaagatagccacagtgtcagtgcttctgcccttggctctttgcctcatacaagatgctgccagtaagaatgaagatcaggaaatgtgccatgaatttcaggcatttatgaaaaatggaaaactgttctgtccccaggataagaaattttttcaaagtcttgatggaataatgttcatcaataaatgtgccacgtgcaaaatgatactggaaaaagaagcaaaatcacagaagagggccaggcatttagcaagagctcccaaggctactgccccaacagagctgaattgtgatgattttaaaaaaggagaaagagatggggattttatctgtcctgattattatgaagctgtttgtggcacagatgggaaaacatatgacaacagatgtgcactgtgtgctgagaatgcgaaaaccgggtcccaaattggtgtaaaaagtgaaggggaatgtaagagcagtaatccagagcaggatgtatgcagtgcttttcggccctttgttagagatggaagacttggatgcacaagggaaaatgatcctgttcttggtcctgatgggaagacgcatggcaataagtgtgcaatgtgtgctgagctgtttttaaaagaagctgaaaatgccaagcgagagggtgaaactagaattcgacgaaatgctgaaaaggatttttgcaaggaatatgaaaaacaagtgagaaatggaaggcttttttgtacacgggagagtgatccagtccgtggccctgacggcaggatgcatggcaacaaatgtgccctgtgtgctgaaattttcaagcggcgtttttcagaggaaaacagtaaaacagatcaaaatttgggaaaagctgaagaaaaaactaaagttaaaagagaaattgtgaaactctgcagtcaatatcaaaatcaggcaaagaatggaatacttttctgtaccagagaaaatgaccctattcgtggtccagatgggaaaatgcatggcaacttgtgttccatgtgtcaagtctacttccaagcagaaaatgaagaaaagaaaaaggctgaagcacgagctagaaacaaaagagaatctggaaaagcaacctcatatgcagagctttgcaatgaatatcgaaagcttgtgaggaacggaaaacttgcttgcaccagagagaacgatcctatccagggcccagatgggaaagtgcacggcaacacctgctccatgtgtgaggtcttcttccaagcagaagaagaagaaaagaaaaagaaggaaggcgaatcaagaaacaaaagacaatctaagagtacagcttcctttgaggagttgtgtagtgaataccgcaaatccaggaaaaacggacggcttttttgcaccagagagaatgaccccatccagggcccagatgggaaaatgcatggcaacacctgctccatgtgtgaggccttctttcaacaagaagaaagagcaagagcaaaggctaaaagagaagctgcaaaggaaatctgcagtgaatttcgggaccaagtgaggaatggaacacttatatgcaccagggagcataatcctgtccgtggaccagatggcaaaatgcatggaaacaagtgtgccatgtgtgccagtgtgttcaaacttgaagaagaagagaagaaaaatgataaagaagaaaaagggaaagttgaggctgaaaaagttaagagagaagcagttcaggagctgtgcagtgaatatcgtcattatgtgaggaatggacgactcccctgtaccagagagaatgatcctattgagggtctagatgggaaaatccacggcaacacctgctccatgtgtgaagccttcttccagcaagaagcaaaagaaaaagaaagagctgaacccagagcaaaagtcaaaagagaagctgaaaaggagacatgcgatgaatttcggagacttttgcaaaatggaaaacttttctgcacaagagaaaatgatcctgtgcgtggcccagatggcaagacccatggcaacaagtgtgccatgtgtaaggcagtcttccagaaagaaaatgaggaaagaaagaggaaagaagaggaagatcagagaaatgctgcaggacatggttccagtggtggtggaggaggaaacactcaggacgaatgtgctgagtatcaggaacaaatgaaaaatggaagactcagctgtactcgggagagtgatcctgtacgtgatgctgatggcaaatcgtacaacaatcagtgtaccatgtgtaaagcaaaattggaaagagaagcagagagaaaaaatgagtattctcgctccagatcaaatgggactggatcagaatcagggaaggatacatgtgatgagtttagaagccaaatgaaaaatggaaaacttatctgcactcgagaaagtgaccctgtccggggtccagatggcaagacacatggtaataagtgtactatgtgtaaggaaaaactggaaagggaagcagctgaaaaaaaaaagaaagaggatgaagacaggagcaatacaggagaaaggagcaatacaggagaaaggagcaatgacaaagaggatctgtgtcgtgaatttcgaagcatgcagagaaatggaaagcttatctgcaccagagaaaataaccctggttgaaggcccatatggcaagatgcacatcaataaatgtgctatgtgtcagagcatcttgtacgaccagtgcagacaggttcagaatgaagcggaggatgcaaaatttagacaacctgggcgttccttggcctctgttgccaggatgagtacagatgagtgcagtgaatttcgaaactatataaggaacaatgaactcatctgccctagagagaatgacccagtgcacggtgctgatggaaagttctatacaaacaagtgctacatgtgcagagctgtctttctaacagaagctttggaaagggcaaagcttcaagaaaagccatcccatgttagagcttctcaagaggaagacagcccagactctttcagttctctgctgatggtcaccagtaatgattctgagatgtgcaaagactaccgagtattgcccaggataggttatctttgtccaaaggatttaaagcctgtctgtggtgacgatggccaaacctacaacaatccttgcatgctctgtcatgaaaacctgatacgccaaacaaatacacacatccgcagtacagggaagtgtgaggagagcagcaccccaggaaccaccgcagccagcatgcccccgtctgacgaatga

SEQ ID NO: 114368 - DNA, 330 bp, Homo sapiens
atgagtgagcaggaagaggagcttgaggatgatcctactgtagtcaaaaactataaagacctggaaaaagcagttcagtcttttcggtatgatgttgtcctgaagacggggctagatattgggagaaacaaagtggaagatgctttctacaaaggtgaactcaggctgaatgaggaaaaattatggaagaaaagcagaacgccatccttgtcattgtccagtgggctcatggtggcagaagcccagcagcatagacttccattcaccgtggccaacctggctacaaccactggggagtgcccaacctgctgctgcagggaccaacactga

SEQ ID NO: 114369 - DNA, 1096 bp, Homo sapiens
gggacgagagggcctgacgtacagattataatgcgccatggctatgcgctagtgttaaattgcttgccggtgttttaagaaagccagatgcctggattggactctcgggtgttctccgagggacaccttcatcatacaaactctgtacttcctggaatcgatacttgtatttttctagtaccaagttacgtgcaccaaattataaaacacttttttataaatattttctcactgagactcccagggcttttactatctccagaatgtatttttcctttttccgtaagacttcaaaagtaatataaaggtctacaaaatctacttaaaaagtctctggcaaaaagtagatgaagaggactctgatgaagaaagccatcatgatgagatgagtgagcaggaagaggagcttgaggatgatcctactgtagtcaaaaactataaagacctggaaaaagcagttcagtcttttcggtatgatgttgcccctgaagacggggcctagatattgggagaaacaaagtggaagatgctttctacaaaggtgaacctcaggctgaatgagggaaaattatggaaaaaaaacagaacggttaaagtgggagataccttgggtcttttccttggagaggataaaaaagcaggaacaaagacagttattcggattttcttgaaaaaagtgtttgaaaagaagactgaaagtgaaaaatacagagtggtggttcggcggtggaaaagtttaaagttgcctaaaaaaagaatgtttaaataaatggattgctttttagccataaagctgctttttagtggtaaaggaaggggtcccctgaaaaataggacctttttattaaaataaagttctcttagcggttgtggaatctgccgagccattttgtggaaattgggatccatatctggagacacttcccaaggcctgcctcacctccaccccctgcccaccttgatccatgctcctttgacctcgtgtgagaacccctttgccagagtgagacgtgtgcagaatgaactaagccccagagggttttaatggcttgcctgctgtttcccacataaactacctcaggagtcacagtaaaat

SEQ ID NO: 114370 - DNA, 713 bp, Homo sapiens
ggcacgagcggcacgagtgggcacagttgctggtggaggtcctggggctggtgtgagtgcctccaattcccttgctttacgcagcttctcacgctttcgctggatggcagcaacccgttcacgtactgcacgggccactggctggttaatcggcttcacagaccaagcccagagccacctggaattggggtgggggatgaggaacacagcttgggaccccctatcaaagattcatcaagacgccttgcacgtgcacccactgcctcttcccttcttctcgccttgggaactcctagtctcgcgcctcgggttgcaatggaccccaactgctcctgtgccgctgcaggtgtctcctgcgacctgcgccaaactcctgcaagtgcaaagagtgcaaatgcaccttcctgcaaagaaagagctgctgctcctgctgtcgcctgtgggctggtgccaaagtgtgccccagggctggcatctggcaaagggggcatcgggagaagtgcaggctgctgcgcctgatgactgggacagccctgactccaagtacaaataggagtgacccgtacaatccagggatttttgtgtttttttgctaacaatctttgaacccctttgcttacattcctttttttcttgtggaaatatgtggaataattaatttaaacatttaggatttgaaaaaaaaaaaaaaaggccggccgctttaaagaacc

SEQ ID NO: 114371 - DNA, 873 bp, Homo sapiens
atggccgggtacccctctgagaggaaaccaccagaggaacgatcacacagcaacgtttgctgttcagcattattcgctgttctgcagcctccactactgatacccaggcaaacggggtctggaatggacctccagcaaactccaacagacctgcagctgacggtcctgactgttagaaggaaaactaacaaacagaaaggacagccacaccaaaaccccatctgtacatcaccatcatcaaggaccaaagaaatacaaactatcatcagagaatactataaacacctctacacaaataaactagaaaatctagaagaaatggataaattcctcgacacatacaccctcccaagactaaaccaggaagaaattgaatctctgaatagaccaataacaggatctgaaattgaggcaacagttaatagcttaccaaccaaaaaaagtccaggagcagatggattcacagctgaattctaccagagagcctggaatcctcctggaatccgttccataccacatctcataagtgaagaacctgaaaggaaagaactgaggtcaacagcaaagatgagaagcagtgaccagagctgctccaagccttgtttgatcagaagcctgaagggcaaaattgtctcctttggtgcactgacttggatctccttgtttttcacaggacaaagagatgaagaaaatggattttgtttgcctgtgaaaggcaagctcaatgttcagatgtgtccagagtttcttccttctggtgggttcgtggtctcgctgacttcaggagtgaagccgcagacctacacagtgagagttacagctcttaaaggtggtgcagacccaaagagtgagcagcagcaagctctattgtga

SEQ ID NO: 114372 - DNA, 1737 bp, Homo sapiens
atgaacacctcttgcccaagaacctgcagcattccctggaccctgttgatcggaatagttgcactcactgatgcagcagcagaaactctagttttcctcctagaccacaaggaggaccaaggaagaagtacaggaaaagcggaagctggttctaggcaaaccaatggtcccaactccaaagagtcgggggttgttagagagccctttcccagtaagcctgacacccgtgtctttagtccagtggccgtactagtcgcttttaactggctgacaggtgatagtcccttagtggtcaccaagatgtgcccagttcttggtctcaatgacttcaaaaggaagccatggaccttcacggtgagtgttacagctcttaaagatggtgtgtcaggagtttgttccttcagatgttcagatgtgtccagagtttcttccttctggtgggttcgtggtctcgctgacttcaggagtgaagccgcagaccttcatgcccagcatctccaaggcccacgaatatttctgaagcaagcaagggtgaatgtgtggcaaacatcagagtggagctacctgccagtcccgcgccatgtgctggcactcctcagcccctttggatggtggatgggactgggcgccctggagcagggggcggcgctcgtcggggaggctcgggccgcacaagagcccacggagggggtgggaggctcaggcatggcgggctgcggatcctcagccgtgccccgcgggaaggcagctaaggcccggcgagaaatcgagcgcagtgccgttttgggtggagcccgtcaccggagtaagaacttctttacttcctggatgccttttagccaatcaaatggtgctttttccagacctgcccaaggaccaatcagcatgcactcctccattctgagcacatataaaccctggactcagcctcacagtttctgccatctccaagttttcaggcattgcaggctccctatagtccagacactgacgccggaggtggaagcctatcgcggcatatcccgtaccagccatgggatgagcacagagccttggcggttgcaggatcctgaatactggttattgactaagaggtctgagttattaagcatcaagagagttgagcatgctcttggcctaaatagatgggctcagcaaaactcagagtattttgcaactgaagtccacaaatgtgagcatttgccatccaacaaaaaggtggagtcacagagctatctgctgctcctaatattggagagcccaacaggtgaacgcagagaactgcagcttgctggagcggaaacccacaagcaaaagcaacacggggaaccaacattgaggtatttacccaagatgtgtaattgttcaaccaggctcctcttgcctgctaccctgaaaaagtcctatacactgagaatagcaggtgttgcagcagggaaagagtttacagggtcagactcttcaactgttgctgaaaaattattgatgtctgatgaagatcttgattcttttacagttctatatgacataatcagtatagaatttataattgttgaagcaaaagtggatgggaaatgtagtcacatcatggaagccattgccaaccaacaactttactccatggaaaaggaacataaatcatggatagagcactacatacttattacccacctaaaactattgaaaattgttgcagaaaacctgagtgtaccctattatgtaggagtgactgaatag

SEQ ID NO: 114373 - DNA, 690 bp, Homo sapiens
atgggcagtgggcctcgggtgagacctagtgctgtgctggcttcaggtctgaatcagagcagtcctagtggtggtagccacagggtgcttatatcaccattccccccaagctccaggcagttcagcacagagagactctatttgggagaaaataaaggaagacaacaagagtctctgcctgttgatccagagaattcttctggatcttacacaagaccatcaagggggtacctctatgagtctgcaaaagccacagtgttactggctttggggttcttggtctcactgacttcaagaatgaagccacggaccctcacagtgagtgttacagctcttaaagatggtgtgtccggagtttgttccttcagatgttcagatgtgtccagagtttcttccttccggtgggtttgtggtctcgctgacttcagaagtgaagctgcagacctttctcaaaaaggtcaagttaacagaaacacatgtccagggcttatacccaaacaagaattccagagaacaaagatcgagatggtagatggggaaagaagaatcagttcagtaatatttcccgtatctgaagagcaagtttatacaatgacaagattcagacagtcttcagataaccagaagggaaagaacattgttcaaaggtgtggtagaaatctcagttacagggagaagatgaagccttaa

SEQ ID NO: 114374 - DNA, 1685 bp, Homo sapiens
gaattcgcagagggatccaagatcaacgcgagcaagaatcagcaggatgacggtaaaatgtttattggaggcttgagctgggatacaagcaaaaaagatctgacagagtacttgtctcgatttggggaagttgtagactgcacaattaaaacagatccagtcactgggagatcaagaggatttggatttgtgcttttcaaagatgctgctagtgttgataaggttttggaactgaaagaacacaaactggatggcaaattgatagatcccaaaagggccaaagctttaaaagggaaagaacctcccaaaaaggtttttgtgggtggattgagcccggatacttctgaagaacaaattaaagaatattttggagcctttggagagattgaaaatattgaacttcccatggatacaaaaacaaatgaaagaagaggattttgttttatcacatatactgatgaagagccagtaaaaaaattgttagaaagcagataccatcaaattggttctgggaagtgtgaaatcaaagttgcacaacccaaagaggtatataggcagcaacagcaacaacaaaaaggtggaagaggtgctgcagctggtggacgaggtggtacgaggggtcgtggccgaggtcagggccaaaactggaaccaaggatttaataactattatgatcaaggatatggaaattacaatagtgcctatggtggtgatcaaaactatagtggctatggcggatatgattatactgggtataactatgggaactatggatatggacagggatatgcagactacagtggccaacagagcacttatggcaaggcatctcgagggggtggcaatcaccaaaacaattaccagccatactaaaggagaacattggagaaaacaggaggagatgttaaagtaacccatcttgcaggacgacattgaagattggtcttctgttgatctaagatgattattttgtaaaagactttctagtgtacaagacaccattgtgtccaactgtatatagctgccaattagttttctttgtttttactttgtcctttgctatctgtgttatgacatcaatgtggatttgtttatacacattttatttgtatcatttcatgttaaacctcaaataaatgcttccttatgtgattgcttttctgcgtcaggtactacatagctctgtaaaaaatgtaatttaaaataagcaataattaaggcacagttgattttgtagagtattggtccatacagagaaactatggtcctttataaatagccagccagcgtcaccctcttctccaatttgtaggtgtattttatgctcttaaggcttcatcttctccctgtaactgagatttctaccacacctctgaacaatgttctttcccttctggttatctgaagactgtcctgaaaggaagacataagtgttgtgattagtagaagctttctagtagaccatatttcttctggattgtaataaaattgttattagctccttttactttgttcctgtctctggaaagccatttttgaattgctgattactttggctttaatcagtggtcacctagaaaaagctttgtaatcataacacaatgagtaattcttgataaaagttcagatacaaaaggagcactgtaaaactggtaggagctatggtttaagagcattggaagtag

SEQ ID NO: 114375 - DNA, 1166 bp, Homo sapiens
atggtatgtctggagtttgttccttcagatgttcagaatgtgtccggagtttcttccgtctggtgggtttgtggtcttgctgacttcaggagtgaagctgcagaccttcgcggaatgaagctgcagaccttcgtggtgagtgtgacagctcttaaaggcggcgcgtctggagttgtttgttccttccagtgggttagtggtcttgctggcttcaggagtgaagctgcagacctttgcatggactcttgttccaaactggaacaacactcaaccctatctcgggctattcttttgattaataagggattttgccgatttcggaaccaccatcaaacaggattttcgcctgctggggcaaaccagcgtggaccgcttgctgcaactctctcagggccaggcggtgaagggcaatcagctgttgcccgtctcactggtgaaaagaaaaaccaccctggcgcccaatacgcaaaccgcctctccccgcgcgttggccgattcattaatgcagctggcacgacaggtttcccgactggaaagcgggcagtgagcgcaacgcaattaatatgtttagctgtgtccagagtttcttccttccggtgggttcgtggtctcgctgacttcaggagtgaagctgcagacctttgcagtgagtgctacagctcttaaaggcgatgcgtctggaattgttcgttcctcccgtccggagttgttccttccttccagtggcctcatgagtgaagctgcagaccttcgtggagtgaagctgcagacctttgccatgagtgttacagctcagaaagctggcacggacacagagtgagcagcaggaagatttattgcaaagagcgaaagaacaaaacctccaaagtccagaagaggacccgagtgcattgtggctgcttgcgcagctggcctgcttttattcccctatctggccccacccacatcctgctgattggtccattttacagagagctgattgaaacccagccggcttcacctgtcactggcatgcgtcgcgggactttgcggcacctagccagccactctggcagcccagagggagctcgccccccagtcaagcccagcaggtgcctgccggctgtgccgctgagtgcggggcttgcggagcccgcgcctacccggaaccgcgccggtggccaccc

SEQ ID NO: 114376 - DNA, 857 bp, Homo sapiens
gcgggaggcagcaccgggctcttgatggacttggcagccaatgaaaaggccgttcatgcagacttttttaacgcagctcaggactgcccaggacaagccagcagtcctccatggttcccgcactgcagcgagggcagtcggagcacggggtccgtgggaaggcagcagacggcctgtggtgtcggaagagagacctctataccgatccctgccacatttagaaagctgctgggggatcgcaggctcagctgccggccagataatgaacctcagcaaggcagcacagctctgcggggaatgcctgcctgcgtcttggagcagaatgggccgagggcgagggagccttctggggtcctggagaagacgcttctaaatacttgtcttctcactggacagaatgacttgtcccaggtcactcggaattccagaggcaaacctaccagacctcgttctagtgtcacgagcttccttgtctctccccagagatgtgaactgaacgggagagaagtggcagctttggacagagcgtttgggagcacaggccatgggcagggggcggaggcgctaatgtttaccagatgcagagaacatccgctgtgtggcaccaacaaagcaacaagtgaggggaaaatgggcacaggacgcttaagaaacagtttacggaagaaccaatccaagtggctgggaagttatctagaggtgctcagaaccacaagaagcaggcgagaggtcagcgaagacagcacaatatcagtttctactcactggaggggtaaatgttttaagagtgatgaaacaccatccgttgctggtggagaagaagggaagaagaccacacagccatgcatagatgtgag

SEQ ID NO: 114377 - DNA, 523 bp, Homo sapiens
ccctcaaagctctttttgaatgggcaccccgtgttttttattttagacagtgctttctcttaattggagtgagtacaaaacatgatcccgttcagagatgaacagaatcatctaggtgcgttaagaacagtcttatctttctggttaaccaggtcctaaattcaagggatttccacgtgttctttaaaaccacctgaaactgtcctgcgcaggctcacactgcggctctgtaccaagggcttggcccccgcccgcatgccagagggcatctcactggatgtcatcatcatcaaaaagatcttcaacatcgttaaaaaagtctgcatgaacggccttttcattggctgccaagtccatcaagagccccggtgctgcctcccgcctggggaatggaaaggcaaggttatgtcaggtgcgttttccgaaagaacaggtgataagtgcattgcagggccactacccccacaaaaaaagaagatgggtgaggggaaacaggctcaagttggagtcaacattttagttc

SEQ ID NO: 114378 - DNA, 210 bp, Homo sapiens
gtggctgctgagagcatgtatatgagagaagcattagagaagatacagggagatgaggaggtcgtcatagtccatgtgagagatgatgatggcttgctgttaggcagaggcaatggcaacgacaatggcaaaatacagttgaaggagaaaagtaactaagataggagatggctaaggctatctttgacttatccaaatggctaatgggga

SEQ ID NO: 114379 - DNA, 773 bp, Homo sapiens
cagcgttccgccgcgcgaggggccgggagctggggcggaaagcggaaccgagagcgctttccgccgtgcggcgatgaacctccgggaaagacgctgggaggcccgagggatgcccggcgcaggtggacgctcatcgggagtcacggggtcggccctcaggggaacggggactatccgtatcaactcggtgttagttcgttttcttcaccttgcggtttgtgccctctccacatttcctctctgtgtctaccattctcctgggggacgtggcaaaccgtgagccgatgcgtttgagttttgggaaaccctgcggaaacgccctggcgccggtggttttgcgcgtcctaccctgtgtcacctcagggttatgatctggcccctggcaaggctccccaagtgtgatgcctccccccgtccagatgactgcattttgaggatggagtcagtctggtggcattttttgcttaagtaaacaattgtaaccgtttgtgtagcatcagcgttcaacagctgcctgtgcaaatcgaaaaaagcgaaactttggaaactaggaagcatcagatgaataattctgaagacttgatgtcaacgggagtatcttgtttttaaacttttggttttctgttctggagacaaacagttcatatgcactaaagaaaaaagtgtcattatttcagatgctcattgccagcaaagagaactgtattgcaagtcaggcttcactcccagtattttctgaatgtttcaataaaatgaaatatatacgtcaaaaa

SEQ ID NO: 114380 - DNA, 545 bp, Homo sapiens
cgcctctcggaagcttggcctcgcaggagcggctctctatcctgtggggatcttcggccagtgggcctcgtgagctggggtcccgcctggggaatccgcatggcaccggtggtctgggggagaggctgggcctggcgcgggacgaggcgaagcgccggtggccgacggcttctgaggaattatcttttacttggcgccacacggggcggggcctcctgctatgctgtggagcgcagtgtcttccatcgttgcctcacagacccgctgctccgggaagtcgccacacattctcagggaacacccacatctgtcgcctgcgccctccgccgctcagctgtttgcttttgtttacgcattccggagacctgacccaccggagcactgggctgagcacaggagaaggggctttggagcgctctttgtactcaactccaagagcgagtgggaaactcaggactgggttgggtggatccctgcgtctctccctagccttcgtcctcttcccccgtttttccactttatgaaagtattgcctagagatgaaa

SEQ ID NO: 114381 - DNA, 664 bp, Homo sapiens
  misc_feature (1)...(664): n = a,t,c or g
ctgaaacccttgagaacctgtcgacgccaagtcttggcacgaggggaagcgtgccctggcggcgctgccagccccagctgggagctggtaggggagtgcgaggaaggcgggacgcagggcggagccgctgcaggggcggggcctgcggacaggagccggggtttggggcgggaacccctcgtcccctgcagaccccgcctgctcgggcgcgggcggcggcgcggccatgaagctgaagctgaagaacgtgtttctcgcctacttcctggtgtcgatcgccggcctcctctacgcgctggccagccatgtgactgccttcctcccctgcgggcagcagccgagcagctacggcagaaggatctgaggatttcccagctgcaagcggaactccgacggccaccccctgcccctgcccagccccctgaacccgaggccctgcctactatctatgttgttacccccacctatgccaggtatgggctctggtgcactcaagaggtctgcgttgtccaagaagttggagttgatgatgaggagtttggggaggcactgggctaggagttgttcctcaaactagagcatgccaaagacaggataaatgaaccacatttatactcanatatttgtgggaaaatagttctttttcaggctgggtgtggtggct

SEQ ID NO: 114382 - DNA, 740 bp, Homo sapiens
agatcgtcagtgcctgagaaagaacattgacttactctatatcaattgaggggaaagtgcagtaccgtcatcttcaagccttgtaagcataaaagagaataggctgcccatataagtcaaaggaaaatgagcccaggccttgctatgaagcagtgtgtgaatggacaatgttgaatgaatgtctggctcagtgatggagagccaggttcatctttgaaatctagggctctctcactcatgaagcagactcctagtcctggagtgactgtgtactagagcgtggttgtggtgctgtatgtgaaccgcatgcaagcttgatttcaccttcagggggctgataacctagtaaatcatcaaaatgagatcataagtgttaatgtacactggacatgaaaacaaagactggtttagcagcagacattggtttactctgcagcctgtgttttctgtttccccctttcccacctccttccccccacccaatccttttttttttcttttttgcttttcttttctttttttttagtttttatttactttacctagtatgcctttttttagttgcttctcaagtcagaaaacttttcaggaaggtttcccctgtgcatttgcaccaagatgaatgtttgatgctatgaaaaagctttccatatcatcaaaactaatttggtggtagatttttgcatgaaaaaaatcataaatgtccctcaaaatagactgtgttgcagtacacaagttgc

SEQ ID NO: 114383 - DNA, 4239 bp, Homo sapiens
ggcggaggcaggtgagaggaggaaggaagcggcggcgcggcgggcacagcagctcaggcggcggcccggttcctgggagtgtcggtgcggcgcgttggttggggcggatcccgcggggcccgggcgggggaaggagtcaccggcccggccatggcggacaacgagaaactggacaaccaacggctcaagaatttcaagaacaaaggccgcgacttggagactatgagaagacaacgaaatgaagttgtagttgaattaaggaagaataaaagagatgaacatctcttaaagagaaggaatgtaccacatgaagatatctgtgaagactctgatatagatggtgattatagagtgcaaaatacctctctagaagctattgttcaaaatgcttcaagtgataaccaaggaattcaattaagtgcagttcaagctgctaggaagcttttgtccagtgatcgaaatccaccaattgatgacttaataaaatctggaatattgcccattttagtccattgtcttgaaagagatgacaatccttctttacagtttgaagctgcatgggctttgacaaacattgcatctggaacttctgaacaaactcaagcagtagttcagtccagtgatgggccccagtgtagagattatgtcataagtcttggagttgtgaaacctttactttccttcataagtccatctattcctataacattcttaagaaatgttacttgggttatggtcaacttatgtcgccacaaagacccaccaccaccaatggaaaccattcaggagatggctgtatgggcgaaaaagatgaccgaaattcaaactcctgaaaatactcctcgtttatttgatttagtaaaagtaaaagatgagaaaattcgccaagctttttattttgctttacgagataccttagtagctgacaacttggatcaagccacaagagtagcatatcaaaaagatagaagatggagagtggtaactttacagggacaaatcatagaacagtcaggtacaatgactggtggtggaagcaaagtaatgaaaggaagaatgggttcctcacttgttattgaaatctctgaagaagaggtaaacaaaatggaatcacagttgcaaaacgactctaaaaaagcaatgcaaatccaagaacagaaagtacaacttgaagaaagagtagttaagttacggcatagtgaacgagaaatgaggaacacactagaaaaatttactgcaagcatccagcgtttaatagagcaagaagaatatttgaatgtccaagttaaggaacttgaagctaatgtacttgctacagcccctgacaaaaaaaagcagaaattgctagaagaaaacgttagtgctttcaaaacagaatatgatgctgtggctgagaaagctggtaaagtagaagctgaggttaaacgcttacacaataccatcgtagaaatcaataatcataaactcaaggcccaacaagacaaacttgataaaataaataagcaattagatgaatgtgcttctgctattactaaagcccaagtagcaatcaagactgctgacagaaaccttcaaaaggcacaagactctgtcttgcgtacagagaaagaaataaaagatactgagaaagaggtggatgacctaacagcagagctgaaaagtcttgaggacaaagcagcagaggtcgtaaagaatacaaatgctgcagaggaatccttaccagagatccagaaagaacatcgcaatctgcttcaagaattaaaagttattcaagaaaatgaacatgctcttcaaaaagatgcacttagtattaagttgaaacttgaacaaatagatggtcacattgctgaacataattctaaaataaaatattggcacaaagagatttcaaaaatatcactgcatcctatagaagataatcctattgaagagatttcggttctaagcccagaggatcttgaagcgatcaagaatccagattctataacaaatcaaattgcacttttggaagcccggtgtcatgaaatgaaaccaaacctcggtgccatcgcagagtataaaaagaaggaagaattgtatttgcaacgggtagcagaattggacaaaattacttatgaaagagacagttttagacaggcatatgaagatcttcggaaacaaaggcttaatgaatttatggcaggtttttatataataacaaataaattaaaggaaaattaccaaatgcttactttgggaggggacgccgaactcgagcttgtagacagcttggatcctttctctgaaggaatcatgttcagtgttcgaccacctaagaaaagttggaaaaagatcttcaacctttcgggaggagagaaaacacttagttcattggctttagtatttgctcttcaccactacaagcccactcccctttacttcatggatgagattgatgcagcccttgattttaaaaatgtgtccattgttgcattttatatatatggggattttggcactcaaaaagaagctgcttgggccataagtaacttaacaattagtggaaggaaagatcaagtggcttaccttatccaacaaaatgttatcccacctttttgcaacttgctgactgtaaaagatgcacaagttgtgcaagtagtactcgatggactaagtaatatattaaaaatggctgaagatgaggcagaaaccataggcaatcttatagaagaatgtggagggctggagaaaattgaacaacttcaaaatcatgaaaatgaagacatctacaaattggcctatgagatcattgatcagttcttctcttcagatgatgtatttaataattttgtagttttcttaattttatatataaacatagatctggataaagtaatatatataggtgaagttgaacaaattgctatgatgaaaccaaaaggccagactgaacacgatgagggtatgcttgaatatttagaagatataattggttgtggacggctaaatgaacctattaaagtcttgtgtcggagagttgaaatattaaatgaacacagaggagagaagttaaacagggtaaagatggtggaaaaggaaaaggatgccttagaaggagagaaaaacatagctatcgaatttcttaccttggaaaatgaaatatttagaaaaaagaatcatgtttgtcaatattatatttatgagttgcagaaacgaattgctgaaatggaaactcaaaaggaaaaaattcatgaagataccaaagaaattaatgagaagagcaatatactatcaaatgaaatgaaagctaagaataaagatgtaaaagatacagaaaagaaactgaataaaattacaaaatttattgaggagaataaagaaaaatttacacagctagatttggaagatgttcaagttagagaaaagttaaaacatgccacgagtaaagccaaaaaactggagaaacaacttcaaaaagataaagaaaaggttgaagaatttaaaagtatacctgccaagagtaacaatatcattaatgaaacaacaaccagaaacaatgccctcgagaaggaaaaagagaaagaagaaaaaaaattaaaggaagttatggatagccttaaacaggaaacacaagggcttcagaaagaaaaagaaagtcgagagaaagaacttatgggtttcagcaaatcggtaaatgaagcacgttcaaagatggatgtagcccagtcagaacttgatatctatctcagtcgtcataatactgcagtgtctcaattaactaaggctaaggaagctctaattgcagcttctgagactctcaaagaaaggaaagctgcaatcagagatatagaaggaaaactccctcaaactgaacaagaattaaaggagaaagaaaaagaacttcaaaaacttacacaagaagaaacaaactttaaaagtttggttcatgatctctttcaaaaagttgaagaagcaaagagctcattagcaatgaatcgaagtagggggaaagtccttgatgcaataattcaagaaaaaaaatctggcaggattccaggaatatatggaagattgggggacttaggagccattgatgaaaaatacgacgtggctatatcatcctgttgtcatgcactggactacattgttgttgattctattgatatagcccaagaatgtgtaaacttccttaaaagacaaaatattggagttgcaacctttataggtttagataaggtgcccgccaccacacccagctaa

SEQ ID NO: 114384 - DNA, 2076 bp, Homo sapiens
atgcttcatcgtgttttcagaaaagccacaaacaccaacacagttgctggagctgcagtagaggactccccgcccaacacactaggcacaccagactgtgctacaggaaaagaaaaaggactcagaaccaccttctccgcatccgtaaaggtccttagactcaccgcggggaggaagcggaccaggcaactccacagcacggaaacacagcgccacgagctccaggcggatgctgagagccgccccgagtccccgccctcctctgccccgaagggcttcaggtgcccagaccgggcggggcctcgcggagcctcgcagcgcaggcgcagtctgcaggcaacattcaactgcaaggcatcggccaatgggaactattgctgggctcgttcgaaaacccgctgctccgggaagtcgccacacattctcagggaacacccacatctgtcgcctgcgccctccgccgctcagctgtttgcttttgtttacgcattccggagacctgacccaccggagcactgggctgagcacaggagaaggggctttggagcgctctttgtactcaactccaagagcgagtgggaaactcaggactgggttgggcggcagcggcgtggccatgaagctgaaggtgaagaacgtgtttctcgcctacttcctggtgtcgatcgccggcctcctctacgcgctggccagccatgtgactgccttcctcccctgcgggcagcagctgagcagctacggcagaaggatctgaggatttcccagctgcaagcggaactccgacggccaccccctgcccctgcccagccccctgaacccgaggccctgcctactatctatgttgttacccccacctatgccaggctggtacagaaggcagagttgcggaacaaggccctggactggctccggggcagagggagtgctgtgggtgggaagaaggacccatcaccaccagggacccaaggagtcgtgtactttgctgacagtggcaacacctacagctgggagctgtttgaggagatgcgctggacccgtggtgtctcagtgtggcctgtggggctggtgggtggcctgcgagtcaagggccctcaggtacaggacagccgggtagtgggcttccacacagcatgggagcccaacgggcccttccctgtggatatggccggatttgctgtggccctgcccttgctgttagctaagcccaatgcccagtttgattccactgctccccggagccacctggagagcagtcttctaagccaccttgtggatcccaaggacctggagccacgggctgccaactgcactcgggtactggtggtcagttctcagcagagagaggccctggagagggtggcacatccctgccagcaggtcatctctgcagctctcagcagagagggttggtcctctctgcaactggttgtcccatcatctccagctatcaacagagaggggcttgaccccaaccccactccaagattagagccggcactgggaaggacagagtccaggcagtgggagcagacaccccccagccagcaggaatggagaggtgggggcccttcccaggcccctgaggatgcagactacagagatacccaggtccttcgcctgggaggacagctacagctgcacccagggagctcctgccccaccaactcagaaggaggggggttcctgcttatccctgactcctgcctgctccatggagggggaggcccaggtctgcagctgcagatgggaccatctagttgcaggaaaacaagctcagggctcccaatgattctacattatgggctggagaaaattgaacaacttcaaaatcatgaaaatgaagacatctacaaattggcctatgagatcattgatcagttcttctcttcagatgatgtatttaataattttgtagttttcttaattttatatataaacatagatctggataaagtaatatatataggctcttcactcatgaagcagactcctagtcctggagtgactgtgtacgagagcgtggttgtggtgctgtatgtgaacgcatgcaagcttgattcaccttcagggggctga

SEQ ID NO: 114385 - DNA, 465 bp, Homo sapiens
atggcaaagtacagccaagtaagcagctcagtgaccagcctgagtgcccagcagtgtggcagtgccacattcagaggtctcttcataattgaccccaatggagtcatcaagcatttgagcgtcaacgatctcccagtgggccgaagcgtggaagaaaccctccgcttggtgaaggcgttccagtatgtagaaacacatggagaagtctgcccagcgaactggacaccggattctcctacggttgctcatgtttgtgatgcaggttacgtcgctggatttgtagacttggaggtgagcaacagaccagacctctatgatgtgtttgtgaatctggcagagagtgagattaccattgctccccttgcaaaagctgtaggacactcgtggcagatcccgggtgaccgaagacagcccatttccaggagtggggccttcggagcggagggagcaaggaaacggggctga

SEQ ID NO: 114386 - DNA, 1371 bp, Homo sapiens
  misc_feature (1)...(1371): n = a,t,c or g
aattcccgggtcgacgatttcgtgccgcggcggcggaagatggctgcggccgaggtggtggacactcagctgatgcttggagtcgggctgatcgaaaaggacacaaatggagaagttctgtgggtgtggtgttatccttccacgacagccacattaaggaacctgctgctgagaaaatactgccttacagatgaaaacaaacttctccatccctttgtctttggtcagtacagaagaacatggttttatatcacaacaattgaagttccagattcttccattttgaaaaaggtgactcatttttctattgtcctgaccgccaaagattttaacccagagaagtatgctgccttcactaggatattgtgtagaatgtacctgaaacatgggagcccagttaaaatgatggagagttatattgcagttctcacaaaggggatatgccagagtgaagaaaacggctctttccttagtaaggattttgatgcccgaaaggcctacctggctggctccatcaaagacattgtatctcagtttggaatggaaactgttatcttacacacagcactgatgctaaagaaaagaattgtggtgtatcaccccaagatagaagcggtccaggagttcaccaggactctgcctgccctggtgtggcaccgacaggactggaccatccttcactcttacgtgcacctcgacgccgatgagctggaagccctgcagatgtgcacaggttacgtcgctggatttgtagacttggaggtgagcaacagaccagacctctatgatgtgtttgtgaatctggcagagagtgagattaccattgctccccttgcaaaagaggccatggcaaatgggcaaacctgcacaaaagaaattggggtcagctaattggttcaagtctgcagaagatccaggagaaattcagaggagccacgttatacaggaagaactttaattcctcctgaggaactctactttctgagccaaactgctaattttctgcggaactgtctagaagatcattcaagagaccctgcagttgcactttctcgtaaaagttnnnnnnnnnnnnnnnnnnnnggggtttttcccggcctttgaaaattttgcctataaaagttttgcaaatattttatacttgaggaaacaactttaaaaatccatatttaaactatcgcaaaaaaaaacatttggcaaacgttcagccattagcactcatttaaccctggtagaaatatttttttaaaaaaagggccagcccttatgtgaaaaactaaaaaccccattgaatataaaagggtataggactgaaacagggcccttattttattggtaagggaaaataaaattaacttcctacgggggcca

SEQ ID NO: 114387 - DNA, 653 bp, Homo sapiens
atggacattcaactcatgaggcacaaagggcccatctgcgctgactgtgggctgtggtacaagacatgtcaggatgagtgtggagctttcatggcactgacgggggtagctgagtgtagttctgagaagcggatggcatctgaggttacaaaaccacgggaactcttcactcaaaagcaaaaacacatccggaaagaggaaaaaatccacggccaatgtaaaccccctacaacaccaaccgcccacgtcgtaccccaggctgcaatgaggccggcactcacccaccgctcgcccgggaagcccagacccaggtgtttcaaaatcagaagtacggcaggctcgttcgctctcacgggcaagaatcttaaaccccaacttcagagatacccgcgcacgctgggcgctgccattttgacagaaagcgggcctgccccagaggcccctacgcaggtcgccctgagcagagccggagtgccacagaacccctagctcatcacctccacacccagacgtcgcatcccccggcctgaggaatgccaagaaaccccaccctgccgaccaggatcaggcgaaatcaagtcacccttgaaatacgaaatcgtcgacccggaattccggtccggtgctcacgagtacggcttcaatttccttcc

SEQ ID NO: 114388 - DNA, 766 bp, Homo sapiens
acgtctgggtgtggaggtggcgagctatgggttctgtggcactcccgctctgctcaaggcgacctgcgtaggggcctctggggcacgcccgctttctgtcaaaatggcagcgcccagcgtgcgcgggtatctctgaagttggggtttaagaatcttgcccgctagaacgaacaagcctgccgcgcttctgattttgaaacacctgggtctgggcttcccgggcgagcggcggaacctgtgacaatttcctacaatggtgggctcagctctcaagagaggggcccatgcatatgtttacctggagagtaaggccaggcacatctccagaggccatcagcaccaggcctggggatcgaggcctcctgcagcagagtgtgccacccaaagagctccaggcagtgtggtggagctgctgggcaaatcctaccctcaggacgaccacagcaacctcacccgggaaggttccttcaccagagttggcagggaacctgcacaaccagcagcattcaccctttgtgggttgttcaagggagagggttgaagggagcattttttacaagcagtatgtgggccgctttgggacccccgtgttctcggtctacgacaacctttctccagtggtcacgacctggcagaactttgacagcctgctcatcccagctgatcaccccagcaggaagaaggggggacactattaccttgaattcgactcacatgctgagaagcgcacacgtctgcacaccagtgggacttgctgcacgccggg

SEQ ID NO: 114389 - DNA, 613 bp, Homo sapiens
ctggaagaattaattctggaatatttcttaaacttgcttgatttgtgtaaggtctggctgctgggctccctgaaaccttgcacatatcttactgtatgactgtatttcgttttggagtctctggattctggggtttggacagatggccccatagtgaggccctgcagaaatatgccatgtccctcagtgtttgggacctgcccagctgcaaggcagagcccaaaccccaatatggcccccatcatcccctggctcagctgtgcctaccctggcccatgcctggaaggggtttgatcttcccaggaatttgcttcacagctctttcctgtcccaagatctatgcctgatgtgtaaaattcaggaccccaaaggggccacaaaaaagcaataactactaaatataaggaaaacaactctgtatacagcatgtataaagaaaagcaagatatatttggggagataaaagttgtaaaggcattaagatgtgtgtttgttgagaaaaaataaatttgtgcatttaagaagttaaaaaaaaaaaaaaaaagaaatgggtctcactttattgcccagtctggtcttgaactcctacactcgagcagtcctctcaacttgg

SEQ ID NO: 114390 - DNA, 347 bp, Homo sapiens
acaacatgatgccatttatttacatgattctgaaagaatatgagtccccaggatcaaatatatacatttttaatatttgaaatatttacataatggaaccacatcagggttcgagggtaagaacagtgttttcaaatgtcctatactttggaaagcagacccgactctggagcactcgccttaattagattctgaatttccttgaattttggatggtccttatcagctaccagctgaagcagaacagcctcactcgtggtcactatgatcccgccttcgagcgagacgctcgagggcaaacatccataagccgaattctggcctgagggccaattcccatagtagtg

SEQ ID NO: 114391 - DNA, 5171 bp, Homo sapiens
  misc_feature (1)...(5171): n = a,t,c or g
cggcacgaggctgtatttgcggcctgtgcgagtaggcgcttgggcactcagtctccctggcgagcgacgggcagaaatctcgaaccagtggagcgcactcgtaacctggatcccagaaggtcgcgaaggcagtaccgtttcctcagcggcggactgctgcagtaagaatgtcttttccacctcatttgaatcgccctcccatgggaatcccagcactcccaccagggatcccaaccccgcagtttccagggatttcctccacctgtacctccaggggaccccaatgatttcctgtaccaatgagcattatggctcctgctccaacttgtcttaggtacccactgtgtctatgggttnggaaagcattttggggcgcaagaaagggatcatccaggcttaaaggctaaagtaaaatgatagaaaatttgtgggtcctactacccactgtttttgttggcaacattttccgaggaaagctttcagagcatgcttattaagacaactcttagcttaaatgtgggtttggttttgagctggaagaggagtacaaggtgcttcccggaaagcttcaaggcctttcggaattctgtgagtcacaaggagcccagaatcttaccctccgtgcacttagattattacatgacctgcaaattggagagaaaaagctactcgttaaagttgatgcaaagacaaaggcacagctggatgaatggaaagcaaagaagaaagcttctcaatgggaatgcaaggcccagaaactgtcacctaatgactgatgaagaagcccttggatgaagaaacaaagaggagagatcagatgattaaaggggctattgaagttttaactcgtgaatactccagtgagctaaatgccccctcacaggaatctgattctcacccccaggaagaagaagaaggaaaagaaggaggacattttccgcagattctccagtggccccactgatcccttatccactcatcactaaggaggatataaatgctatagaaatggaagaagacaaaagagacctgatatctcgagagatcagcaaattcagagacacacataagaaactggaagaagagaaaggcacaaaggaaaaagaaagacaggaaattgagaaaggaacggagagaaagagagagggagcgtgtaaagggaacgagcaaaggcgagtaacgggaacgagaaagggaaagagaacgtgaacgagaaaaggagaaagaacgggagcgggaacgagaacgggatagggaccgtgaccggacaaaagagagagcccgagatcgggatcgagagagagatcgtgaccgggatagagaaaggagctcagatcgtaataaggatcgcagtcgatcaagaaaaaaaagcagagatcgtgaaagggaacgagagcgggaaagagagagagagagaagatcgagagccgagaacgaataacgggagcgaaagagagagcgagagagggaacgggagcgagaaagagaaaaagacaaaaaaacgggaccgagaagaagatgaagaagatgcatacgaacgaaaagaaacttgaaagaaaactccgagagaaagaagctgcttatcaagagcgccttaagaattgggaaatcagagaacgaaagaaaacccgggaattttgagaaagaagcttgaaagagaaggaagaaagaaggaaggagaattggccaaagaagctaaacgacttaaaagaattcttaggaagactatgatgatgatagagatgaccccaaatattacagaggaagtgctctttcagaaaaggttgccgtgattagagaaaaggaaattggaagccagattgaaccgagattaggaaggagagagaaggaggagctttgaggaaattcaggcagcgccttttcttggccagaagggcatcccagatccagatgcagagctccagaggatggaacaagaggctgagaggcgcaggcagccacaaataaagcaagagccagcactcagaagaggaggaagaagaaaagcaagaaaaagaagaaaaacgagaagaacccatggaagaggaagaggagccagagcaaaagccttgtctgaaacctactctgaggcccatcagctctgctccatctgtttcctctgccagtggcaatgcaacacctaacactcctgggggatgagtctccctgtggtattattattcctcatgaaaactcaccagatcaacagcaaccttgaggagcataggccaaaaataggactaagtctttaaactggggtgcttccaatagtccctggtcagcctaattctgtgaagagaaagaaactacctgtagggtagtgtctttaacaaattttgagggatgaagacagttgatgacgtacccccgaaaaaagggaaacttggttccccttgggattatggtgaagattgataaaaatgcaaccaaaggcacttgtaaacactgaagaaaagcggtaaacacattaagagtctcattgagaaaatccctacagccaaacctaggctcttcgcttatcccctggaattggtcctatggtggattctatacctgatggaacgtcgaattagcccatggattaataagaaaatcataggaatatataggtgaagaagaaggctacattaagttgattttgtttgttctaaggttatggctcatagttcaccccagagccattttagatgatgttgccatggtacttggatgaagaagccagaagtttttatagtccaaaatgtggagattatggatatatgaaacagaaagcccaaagaaaattggtcttgtgaagtaaacactttttaaatttaaagttccatttcagattttttctttgcccacccttttaaggactttgaatttttctttgtctttgaagacattgtgagatctgtaattttttttttttttgtaggaaaatgtgaattttttggtcctctaatttgttgttgccctgtgtactcccttggttgtaaagtcatctgaatccttggttctctttatactcaccaggtacaaattactggtatgttttataagccgcagctactgtacacagcctatctgatataatcttgttctgctgatttgtttcttgtaaatattaaaacgactccccaattattttgcagaattgcacttaatattgaaatgtactgtatagggacccaccatggacaattttaattgaaaacaccagtcataaactattaccacccccactctcttttgatcagaaatggcaagcccttgtgaaggcatggagtttaaaattggaatgcaaaaattagcagacaatccattcctactggtatttctgtatggaatgtgtttgtgaatgtatgtgtaaaagtctttcttttccctaatttgctttggtggggtccttaaaacatttcccaactaaagaatagaattgtaaaggaaaagtggtactgttccaacctggaaatgtctgttataattaggttattagtttcccagagcatgggtgttctcgtgtcgtgaggcaatgtgggtttgctaactggatggggttttcttattaataagatggctgcttcagcttctcttttaaaggaatgtggatcatagtgatttttccttttaattttattgctcagaaatgaggcatatccctaaaaatcctggagagctgtatttaatgcatttttgcactaattggtccttagtttaattctattgtatctgtttatttaacaaaaaattcatcataccaaaaagtgtaagtgaaaaccccctttaaaacaaaacaaaaaaatgaaataaaattaggcaaattgacagacagtgagagttttacaaacatgatagggtattctgctcgggcaatttgtaagtttacatgttatttaagggataaagggtaaatcatttcaagggcaggttacccaacccactaactattttgttyttcattttttgstcttgtagaaggktttatatcttgttttaccctggggctcattagtgtttaaaaatgtactgatgatgtgcttagagaaattccctggggctttctytcgttgtagatcagaatttcaccagggagtaaaattacctgaaaacgtaagaagttttaaacagcttttcacacaaattatgatgcaacttgttcccatgtctgaggtacttatttaaaaggaaaggtaaagattggcctgttagaaaaagcataatgtgagctttggattactggatttttttttttttttaaacacacctggagaggacatttgaaaacactgttctttaccctcgaaccctgatgtggttccattatgtaaatatttcaaatattaaaaatgtatatatttgatcctggggactcatattctttcagaatcatgtaaataaatggcatcatgttgtaattgtgtggtgcatactagaaaagttaaaaatatgggctgaactttttatggacttgatttttatgactattggtatctaaaggtcaaggaagccatttacattattttggatgaatctactatacatctatggaaatgtctcttttattttaaattctggtttctcaacggaaaatttcagaaaagatgccccttgccattttcgttaattattcagtcttttcttagacacacccccagcctaagaccttgttcgaggagtttatagtgtctgtcttttcttaacatactgcactgttcttaagcatcatattgtgttgtttttatttagccactattaacatgaaggtttattcaggtagatttgatttcctttgcttcgtttcttctcctgctctgtcaactgtacttatcttaaagggccactctaaaaacaagggagatgtcgtaatctgaaacctttggggagatgtactctgtactgcataacatctccagtgaggtttgtgacaggacctcaactaaatatatgaatttgtgcaagttcatatattaaagtttctgcagcagagtgaaaattgttacagtaaatgtggtagaaactgttaatcgcttaatgccagtttaaatcatgttttgtaaccaagcttcagtaaaaggctttagattgtcagagttggttgatttttagaattgtatatataaagaattagacattaaacaggcatattctagtgtctgaaaatacacataagaaatttctattaaaaa

SEQ ID NO: 114392 - DNA, 574 bp, Homo sapiens
ggcacgagattcatcagaacagcacggtgtcaaggccctcacccccagaaagcttaagagacactgttttatggaggagagtgagattggaggaagccctgactccaggtctcctgatccttcctacacaaagcgaagctgaaaaaaagtgcaggacactccatttcctcctgggaccagacagggaagccagagccaccatggatgtcaaattccggcaaggaaacaccagtatagcaaaatctccacatcacattttaaagctcacacaatggctcaaagagaacccacatcaaaaaaccgaattcctagctcaggtgagatcaccagaagttgcctgtgaggcttcgtggaacctgcaggtagaaaggacatctttatttcgagctgcagcccagttgcttctgcgtcttggagccccttgaaaggaccctctcccttcaacagtacatagggaggccatttctggggagaaatgtagactgtccttagactcctgaggtttttacacttgcttgctgactctgtggactttgacttcatcaataaccctcttataatgaaaaaaaaaaaa

SEQ ID NO: 114393 - DNA, 4980 bp, Homo sapiens
atggcggaaggcggagcggcggatctggacacccagcggtctgacatcgcgacgctgctcaaaacctcgctccggaaaggggacacctggtacctagtcgatagtcgctggttcaaacagtggaaaaaaatatgttggctttgacagttgggacaaataccagatgggagatcaaaatgtgtatcctggacccattgataactctggacttctcaaagatggtgatgcccagtcacttaaggaacaccttattgatgaattggattacatactgttgccaactgaaggttggaataaacttgtcagctggtacacattgatggaaggtcaagagccaatagcacgaaaggtggttgaacagggtatgtttgtaaagcactgcaaagtagaagtatatctcacagaattgaagctatgtgaaaatggaaacatgaataatgttgtaactcgaagatttagcaaagctgacacaatagatacaattgaaaaggaaataagaaaaatcttcagtattccagatgaaaaggagaccagattgtggaacaaatacatgagtaacacatttgaaccactgaataaaccagacagcaccattcaggatgctggtttataccaaggacaggtattagtgatagaacagaaaaatgaagatggaacatggccaaggggtccttctactcctaagtccccaggtgcatccaatttttcaactttaccaaagatctctccttcatctctatcaaataattataacaacatgaacaacagaaatgtgaaaaactcaaattactgtcttccatcatataccgcttataagaactatgattattcggaacctggaagaaacaatgaacagccaggcctctgtggcctaagtaacttgggaaatacgtgtttcatgaactcagctattcagtgtttgagcaacacacctccacttactgagtatttcctcaatgataagtatcaagaagaactgaattttgacaatcccttaggaatgagaggtgaaatagctaaatcttatgccgaactgatcaagcaaatgtggtctggaaagtttagctacgtcaccccaagagcctttaagacacaggtaggacgttttgcacctcagttctctggatatcagcagcaagactgtcaagaactgttagctttcctattagatggattacatgaggatttgaatatgttctacgaaaataccatatatacaattataaagatgcggatggaaggccagataaggttggttgccgaggaagcctggggaaaaccattttaaaacggaaattgattctatcatagtagatatatttcatggccttttcaaatcaactttagtttgtcctgagtgtgctaagatttcagtaacatttgatcctttttgttacttgacacttccattgcccatgaaaaaagaacgcaccttggaagtttacttagttagaatggatccgcttaccaaacctatgcagtacaaagtggttgtccccaaaattggaaacatattagatctttgtacagcattgtctgctttgtcaggaatacctgcagataagatgatagttactgatatatacaatcatagatttcacagaatattcgctatggatgaaaaccttagtagtattatggaacgggatgatatttatgtgtttgaaattaacatcaataggacagaagatacagagcacgtgattattcctgtttgcctaagagaaaaattcagacactcgagttatacccaccatactggttcttcactttttggtcagccctttcttatggctgtaccacgaaacaatactgaagacaaactttataatctcctgctcttgagaatgtgccgatatgtcaaaatatctactgaaactgaagaaactgaaggatccctacactgctgtaaggaccaaaatattaatgggaatggcccaaatggcatacatgaagaaggctcaccaagtgaaatggaaacagatgagccagatgatgaatccagccaggatcaagaacttccctcagagaatgaaaacagtcagtctgaagattcagttggaggagataatgattctgaaaatggattatgtactgaggatacttgcaaaggtcaactcacgggacacaaaaaacgattgtttacatttcaggtccaacaacttaggcaatactgatatcaactacatcaaagatgataccaggcatattaggtttgttgatatagcagcttaggctagatgaaagatcttttcttgctttggattgggatcctgatttgaaaaaaagatattttgatgaaaatgctgctgaggactttgaaaaacatgaaagtgtggagtataaacctcctaaaaaaccctttgtgaaattaaaagattgcattgaactttttacaacaaaagaaaagctaggtgctgaagatccctggtattgtccgaattgtaaagaacatcagcaagccacaaagaaattggatttatggtccctgcctccagtacttgtagtacatctcaagcgattttcttacagtcgatacatgagagacaagttgggataccttagttgattctcctatcaatgacgtggatatgtcggaattcttaattaatccaaaatgcagggtccttgccgctataatctgattgttgttttccaaccactatgaaggggatggagggaggacactatactgcttttgcaaaaaaataaaagatgatggaaaatgggtactattttgatgaccagtagtgtctccactgcatctgaggaccaaatttgtgtccaaagcagcatatgtactcttctaccagagacaagacactttcagtgggaactgggcttttttccctcttgacccgagaaactaaaggtgcttcagctggccactggcatcccatttaggaaagtgatgaagatagcaatgataatgacaatgatatagaaaatgaaaactgtatgcacactaactaattgaaagtcctagaagccttaaaaggggacacttttcctgctggtggtatctatggaaatgatgaagttaccccccacattaaacaaaaagtttgagatggggagtttcagataaccgaatgtaaatcctttatcagattttaacttgtgcagtacttgaagtgaaacacaatgaaaactttaacagaaattgtctcttaatacatttacagtcttgtatttactagttaaaaatccatccggaaatcgcaaataaatcccttttaagtttgaagaagttttgattaattatgtttcctttaattttttggatgtgagttgatgacaaatggtaaatttgtggatgttggtcatttattttgctctaataatactgcaagaaaactatggctgaacttagtttttggataatctagttcatgtgcattaggctgccgtatatactactatgatatttagctgcagtatcaatgtggcataaatactgcggcagcattcttcgaaaaccgcattttcaaatttatccccgtaatcaatgtgggcctattaaaaaaccaaatcatgatacaagaaacaaccttggaaaagttatttccctttgtaatacctttaaaaatccagagtattatattcattttactgccactgtggaaacaggttctagatttcatactccatctaaagtcatttttcagttacatgtaagtattatttactgctattgggatctattcttcagatattcaaaaacattttttgctttaaaatgcatatctttaattgggtgttggtccaaaattaaaatttttgctgtctgtttttctctaccccattttgtggtaatttggcaacttgagctctcccaattattgtaatataaggacagacataatagtattctgtacccatagtaataattgcatcaagcttagatgagaaatttttttcatatactggcctttaaatcattaatggacaattggctataaaggtaggtctgttaactttctttgtgtgttcctgatggaattcaccatagccttacagcttttctcagaaggtaacttgttataagagaaatggcatttgcatgttccagagtcagaacctgtacagtatataaagcataaacaccttgaatttgattttagttcaccacattcaaggatccaggatgccaaaaatatgtgtgaacatttgaaacatttttatttgctgctttttccctttgatatagttgaaagaatgtattgtaaattggcatacaatactgcctttaatagaaaacctaaatgctggggcacatttcacatatcgactacctgagaaattgctttgtgtcccactgttattaaagcaaaaagtataatgttcttcacttgaactaatcaaatacaatagattataaattgtgtattgtaaataaaagttcactctgtgagtgcacattttggtaaattatttatttatgttagcatttaaaagtttaaaaaaaatgcatttgaccaggataaatgaggtatgttgatcatggctttgctttatatcttgatattaaagctggtttatcatcctggtattttaaaagctgctttggggttttttttttctttttttttttttttaatgtaaactaacctcctgcatgacagaggttaaaattttgtctgcacttgagttcacttgagtttacatttgaaatgtgcatgtttatttatatagatttcaataaagctattcaaggccttatttagtcttttatttcttactcttaatcttttaataaaaatcccctactttatggttagatgactatatgctagactttttagttataaatagttaatactagaaaggaaattatgtcagagcaaaatgaatcctactattaaggacgttttaaagttgatttttgtccactttaatatttattcattaaacatatgtttgtgtaccaatcactgttgtagagtctggagatacagcagtaaacaaatatccttacct

SEQ ID NO: 114394 - DNA, 894 bp, Homo sapiens
atggggaggagagaccggaataaagaagaacgttgggagcccggggaaaggggccgcactagaggtagtcgcgaatccgaagagctccgctctgccagagccccacaaacaatccccggtggccccactcaccccagatggcggcgagtctgcggaaagttcctggtcagggatggctcggtgcttctcagggtccccaggactgcacgggatctgcagctggaagcgacccccaggcctggaacctcagccctaggcagctccggaacgtgccccggctcctccgagccccgggaggcgggagagcgcaggacggccaggacgcgctgctggctctggaatgcgcggctgctggggaccgccccggaacgcccggtcccggggccccggcaactccagctcagctcctccccagcgtcccctgcgggctgcgttcggggagaaaggaacctgcgagagagggagagaccagggcgtctcgggctccccttccacgttgccacacactcccgcagtagacatgggaaagaaagcctagcaagtaggtttggacaaggagccgggactcagatcctgctttgcgatgtccgaagtgtagggtcctcggaggctttgccactctgtttcattctctgtaaagtgggaaaggtaaacctgtctcccagtcctgttgtgaggattggtttagaggaccagtgtaccccggtcagtttcctcccacatcccgaagatatcatgttaggcaaactgctgtgtctatgtagtcccagtgtgaacgattgtggtgtgggtgagtctgctctgcgatgtgatggcgtcctgtccagggctgttactgcctcgagccctgagctgccgggacaggctctggccactgaacttaaactggaataa

SEQ ID NO: 114395 - DNA, 3927 bp, Homo sapiens
atggagttggagaccattattctaagtgaagtaactcaggaatggaaaaccaaatatcgtatgttctcacttataagtggcagtgaagctatgaggacacaaaggcataaagatgataaaatggacttggtgactcagggggaagatgactacacattgggtacagtgtacactgtgcggttgtcatcctgtacaatcaagtcagtagttgaaaatggatggatccatttttttgaaaagatcaacaaaattgatagaccgctagcaagactaataaagaagaaaagagagaagaatcaaatagatgcaataaaaaatgataaaggggatatcaccaccgatcccacagaaatacaaactaccatcagagaatactataaacacctctatgcaaataaactagaaaatctagaagaaatggataaattcctggacacatacatcctcccaagactaaaccaggaagaagttgaatctctgaatagaccaataacaggctctgaaattgaggcaataatcaatagcttaccaaccaaaaaaagtccaggaccagatggattcacagccaaattctaccagaggtacaaagaggagctggtaccattccttctgaaactattccaaccaatagaaaaagagggaatcctccctaactcattttatgaggccagcatcatcctgataccaaagcctggcagagacacagccaaaaaagagaattttagaccaatatccttgatgaacatcgatgcaaaaatcctcaataaaatactggcacaccgaatccagcagcacatcaaaaagcttatccaccatgatcaagtgggcttcatccctgggatgcaaggctggttcaacatacacaaatcaataaatgtaacccagcatataaacagaaccaaagacaaaaaccacatcattatctcaatagatgcagaaaaggcccttgacaaaattcaacaacgcttcatgctaaaaactctcaataaattaggtattgatgggacgtatctcaaaataataacagctacctatgacaaatccacaaccaatatcatactgaatgggcaaaaactggaagcattcccattgaaaatgggcacaagacagggatgccctctctcaccactcctattcaacatagtgttggaagttctggccagggcagtcaggcaggagaaggaaataaagggtatccaattaggaaaagaggaagtcaaattatccctgtttgcagatggcatgattgtatatctagaaaaccccatcatctcagcccaaaatctcctcaagctgataagcaacttcagcaaagtctcaggatacaaaatcaatgtacaaaaattacaagcattcttatacaccaataacagacaaacagagagccaaatcatgagtgaactcccattcacaattgcttcaaagagaataaaatacctaggaatccaacttacaagggatgtgaaggacctcttcaaggagaactacaaaccactgctcaaggaaataaaagaggatacaaacaaatggaagaacattccatgcttatgggtaggaagaatcaatatcgtgaaaatggccatactgcccaaggtaattgatagattcaatgccatccccatcaagctaccaatgactttcttcgcagaattggaaaaaactactttaaagttcatatggaaccaaaaaagagcccacatcaccaagtcaatcctaagccaaaagaacaaagctggaggcatcgcactacctgacttcaaactatactacaaggctacagtaaccaaaacagcatggtactggtaccaaaacagagatatagaccaatggaacagaacagagccctcagaaataatgccgcatatctacaactatctgatctttgacaaacctgacaaaaacaagcaatggggaaaggattccctatttaataaatggtgctgggaaaactggctagccatatgtagaaagctgaaactggatcccttccttacaccttatacaaaaattaattcaagatggactaaagacttaaacattagacctaaaaccataaaaaccctagaagaaaacctaggcaataccattcaggacataggcatgggcaaggacttcatgtttaaaacaccaaaagcaatggcaacaaaagccaaaattgacaaatgggatctaattaaactaaagagcttctgcacagcaaaagaaactaccatcagagtccacaatacagacttagacctaacgctaactatgtactcaaaaacctgcgtttcaaatgagataatgtatgtgaaagttcccaaaggccattggcaagactcagaagacagtgctggtgtgactcctgtcttgcagtccccacggagccctgtccctttgagaccttccatttgtctcctggatgctcgcctgttaagtggggcagaggaggccgtcgtaaataagacaaaagatcaggcttccattctggaagaaaagaataaaaggagctcactgagtccagacctaatggcaatggcgtccttgctgcagtcggaccgggttctctatctagtccagggagaaaagaaggttcgggccccgctctcgcaactctacttctgccgctattgtagcgaactgcggtcgctggaatgtgtgtctcacgaggtggactcccattattgtcccagttgtttagaaaatatgccatcggctgaagccaaactaaaaaagaatagggccttagcgtttgctaaatttgctggcctgatgaaactggcgtgtgataatgatgatttagaggtcatttctgctgacctcatccctgaatcagaggaaacagcatggaagaggggagaccctcagaagccaagcgacatgtccacggctacgcggcgagtgtgtggcaacgtggaaggggagcccgagacgccctggtctctcccttctctcgcaggttcctttctccccgaacgcagcccgcaggggacgctggaggaggagctgagctggagttgccggggccccgggaccgggcgttccgggggcggtccccagcagccgcgcattccagagccagcagcgcgtcctggccgctcctgcgctctcccgcctcccggggctcggaggagccggggcacgttccaggagctgcctagggctgaggttccaggcctgggggtcgcttccagctgccagatcccgtgcagtcctggggaccctgagaagcaccgagccatccctgacccaggaactttccgcagactcgccgccatctgggccgggacctcctgttcccagctgtcctgggactgtgaatcatgctgtgggggttacaagtcatgcttcatgaactctcccacaagtgacctctccgaacctcagaactgtggctccatgacactaaagatctggggagtcccagagaacagccagagaaccactgagtcgcgaaagattcacatcttgggcaacatcactgctcccctcacccctggtccctcctccccacctcagtccccagctcctgagcacatggagtcagaactcgaatttgagcttatcggcccaagcaaatcaacaagtgggaatcctagagggcttcgttctgaaaggccagttctcttctgcctgcagcatcttctgagggtggagactttttggaaggggtcctataaggtggacaatgctggcaaaccctctagtcctgtgccctgggaaccatcagccttgttcacattctgcaaaatacttgaagagtcatgtatctttggacgcctcagcatcagtgacttggagctggttatagctgtctgctctctggccaccgtggctggtggaaacaaaacagcagcagcatggtctgcccagagttctggcagtgctgggctaaggccacacctgcaggaagccacctgcctctatctgccttgtctcccactttga

SEQ ID NO: 114396 - DNA, 1601 bp, Homo sapiens
  misc_feature (1)...(1601): n = a,t,c or g
cggacgcgtgggcagcagcgcgtcctggccgctcctgcgctctcccgcctcccggggctcggaggagccggggcacgttccaggagctgcctagggctgaggttccaggcctgggggtcgcttccagctgccagatcccgtgcagtcctggggaccctgagaagcaccgagccatccctgacccaggaactttccgcagactcgccgccatctgggagtgaagcaacatggatgcagtcagccaagtccccatggaagtcgtgcttcccaagcacatcctgggatatctgggttatttgtcctcatcatcctgggccaccattgttcattcatggacctcgttgttgctgtgcccaagccactgcaagtaatcatctattcgcatgcggaacttcatccgatccttagtgggggctgttttgagagcctcccaagagggcccgggtgagggaatgaggacaaggcatcctatccccaagcctctttccctgttctttcaagaaaaagcaagcaaggaagggactttggggcatggacctgagttctgggttttgaattctgccacgagccagctgtgtgaatttggtcaagggacctaactctctgagttccaggttccttatctttcaaatggggatggtgatccctgccctttctacctcataagggatgtgagaaccacctgacttagtggatgtgaaagctgtttgtgatcagtaaagctaccacagatataagggtgttatgctgaatcctgagaagctttcaagaacccagagaacctggatttgcctgatgatggccttaaaggtggtgagggagatactgggggcagagcagactttgccagtgcccctcaggtcaaaccaagccaagagcaccctgtccccatttccaaggggccaagcagcactttgggccaaagtattttctttaaaggtgccattccttcaatgttttctcagtttggaaggtgatggggtaaaagctttccagaaccttcttcaattcccagaaatctctggcccctgtgtaaatctgaaggaaagggctgtgcaatcctttggggcactgccaagggaagttggggtgatgggcttctttctgcactgggagtctcacatctgttaagctttgacactcaagcaatgttggaaaaatgccagggtgactgagtttccctgcccagctttcggggatctctgggcccccatcccccttgtgtgtggtccctctggcccagctcctggntgtaaattaaggttccacgtgtaaccccctttcattccctcccaccaagctctgcaagccaagcctatggcaattatattttaagagggtgttcccaggccttttgggacctactaaaacaatgatggttattttagatgtgatcatttatatttacgtagagatatttctggaccactcaagctcttcgataccgaaaatcaggagcatcttgggatttattaaattatgtaagaagatagcacagatatcgggatattattgtgtgaaaatgctgcttttactttgatgtgatctcattgatgtacacaaccaagttccaataaagtgctagaatgtgcaaaaaaaaa

SEQ ID NO: 114397 - DNA, 411 bp, Homo sapiens
aatttaagaaaagaaggcaaatttagcaccagtggtcccttccacccaaatgagaaggaaccagaaaaacaattcggtaatatgacaaaaaaaggttctttcacactctcaaaagatccccctacttaccggcaatggatccaaaccaaaaagaaatccctgaattggcagaaaaaaattcagcaggtaattagagttagaaaagacctgagacctacaatcattcaaactccttattttgcacatgagcaggccaagtgccagcagcagccatggcagcatccaggagagccacaaggctaccgagacccttctccaatccaagatggcaacgaggacatgaaagctattcagaaggagagaaaattcaaggcgatggggcccaagccgcagttaaggggcacaggctga

SEQ ID NO: 114398 - DNA, 2123 bp, Homo sapiens
atcatgctgatgcaagcagtgggctcccatgggcatgggaagctctgcctctgtggcttttcagggtacagcttccctcccaactgctttcatgggctggtgttgagtgtctgtggcttttccaggtgcacagttcaggttgttggtggatctaccattctgggtctggaggatggtggcccctgctcacagctccactaggcagtgccccgcagcagcagcagcagcagcaacagcagcaacaacaccatccacaatacattaccagcgggggtagaacaccaagtgggttcttggcagctctgattccagaacttgaatcttgggtggcaattttggacccgccctaccccagaggggagcccactgccatgaagggtgagcaccaggacagataccaaaaaacatctgctagcatcagcactctccaggaaaacatgatcttaccaaatgaactaaataaggcaccagggaccaatcctggagaaacagagatatgtaacctttcagacagagaattcaaaatagatgtgttgaggaaacttaaagaaattcaagataacacagagaaggaaagctacacaatcaaacacaacattgctgctgccctgcatgctggaaactttggaaagatgctgaaggttataagcaggggagtgccatatctagatctttctactcttgtggcagtgcgaagcagggactggaggaggttaatgctggaaattgggaagctgacagctaagctggttattagagtaattaagagggaaagcatgctagtggcctggctggaggcaagggcatatctacatgaaaatgggattgtccatcgtgatctcaaaccagagaatcttctttatgcaactccagccccagatgcaccactcaaaatcgggttcctgtgtggcttttggacaatgggaaaacgaccatcagggaaggggagaggaagtgaggcagagaatgctaaccagtccacccaaatgagaaggaaccagaaaaacaattctggtaatatgacaaaaaaaggttctttcacactctcaaaagatccccctagcttaccggcaatggatccaaaccaaaaagaaatccctgaattggcagaaaaaaaattcagcaggtcggtcattaagctaatcaaggagacaccagagaaagaatggtatggtgtcctcatccccaaggccttcctcaagcagccatcagcattaatcaagaagctccttcttcaagtacgctgctggcacctgccgcacttgtgttcaaaatcaagaaaggccactctggacaataggcctgagctctatttctccatagatgcacctgaaattcttagaggttgtgcctatggacctgaggtggacatgtggtctgtaggaataatcacctacatcttactttgtggatttgaaccattctatgatgaaagaggcgatcagttcatgttcaggagaattctgaattgtgaatattactttatctccccctggtgggatgaagtatctctaaatgccaaggacttggtcagaaaattaattgttttggatccaaagaaacggctgactacatttcaagctctccagcatccgtgggtcacaggtaaagcagccaattttgtacacatggataccgctcaaaagaagctccaagaattcaatgcccggcgtaagcttaaggcagcggtgaaggctgtggtggcctcttcgcgcctgggaagtgccagcagcagccatggcagcatccaggagagccacaaggctagccgagacccttctccaatccaagatggcaacgaggacatgaaagctattccagaaggagagaaaattcaaggcgatggggcccaagccgcagttaagggggcacaggctgagctgatgaaggtgcaagccttagagaaagttaaaggtgcagatataaatgctgaagaggcccccaaaatggtgcccaaggcagtggaggatgggataaaggtggctgacctggaactagaggagggcctagcagaggagaagctgaagactgtggaggaggcagcagctcccagagaagggcaaggaagctctgctgtgggttttgaagttccacagcaagatgtgatcctgccagagtactaa

SEQ ID NO: 114399 - DNA, 1764 bp, Homo sapiens
cccggacccaggtgctgccagggcggcggctggcggccggcttctcgctcgggcagcggcggcggcggcggcggcggcttccggagtcccgctgcgaagatgctcaaagtcacggtgccctcctgctccgcctcgtcctgctcttcggtcaccgccagtgcggccccggggaccgcgagcctcgtcccggattactggatcgacggctccaacagggatgcgctgagcgatttcttcgaggtggagtcggagctgggacggggtgctacatccattgtgtacagatgcaaacagaaggggacccagaagccttatgctctcaaagtgttaaagaaaacagtggacaaaaaaatcgtaagaactgagataggagttcttcttcgcctctcacatccaaacattataaaacttaaagagatatttgaaacccctacagaaatcagtctggtcctagaactcgtcacaggaggagaactgtttgataggattgtggaaaagggatattacagtgagcgagatgctgcagatgccgttaaacaaatcctggaggcagttgcttatctacatgaaaatgggattgtccatcgtgatctcaaaccagagaatcttctttatgcaactccagccccagatgcaccactcaaaatcgctgattttggactctctaaaattgtggaacatcaagtgctcatgaagacagtatgtggaaccccagggtactgcgcacctgaaattcttagaggttgtgcctatggacctgaggtggacatgtggtctgtaggaataatcacctacatcttactttgtggatttgaaccattctatgatgaaagaggcgatcagttcatgttcaggagaattctgaattgtgaatattactttatctccccctggtgggatgaagtatctctaaatgccaaggacttggtcagaaaattaattgttttggatccaaagaaacggctgactacatttcaagctctccaggcatccgtgggtcacaggtaaagcagccaatttggtacacatgaataccgctcaaaaagaagctccaagaattcaatgcccggcgtaagcttaaggcagcggtgaaggctgtggtggcctcttcccgcctgggaagtgccagcagcagccatggcagcatccaggagagccacaaggctagccgagacccttctccaatccaagatggcaacgaggacatgaaagctattccagaaggagagaaaattcaaggcgatggggcccaagccgcagttaagggggcacaggctgagctgatgaaggtgcaagccttagagaaagttaaaggtgcagatataaatgctgaagaggcccccaaaatggtgcccaaggcagtggaggatgggataaaggtggctgacctggaactagaggagggcctagcagaggagaagctgaagactgtggaggaggtagcagctcccagagaagggcaaggaagctctgctgtgggttttgaagttccacagcaagatgtgatcctgccagagtactaaacagcttccttcagatctggaagccaaacaccggcattttatgtactttgtccttcagcaagaaaggtgtggaagcatgatatgtactatagtgattctgtttttgaggtgcaaaaaacatacatatataccagttggtaattctaacttcaatgcatgtgactgctttatgaaaataatagtgtcttctatggcatgtaatggatacctaataccgatgagttaaatcttgcaagttaac

SEQ ID NO: 114400 - DNA, 654 bp, Homo sapiens
agtcatgagcaatggataacggatacaggtcgaaacccataatgctgttaaacgtgtatacaagtgaagcacaaaggctgatgatgggcccagagggacacagaatgccagagctgatcgcactgtctctaacttatctacagtacatgtcgtctatgcaacgagttgagtcctccatggattccctgtgttccttttctgtctaaaggcatgaaaggcaaatggcctgtggctgtgaaggggacagcatgcctccacctgcacagtccccttggtatcacagaaggtgctgctaaccagccaagctgcagactgcctcttcctgccctggagcaactgcctccatctctggcaagcccctaccatcaagaaaggatctgctctccaggaccacgcgtttcggatttattgtccgccaacagtgtatttttaatacaagaaatgaagtcttctttcgtctgggtgacccgggtttgttccaatgggggaaaacaagcaggaggaggagagtttgaaaaggtggggggcctggggaggcgaggggagctctatccccctttcagatcctccgcagcgccttcgcgggtcctggaccctcacgggatcgtcccctttcgcaactccaagctcagccgccgggtttctatttcatga

SEQ ID NO: 114401 - DNA, 606 bp, Homo sapiens
ctaagtttgccccaaatattgggttaacactggaggctctaagatggcggcagtggcaacctgcggtagtgttgccgcgagtactgggtctgcagtggcgacagccagcaagagcaacgtcaccagtttccagaggaggggtcctagagccagcgtgaccaacgacagcggccctcgactggtgtccattgcgggcacgcgaccgtcggtgcggaatggacagctgctggtatcaaccgggctcccagccctagaccagctcttaggtcggttcagagcggagatataactatggcttttaaagaaatctgatggactagtggtgaggattttgtctccttccaaaccaattactcttttacaaatatttgattttggatcacttgggctttttgcaatcacaatgtcacctctttggataccataaaaatgtcgactaagattttctgcaaagacaatatctgaattttgaattgtaggctccattgatggtccagaacacatgacaacaccaccaacgtattcaaaagcacaatgagctatacagccatattgaatagtatagccaacaagtcgaaaggttttccccagaacaccacgaagcat

SEQ ID NO: 114402 - DNA, 927 bp, Homo sapiens
atgaatgcttccaaacaagtgccagatgatgagaaagaagtagaagaagcagtgccagaaaacaaactgacattaggcaatctggcagaagtcttccagttattcaagactgctgtgacttcttctgacatggacccctattataacacagatactaaaactaaagcaaacagtggaagaaatgggcgcacttttcagcaatacgccttccgattggttggctcgggactgacgtctcagtcctattggttacgagagccgcggttggggcgaggaggcgggagtttggcactggttctgataggacggagttcctattgggttaacactggaggctctaagatggcggcagtggcaacctgcggtagtgttgccgcgagtactgggtctgcagtggcgacagccagcaagagcaacgtcaccagtttccagaggaggggtcctagagccagcgtgaccaacgacagcggccctcgactggtgtccattgcgggcacgcgaccgtcggtgcggaatggacagctgctggtatcaaccgggctcccagccctagaccagctcttaggtcggttcagagcggagatctgggctcagccgaggggaaacttagggaggggacctgtcggggaagccactttgaccccacatctctttctgacccctaaaccttcggaggaggagagaatagcctgttctttgacccctggctacacaaagctgcttcagtttatccagaacatcatttatgaggaaggatttgatggatccaatcctcaggatgatgatgacacatcttctgagagtaagaaattttatagaatcccaaaagcaaagaatttattgaccatggaaaggaagaaaaatgaatacaacactgaaatgttagaagatgaaagcctaaaggaacataagctagtaaatgaatag

SEQ ID NO: 114403 - DNA, 472 bp, Homo sapiens
cgacactggaggctataagatgttggcagtggcaacctgcggtacgtgttgccgcgagtactgggtctgcagtggcgacagccagcaagagcaacgtcaccagtttccagaggaggggtcctagagccagcgtgaccaacgacagcggcccgtcgacctggtgtccattgcgggcacgcgaccgtcggtgcggaatggacagctgctggtatcaaccgggctcccagccttaggaccagctcttaggtggaggtttagccgttggaacagttcttctaattgaggaggataaatattaatattttactcaccttttgctctttcaagtatttccctggcagaaggaatttgtcaatgggcatactttgttggatgcatctgctaaagaaggatccctgccaacattttacaggaacttccaagcaccattacttgaatgaataaatgtaaaaaggaatttgaatgaagatgt

SEQ ID NO: 114404 - DNA, 455 bp, Homo sapiens
agagaagtatgactgcattacagcttaaagagctttcacattcaggtctctacaggagaagacgagatcgccccgatagtttgagagtaaatgggttaccagaggaagagctaagagcacttggtagtctgaaatttgatctccgccaggtaagagcaatttacctgcaggaaggattgatgggtcagggattaatgccacatagttcctttttcactggaatccagttgtctgatgattccccaccttggatgttccacagggcaggcttaagccgcctaaggagctgcctcgaccatctgccaatcacctcgcttcccggtcagggaaccgagaaatgtagcaggaccagccgcagacaaaactcctcagacaccgagttaaagaaggaaggggcttattcagccgggggcataggcaagactcctttcttaagggccaagctccccgagtga

SEQ ID NO: 114405 - DNA, 404 bp, Homo sapiens
gcgactcttaccaattcttactagacttatgaagtagggactttctaccccatttcatggatgaggaagttgcagcgcagacaggttaaggatttgccgagattcacacagtaagtggcatgttctgatttgtcagtgtttcatttgaaatggtgttcctaggcctcaacactggttgctatgccagatgcactgtggtccactgtattgggctgttttaccttccttcttttggatcctgaatttctacaaatgtaaccatcaggagaattgtttttctggaaatcattacatattccattgaccacagttcagccaagttgtctttatattacgacactatgctcctgaatttgagaggatatgatgagttcaccataggtaggcttgatatggcacctgat

SEQ ID NO: 114406 - DNA, 333 bp, Homo sapiens
atggaaatgcaattggagcccattatgacaaggacagagaaagccactttggtggaagcatccacagggctaatgcactatagtgggtgtgaacttagagggctcaggaatcaaggagaaggtcagcgtggctggagcctgtttagcaacagggatgggacccaaagcccaacaactggtgtccttgtaagagagaggaaaggaagattggacatacgcagacatagaagagacgacaaacaagaaggccatgtgaggatggaggcagaaatgggagtgtggcagccgcaagccaaggaataccaaggactgccggcagacacccaaagctag

SEQ ID NO: 114407 - DNA, 386 bp, Homo sapiens
tcgaccacgcgtccggtcaaaggcatgactgattttccacatatacacatattaacggaccaggccatgtgctgagttcctcatatagattgactcattctaaacctcagaacagccgtgcaacgtgggcatcattagcatgtctttctttcccgcctctgccttcagcttccttgacctctttctccatcactccctctcttccttcctccttatatcgaagggctttcctgaggccaggatggttatggtggggtgttacagaggatgggagaacaggcacactactgaattctagttattgtctgcagatttcatttttccacttcctcatttttgggacaggtagactgtggagcgtaatagaaggtgtgtccaaaagaagg

SEQ ID NO: 114408 - DNA, 2171 bp, Homo sapiens
ctaggcagttacagtctgtagctgtaccattgaggggatcggggcaagatggaaatttccatggcttaccagaaacaggtgagaaactgcctgctggtagcctgctgcaagacaaggaggcccccaaaagagaggagatacatgatcccttaattcaggctcaggctgaagaactgacccacttacaacagaagatacaggaagggagaggtgtctgctaccttttcacccagcatgtgaagaacacagtcaagtcttttgagggccttctcaggaacactgacattgcctactaccagagacagagattctgtgagcaaatggtacaaggaagccagctgacagagatccttgtcagaaaacttgccacagaatactgtcttactagtgcaaatcgatggcagttggttcagttcagaaaactcacatgtggaaaggcaatttcctgtgtgtcacatttgtgggaacttcacttccccaaaccaacctctctggcacctgtattcaccactgtcattgacactggcagaggtgattctgtagctgggggtcgaggtctgagtggctgtgccattgagaaaccactgtgtggagctgctcccaggcagatggagcacctcacagtgcaaggttacggtttcctcttggaacacgctgacccatggaggctgcaaagtgatcactgcctttgtggtgtctacttggagattacaagaagaaaaagaaaaagatcaagtggagtaaaggggagggctctgagcaactgcccgccagatgcacaagtcaaaactgatctagagattctgaagtacgctgtgctccttgagaagtgcggagccactggaaccacaagcagcttcagacaggaaccaatgaggccatcaaaaccctcaacagaggcatctacccctgcagggctgcagagcctctgtactgggcggcatcccagcctgagtgccagagctcagtgggcaggcccccgagcaagtagagaggagggcaccttttggacagaacctgtgggacaagagcgacgtctcatccgttcaggttcctcacaaaatgagagtcaggaagatcagggtgcagacctgatttcccacgaagggctgaaagcagacaaccagagggagagcagcacctgggccaatgagtggctcagcggtaagcccaaggtccagcacacgaatcaggaaactgatggttcttgggttagcaggaatccgcccagagaacagatgaaagtaacaggtaccaatatcaaaactgcagtgactcaccagaaacactacgtgcttgccactttgcttagcggtttgttgagtccaacaactgcgtgggtcccggactcagcccgcctgcacccaggtgaaataaacagccttgttgctcaaacaaagcctgtttggtggtctcttcacatggacagaagcttcagggggcatttattcaattttctaggagcccacgaggcgcaggtgagcggtgacgctgtggttcccaccgcaccgccgcgctccttggtcctctcgctgtctccggcgggcagtaatgttccagcttttgctttcccttcccccgctcccgccctaccgccccacgacccgaccaccgcccagctgagccccagaggctccacagcgcagaaggtgcaccggaggtcgtgggacccacgagcgaccctcaccaccatccctgccctggtggagccccgggcggaacacaggatccgaagatggcagcggaagctccgcagcagcccaacagcgactgggcaggggagattagcatgtgtagaggaagtacacatcaactgcaaatggctttctctgagaccttcttatctgctttatctggatccagtaggggccgacctgctggaaaagaatcttgctgagatgcagaacctgcgccagcgcctggaggagtccatcagtctcaatgaccgcctgagggagaggctggagcatgtgcttagcaatggtgaccaaggaaaagataatcagagagtcactagctgtcaactagaaagcttggtgtctctcttcctgtctttcccactttcacctgggtacggaataggagagaagaaatgtactggacagtccactgtagcccctcattcatatactcagagtcactcttctggctgtggcgaggacatcctgtga

SEQ ID NO: 114409 - DNA, 1374 bp, Homo sapiens
atgatgtttgcctccagcaacccacaaatttatggggacttccagtcacagacctgtgaatccatgataccagctcttgacctaccaccccacggccgcaccaccgcccagctgagcccccgtggctccaccgcgcagaaggtgcgccagaggccctgccagttgccctccctgccggggctcttcaaaggactaaaagctaaaggcgacgatgaattcattccacaagtcctagtcgtgcgccctggtgagtaccagaccctgctccccgcgaggggacccacgagcgaccctcaccaccatccctgccctggtggagcccccgtgcggaacacaggatccgaagatggcagcggaagctcctcagcggcccggaaagcgactgggcaggaatctcctaacacgcaggcgtccaacgtgaccggcgcgactcaccgctctaatctctctgggtttccaaggccttgctcagtggtcctgcccgggcaccggcagcagttttccgtctgtgcctactccacctgctgtccttgttgggtcagcgaacatcgcctccgtctaccactcaatcagcaaacgggaccgccctcgaggacctcacccgccgcttacccccctaacaaattcgcgggcatcgcctccggtcgcctcttcccaaggcctaacgagcgccttcgctggcaacggagttattcgcagctcagcccgatgggcgtctccggggtggcgacgggaaagaagagcctgcaagcgacacaccgagggctccgcgagggacaccgaggccacgagtccgaaggcctggagcgagttgcagcgacccggccgcagctcaccactggactagagatgcgcctttgcgaggtggcagcaagtgaccagtcggtcgtgcgtcgccagagaagctttatgggccacttccttcggcatccccgggggcaggtgcgcggtgcccggggaagaagagggtttgactgcggttctcgacccccggcgaccaacctccaccccgacgacctgaacccaactccctccccaagcactggagatggggcttttccaagggctggggatcttgctgtcctgagaacagctgagcaagggggtcgaggaggagcttgggtggtggaggagaggaaaccggcatgccctgtggcctttatcctgctggtgtggaacagtcagagccctgcagggctgcagagcttctgtactgggcggcatcccagcctgagtgtcagagctcagagagcaggcaccggagcaagtagagaggagggcacctttggacagaatgtgtgggacaagagcgacggctcatccattcaggttcctcagaaaatgagagtcaggaagatgagggcgcagacctga

SEQ ID NO: 114410 - DNA, 581 bp, Homo sapiens
cccgccagatgcacaagtcaaaactgatctagagattctgaagtacgctgtgctccttgagaagtgcggagccactggaaccacaagcagcttcagacaggaaccaatgaggccatcaaaaccctcaacagaggcatctacccctgcagggctgcagagcctctgtactgggcggcatcccagcctgagtgccagagctcagtgggcaggcccccgagcaagtagagaggagggcaccttttggacagaacctgtgggacaagagcgacgtctcatccgttcaggttcctcacaaaatgagagtcaggaagatcagggtgcagacctgatttcccacgaagggctgaaagcagacaaccagagggagagcagcacctgggccaatgagtggctcagcggtaagcccaaggtccagcacacgaatcaggaaactgatggttcttgggttagcaggaatccgcccagagaacagatgaaagtaacaggtaccaatatcaaaactgcagtgactcaccagaaacactacgtgcttgccactttgcttagcggtttgttgagtccaacaactgcgtgggtcccgg

SEQ ID NO: 114411 - DNA, 585 bp, Homo sapiens
atgggatattccttcagttcccagatgaacagtgggaaagactccacattgaccaacctcgggggcctgaaaacccaggtcctcaaggaggcatgccctgtggcctttatcctgctggtgtggaacagtcagacccctgcagggctgcagagcctctgtactgggcggcatcccagcctgagtgccagagctcagagggcaggcccccgagcaagcagagaggagggcaccttttggacagaacgtgtgggacaagagcgatggctcatccgttcaggttcctcacaaaatgagagtcaggaagatcagggcgccggcctgatttcccaggcagggctgaaagcagacaaccggagggagagcagcacctgggccaatgagcttctctccttccaagagtgtcatttcttgatcctctccatagtggctcaacgttcattctccaagggcttcctctcagaggaactagccagcgttcagccccggcgcccctgctcagagcacagcccctccaccaggaccatttccttgcggctgctgtgctcctcatgctctgaaaaaagacaaagatgtcttcctaaataa

SEQ ID NO: 114412 - DNA, 1716 bp, Homo sapiens
atgagggaccttggtgatgacggacatgttctgaatctggactctatcaatgtcagtgtcctgtttgtgaaatcatacaatagttttgaaggttcctcctcttctccccaaacacctcagacctcagtcttcagacctcctgcttctctgtccacacttgctgcccccatcaatgagctcatccagagtcatgattgtagctgcctcaccaacactgatgatgccaaagtccaatctccagcccacatcaccccctcaactccaggctcagagagccagccagccacttgtcttctctactggaacgtctacctgcaactccaatggattgtgtccaaaacagagtccctgattttccctcccaaatactgttcacccccaacccccagccatcctatctcagggaacatgatatggggtcagcacatccggagtgcaatggataagcctcgccctgggaaaaccaccttcgtgatcatggtatctcccctgccagggcaccggcagcagttttccatctgtgcctactccacctgctgtccttgttgggtcagcgaacatcgcctccctctaccgctcaatcagcaaacgggaccgccgtcgaggacctcacccgctacttacccccctaacaaattcgcgggcatcgcctccggtcgcctcttcccaaggcctaacgagcgccttcgctggcaacggagttattcgcagctcagcccgatgggcgtctccggggtggcgacgggaaagaaggtgggcttattgggtgcagctccacgggggctggcatctctgccgggctgtgtacaccggaccgagatgctcagtcgctctctaaagctgctcccgcggatgacggacacggagataaataggaacggcgatggcaacgccacccttccgtttgctccgggcaaaacttcgagagttccctctgactctggagatttttcctcacatccaagagccaactggtcatcaattcgtgatttcccatcggctaaagaagctttatgggtcacttccttcggcatccccgggggcaggtgcgcggtgcccctggaagaagagggtttgaccgcggttctcgaccccggcgcccaacttccatctcgggggcagaaagagggcgagagagctccccagggtcccttttataagggcattagtcccattcagactaatgggactaaatccagactctttgctgagtgttgtggattttttgcatgttcatcctccctgcaggcaactggagatgtattgtccccagaggcatgccctgtggcctttatcctgctggtgtggaacagtcagacccctgcagggctgcagagcctctgtactgggcggcatcccagcctgagtgccagagctcagagggcaggcccccgagcaagcagagaggagggcaccttttggacagaacgtgtgggacaagagcgatggctcatccgttcaggttcctcacagaatgagagtcaggaagatcagggcgccggcctgatttcccaggcagggctgaaagcagacaaccggagggagagcagcacctgggccaatgaggtagaagacagaagaccacagtgtactcctgccctcaacctcaccccctcccacccacatcctccacactccctgaccaccttcctcagaagtgtaataggaatccagattccccctggcctggttgctgcaggaggcacagtagcctga

SEQ ID NO: 114413 - DNA, 1912 bp, Homo sapiens
  misc_feature (1)...(1912): n = a,t,c or g
cagtcccccactaccacaaattatgcagtcgagtttcccacatttggggaaatcgcaggggtcagcacatccggagtgcaatggataagcctcgccctgggaaaaccaccttcgtgatcatggtatctcccctgccaggtaagtatgagatcttcgggctctgccccgacacagcctcatacgcctcactctttacacacacggtcacttgccccgcgcagccccaccccccccagccctcctagccctgacacacagctgggactctcaggtccgaccagcggtcctgaatccgctcccacggcacgggaaatccttcgtggcgaagcagcaggtggggaagcagcagcccctgcgctgcctcatctacatagaagtcgccctatccgtgatgtcaccgacagtgcctttcccagtccccgtctgcctttctgccgctcagcctaccaacccgctgccggagccggcagggggaagtgacgtctgctncgggaganggggaaacacgaaccagccccaggggggagagaggacagcggacgagcgcgggaacacaaagcgggagaaaggaaagcgaccgacgagggccgggcggggagcagaaccaagagaacgaaagaagaaaacagacccggggaaaaggacaagggcgcgggagacgcggagaaagaaacgaagccccagccgcgacacaaaccagcgagacaggcccaggaggggggggccacccgagcccccggaaaaacgagaggcgcaagggaaccaacagaccccggaagtagaacggaagaagcgggaacaggccaccgcggacaaggcgcaacgaaagcagaacagaaccggggcgcccagggaaaggcgggagacgaggaagagagtaggggctcaaagaggcgagggcgatgtccccgcccccaggctcagcagggagctgctggaggtagtagcgcctgaagtcttgcaggactcactggatagatgttattcaactccttccagttgtcttgaacagcctgactcctgccagccctatggaagttccttctccgcattggaggaaaaacatgttggcttttctcttgacgtgggagagtatgaagagtgtaaagacctcataaaatttatgctgaggaatgagcgacagttcaaggaggagaagcttgcagagcagctgaagcaagctgaggagctcaggctcagcagggagctgctggaggtagtagagcctgaagtcttgcaggactcactggatagatgttattcaactccttccagttgtcttgaacagcctgactcctgccagccctatggaagttccttttatgcattggaggaaaaccatgttggcttttctcttgacgtgggagtccctggccccacctcttctgccacaaacgtcagcatggtggtatcagccggccctttgtccagcgagaaggcagagatgaacattctagaaatcaatgagaaattgcgcccccagctggcagagaagaaacagcagttcagaaacctcaaagagaaatgttttctaactcaactgtccggcttcctggccaaccaacagaagaaatacagtcctgcctgcggcaatgacgtctctcgggtcagtaaggggcacttggaacaggaatatcacccctatctggaagaccacgtggaggcttatcaccttcacaanaatgagaaagatgaggatgaagatgttcaagttgaggaggctgagaaagtactggaatcatctgcccccagggaggtgcagaaggctgaagagagcaaagtccctgaggactcactggaggaatgtgccatcacttgttcaaatagccacggcccttgtgactccaaccagcctcacaagaacatcaaaatcacatttgaggaagacgaagtcaactggggatccttctag

SEQ ID NO: 114414 - DNA, 909 bp, Homo sapiens
aaagagcaggaatgggtggccctgaccttgccctgcagccgctgcacaagctgggcctgccgctgcttattccccaggcctccactgtaggattaacaactaagacacaaaccaatacgaaaaaagacatgacctgaaactccagaaagtcaggggaaagcgcgaacgcagtcccccactaccacaaattatgcagtcgagtttcccacatttggggaaatcgcaggggtcagcacatccggagtgcaatggataagcctcgccctgggaaaaccaccttcgtgatcatggtatccccgctcccagggcacgggaactccttcgtggcgaagcagcaagtggcgaagcagcagcctctgcgctgcctcatctacatagaagtcgccctgtccgtgatgtcaccgacagtgccttgcccagtccccgtctgcctttctgccactcaaccgaccaatctgctgccagagccttccaccacagcatgccctgtggcctttatcctgctggtgtggaacagtcagacccctgcagggctgcagagcctctgtactgggcggcatcccagcctgagtgccagagctcagagggcaggcccccgagcaagcagagaggagggcaccttttggacagaacgtgtgggacaagagcgatggctcatccgttcaggttcctcacaaaatgagagtcaggaagatcagggcgccggcctgatttcccaggcagggctgaaagcagacaaccggagggagagcagcacctgggccaatgaggtagaagacagaagaccacagtgtactcctgccctcaacctcaccccctcccacccacatcctccacactccctgaccaccttcctcagaagtgtaataggaatccagattccccctggcctggttgctgcaggaggca

SEQ ID NO: 114415 - DNA, 3036 bp, Homo sapiens
gaccaaagatctgcttttatcatgacagccgccagattcataccacatctccaggttctgttagacatcacagtaaagtaattctttactgcttgctttacttgagccatctttctaatgtgtattcttgaaagtatcctggctgtatgaatctcaaatttcagtcccttttttagaccaccatgcagcccagaggtttggagctttgtcttggaagctccttccatcaatcagaataccaaatttacattgttaggttccctggaggtgttggagctctggattcagcaattatttgtgaataagaaccttgcagctagggctatgggaggattatatgatgtcatggatgcgaaaatcctttataaaatagacagtgtacacaggagacacaaggatgatcagagtgatggtttcttaagtgattacagggccacacacaggctgttttctaaccctgttgtcacccccagggcccacaggtctcatctgagtgaggggaatctggagataacagcccgccgtcagtggaaacatatttatgatgaattaggcggtaatcctgggagcaccagcgctgccacttgtacccgcagacattatgaaaggtcagtggagaaggtccgctcctacatcttggccacaaactcagatatttatggaggcagattaatcctaccatatgaaagatttattaaaggagaagaagataagcccctgcctccaatcaaacctcggaaacaggagaacagttcacaggaaaatgagaacaaaacaaaagtatctggaaccaaacgcatcaaacatgaaatacctaaaagcaagaaagaaaaagaaaatgccccaaagccccaggatgcagcagaggtttcatcagagcaagaaaaagaacaagagactttaataagccagaaaagcatccctgagcctctcccagcagcagacatgaagaaaaaaatagaagggtatcaggaattttcagcgaagcccctggcatccagagtagacccagagaaggacaacgaaacagaccaaggttccaacagtgagaaggtggcagaggaggcgggagagaaggggcccacacctccactcccaagtgctcctctggccccagaaaaagattcagccttggtccctggggccagcaaacagccactcacctctcctagtgccctggtggactcaaaacaagaatccaaactgtgctgttttacagagagccctgaaagtgaaccccaagaagcatccttccccagcttccccaccacacagccaccgctggcaaaccagaatgagacggaggatgacaaactgcccgccatggcagattacattgccaactgcaccgtgaaggtggaccagctgggcagtgacgacatccacaatgcgctcaagcagaccccaaaggtccttgtggtccagtcgtttgacatgttcaaagacaaagacctgactgggcccatgaacgagaaccatggacttaattacacgcccctgctctactctaggggcaacccaggcatcatgtccccactggccaagaaaaagcttttgtcccaagtgagtggggccagcctctccagcagctacccttatggctccccaccccctttgatcagcaaaaagaaactgattgctagggatgacttgtgttccagtttgtcccagacccaccatggccaaagcactgaccatatggcggtcagccggccatcagtgattcagcacgtccagagtttcagaagcaagccctcggaagagagaaagaccatcaatgacatctttaagcatgagaaactgagtcgatcagatccccaccgctgcagcttctccaagcatcaccttaacccccttgctgactcctacgtcctgaagcaagaaattcaggagggcaaggataaactcttagagaaaagggccctcccccattcccacatgcctagcttcctggctgacttctactcgtcccctcatctccatagcctctacagacacaccgagcaccatcttcataatgaacagacatccaaatacccttccagggacatgtacagggaatcggaaaacagttcttttccttcccacagacaccaagaaaagctccatgtaaattatctcacgtccctgcacctgcaagacaaaaagtcggcggcagcagaagcccctacggatgatcagcctacagatctgagccttcccaagaacccgcacaaacctaccggcaaggtcctgggcctggctcattccaccacagggccccaggagagcaaaggcatctcccagttccaggtcttaggcagccagagtcgagactgtcaccccaaagcctgtcgggtatcacccatgaccatgtcaggccctaaaaaataccctgaatcgctttcaagatcaggaaaacctcaccatgtgagactggagaatttcaggaagatggaaggcatggtccacccaatcctgcaccggaaaatgagcccgcagaacattggggcggcgcggccgatcaagcgcagcctggaggatttggaccttgtgattgcagggaaaaaggcccgggcagtgtctcccttagacccatccaaggaggtctctgggaaggagaaggcctctgagcaggagagtgaaggcagcaaagcagcgcacgtacttgaaaaaccagactgtgctttctccactcatgcagcccctggctttccactcgcttgtgatgcaaagaggaatttttacatcaccgacaaattctcagcagctgtacagacacttggctgcggctacacctctgtcatccgtgcaccccagtacaaaactgtaggctcagctctgcccagcagtccaaagcggcatggcccaccaagcttcactccttacccaggaggtgctgggcttatagagttagaagtcagtttttcttctaatctgagggttggtacaaaagtaattgcggtttttgctattgaaagtaatggaaaaaaccgcgattacttttgcactaacctaacacttcgcgttcctgacacctggcatttaggccgctag

SEQ ID NO: 114416 - DNA, 483 bp, Homo sapiens
atgcagcccagaggtttggagctttgtcttggaagctccttccatcaatcagaataccaaatttacattgttaggttccctggaggtgttggagctctggattcagcaattattgtgaataagaaccttgcagctaggcttctgtgcatgatctccattgagagaggagcctggggcctggaaatggctcgtggacacctggcatctggagagatgaataggagaaaggagttgccagcgccaaatcttaaaggcagaccacgcaaaaagaaaccatgcccacaaagaagagattcattcagtggtgttaaggattccaacaacaattccgatggcaaagccgttgccaagttgggcagactgagatggcttatatccctcctaccttcttatgaaccctgcatgtcccaggggcctaaccatgcagcagccttcagctgcatgactccaggacctgcaggaccccaggaatgtgtcctatga

SEQ ID NO: 114417 - DNA, 251 bp, Homo sapiens
atggctcgtggacacctggcatctggagagatgaataggagaaaggagttgccagcgccaaatcttaaaggcagaccacgcaaaaagaaaccatgcccacaaagaagagattcattcagtggtgttaaggattccaacaacaattccgatggcaaagccgttgccaagggaaaatataccacatcagacgaggcacagccccaggatgcttaccaagacatagctagtgacagagccagcaacacttttca

SEQ ID NO: 114418 - DNA, 407 bp, Homo sapiens
aaagaccaaagaagaaatgtgggcaatatgcaaccaactgctcagtattctggtggctcatccacaataagcttaaactctaaccaggctttggcaaacccagtttcaacacacaccattttaactcccaattccagcctcctgtctacttctcacgggacaagaatgccatcattatctacagcagttcagaatatggggatgtatggaaatctgccttgtaatcaacctaacacatacagtgtcacttcaggaatgaatcaattgacccaacagagaaacccaaagcaattgttagcaaatcaaaacaaccctatgatgccacggccacctaccttagggccaagtaataataacaatgtagccacttttggagctggatctgttggtaattcacaacaattgaa

SEQ ID NO: 114419 - DNA, 236 bp, Homo sapiens
gagctgacaacctgctgggcacccgaagacccagccccctgccccctgcatcccctcgaagagcctggccagagagggaagacacagatgatgaagctggagccagggctgccggtccgagtctcctacctcccccaaccctgcccgcccctgaaggctacctggcgccttgggggctgtccctcaagttatctcctctgctaagacaaaaagtaaagcactgtggtctttgcaaa

SEQ ID NO: 114420 - DNA, 815 bp, Homo sapiens
cccacgttaatattcagcctcctctataggaaaaaaaaactcctttcccccccccgctaaactctggccccccccacaatcccttaaaggggcccccccaacaggttgatagttgtttccttttttttgttaagcaaagaccacagtgctttactttttgtcttagcagaggagataacttgagggacagcccccaaggcgccaggtagccttcaggggcggtgcagggttgggggaggtaggagactcggaccggcagccctggctccagcttcatcatctgtgtcttccctctctgggccagggctcttcgaggggatgcaggaggctcgggcacgggtgagctggcagggggcttggtcttcgggtgcccagaaggttgtcagctcctgtttctgatgggactcacctggcaatgattccgggcataaccggggacagcttgcctgcactttgccactgggtgagggatgatgatgccttgtgatgaaacagcacagctgcggaccaacagcccccgtttccggaggttgttgttcatcatagaagaaggggtcatcctcatgaaaacctgcggttggagagtggcagtcccgggagaaggatgctcggacagtcgctatggcaaccgggtgctgtcccgcaccgtggtggtagcagacggggaagagatgagcttgcagggtgggagcgggtgggtctgcgaccagagacgttctggaagatttcagggtccctcccaagatgccccagttgccatagcaaccacctccttcctgatatctctttggcagctggccaggagtagtgcacat

SEQ ID NO: 114421 - DNA, 394 bp, Homo sapiens
cctggtggctgatgtggttgtattcaactcagtttttaatatggaatcatttctcacttccatgggaaaatttatgaagctgattcctgatcacagacccaaggatctggaaagcatcatcagacccaagtgccaagttatttactttcccatcaggtttcctgatgtgagcagggacatggatgaagctggaaactatcgttctcagcaaactaacacaggaacagaaaaccaaacactgcatgttctcactcataagtggaagttgaacaatgaaaacacatggacacaggaaggggaacatcacatactggggcctgccgggggaacccagaaggtgagggagtttagagtaaagggtaatacagatattggggcagttggacttgagtga

SEQ ID NO: 114422 - DNA, 1209 bp, Homo sapiens
gcggccgcgggggaggggcacggcgtcagcgcgtcgccggactgggccgcgcctggtgagccaggaggggagagacaaggagggacggaggaggaggaggtatctctgcattagccagattggacatatgtaaagggacatcagtatatctggatcatcagattgtgcttcaagaagaccatagggaaacacggctttttcatcttgctcctaaagttgcaatagaagatctgaaaggtttgaaatgggccaatgagtatcctcatcattgaagcattctatggaggctcccataaacagctggtggatcttcttcaagaagagttaggagactgtgtcgtttatacccttcctgcaaagaaatggcattggagagcccggacatctgctttatatttctctcagaccattcccatcagtgagcattacaggaccctctttgcaagttcagtgcttaacctgaccgaacaatggcatgcccttcggcctgaccttgggaaactgaaaaagattctgtattttcacgagaaccagttgatatatcctgtcaagaaatgtcaggagagggatttccaatatggatacaaccaaattctttcatgcctggtggctgatgtggttgtattcaactcagtttttaatatggaatcatttctcacttccatgggaaaatttatgaagctgattcctgatcacagacccaaggatctggaaagcatcatcagacccaagtgccaagttatttactttcccatcaggtttcctgatgtgagcagattcatgcccaagcacaaaacaacccatttaaagaagatgctcggccttaaaggaaatggcgtggcggttctgtccatggcccttccttttcagccagagcacagagattcataggatttattgaagaattgtaattcagagcgtgatacacactgtggccttgatactgcacgacaagaatatttgggtaactcatttagacaggaatcagacttggacagatccacctcgtcagataaatcaagctctcatcatggtgaaaataaacaaaatctgactgttgatccctgtgacattttgggtggagttgataatcagcaaagactgctacacattgtctggcctcacaggtggtaagtcaaggcatgccaatttagtaagagttgtagaactggtaaaagaaaatatattctgttgattgacataaaaaaa

SEQ ID NO: 114423 - DNA, 1111 bp, Homo sapiens
tttttttgtatgaaaaaacaaacactagctttattaaaatgaaaagcagttgcacaggttatatatttgattttgtcaaaaaagattttgttaactccattaaatacaaaccaaattgtaaacccctagaagaagagcttcaatgcatccactgctatgcacatttctgctggctgagactgcaaggtagcaccaaattagttctgggagaaattgcagcgtaaattgaagcaactgctcctctccactgcgatagaattcaaagagctggtgacagacagggttctaggcaactcacttttgtggctcctggataactttatagagagatgaaactaaagaactcttgtctttcaaatttgtggcataatttggtaaagatgtttctggtaatgtcttaaggtgtggcaaccattcctccacaacccctttctgtgaagtaaacatttttccacatctgttctaagccttcaaccagggcggctgccggagctccacctgcggggcctcgactcgtgaggctctcagcgacagcgacggaggctgctgtgcttcctcccgagtagcagcaccacctgctccccttcttcctagcagaacgggtcccgaatttgaactggaaataggaagagaaaatcacgtggtggaagcagaagctaaaaaatcaagagcagaggcagcaatcaaggcacacacttccttggttcctttgctaagtggttcccacaaaggaattcaacaagcacaagcactggatgaagggaggttgagactattacgaagaatgccgtttggagtattcttgtacgtgcctcttggtgcacatctacatactcttctgtggtatatatccaggaggggtattgttgggaagaagagttttgtccaaagacgcaacagcggccaatgggaagctccttctgttttagaaaaagaggctctgaattgccttcctgtgcatcctaaccaagaggggatgctagaacagggagctgccactgatggtcctaaacccgtgattctcaaaacagggtcctcagagcggcagtttaagctgctgggaacctggaaacctgttagaaatgaacatctacagagtcagaaatgctga

SEQ ID NO: 114424 - DNA, 558 bp, Homo sapiens
atgcctgtgagaaagccattgtgggttactttaggttttgtccaagagggccagctggaggggcacagagctgcaggtgttgctggattcccatggccatggggaaaccaccgtgagccacaggagaagcatccccccgagttagggaacttccagcgggaagtgcccaccttcgtgggtggctggaggaggggctctgaggaacccacacaaacctccacgggagaaggcattggccctgaacgtctgtcaggaacagagagcaaaaaggaaactggtgacagcgacagttccatcctgtcagccctctcttgtctcccagttactccctatgaaaccagcaacccacaggcatcggaaaccatgggcagacccccagagagcatttctgcaagggattcacactcacccgtttctcggacccctccattctgctgccagctcaaccgcaggtccaaagaaacggagtcactcgcactaccctacttccccagccaggccaggggccatgatcattctctgaacatcccacagttagaagcacgcactgagtactaa

SEQ ID NO: 114425 - DNA, 397 bp, Homo sapiens
tacgaaaggctgtgtacatgatgccaaccgagggggatgattcgtctaaaagcgtccctttagcattacagagagtgttctatgaattacagcatagtgataaacctgtaggaacaaaaaagttaacaaagtcatttgggtgggaaactttagatagcttcatgcaacatgatgttcaggagctttgtcgagtgttgctcgataatgtggaaaataagatgaaaggcacctgtgtagagggcaccatacccaaattattccgcggcaaaatggtgtcctatatccagtgtaaagaagtagactatcggtctgatagaagagaagattattatgatatccagctaagtatcataggaaagaaaaatatatttgaatcatttgtggattatgtggcagt

SEQ ID NO: 114426 - DNA, 744 bp, Homo sapiens
atgctgcgcgaggccactggttctgcacctggggcagccaaggagcatggtgctggagcaacaggacgaggaggtcaagcaccactttctgtctacggcaagagcaggattgtccccgttctaccccgctccaagcacctgctcatctttgctctggatatgctgaaacttgtgattgatgtaatgtcagcatctgtgccagccagctctgtcacacaggcttccacggggaaggagataagtagagggagcagaactgacagcactgggcaagagtggtcagctttagtaaccatgatggcaacagagaaaaaagaatccattatcattgctgactgtgctgtgatatttggcgtcaatatagtacctcatgtgggtggaggatcaccaggttgcctaaggaggagtgaaccatccaggtcagaaatggagcaggtcaaagctccagtgctggttaatagtggatggtgcctaggacttaaactcattctgccagaggtatgcctcacccttgagcactacccattcccagtagggccctgctgtggtaccctatcctatggtgacattcagacatccctcaaggggcctgagcagaccgatagtctacttctttacgctggatatagacaccattttgcctcagaatcatctgggtatggtgccctctacacagggcctttcaccttcttttccacattatcaagcaacactccacaaagctgcgaacatcgtgttgcatga

SEQ ID NO: 114427 - DNA, 1080 bp, Homo sapiens
atggcattaaaatatgtttattttaaagacattgttctctggccatgctgggaagaacacatcggaggcaagaagaacgaatgtggggctgaccgttacgaggctgttaccacaaccaaggaagaaatgatggtgccctggaacaggacatctggtgtaagtgtgtatctatgggggcgggatgttaacagagccatgaagctggaagtgaagacaggtggcatagacagtggtgcgcgagtcacggtgagccatctccgagtgagcacagccaccagcttggcggttatctctgaggcccccctcagacctgagctggcttccacaccagaaccaccaggggattttggagttgaggctcccgcgccttggccccctggctgggtgagggtgtacagcggctgtcgaaaatctctgggtgacgctcacgagtggcttggggcacctcatggtctccggtccctcccaggcatgaaggaaagcagccatgccgaaagccatgcacagacagggcctgaggacgcatgcgggtttccaccgaacggccacagtactgttaatacgaaaggaaaacgaaacaaacacaccaacaaaaatggacagaaggacaacccccttggagatggattttctgttaggtgtttcgctttcttggtttgggtgttcctttcgcggccagacggcacgatcgttaacagtttcagagaaaacgcccaggtcccgcagcaagtcgggtatagctttgactttggtaaaagcaaacaagaagatatacagcccccatttaaactcctggtgagctaaaatgggcagtaagttgaaggcaaggctttggaatggtctacgcattagaaacggaaaatggcaatgcatggatgtgtatttatatattgattgctacaggatgacataaacactgactcagagagggggcacgcgtagctttgtacccacacaaaatcaggcctggctctctgtggctatcttctgaggtccctccaaaggctgcgtgccaaatgcaatcaaatactttctacttaaaaaaagaaaataacttgcgctttatgagttgcaacaatg

SEQ ID NO: 114428 - DNA, 1422 bp, Homo sapiens
atgaacgccgacagcaagggaagcgggactgtacttgcagagccttatgaagtggatgctattaccagccctttttttaccgggaaagagggccagaggggtaatgtaaccggcctgagatggcacagcaagcatttagttaccttcacagtccatacagacacatcaacagcccactctaactgcgtggaggatgctcccatggagacagtgtacccagcactcacagccagggttggacaagagctgaccagcccagaagtcatcaaggccacactggccttgacccaggttcagcagagctcctcggagggtttcctgaagacagtcctgctgcaagtctcttggttctccctgtgtgctccccggagcagcagcagcctcccctggaacttggcccctcctcagaccagatgctctggtgggggagggggctttccaactcgggactcatctgaatcaggtgagaaaaactccacagcagcaacgggattcagaggtgggctagctgggaagactgaagaccaggaaggattgggattttcccagaatcagggaagtgagttcaagtacgggggacccttcctgtcccttagacacattcgagacaacggaggggtcagatctggctggctgggctatgtgcgggcatcagcatttctgacccatcccaagcagaaagcaggtgaaggactttgcccattctctatagacaggtggaccagagtcatgagctctcatggaaagtttcgtttatacggagacatgaaggttgagcattattacacaggtactcgcagagctatgctctgcacacagagccagggctggctgggcgagagggctctgattggagacaggtgccttggggagagttgaggaacgacttccttccaggcggggcctggggacttggtctgcatgtgtctttggtctagaatttggtctgagaatcttataagaagaggccttcctcaggccatgtccagaatgttgcaatttgcctaccaacccaaaatactgtggcctttcacccagggagcccccgctggggagatggaaactgaaatgaccacaaatgcccaggtagccactgcgtgccaagtcccctcttccccacgtgccacctgccctcaatcattgacagtggttagtttactaaagttatataagacaaaggaaaacaggtcacaatgctactccataaaatcagggaaaaaacagtaaaatcaaatcagacacaaacggcaaccataaatacatagaaaaacaggaacaagatagaatcgttgagagtttggaataggactgggtgttgtttggcagagtagatagctttggaaacagtgaaatatgtatgcctgccaaagatggggttcagaattgccccttgggagggggacaccaaaggcatactcctcc

SEQ ID NO: 114429 - DNA, 496 bp, Homo sapiens
ggcgagaatcttttcctgaaagctgtcaataaaatttgccaacaaggaaatttccaatatgagaattttttcaattacgttacaaatattgatatgctggaggaatttgcctacttgagaactcaggaaggtgggaaaattcatctggaattactacccaatcaaggaatgctgatcaagccttctagccctcccatggggttactgcagcaggaattcttacctgtgcttcagcccagcatacagactgctgacaggcaccacactgtaactcgaggcatcaccaaaggcgtgaaggaggactttcgcctggccatggagcgccaggtctcccgctgtggagagaatctgatggtggttctgcacaggttctgcattaatgagaagatcttgctccttcagactctgacctgagtggagacctttccaccagacacagctcgggcctgtgtaattgtaggagaagacactcagcagtgattgccatggcacagag

SEQ ID NO: 114430 - DNA, 509 bp, Homo sapiens
catctcatgccaagagttatctgtgcgagggagtttagtgggtataagaatcaggttttggcatcagacagatctgggttcaaatatggagtctgcagttagtggggtagcaatgggcaagttactcaactgccaagaccccatttccttatcagagagaactggcaccttttttagtgggatggcaatgggcaagttactcaactgccgagaccccatttcctcatcagagaaaactagcacctttttttacatgtggttaacctgaatctggcctgcagatattgatatgctggaggaatttgcctacttgagaactcaggaaggtgggaaaattcatctggaattactacccaatcaaggaatgctgatcaagtaagcatgttctcttttgctcttccatgctgagtgctcaccttttgtgtctttgtatgaagtatttgtaaatgtctatacctatcaaaaatttaatacaaaggactttaaacctggaaaaaaaaaaaaaaaaa

SEQ ID NO: 114431 - DNA, 1681 bp, Homo sapiens
atgaggaggttgcactcccacggacggcatccaccaaagcgctttccaagtacttcgttgctcaataaacgtttgttggagaaaccggtgcataaaggtgaaataataaaacgtggacggatttcggaaagagaaggaaccccggagctcacgctttgcacgatcacccccaccagccccaggagttttcgcgtaaatcgaagcccggggagtgacctggaagcggttcaactgctctggcttctcagaagaggaggggaccgggcgacatgcgcagtagcctcccccgcggtggcggcggcggcggcggcggcggtggctgccgtggcggctgagagtccagagccggacgttccggccgcttcgggctggcggctggagagcgctcgggtcatgtctgcccagggggactgcgagttcctggtgcagcgagcccgggagttggtgccgcaagacctgtgggcagccaaggcgtggctgatcacggcccgcagcctctacccggcagactttaacatccaggtgaggtcccggctgtgcatgcggccgctctgcgtggaggagggccaacgagcgatgctggatgagctgggagccttctgggcagggtatgagatgtacaccatcgagcggaatgcagagcggaccgccaccgccgggaggctgctgtacgacatgtttgtgaatttcccagaccagccggtggtgtggagagaaatcagcattattacatcagcattaaggaacgattcacaggacaaacaaacccaatttttaagaagtttatttgaaactcttcctggtcgggtccagtgtgaaatgttactaaaggtcacggaacaatgcttcaacacgttagaacgatcagaaatgttgcttctacttttgaggcgcttccctgaaacggtggtgcagcatggggttggccttggggaggcactattagaggctgaaactattgaagaacaagaatctccagtgaactgctttagaaaattatttggtaaggaaaattgtattctctattacttctatggtaaattaatatgctgggtttgtgatgtccttcctctaataattaacaaccatgatgttcgattacctgccaatttattgtataagtacttgaacaaagcagctgaattttatatcaattatgtcactaggtctactcaaatagagacatcagcatcacggcgcccaggatacatctgcatttaatgtcacctagcacacgtagctctcagaggtacataatagaggggctgacggaaacatcatcccagatcgtggacccttgggagaggttgtttaagattttgaatgttgttggaatgagatgtgaatggcagatggataaaggaagacgaagctatggagatattttgcatagaatgaaggatctctgcagatacatgaacaactttgatagtgaagcacatgcaaaatataaaaaccaagtggtgtattccaccatgctggtcttctttaagaatgcattccagtatgtcaacagcatacagccatctctcttccaaggttggtttacaaattttagagtgtccaaaaagccagttcatactgtggggatgctgggagttaaaaaaaattctgccgtagcctaccgcctcatgactttgagtctgtctgtattacaccaagacaacatagaagttatgag

SEQ ID NO: 114432 - DNA, 1812 bp, Homo sapiens
tttttttttttttttttcaaattttagggatgatttttattttacaaaaccagatgggtacttttggttttaccaaaaattacaaaaaaatgactcttaaaaaattggaaatagcttctcagacttcttgggaactacttttaagcaaccaaggagttagaactcagatcggttttcttctttgtaacagcaacaatgaccacggctctgtgccatggcagatcactggctgagtgtcttctcctacaattacacaggcccgagctgtgtctgggtgggaaaggtctccactcagggtcagaagtctgaagggggcaaggatcttcttcattaatgcaggaacctggtgcagaacccaccatcagattctctccacagcggggagacctggcgcttccatgggccaggccgaaaagtccctcccttcaagcctttgggtgatggcctcgagttacagtgtggtgcttgatcagcattcccttgattgggtagtaattccagatgatattttcccaccttcttgagttctcaagtaggcaaattcctccagcatatcaatatttgtatcgtaactgaaataattctcatattggaaatttccttgttggcaaattgttattgacagctttcaggaaaagattctcgccccgtggccactcttgctgaagcaacacaatcacatggccccaatgccatgtcgtctctgttgtctgtgaaagctctaagctttaaaaccggctaacattaaatggaggcagtatggcatggatagcctgctgggtacaaggcaggagcttcagatccgaaccttttctaaatttgggctttaactttcggaggggttcctcctgggatttgcctccatcttgaatggggagtaccatgtagcacatcaaatcaaggactttttcacatgtcattctgtactcccctaagcgcaaagtggcacgtcgccagcgtggatgagcgccctctgatgctccagggtcccctgccctgtgatctgtggctgagagatggatccctggagagctgctaagtgatgcaaggcctgtatcggcctttttatattgaccctgatagatgatcatatcagtgaggaagattcttaaccaaagccaagtatccgtcttcccaggccaagcaaatccttgtaaattctttgtcaaggaattctagggaatagagcaactcccagctctcccctggccaatttaaagctttctaacacttcagtggagttagcaagttcgcgctttattgactacaatgtgacgatttcttcctatcgccgaacagtcttcatcgtctgaactctgcatggttttttctcttccttcagctagtttcctctttttatggatgtgtttattacgatcaatttctacatcaccatacacattcgatacatcttcaagaagaaacccagtggaacttggctcggggcattaggaccttggaagagagatggctgtatgctgttgacatactggaatgcattcttaaagaagaccagcatggtggaatacaccacttggtttttatattttgcatgtgcttcactatcaaagttgttcatgtatctgcagagatccttcattctatgcaaaatatctccatagcttcgtcttcctttatccatctgccattcacatctcattccaacaacattcaaaatcttaaacaacctctcccaagggtccacgatctgggatgatttttccgtcagcccttctattatgtacttctgagagctacgtttgctaggtgacattaaatcagatgtatcctgggcgccttgatgctgatttt

SEQ ID NO: 114433 - DNA, 510 bp, Homo sapiens
atgaatgaggagttgcctcttacagatgagcagagaaagtggttgtataagatagaaactacccctgctgaagatgctgtgaacactgttgaaatgacaacaaaggattacaaatattacgtaaacttaattgatacaaggacaggttttagaggattgactctagctttgaaagaagttctactgtgggtaaaatgcgatcaaacaatggttcatactacagagaaatctttcatggaaggtaaacttgcctcacaagaaatgttaaaacttatttcagagaaaatgaaaattacagaggtcaggaatttggatcaacacaaagaaacaggagagtcagacaagaaagaaatgaaggaaaacctaggatataccatcctggacataggacctggcaaagatttcaagacaaagacaccaaaagcaatcgcaacaaaagcaaaaattgacaagtgggacctaatcaaactaaagatctctgcacagcaaaagaaactatcaaaagagtaa

SEQ ID NO: 114434 - DNA, 1011 bp, Homo sapiens
  misc_feature (1)...(1011): n = a,t,c or g
tttttttttttttttttttggttacggcagcacttttatttttccttacacaaagacgagcccgctggggccctaatgtgtctcacataactaggagaaaaccaaagatttgttgtcatctctttaaagaatcgagaattgcgtacaaaaaaaaccttacataaattaagaatgaatacatttacaggcgtaaatgcaaaccgcttcccaacttaaaagcaattaacagcccaccggggttttggccaaaagacatcagcttaagaaaggaaactggggtcctatcggcttggacttttccaaccctgacaagaccccgcaagacaaaaacaactggtttcttgccagcctctagaggaaatcccaggaacactcagccctggacacgtttanttaccaagggggaacagtttaactttcaatacaaggtcaaaatcagcaacaagttctacaatccagtgctgatatcagatacaagcttcaaggacaatttcgtttcgaagggcttatttccagtttcgtgagggctagccatgaggtgtgtgcatttgcccaggggcaaatttccaatccccatttaacccatgcagcaaatggctacggcatcttgctgaagtcgtttagaagcaatttgcggttggacgaatggaggggccccgactcgtcgtacttcttgcttgctaatcccacatctgcctggaaggtggacagttgagcccagatgggagccaaccgatccacccaccgagtacttgcgcttcctgggggtgcgatgatcttgaatctcaatgttgcctgggccgcaggggcgtggatttctttctgcatccctgtcaacaatgcccccgatacctggtggttgccgcccggaagcaacgtttgggcgtaaaggtctttggcggattgccacgtcaaactttatgaatgggagtgaaaggtggtctcgtggatgccgcaagatttcataacccggaaagaaaggttggaagaggccttccggaaaccgggacc

SEQ ID NO: 114435 - DNA, 2016 bp, Homo sapiens
  misc_feature (1)...(2016): n = a,t,c or g
atccttaattaaattaatccccccccgctcagtcgccgctgccaactctcgcactctgttcttccgccgctccgccgtcgcgtttctctgccggtcgcaatggaagaagagatcgccgcgctggtcattgacaatggctccggcatgtgcaaagctggttttgctggggacgacgctccccgagccgtgtttccttccatcgtcgggcgccccagacaccagggcgtcatggtggggcatgggccaaaaaggactcctacgtgggcgacgaggcccagagcaagcgtggcatcctgaccctgaagtaccccattgagcatggcatcgtcaccaactgggacgacatggagaaagatctggcaccacaccttctacaacgagctgcgcgtggccccggaggagcacccagtgctgctgaccgaggcccccctgaaccccaaggccaacagagagaagatgactcagaattatgtttgagaccttcaacacccccggccatgtacgtgggcccatccaggccgtgctgtccctctaaagcctctgggcgcaccactggcattgtcatggactctgggagacggggtcacccacacggtgcccatcttacgagggctacgccctcccccacgccatttctgcgtctgggacctggcttggcccgggacctgaccgactacctcatgaagatcctcactgagcgagggtacagcttcaccacccacgggccgagcgggaaaacgttccgcaacatcaagggagaagcttgtgctacgtcgcccctggacttcgagcagggagatgggcacccgncgcatcctcctcttctctggagaagagctacgagctgcccgatggccaggtcatcaccattggcaatgagcggttccggtgtccggaggcgctgttccagccttccttcctgggtatggaatcttgcggcatccacgagaccaccttcaactccatcatgaagtgtgacgtggacatccgcaaagacctgtacgccaacacggtgctgtcgggcggcaccaccatgtacccgggcattgccgacaggatgcagaaggagatcaccgccctggcgcccagcaccatgaagatcaagatcatcgcacccccaggagcgcaagtaactcggtgtggatcggtggctccatcctggcctcactgtccaccttccagcaagattttggattaagcaagcaggagtacgacgagtcgggcccctccattcgtccaccgcaaatgcttctaaaacggactcagcaagatgcgtagcatttgctgcatgggttaattgagaatagaaaatttgcccctggcaaatggcacacacctcatgctagccttcacgaaacttggaataagccttcgaaaagaaattgtcccttgaagcttgtatcttgatatccagcactggattgtagaacttgttgctgattttgaccctggtattgaagttaactgttccccttggtatttgtttaatacccctgtacatatcttggagttcaaccctttagtacgtgtggcttggtcactttcgtggctaaaggtaagaacgtgccttgtggaaagacaagtctgtggcttggtgagtcctgtgtggcccagcagcctcctgatctgtgcagggtattaacgtgtccagggctgagtgttctgggatttctctaagaggcttggcaagaaccagttgtttttgtcttgcgggtctgtcagggttggaaagtccaaagccgtaggacccagtttcctttcttagctgatgtcctttgggccagaacaccgtgggctgttaacttgccttgagttggaagcggtttgcatttacgcctgtaaatgtattcaatcctaatttaagtaagggttttttttgtacgcaattctcgattctttgaagaagatgacaacaaacttttggttttctacatgttatgtgagaacattagcgccccacgcaacactgtcattgtgtaaggaaaaataaaagtgctgccgtaaccaaaaaaaaaa

SEQ ID NO: 114436 - DNA, 267 bp, Homo sapiens
atggctgtcatactgagcacgtcctatgagccagctgatttgcttgtcagcgtctccaggtcactgtccagcaccactgtcctggacagcagagccccaagtctttgcatgaggaggcaagctactacccagattgtgagcctctattcgccgaacagaaatagtggggagagagggttgcaagctttagagcgcatgtcaatggccggtatcatcattacggctgtggtgtttgtggtcacctatctgcaagtcacgctttcatag

SEQ ID NO: 114437 - DNA, 392 bp, Homo sapiens
gtttctgtgtagaaagaagtagacataggagactccattttgttttgtactaagaaaaattcttctgccttgagatgctgttaatctgtaaccttacccccaaccccgtgctctctgaaacatgtgctgtgtcaactcagggttaaatggattaagggctgtgcaagatgtgctttgttaaacagatgcttgaaggcagcatgctcgttaagagtcaccaccactccctaatctcaagtacccagggacaggccaggcacggtggctcacgcctgtaatcccagcactttgggaggccaaggcaggcagatcacgaggtcaggagatcaagaccatcctggcaaacacggtgaaacaccggtctctactaaaaatacaaaaaattagccggg

SEQ ID NO: 114438 - DNA, 208 bp, Homo sapiens
tttattgatcattcttgggtgtttctcacagagggggatttggcagggtcataggacaatagtggagggaaggtcagcagataaacaagtgaacaaaggtctctggttttcctaggcagaggatcctgcggccttccacagtgtttgtgtccctgggtacttgagattagcgatgggcggccaggcagagacgcccctcacttcccac

SEQ ID NO: 114439 - DNA, 4538 bp, Homo sapiens
aaaaaccagtgtgggtaaatcagtggccgctaccaaaacaaaaactggaggctttacatttattagcaaatgaacagttagaaaagggtcatattgagccttcattctcaccttggaattctcctgtgtttgtaattcagaagaaatcaggcaaatggcgtatgttaactgacttaagggccgtaaatgccgtaaacgccgtaattcaacccatggggcctctccaacccgggttgccctctctggccatgatcccaaaagattggcctttaattataattgatctaaaggattgcttttttaccatccctctggcagagcaggattgtgaaaaatttgcctttactataccagccataaataataaagagccagccaccaggtttcagtggaaagtgttacctcagggaatgcttaatagtccaactatttgtcagacttttgtaggtcgagctcttcaaccagttagagaaaagttttcagactgttatatcattcattatattgatgatattttatgtgctgcagaaacgaaagataaattaattgactgttatacatttctgcaagcagaggttgccaacgcaggactggcaatagcatctgataagatccaaacctctactccttttcattatttagggatgcagatagaaaatagaaaaattaagccaccaaaaatagaaataagaaaagacacattaaaaacactaaatgattttcaaaaattgctgggagatattaattggattcggccaactctaggcattcctacttatgccatgtcaaatttgttctctatcttaagaggagactcagacttaaatagtaaaagaatgttaaccccagaggcaacaaaagaaattaaattagtggaagaaaaaattcagtcagcgcaaataaatagaatagatcccttagccacactccaacttttgatttttgccactgcacattctccaacaggcatcattattcaaaatactgatcttgtggagtggtcattccttcctcacagtacagttaagacttttacattgtacttggatcaaatggctacattaattggtcagacaagattacgaataataaaattatgtggaaatgacccagacaaaatagttgtccctttaaccaaggaacaagttagacaagcctttatcaattctggtgcatggcagattggtcttgctaattttgtgggaattattgataatcattacccaaaaacaaagatcttccagttcttaaaaatgactacttggattctacctaaaattaccagacgtgaacctttagaaaatgctctaacagtatttactgatggttccagcaatggaaaagcagcttacacagggccgaaagaacgagtaatcaaaactcaatatcaatcggctcaaagagcagaattggttgcagtcattacagtgttgcaagattttgaccaacctatcaatattatatcagattctgcatatgtagtacaagctacaagggatgttgagacagctctaattaaatatagcatggatgatcagttaaaccagctattcaatttattacaacaaactgtaagaaaaagaaattttccggccgggcgcgggcctttgactaaagcaaatgaacaagctgacttactggtatcatctgcactcataaaagcacaagaacttcatgctttgactcatgtaaatgtagcaggattaaaaaacaaatttgatgtcacatggaaacaggcaaaagatattgtacaacattgcacccagtgtcaagtcttacacctgcccactcaagaggcaggagttaatcccagaggtctgtgtcctaatgcattatggcaaatggatgtcacgcatgtatcttcatttggaagattatcatatattcatgtaacagttgatacttattcacatttcatatgggcaacttgccaaacaggagaaagtacttcccatgttaaaaaacatttattgtcttgttttgctgtaatgggagttccagaaaaaatcaaaactgacaatggaccaggatattgtagtaaagctttccaaaaattcttaagtcagtggaaaatttcacatacaacaggaattccttataattcccaaggacaggccatagttgaaagaacaaatagaacactcaaaactcaattagttaaacaaaaagaagggggagacagtaaggagtgtaccactcctcagatgcaacttaatctagcactctatactttaaattttttaaacatttatagaaatcagactactacttctgcagaacaacatcttactggtaaaaagaacagcccacatgaaggaaaactaatttggtggaaagataataaaaataagacatgggaaatagggaaggtgataacgtgggggagaggttttgcttgtgtttcaccaggagaaaatcagcttcctgtttggatacccactagacatttgaagttctacaatgaacccatcggagatgcaaagaaaagcacctccgcggagacggagacaccgcaatcgagcaccgttgactcacaagatgaacaaaatggtgacgtcagaagaacagatgaagttgccatccaccaagaaagcagagccgccgacttgggcacaactaaagaagctgacgcagttagctacaaaatatctagagaacacaaaggtgacacaaaccccagagagtatgctgcttgcagccttgatgattgtatcaatggtggagcagctgcagctaactatacctactgggcctatgtgcctttcccgcccttaattcgggcagtcacatggatggataatcctatagaagtatatgttaatgatagtgtatgggtacctggccccacagatgatcactgccctgccaaacctgaggaagaagggatgatgataaatatttccattgggtatcgttatcctcctatttgcctagggagagcaccaggatgtttaatgcctgcagtccaaaattggttggtagaagtacctactgtcagtcccatcagtagattcacttatcacatggtaagcgggatgtcactcaggccacgggtaaattatttacaagacttttcttatcaaagatcatttaaatttagacctaaagggaaaccttgccccaaggaaattcccaaagaatcaaaaaatacagaagttttagtttgggaagaatgtgtggccaatagtgcggtgatattacaaaacaatgaatttggaactattatagattgggcacctcgaggtcaattctaccacaattgctcaggacaaactcagtcgtgtccaagtgcacaagtgagtccagctgttgatagcgacttaacagaaagtttagacaaacataagcataaaaaattgcagtctttctacccttgggaatggggagaaaaaggaatctctaccccaagaccaaaaataataagtcctgtttctggtcctgaacatccagaattatggaggcttactgtggcctcacaccacattagaatttggtctggaaatcaaactttagaaacaagagatcgtaagccattttatactgtcgacctaaattccagtctaacagttcctttacaaagttgcataaagcccccttatatgctagttgtaggaaatatagttattaaaccagactcccagactataacctgtgaaaattgtagattgcttacttgcattgattcaacttttaattggcaacaccgtattctgctggtgagagcaagagagggcgtgtggatccctgtgtccatggaccgaccgtgggaggcctcaccatccatccatactttgactgaagtattaaaaggtgttttaaatagatccaaaagattcatttttactttaatagcagtgattatgggattaattgcagtcacagctacggctgctgtagcaggagttgcattgcactcttctgttcagtcagtaaactttgttaatgattggcaaaaaaattctacaagattgtggaattcacaatctagtattgatcaaaaattggcaaatcaaattaatgatcttagacaaactgtcatttggatgggagacaggctcatgagcttagaacatcgtttccagttacaatgtgactggaatacgtcagatttttctattacaccccaaatttataatgagtctgagcatcactgggacatggttagacgccatctacagggaagagaagataatctcactttagacatttccaaattaaaagaacaaattttcgaagcatcaaaagcccatttaaatttggtgccaggaactgaggcaattgcaggagttgctgatggcctcgcaaatcttaaccctgtcacttgggttaagaccattggaagtactacgattataaatctcatattaatccttgtgtgcctgttttgtctgttgttagtctgcaggtgtacccaacagctccgaagagacagcgaccatcgagaacgggccatgatgacgatggcggttttgtcgaaaagaaaagggggaaatgtggggaaaagcaagagagatcagattgttactgtgtctgtgtag

SEQ ID NO: 114440 - DNA, 4086 bp, Homo sapiens
atggggcctctccaacccgggttgccctctccggccatgatcccaaaagattggcctttaattataattgatctaaaggattgcttttttaccatccctctggcagagcaggattgtgaaaaatttgcctttactataccagccataaataataaagaaccagccaccaggtttcagtggaaagtgttacctcagggaatgcttaatagtccaactatttgtcagacttttgtaggtcgagctcttcaaccagtgagagaaaagttttcagactgttatattattcattatattgatgatattttatgtgctgcagaaacgaaagataaattaattgactgttatacatttctgcaagcagaggttgccaatgctggactggcaatagcatccgataagatccaaacctctactccttttcattatttagggatgcagatagaaaatagaaaaattaagccacaaaaaatagaaataagaaaagacacattaaaaacactaaatgattttcaaaaattactaggagatattaattggattcggccaactctaggcattcctacttatgccatgtcaaatttgttctctatcttaagaggagactcagacttaaatagtcaaagaatattaaccccagaggcaacaaaagaaattaaattagtggaagaaaaaattcagtcagcgcaaataaatagaatagatcccttagccccactccaacttttgatttttgccactgcacattctccaacaggcatcattattcaaaatactgatcttgtggagtggtcattccttcctcacagtacagttaagacttttacattgtacttggatcaaatagctacattaatcggtcagacaagattacgaataacaaaattatgtggaaatgacccagacaaaatagttgtccctttaaccaaggaacaagttagacaagcctttatcaattctggtgcatggcagattggtcttgctaattttgtgggacttattgataatcattacccaaaaacaaagatcttccagttcttaaaattgactacttggattctacctaaaattaccagacgtgaacctttagaaaatgctctaacagtatttactgatggttccagcaatggaaaagcagcttacacagggccgaaagaacgagtaatcaaaactccatatcaatcggctcaaagagacgagttggttgcagtcattacagtgttacaagattttgaccaacctatcaatattatatcagattctgcatatgtagtacaggctacaagggatgttgagacagctctaattaaatatagcatggatgatcagttaaaccagctattcaatttattacaacaaactgtaagaaaaagaaatttcccattttatattacttatattcgagcacacactaatttaccagggcctttgactaaagcaaatgaacaagctgacttactggtatcatctgcactcataaaagcacaagaacttcatgctttgactcatgtaaatgcagcaggattaaaaaacaaatttgatgtcacatggaaacaggcaaaagatattgtacaacattgcacccagtgtcaagtcttacacctgcccactcaagaggcaggagttaatcccagaggtctgtgtcctaatgcattatggcaaatggatgtcacgcatgtaccttcatttggaagattatcatatgttcatgtaacagttgatacttattcacatttcatatgggcaacttgccaaacaggagaaagtacttcccatgttaaaaaacatttattgtcttgttttgctgtaatgggagttccagaaaaaatcaaaactgacaatggaccaggatattgtagtaaagctttccaaaaattcttaagtcagtggaaaatttcacatacaacaggaattccttataattcccaaggacaggccatagttgaaagaactaatagaacactcaaaactcaattagttaaacaaaaagaagggggagacagtaaggagtgtaccactcctcagatgcaacttaatctagcactctatactttaaattttttaaacatttatagaaatcagactactacttctgcagaacaacatcttactggtaaaaagaacagcccacatgaaggaaaactaatttggtggaaagataataaaaataagacatgggaaatagggaaggtgataacgtgggggagaggttttgcttgtgtttcaccaggagaaaatcagcttcctgtttggttacccactagacatttgaagttctacaatgaacccatcggagatgcaaagaaaagggcctccacggagatggtaacaccagtcacatggatggataatcctatagaagtatatgttaatgatagtatatgggtacctggccccatagatgatcgctgccctgccaaacctgaggaagaagggatgatgataaatatttccattgggtatcgttatcctcctatttgcctagggagagcaccaggatgtttaatgcctgcagtccaaaattggttggtagaagtacctactgtcagtcccatcagtagattcacttatcacatggtaagcgggatgtcactcaggccacgggtaaattatttacaagacttttcttatcaaagatcattaaaatttagacctaaagggaaaccttgccccaaggaaattcccaaagaatcaaaaaatacagaagttttagtttgggaagaatgtgtggccaatagtgcggtgatattataaaacaatgaatttggaactattatagattgggcacctcgaggtcaattctaccacaattgctcaggacaaactcagtcgtgtccaagtgcacaagtgagtccagctgttgatagcgacttaacagaaagtttagacaaacataagcataaaaaattgcagtctttctacccttgggaatggggagaaaaaggaatctctaccccaagaccaaaaatagtaagtcctgtttctggtcctgaacatccagaattatggaggcttactgtggcctcacaccacattagaatttggtctggaaatcaaactttagaaacaagagattgtaagccattttatactgtcgacctaaattccagtctaacagttcctttacaaagttgcgtaaagcccccttatatgctagttgtaggaaatatagttattaaaccagactcccagactataacctgtgaaaattgtagattgcttacttgcattgattcaacttttaattggcaacaccgtattctgctggtgagagcaagagagggcgtgtggatccctgtgtccatggaccgaccgtgggaggcctcaccatccgtccatattttgactgaagtattaaaaggtgttttaaatagatccaaaagattcatttttactttaattgcagtgattatgggattaattgcagtcacagctacggctgctgtagcaggagttgcattgcactcttctgttcagtcagtaaactttgttaatgattggcaaaagaattctacaagattgtggaattcacaatctagtattgatcaaaaattggcaaatcaaattaatgatcttagacaaactgtcatttggatgggagacagactcatgagcttagaacatcgtttccagttacaatgtgactggaatacgtcagatttttgtattacaccccaaatttataatgagtctgagcatcactgggacatggttagacgccatctacagggaagagaagataatctcactttagacatttccaaattaaaagaacaaattttcgaagcatcaaaagcccatttaaatttggtgccaggaactgaggcaattgcaggagttgctgatggcctcgcaaatcttaaccctgtcacttgggttaagaccattggaagtacatcgattataaatctcatattaatccttgtgtgcctgttttgtctgttgttagtctgcaggtgtacccaacagctccgaagagacagcgaccatcgagaacgggccatgatgacgatggcggttttgtcgaaaagaaaagggggaaatgtggggaaaagcaagagagatcaaattgttactgtgtctgtgtag

SEQ ID NO: 114441 - DNA, 474 bp, Homo sapiens
cctgagtggacacagcacatgtttcagagagcacggggttgggggtaaggttatagattaacagcatcccaaggcagaagaatttttcttagtacagaacaaaatggagtctcccctgtctggtaagtgggattttttaaaaagctgatattaaacaaaggagtttaatcattcttacccacagactcaaagagaaaaaaaaccggtaagcagtgtatgccaacagtaagccttaaaagggcgaggcaattgtcatcatccaatatttgtcagtaagccaaacccccctcctcacctcgcaagcccgcgccagtccagttttagccgttcttttggaagagcaagtcagttgaacgccatcgaagaggctcctgatttagatattaattgtgcttaaatgcagatgactccccactctcatgcgttcccttatttcccgttgcttctcccattggcatttacagacttgaggtt

SEQ ID NO: 114442 - DNA, 762 bp, Homo sapiens
atgactcttaacgagcatgctgccttcaagcatctgtttaacaaagcaaatcttgtaccgcccttaatccgtttaaccctgagtggacacagcacatgtttcagagagcacggggttgggcctactgacggggtggtgcgtaacggcaaaagcaccgccggacatcagcgctatctctgctctcactgccgtaaaacatggcaactgcagttcacttacaccgcttctcaacccggtacgcaccagaaaatcattgatatggccatgaatggcgttggatgccgggcaacagcccgcattatgggcgttggcctcaacacgattttacgtcacttaaaaaactcaggccgcagtcgccgggcagtgacgtcatcgtctgcgcggaaatggacgaacagtggggctatgtcggggctaaatcgcgccagctggctgttttacgcgtatgacagtctccggaagacggttgttgcgcacgtattcggtgaacgcactatggcgacgctggggcgtcttatgagcctgctgtcaccctttgacgtggtgatatggatgacggatggctggccgctgtatgaatcccgcctgaagggaaagctgcacgtaatcagcaagcgatatacgcagcgaattgagcggcataacctgaatctgaggcagcacctggcacggctgggacggaagtcgctgtcgttctcaaaatcggtggagctgcatgacaaagtcatcgggcattatctgaacataaaacactatcaataa

SEQ ID NO: 114443 - DNA, 1584 bp, Homo sapiens
atggtggattcgttaattgcgcgcgtaggagtaatggctcgcggtaatgccattactttgcctgtatgtggtcgggatgtgaagtttactcttgaagtgctccggggtgatagtgttgagaagacctctcgggtatggtcaggtaatgaacgtgaccaggagctgcttactgaggacgcactggatgatctcatcccttcttttctactgactggtcaacagacaccggcgttcggtcgaagagtatctggtgtcatagaaattgccgatgggagtcgccgtcgtaaagctgctgcacttaccgaaagtgattatcgtgttctggttggcgagctggatgatgagcagatggctgcattatccagattgggtaacgattatcgcccaacaagtgcttatgaacgtggtcagcgttatgcaagccgattgcagaatgaatttgcgggaaatatttctgcgctggctgatgcggaaaatatttcacgtaagattattacccgctgtatcaacaccgccaaattgcctaaatcagttgttgctcttttttctcaccccggtgaactatctgcccggtcagaggatccccggttttctgtgaagacggagccatcgcatttgaggggcaggaagcagcagcaacacccatgtccccagcagtgcccagcagtcggtgacggggctctttgtgcccccaagagtgaggtggtcccagcctggcctccaccggcaggaactggaatggaccagagccaccatgtgtgggagtctattctgaacccagaagcccgagagagcttccaaaatgttctctactctgaaatcccctcattcagaagtttccacgaagtgcgggacgaccatgttcttaatgtaacgtttactacaagggacgatgtcacttatgcaataaagcccacttgctggccggggcttgacattattccttcctgtctggctctgcaccgtattgaaactgagttaatgggcaaatttgatgaaggtaaactgcccaccgatccacacctgatgctccgactggccattgaaactgttgctcatgactatgatgtcatagttattgacagcgcgcctaacctgggtatcggcacgattaatgtcgtatgtgctgctgatgtgctgattgttcccacgcctgctgagttgtttgactacacctccgcactgcagtttttcgatatgcttcgtgatctgctcaagaacgttgatcttaaagggttcgagcctgatgtacgtattttgcttaccaaatacagcaatagtaatggctctcagtccccgtggatggaggagcaaattccggatgcctggggaagcatggttctaaaaaatgttgtacgtgaaacggatgaagttggtaaaggtcaaatccggatgagaactgtttttgacaggcccatgatcaacgctcttcaactggggcctggaaattgcttacgatctgaagtgaggagcgtctctgcctcgctgcccattatctgggatgtgaggagcccctctgcccggccgcccagtatgggaagtgaggagcgcctcttcccggccgtcatcccctctaggaagtga

SEQ ID NO: 114444 - DNA, 2703 bp, Homo sapiens
atgactcttaacgagcatgctgccttcaagcatctgtttaacaaagcacatcttgcaccgcccttaatccatttaaccctgagtggacacagcacatgtttcagagagcacagggttggggacacaccacagacagagaggaggaagacaagaacaaagagaaagagccacagacaaacaaccaagacacaaacacgaaagaaacaaacaaacaagaaacaaacacaaaacaaaacaacaggacaaacacagagagagccccaagaagagaggacgaaaaccacaccccacaacagcaaagaacacaggaacaggaaagcaaagggacacgaggcactaactgacagcaccaaggacggggaggcagagaagaccgaaagaggaagaacgtcgcggcacacagggactgcctgcgttacaagcaggacgggaaacgccggacaggcagacacgggggaccgcgagcgggagcgggcggacgacgagagacccaacgaacaaaaaacagccgaaccgaaggagggagcgaaagcgccgcaagcctatccaaatcaggcagtaagggcagagacagaagctgtgtgcttgggggagagagagaaggaagtttgcagacagctttgccttggaagctactaccagcacccacctcccctccccgccacccacaataaatcacagtactgggtccaactccaaacagtaaagcacaaagagaaattccttccatatgagggaagagaaaaaaccggagatagtaaagaacggaactttcgcttcgcctgcaatcgctttcgccagcagcgttttaccggtacccggaggaccgaccatcaagacgcctttcgggatcttaccgccgagtttctggaagcggctcggctcgcgcagatactcaaccagttcagcaacttcttcttttgcttcgtcgcagcccgcaacgtcagcaaaggtcgttttgatctgatcttccgtcagcatgcgcgctttgctcttaccaaacgacatggcacctttgccaccgccgccctgcatttgacgcatgaagaagatccagacaccaatcagcaacagcatcgggaaccaggagatgaagatagaagccagcaggcttggttcttcaggcggttcaccgacaaccttgacgttcttggtcaacaggttaccaacgaaatctgcggtagcagcgacattctgaacgtgactgaagatcatatggatcgctatccgtttggtttacaacagtatcgtgcagcaaaactgcgcatttacgaaaacgcgaaagtttgcgtggttaatgctgatgatgccttaacaatgccgattcgcggtgcggatgaacgctgcgtcagctttggcgtcaacatgggtgactatcacctgaatcatcagcagggcgaaacctggctgcgggttaaaggcgagaaagtgctgaatgtgaaagagatgaaactttccgggcagcataactacaccaatgcgctggcggcgctggcgctggcagatgctgcagggttaccgcgtgccagcagcctgaaagcgttaaccacattcactggtctgccgcatcgctttgaagttgtgctggagcataacggcgtacgttggattaacgattcgaaagcgaccaacgtcggcagtacggaagcggcgctgaatggcctgcacctgggtggcgatggtaaatcggcggactttagcccactggcgcgttacctgaatggcgataacgtacgtctgtattgtttcggtcgtgacggcgcgcagctggcggcgctacgcccggaagtggcagaacaaaccgaaactatggaacaggcgatgcgcttgctggctccgcgtgttcagccgggcgatatggttctgctctccccagcctgtgccagccttgatcagttcaagaactttgaacaacgaggcaatgagtttgcccgtctggcgaaggagttaggattcagtatcctggtctggatctccacggcgctaaagggctgggtgatgggctcgcgggaaaaagataccgacagcctgatcatgtacgatcgcaccttactgtggctgaccttcggcctcgcggcgattggctttatcatggtgacctcggcgtcaatgcccatagggcaacgcttaaccaacgatccgttcttcttcgcgaagcgtgatggtgtctatctgattttggcgtttattctggcgatcattacgctgcgtctgccgatggagttctggcaacgctacagtgccacgatgctgctcggatctatcatcctgctgatgatcgtcctggtagtgggtagctcggttaaaggggcatcgcgttggatcgatctcggtttgctgcgtatccagcctgcgagactacaagcggtccgctaccagatctacgttggcactgatgaacctgtctccacaaaaaatacaaaaattagccagacatgcagacaacacaaatctaggcgtttgccatttcccacgttgggggtccctttgttgttcgccgttttcggccacgtatcgccctcgactaagttacgggactttttggggaatttaggtttcgcgtggaccggcgagtaccctggcacccacgtctcagattttactcaccgcgttctgtgctttagtgatggagctgtggagtttttgtttaatgatatagcttcagttttacaagataaaaagagttacagagatggatggtag

SEQ ID NO: 114445 - DNA, 489 bp, Homo sapiens
atgactcttaacgagcatgctgccttcaagcatctgtttaacaaagcacatcttgcaccgcccttaatccatttaaccctgagtggacacaacacatgtttcggagagtaccgggttgggggtaagctgcgtttggatgaagcacaggaagcagagtgccaggttttgaagatgcagctgcagcaggaactggagctgttgaatgcgtatcagagcaaaatcaagatgcaagctgaggcacaacatgatcgagagcttcgcgagcttgaacagagggtctccctccggagggcactcttagaacaaaagaagctgtccgcctcagagcctgggggctattgcggactcccatactgctacctcgaggtaccccttgcattggccctgaagggtgaccccatggctggggtccaccttgcattggatggccccaagcttgtggtgggccacccatgggatgaccccagtgaggtcctggacccccagtag

SEQ ID NO: 114446 - DNA, 852 bp, Homo sapiens
tcacatacagtttttggagtatgtttctacatttgttacctggcaacattgctgcactgggacgcgaagttgtattggttcccagcagaccctcgctgttcgtactgtagaaggcagaagttgttttcctccgcggggatttagaagagaaggcacaaggctagtggggtttggctgacagatgggctgatgcgcttcggtgacatgacccagaaccaggcactgggcaggggatgtggactcttgtcctgtcccaacaacagctccctgtaacgtttcttgaagaatgcttgctagggaaaagttcccatggtaactgtttttaaaagagttttgtagcatcaacaggttagacaggaagtcaaaatcatggagctcagcagcatcccctataagcacgtgctcctttttaaccacccctaacaaagacactgaagcaccctgttcataagccctgatgggcactggagggtctggccaggttgggctggatttcaggggacctgatttgtgtttccctgtgcagtgctcgtttccatcacaatctttaaggaggaggccttttccatccactggactcttaccatcgtgcctgactctagggtcaaccaagtctggtcccaagcagaatgctatggaactcttcatgtctccccaccctgcatccacatcttgctgtgtgccggcacaccaggtaacttccacacggccacagagagcatccctggcagccccaaccccgtgctctctgaaacatgtgctgtgtccactcagggttaaatggattaagggcggtgcaagatgtgctttgttcaacagatgcttgaaggcagcatgcttgttaagaatcat

SEQ ID NO: 114447 - DNA, 4050 bp, Homo sapiens
atgtcccagcgggtgaggcgcaatgggtcccccacgccggccggctcccttgggggtggtgcggtggccacggccgggggacccgggagccgcttgcagcccatgagggcgacggttccgttccagctgaagcagcagcagcagcagcaacatggcagccccacgcggacgcggacggcggcggcggcaacaacaacggtggctgctgtggtggcgcctcaggccccgcaggcggcggcggcggcggtggccgcgcacctgctcgcgcagaccagccccacgcgcggcggcgggaacgcgacgcgcgcaccagccccacggtgggccaacgcagaacgggcgcgtccgcgacgtccacgcgaggcaccagccccacgcgcagcgccgcgcctggagctcgcgggagcccccacggccgccgccgccgccgccgctgctgggcaccgtgtcgtcgcccagctcgtcgcccacccacctgtggaccggcgaggtgagcgcggccccacccccagcccgcgtccggcatcggaggaggtctccggagcagagccgaagctcgccggagaagaggagccccagcgccccggtttgcaaagcaggcagagaaagctctggcagagaggctcagatgctgagaaattgtctggagaactgttcatagaaactgcaggtgttctccacactggctgtgaatggaaatggtattggattgtcactgcagagaagcagtttattgactgtagcacattagatttaaatggattccctggaagtgaaccaagtattatgaattccttacttggcaacctactctatactggaagtaaaaagttttcagatcattataaacctgcaatttcccatcgagatttaaacagcagaaatgtcctagtgaaaaatgatggaacctgtgttattagtgactttggactgtccatgaggctgactggaaatagactggtgcgcccaggggaggaagataatgcagccataagcgaggttggcactatcagatatatggcaccagaagtgctagaaggagctgtgaacttgagggactgtgaatcagctttgaaacaagtagacatgtatgctcttggactaatctattgggagatatttatgagatgtacagacctcttcccaggggaagggagtgtacaccgtgccaaagcaccccttgggacaaaggagacgagagtacagggtctcctgtgcctgagagctccctgcttgcgcactgaaggtgactgtgccccttgcagcagaggcaggtgtggtgctggaggagtgtgtttcaaccccagtgggcaggcagcattggtgctcaagaagggacacagagagggggacttctcccctacaatcattgctgtgtacatagccaggctgttcctgtggggggttggcacaggtgtgcctatggatggtcaatgcagggctattaggggtgggtgcaccccaactggcagtgttcccaccaccccaggcccggcttgcatgaagagtagggcccctctccctctctacatggagcaacagttttcctgcagtagagatcaacgaagccacaaagttgtctgtgttcagctgagggaagaggttcccacgggaagccgtttcagtggagggctctgggacaggcatttctgtggccctcagctatattgcagcctagagacaaacgacattgcctatttcagggtcacaaagcctcgggacaggggtgtgattgggaggcagatggcattccttcttggtcaggacatagagctggtgcagccctctctgcctgtgatggaaacctcagcgcttttcaccacaagcccccgaccagcctcatcagggtttgtgcttccactgtcattggggtatccgaaggtgagcttagcagtccagctgcacccagcttcgtcttcctttcctgggagaactcagggcacccagcattccacagatcagtccacccacagatcagcccaccgcctgagacaacagacagcccctcccagtaaacaaagattaagcacgcacacaccctgggcatctggctcttacccgtattcgccacctgctggtctagagacggaactgcacaacccaatacaaaaccttttgaccgaagtgcacagcgctatgaaccagcatctgtttaacaaagcacatcttgcaccgcccttaatccatttaaccctgagtggacacagcacatgtttcagagagcacagggttggggctgctggcgtcccaatgaggcaccgccccccgggaaacggcaacggccgggatcccccgcgtgcgcggcccaaccatccggcactgcaacgaagccggcacgcacaggcccacggggaggatcaatctccccagccggcgagggggcctcacgatcccgaagatcccgaagcacagttgggacgcgggaagcatgccagggctccccttgagagatcagagggcggggacactaggactggagcgaggcaagagggcgtcgcgggctggacagagaaattaaaagggaagctggaggaggtggaaaaaaggcgacagcttccagctacgtggagagttgaggttaaagtaaagcctgagcccgagggaggtgaacgatgcagggagccatgcacgcaacgctggacggcagagcgaacacaagaagcggagagcggagagaagagaaaaggaaaggggaggggagggaggaggggagtggaagagagagagagacaacctacagaatgggagaaaatatttgcaaactatacatctgacaaaggaatgaagccgcagatcctcgcgctgagtgtcacagctcttacagatggtgtccggagtttgttccctcagatgttcagatgtgtccggagttttttgcctctgtgggtttgcggtcttgctgactgcaggcatgaagcagtgagtatcacagctcataaaggtagtgcggacccaaagagtgagcagcagcacaatttattgccaagagcaaaacaagagacactccacagggtggaaggacactggagggaatccgtaccagagtaccagatggcttttcagacagaggttggaaaccatcccacttttgaggatatgcaggttctcgtgtctagggaaaaacagagacccaagttcccagaagcctggaaagaaaatagcctggcagtgaggtcactcaaggagacaatcgaagactgttgggaccaggatgcagaggctcggcttactgcacagtgtgctgaggaaaggatggctgaacttatgatgatttgggaaagaaacaaatctgtgagcccaacagtcaatccaatgtctactgctatgcagaatgaacgaaaaatgtacgtttggaagaaaatgaaaaacaactcagactttaaaatcagaggtgttaaatttggagagacagtttgtcataaatatccatcagaggaatcactatctaagtctgcagacccagcgaaccctgaatccacttgcctggtatcgcttaagccgaccccagcgttcaaaccaccagtttcaccacctggcggcgtggtattccggctgacccggaagcgtccagttgagctccagagaaatatctccgtcagcattgatgcgaggcttaccgcaccggttaatgagacattgtcggcgctcaccttgagttccgatggtaatgcctgcgttaatgaacagctttcgtcctgtttctcacgtttaaggcacaagtttgattgcggaaaattaagcacccgttccagttcgcgaaacgccgtttgccgatgcccggatcgcgtcagtcacgttcgcgttatccagttgcaaacgccagtttttagaggattaaataacggatcgggactggacgtatctgcctgggtatgtacggttattgcacagtcaggtgccagcccggcggcgaacgtcgcctgttttacgggtacgctcgtcgacatcagcaataatcgcgacctgaccagactgcgggcagccctttttcgccagcaatccgtcggctaccagacgctggcgttggtaatgtccgagataggcgattag

SEQ ID NO: 114448 - DNA, 3078 bp, Homo sapiens
ggcctttgactaaagcaaatgaacaagctgacttactggtatcatctgcactcataaaagcacaagaacttcatgctttgactcatgtaaatgtagcaggattaaaaaacaaatttgatgtcacatggaaacaggcaaaagatattgtacaacattgcacccagtgtcaagtcttacacctgcccactcaagaggcaggagttaatcccagaggtctgtgtcctaatgcattatggcaaatggatgtcacgcatgtatcttcatttggaagattatcatatattcatgtaacagttgatacttattcacatttcatatgggcaacttgccaaacaggagaaagtacttcccatgttaaaaaacatttattgtcttgttttgctgtaatgggagttccagaaaaaatcaaaactgacaatggaccaggatattgtagtaaagctttccaaaaattcttaagtcagtggaaaatttcacatacaacaggaattccttataattcccaaggacaggccatagttgaaagaacaaatagaacactcaaaactcaattagttaaacaaaaagaagggggagacagtaaggagtgtaccactcctcagatgcaacttaatctagcactctatactttaaattttttaaacatttatagaaatcagactactacttctgcagaacaacatcttactggtaaaaagaacagcccacatgaaggaaaactaatttggtggaaagataataaaaataagacatgggaaatagggaaggtgataacgtgggggagaggttttgcttgtgtttcaccaggagaaaatcagcttcctgtttggatacccactagacatttgaagttctacaatgaacccatcggagatgcaaagaaaagcacctccgcggagacggagacaccgcaatcgagcaccgttgactcacaagatgaacaaaatggtgacgtcagaagaacagatgaagttgccatccaccaagaaagcagagccgccgacttgggcacaactaaagaagctgacgcagttagctacaaaatatctagagaacacaaaggtgacacaaaccccagagagtatgctgcttgcagccttgatgattgtatcaatggtggtaagtctccctatgcctgcaggagcagctgcagctaactataccaactgggcctatgtgcctttcccgcccttaattcgggcagtcacatggatggataatcctatagaagtatatgttaatgatagtgtatgggtacctggccccatagatgatcgctgccctgccaaacctgaggaagaagggatgatgataaatatttccattgggtatcgttatcctcctatttgcctagggagagcaccaggatgtttaatgcctgcagtccaaaattggttggtagaagtacctactgtcagtcccatcagtagattcacttatcacatggtaagcgggatgtcactcaggccacgggtaaattatttacaagacttttcttatcaaagatcatttaaatttagacctaaagggaaaccttgccccaaggaaattcccaaagaatcaaaaaatacagaagttttagtttgggaagaatgtgtggccaatagtgcggtgatattacaaaacaatgaatttggaactattatagattgggcacctcgaggtcaattctaccacaattgctcaggacaaactcagtcgtgtccaagtgcacaagtgagtccagctgttgatagcgacttaacagaaagtttagacaaacataagcataaaaaattgcagtctttctacccttgggaatggggagaaaaaggaatctctaccccaagaccaaaaataataagtcctgtttctggtcctgaacatccagaattatggaggcttactgtggcctcacaccacattagaatttggtctggaaatcaaactttagaaacaagagatcgtaagccattttatactgtcgacctaaattccagtctaacagttcctttacaaagttgcataaagcccccttatatgctagttgtaggaaatatagttattaaaccagactcccagactataacctgtgaaaattgtagattgcttacttgcattgattcaacttttaattggcaacaccgtattctgctggtgagagcaagagagggcgtgtggatccctgtgtccatggaccgaccgtgggaggcctcaccatccatccatactttgactgaagtattaaaaggtgttttaaatagatccaaaagattcatttttactttaatagcagtgattatgggattaattgcagtcacagctacggctgctgtagcaggagttgcattgcactcttctgttcagtcagtaaactttgttaatgattggcaaaaaaattctacaagattgtggaattcacaatctagtattgatcaaaaattggcaaatcaaattaatgatcttagacaaactgtcatttggatgggagacaggctcatgagcttagaacatcgtttccagttacaatgtgactggaatacgtcagatttttctattacaccccaaatttataatgagtctgagcatcactgggacatggttagacgccatctacagggaagagaagataatctcactttagacatttccaaattaaaagaacaaattttcgaagcatcaaaagcccatttaaatttggtgccaggaactgaggcaattgcaggagttgctgatggcctcgcaaatcttaaccctgtcacttgggttaagaccattggaagtactacgattataaatctcatattaatccttgtgtgcctgttttgtctgttgttagtctgcaggtgtacccaacagctccgaagagacagcgaccatcgagaacgggccatgatgacgatggcggttttgtcgaaaagaaaagggggaaatgtggggaaaagcaagagagatcagattgttactgtgtctgtgtagaaagaagtggagattcaccgaaaattgatgagctctcctccttcacacgtaactttaaggcgatcatgtcggggacaccacttgcagagcttatagtttacaatgaatgccacgaaatgg

SEQ ID NO: 114449 - DNA, 2307 bp, Homo sapiens
tcagctgttgttgttgtcgtgtatcatcatataagttgtttctggctggtcaattacctggtagagctgaattatatttgggcggttgggtgtcttcatgatactcatctttctcatcttagcatcacccacactacctagcacagtgccttcgatgggtcctttgctcagcaaatgtttgaatggcagagtcaggactgaaagccggtgctccttccccaaaccgcacaactccttgccacgctgactgccccgagagtggggcgggcactcaggcatatcacagctgagcatatgatggatggctaacacttggacttgctgcggcacctccacggcagaaatggagaagacatggaggcagaagatcttggagccattgtagccgaccacaaagccctgcagcttctgccggtgcatagggaaggtgctggctttgatgttgaggtagcctcctcccgagaagcagagcatgcatgtcctcacactgggtgttccaggccacactgttggcgtttggttccccgtctgggaagtgaggagcgtctctgcctggccgcccatcgtctgggacgtgaggagcccctctgcctggctgcccagtctggaaagtgaggagcgtctctgcccggccgccatcccatctaggaaacatttaattttggcttctgctgctagccggatcttcattgccaaaagaagcacccaaccctctgcagtggctattggccgaccttccgtaccccagtgcactatgcggctttcagttaataactgctctaggccacctggcattttcaaggcatccctgcactcacacagaggtacacaggcactcaccacacagaagaagagcccagcaaagagccccacggccgccacaaccgagaccagggtgatgaggaagatttcccacggcaccagggacccaccaggcttcgcctcactcactgcagtagatgcactatgggaagttgtgtgcattccagtcagagctgctgttccagagcctgcagaggtcacactggacccagagttggtggctgtgttggccccactggaggttgtgctggactcagaattggtggcagtgctggccccactggacactgtgctggactcagagttggtggctgtgctggccccactggaggtcgtgctggactcagaggtggtggctgtgctggccccactggacactgtgctggactcagagttggtggctgtgctggtcccactggaggtcgtgctggacccagagttggtggctgtgctggccccactggaggttgtgctggactcagagttggtggctgtgctggccccactggaggtcgtgctggactcagagttggtggctgtgctggccccactggaggttgtgctggagtcagagttggtggctgtgttggccccactggaggttgtactggactcagagttggtggctgtgttggccccactggagggtgtgctggactcagaattgagttggtggctgtgccggccccactggacactgtgctggactcagagttggtggctgtgccggccccactggaggtcgtgctggactcagagttggtggctgtgccggccccactggagggtgtgctggactcagagttggtggctgtgctggccccactggaggtcgtgctggactcagagttggtggctgtgccagccccattggaggtcgttctggactcagagttggtggctgtgctggccccactggaggttgtgctggactcagagttggtggcagtgctggccctactggacactgtgctggactcagagttggtggctgtgctggccccactggaggttgtgctggactcagagttggtggctgtgctggcctcactggaggttgtgctggagtcagagttggtggctgtgctagccccactggaggttgtgctggagtcagagttggtggctgtgctggccccactggagggtgtgctggactcagagttggtggctgtgctggccccactggaggttgtgctggactcagagttggtggctatgctgatcccactggacgctgtgctgaactcagagttggtggctgtgctgatcccactggaggttgtatggaactcagagttggtgactatgctgaccccattggaggtcacgctggaccctgagatggtggctgtgctgaccccactggaggtcacactggacccagagttggtggctgtgctggctccactggagatcacactggatccagtgttggcagaggtgctagtctcattggaatttgttgctgaagaaatcatataa

SEQ ID NO: 114450 - DNA, 642 bp, Homo sapiens
atgactcttaaggagcatgctgccttcaagcatctgtttaacaaagcacatcttgcaccgcccttaatccattcaaccctgagtggatacagcacatgtttcagagaacacagggttggggcacacaataatgataatatggacagttacaacatggatcataataaaatgactcacacggatctttatttattatggcattacctgtgcatagagaaagctctttcgaaagaaactgccccacagctttcagagctgtcttatccaaaagaagatcttctggagccacaggaacagcttcccccacctcctttaccgcctcctgtttcccaggttgatgctgctattggattactaatgccgcctcttcagacccctgttaatctctcagttttctgtgaccacaactatactgtggaggatacaatgcaccagcggaaaaggattcatcagctagaacagcaagttgaaaaactcagaaagaagctcaagaccgcacagcagcgatgcagaaggcaagaacggcagcttgaaaaattaaaggaggttgttcacttccagaaagagaaagacgacgtatcagaaagaggttatgtgattctaccaaatgactactttgaaatagttgaagtaccagcataa

SEQ ID NO: 114451 - DNA, 3639 bp, Homo sapiens
atgactcttaacgagcatgctgccttcaagcatctgtttaacaaagcacatcttgcaccgcccttaatccatttaaccctgagtggacacagcacatgtttcagagagcacagggttgggggtatatgtcctcattttcctcaagacttttggccagagcagagcatggaagattcttttcaaaaagtattactgagaaaatatgaaaaatgtggacatgagaatttacagttaagaaaaggttgtaaaagtgtggatgagtgtaaggtgcacaaagaaggttataataaacttaaccagtgtctcacaactgcccagagcaaagtatttcaatgtgggaaatatttgaaagtcttctataaatttttaaattcaaacagacatacgataagacatactggaaagaaatgcttcaaatgtaaaaaatgtgtcaagtcattttgcatccgtttacacaaaacccaacataaatgcgtttatattacagagaagtcctgtaaatgtaaagaatgtgaaaaaacctttcattggtcctcaacccttactaatcataaggaaattcatactgaagataaaccctacaaatgtgaagaatgtggcaaagcttttaagcagctctcaacccttactacacataaaataatctgtgctaaagagaaaatctacaagtgtgaagaatgtggcaaagcatttctatggtcctcaaccctaactagacataagaggatacacactggagagaaaccctacaaatgtgaagaatgtggcaaagcttttagccattcttcaacccttgctaaacataagagaattcatactggagagaaaccctacaaatgtgaagaatgtggcaaagcttttagccgttcttcaacccttgctaaacataagagaattcatactggagagaaaccctacaaatgtaaagaatgtggcaaagcttttagcaattcctcaacccttgctaatcataagataactcatactgaagagaaaccctacaaatgtaaagaatgtgacaaagcttttaagcgactctcaacccttactaaacataaaataatacatgctggagagaaactctacaaatgtgaagaatgtggcaaagcttttaatcgatcttcaaatcttactatacataagtttattcatactggagagaaaccttacaagtgtgaagaatgtggcaaagcatttaactggtcctcaagccttactaaacataaaagatttcatactagagagaaacccttcaaatgtaaagaatgtggcaaagcatttatatggtcttcaaccctaactagacataagaggatacacactggagagaagccctacaaatgtgaagaatgtggcaaagcttttaggcaatcctcaacccttactaaacataagataattcatactggagagaaaccctacaaatttgaagaatgtggcaaagcttttagacaatccttaacccttaataaacataagataattcatagtagagagaaaccctacaaatgtaaagaatgtggcaaagcttttaagcaattctcaacccttactacacataaaataattcatgctggaaagaaactctacaaatgtgaagaatgtggcaaagcttttaatcattcctcaagtctttctacacataagataattcatactggagagaagtcttacaagtgtgaagaatgtggcaaagcatttctatggtcctcaaccctaagaagacataagaggatacacactggagagaaaccctacaaatgtgaagaatgtggcaaagcttttagccattcttcagcccttgctaaacataagagaattcatactggagagaaaccctacaaatgtaaagaatgtggcaaagcttttagcaattcctcaacccttgctaatcataagataactcatactgaagagaaaccctacaaatgtaaagaatgtgacaaaacttttaagcgactctcaacccttactaaacataaaataatacatgctggagagaaactctacaaatgtgaagaatgtggcaaagcttttaatcgatcttcaaatcttactatacataagtttattcatactggagagaaaccttacaagtgtgaagaatgtggcaaagcatttaactggtcctcaagccttactaaacataaaagaattcatactagagagaaacccttcaaatgtaaagaatgtggcaaagcatttatatggtcttcaaccctaactagacataagaggatacacactggagagaagccctacaaatgtgaagaatgtggcaaagcttttagccgttcctcaacccttactaagcataagacaattcatactggagagaaaccctacaaatgtaaagaatgtggcaaagcttttaagcactcctcagcccttgctaaacataaaataatacatgctggagagaaactctacaaatgtgaggaatgtggcaaagcttttaatcaatcttcaaatcttacgacacataagataattcatactaaagagaaaccttccaagagtgaagaatgtgacaaagcatttatctggtcctcaacccttactgaacataagagaattcataccagagagaaaacctacaaatgtgaagaatgtggcaaagcatttagccagccttcacaccttactacacataagaggatgcacactggagagaaaccctacaaatgtgaagaatgtggcaaagcttttagccaatcctcaacccttactacacataagataattcatactggagagaaaccctacaaatgtgaagaatgtggcaaagcttttaggaaatcttcaactcttactgaacataagataattcatactggagagaaaccctacaaatgtgaagaatgtggcaaagcatttagccaatcctcaaccctaactagacatacgaggatgcacactggagagaaaccatacaaatgtgaagaatgtggcaaagcttttaatcgatcctcaaagcttactacacataagataattcatactggagagaaaccttacaagtgtgaagaatgtggcaaagcatttatatcatcctcaaccctaaatggacataagagaattcatactagagagaaaccctacaaatgtgaagaatgtggcaaagcatttagccaatcttcaaccctaactagacataagaggttgcacaccggagagaaaccctacaaatgtggagaatgtggcaaagcctttaaagagtcctcagctcttactaaacataagataattcacactggagagaaaccctacaaatgtgaaaaatgtggcaaagcctttaaccagtcttcaatccttactaaccataagaaaattcatactatcacacctaaaattcatactagagagaaaccctacaaatataaagaatgtggcaaatcttttaaccggtcttcaacctttactaaacataaggtaattcatactggagtaaaactctacaaatgtgaagaatgtggcaaatcctttttctggtcctcagccctaaccagacataagaaaattcatactggacagcaaccctacaaacaggaaaaatttggcaaagcctttaaccagttttcacaccttactacagataagataactcatattggagagaaatcttacaagtgtgaataa

SEQ ID NO: 114452 - DNA, 540 bp, Homo sapiens
atgactcttaaggagcatgctgccttcaagcatctgtttaacaaagcacatcttgcccagcccttaatccatttaaccctgagtggacacagcacatgtttcagagagcacagggttgggggaaagaggttggagtttctgagaggaaggctagaaacacagaaggaggatttgatgggtggacagtgtgtggttcaccccacctccctacaatgcagaagaggccatgggcctgcaggagaccttctggaaccattgactgtgtcactggagaaatcagaagttgcacctggtggcggaatgggaatagagctggaaggagaaactggagcggaggcagtgaaaagtttcacatatttggaaatccaaattaacactgatgcaaacaaaagggcccctaagtcattgggaaccggtttggtcggcatcaccacggagacctggggggcagttgtcagaggagagctggctcagatgtcagagatgcacaaacttgcatatgctcagtccacaagcaacacccccgcagctggcatctaa

SEQ ID NO: 114453 - DNA, 3225 bp, Homo sapiens
atgctgcgctctctccgcctgcagcaggagtggctggaatgggaggaccggcggcgggcggctgcccagcagtgccggagccgcaggtgcccgtcaagtccccgggcccgactcactaggcctcaccgttcctgccgagacccagctgtccaccaagccctcttctccggcaacctgcagcaggtccaagccctgttccaagatgaagaggccgccaacatgattgtggagactgtgagcaaccagctggcctggtcggctgaacaggggttctgggtgctgacccccaagaccaagcagacggcacccctcgccatcgctacagcccgaggctacacagactgtgctcgacacctgatccggcagggagctgagctggatgcccgtgtcgggggtcgcgctgccttgcatgaggcctgtgcccgagcccagtttgactgtgtgcggctgctgctgaccttcggagccaaggctaatgtgctgactgaggagggcacgactcctttgcacctctgcacgatccccgagtccttgcagtgcgccaagttgctgctggaagcaggagcgacggtgaacctggcagcaggcgagagccaggagacgcccctgcacgtggcggcggcgcgcggcctggagcaacatgtggctctgtacctggagcatggcgccgacgtgggcctgcgcaccagccagggcgagactgcgctgaacacggcgtgcgctggggccgagggcccaggtagctgcaggcgacaccaggctgcggcgcgccggctcctggaggctggagctgatgcccgggcggccgggcgcaagcgccacacgccgctgcacaacgcttgtgccaacggctgcgggggcctggccgagctgctgctgcgttacggggcccgcgctgaggtccccaatggggcgggccacacgcccatggactgtgcgctgcaggccgtccaggactcccccaactgggagcctgaagtccttttcgccgcactgctggactacggggcgcagccagtgcgccctgagatgctgaaacactgcgccaacttccctcgggccctggaagtcctgcttaatgcctatccttgtgtcccatcctgtgagacctgggtggaggcggtgctcccagagctgtggaaggagcacgaagccttctacagctcggccctgtgcatggtgaaccagccaaggcagctgcagcacctggcccgactagctgtgcgcgctcggttgggaagccgctgccggcagggtgccacccggctgccactgcccccgctcctcagggactacctgctgctgcatatgaagcggagccgctgccgcgaccgaccgcagccgccgccgcccgaccgccgggaggatggagttcagcgggcagcggagctgtctcagtctttgccgccgcgccggcgagcgccgcccgggaggcagcggctggaggagcggacgggccccgcggggcccgagggcaaggagcagccgcctgccttggcctcccaaagtgccgagattgcagcctctgcccggctgccaccccgtctgggaaggcttctgggattccagaaagcctgcaggtgttggagcctcaaccctcatatcctcatggccctgctgaggtctcttgtcccacctgacaagaaacacccacaggtgtggaggggcaggccaccccttcatctggcgcccaacgtggggcttttctctagggtgaaggtacgctcgagcgtggtcattgaggacaagtcaatgagagattcccgaagaggcctatctcaaagaagaagaaggagaaagaagaagaagagaggtagcagcagcaagaagaagaagaggaggaagaagagaaagaagaagaagaggaagaagaggaagaggaggaagaataggaagaagaagaagaagaggaagaacaagaggaagaagaagaggaagaaggaagaaaagaaagaagaggaagaagaaagaagaaagaaggaggaggaagatgaagaaggaagaggaagaggaagaaggaagaggaagaggaagaagaggaagaaaagaagaagcagaaagaagaaagaaacagcagcagcagcagcagctggagaaaggctgggaaaatggtggccaggagagtgtccggtagagtgtgttgcatactttctaaggcggcggctgcagcagcggctccatccagcccgtcagctcctcctgcaaggcatggctggctacctgagtgaatcggactttgtgatggtggaggagggcttcagtacccgagacctgctgaaggaactcactctgggggcctcacaggccaccacggacgaggtagctgccttcttcgtggctgacctgggtgccatagtgaggaagcacttttgctttctgaagtgcctgccacgagtccggcccttttatgctgtcaagtgcaacagcagcccaggtgtgctgaaggttctggcccagctggggctgggctttagctgtgccaacaaggcagagatggagttggtccagcatattggaatccctgccagtaagatcatctgcgccaacccctgtaagcaaattgcacagatcaaatatgctgccaagcatgggatccagctgctgagctttgacaatgagatggagctggcaaaggtggtaaagagccaccccagtgccaattttcacattggcagtggctgtcctgaccctcaggcctatgctcagtccatcgcagacgcccggctcgtgtttgaaatgggcaccgagctgggtcacaagatgcacgttctggaccttggtggtggcttccctggcacagaaggggccaaagtgagatttgaagagattgcttccgtgatcaactcagccttggacctgtacttcccagagggctgtggcgtggacatctttgctgagctggggcgctactacgtgacctcggccttcactgtggcagtcagcatcattgccaagaaggaggttctgctagaccagcctggcagggaggaggaaaatggttccacctccaagaccatcgtgtaccaccttgatgagggcgtgtatgggatcttcaactcagtcctgtttgacaacatctgccctacccccatcctgcagaagtactcgtcttcctgttgcatgctggctctcacccactccactcccttcattggctcctcagaagaggagatgatggtcccagcccactgccacgccccccaccgggatctttgctttggctga

SEQ ID NO: 114454 - DNA, 7552 bp, Homo sapiens
atgactcttaacgagcatgctgccttcaagcatctgtttaacaaagcacatcttgtatcgcccttaatccatttaaccctgagtggacacagcacatgtttcagagatcacagggttgggggacaggactttatccttcttcgcctttggagtcaggggcatcaggagtccaaaacagccagtgctagtctcagcttccaattcagtgaagccatattgtgtcctctgcttggaaccaaagcccccaaaggagcagaacccagagcaaggaatgagccagccgcatattctcttccccaggttaaacaacagagacatcttagacagcttcagcagcagcaagaggttcatcatactacaagtgtggatgagatcccccagaaagctaaaactattctcttctcccaccctcgggccaagttcttgaatctggctgtttgttctagagttcatccttatcttcatttcctggaaactgagagtttaagcatgctgcctgaaactaatccaagtggttcctgctacccaacccccagacacatacaaataaccatttatgaagatgtactatgctccagagactttgatttaattgttcatgggtttggcctgggatttaaaatgtctagaaatttcgcaggtgattctagcctgcagacaacatttagtaaacactgcggtagaggaagccatactccaaccgaaacatggagccatatcaacaggaaacgctattgttttctctcagtagggatggctgaaagtagcagctgttgtataagccagcatgccaacaaagggacacagggacacatcttggagctacgaaagacaggaaaacagcaaatggcattaattctatttcatccaagagcaagtgcagatggcctggagaggcaaggtgacactctgggcagcagaatggagatggaggggttggggagaaagccatctatcaaaaacattgcaccccactcgagctctgctaagggacagactgcctcttcaagtgggtccctgactcctgtgcctcctgactgggagacaactcccagcaggggtcaacagaaacctcatacagaagagctccggctggcatctggtgggtgccccctgggacaaagtttccagaggaaggaacaggcagcaatccttgctgttctgcacccttcgctggtgatacccaggcaaatagtgtctggagtggacttccagcaaacaccagcagacctgcagaagaggggcccccaaccctgtgctctctgaaacatgtgctgtgtccactcagagttaaatggattaagggcggtgcaagatgtgctttgttaaacagatgcttgaaggcagcatgctcattaagagtcatcaccactccctaatctcaagtacccagggacacaaacactgcggaaggccgcagagacctctgcctaggaaagcaaggtattgtccaaggtttctccccatgtgataagtctgaaatatgctggcctcttgggaagggaaagacctgaccgtcccccagcccaacacccgtaaaggggtgaaggtacgctcgagcgtggtcattgaggacaagtcgacgagagatcccgagtacgtctacagtcagccttacgaacaaggaactttagatctaaaagattggaaaagaattggtaaggaactaaaacaagcaggtaggaagggtaatatcattccacttacagtatggaatgattgggccattattaaagcagctttagaaccatttcaaacagaagaagatagcgtttcagtttctgatgcccctggaagctgtttaatagattgtaatgaaaagacaaggaaaaaatcccagaaagaaacggaaagtttacattgcgaatatgtagcagagccggtaatggctcagtcaacgcaaaatgttgactataatcaattacaggaggtgatatatcctgaaacgttaaaattagaaggaaaaggtccagaattagtggggccatcagagtctaaaccacgagggacaagtcctcttccagcaggtcaggtgcccgtaacattacaacctcaaaagcaggttaaagaaaataagacccaaccgccagtagcctatcaatactggcctccggctgaacttcagtatcggccacccccagaaagtcagtatggatatccaggaatgcccccagcaccacagggcagggcgccataccctcagccgcccactaggagacttaatcctacggcaccacctagtagacagggtagtgaattacatgaaattattgataaatcaagaaaggaaggagatactgaggcatggcaattcccagtaacgttagaaccgatgccacctggagaaggagcccaagagggagagcctcccacagttgaggccagatacaagtctttttcgataaaaatgctaaaagatatgaaagagggagtaaaacagtatggacccaactccccttatatgaggacattattagattccattgcttatggacatagactcattccttatgattgggagattctggcaaaatcgtctctctcaccctctcaatttttacaatttaagacttggtggattgatggggtacaagaacaggtccgaagaaatagggctgccaatcctccagttaacatagatgcagatcaactattaggaataggtcaaaattggagtactattagtcaacaagcattaatgcaaaatgaggccattgagcaagttagagctatctgccttagagcctgggaaaaaatccaagacccaggaagtgcctgcccctcatttaatacagtaagacaaggttcaaaagagccctatcctgattttgtggcaaggctccaagatgttgctcaaaagtcaattgccgatgaaaaagcccgtaaggtcatagtggagttgatggcatatgaaaacgccaatcctgagtgtcaatcagccattaagccattaaaaggaaaggttcctgcaggatcagatgtaatctcagaatatgtaaaagcctgtgatggaatcggaggagctatgcataaagctatgcttatggctcaagcaataacaggagttgttttaggaggacaagttagaacatttggaggaaaatgttataattgtggtcaaattggtcacttaaaaaagaattgcccagtcttaaacaaacagaatataactattcaagcaactacaacagggttttcagggacaacaacccccactgtcccaagtgtttcagggaataagccagttaccacaatacaacaattgtccctcaccacaagcggcagtgcagcagtagatttatgtactatacaagcagtctctctgcttccaggggagcccccacaaaaaatccctacaggggtatatggcccactgcctgaggggactgtaggactaatcttgggaagatcaagtctaaatctaaaaggagttcaaattcatactagtgtggttgattcagactataaaggcgaaattcaattggttattagctcttcaattccttggagtgccagtccaagagacaggattgctcaattattactcctgccatatattaagggtggaaatagtgaaataaaaagaataggagggcttgtaagcactgatccaacaggaaaggctgcatattgggcaagtcaggtctcagagaacagacctgtgtgtaaggccattattcaaggaaaacagtttgaagggttggtagacactggagcagatgtctctattattgctttaaatcagtggccaaaaaactggcttaaacaaaaggctgttacaggacttgtcggcataggcacagcctcagaagtgtatcaaagtatggagattttacattgcttagggccagataatcaagaaagtactgttcagccaatgattacttcaattcctcttaatctgtggggtcgagatttattacaacaatgggaaaaaccggtgtgggtaaatcagtggccgctaccaaaacaaaaactggaggctttacatttattagcaaatgaacagttagaaaagggtcacattgagccttcgttctcaccttggaattctcctgtgtttgtaattcagaagaaatcaggcaaatggcatacgttaactgacttaagggctgtaaacgccgtaattcaacccatggggcctctccaacccgggttgccctctccggccatgatcccaaaagattggcctttaattataattgatctaaaggattgcttttttaccatccctctggcagagcaggattgtgaaaaatttgcctttactataccagccataaataataaagaaccagccaccaggtttcagtggaaagtgttacctcagggaatgcttaatagtccaactatttgtcagacttttgtaggtcgagctcttcaaccagtgagagaaaagttttcagactgttatattattcattatattgatgatattttatgtgctgcagaaacgaaagataaattaattgactgttatacatttctgcaagcagaggttgccaatgctggactggcaatagcatctgataagatccaaacctctactccttttcattatttagggatgcagatagaaaatagaaaaattaagccacaaaaaatagaaataagaaaagacacattaaaaacactaaatgattttcaaaaattactaggagatattaattggattcggccaactctaggcattcctacttatgccatgtcaaatttgttctctatcttaagaggagactcagacttaaatagtcaaagaatattaaccccagaggcaacaaaagaaattaaattagtggaagaaaaaattcagtcagcgcaaataaatagaatagatcccttagccccactccaacttttgatttttgccactgcacattctccaacaggcatcattattcaaaatactgatcttgtggagtggtcattccttcctcacagtacagttaagacttttacattgtacttggatcaaatagctacattaatcggtcagacaagattacgaataacaaaattatgtggaaatgacccagacaaaatagttgtccctttaaccaaggaacaagttagacaagcctttatcaattctggtgcatggcagattggtcttgctaattttgtgggacttattgataatcattacccaaaaacaaagatcttccagttcttaaaattgactacttggattctacctaaaattaccagacgtgaacctttagaaaatgctctaacagtatttactgatggttccagcaatggaaaagcagcttacacagggccgaaagaacgagtaatcaaaactccatatcaatcggctcaaagagcagagttggttgcagtcattacagtgttacaagattttgaccaacctatcaatattatatcagattctgcatatgtagtacaggctacaagggatgttgagacagctctaattaaatatagcatggatgatcagttaaaccagctattcaatttattacaacaaactgtaagaaaaagaaatttcccattttatattacttatattcgagcacacactaatttaccagggcctttgactaaagcaaatgaacaagctgacttactggtatcatctgcactcataaaagcacaagaacttcatgctttgactcatgtaaatgcagcaggattaaaaaacaaatttgatgtcacatggaaacaggcaaaagatattgtacaacattgcacccagtgtcaagtcttacacctgcccactcaagaggcaggagttaatcccagaggtctgtgtcctaatgcattatggcaaatggatgtcacgcatgtaccttcatttggaagattatcatatgttcatgtaacagttgatacttattcacatttcatatgggcaacttgccaaacaggagaaagtacttcccatgttaaaaaacatttattgtcttgttttgctgtaatgggagttccagaaaaaatcaaaactgacaatggaccaggatattgtagtaaagctttccaaaaattcttaagtcagtggaaaatttcacatacaacaggaattccttataattcccaaggacaggccatagttgaaagaactaatagaacactcaaaactcaattagttaaacaaaaagaagggggagacagtaaggagtgtaccactcctcagatgcaacttaatctagcactctatactttaaattttttaaacatttatagaaatcagactactacttctgcagaacaacatcttactggtaaaaagaacagcccacatgaaggaaaactaatttggtggaaagataataaaaataagacatgggaaatagggaaggtgataacgtgggggagaggttttgcttgtgtttcaccaggagaaaatcagcttcctgtttggttacccactagacatttgaagttctacaatgaacccatcggagatgcaaagaaaagggcctccacggagatggtaacaccagtcacatggatggataatcctatagaagtatatgttaatgatagtatatgggtacctggccccatagatgatcgctgccctgccaaacctgaggaagaagggatgatgataaatatttccattgggtatcgttatcctcctatttgcctagggagagcaccaggatgtttaatgcctgcagtccaaaattggttggtagaagtacctactgtcagtcccatcagtagattcacttatcacatggtaagcgggatgtcactcaggccacgggtaaattatttacaagacttttcttatcaaagatcattaaaatttagacctaaagggaaaccttgccccaaggaaattcccaaagaatcaaaaaatacagaagttttagtttgggaagaatgtgtggccaatatgattatgggattaattgcagtcacagctacggctgctgtagcaggagttgcattgcactcttctgttcagtcagtaaactttgttaatgattggcaaaagaattctacaagattgtggaattcacaatctagtattgatcaaaaattggcaaatcaaattaatgatcttagacaaactgtcatttggatgggagacagactcatgagcttagaacatcgtttccagttacaatgtgactggaatacgtcagatttttgtattacaccccaaatttataatgagtctgagcatcactgggacatggttagacgccatctacagggaagagaagataatctcactttagacatttccaaattaaaagaacaaattttcgaagcatcaaaagcccatttaaatttggtgccaggaactgaggcaattgcaggagttgctgatggcctcgcaaatcttaaccctgtcacttgggttaagaccattggaagtactacgattataaatctcatattaatccttgtgtgcctgttttgtctgttgttagtctgcaggtgtacccaacagctccgaagagacagcgaccatcgagaacgggccatgatgacgatggcggttttgtcgaaaagaaaagggggaaatgtggggaaaagcaagagagatcaaattgttactgtgtctgtgtag

SEQ ID NO: 114455 - DNA, 1719 bp, Homo sapiens
ccttctgggttcgggcggttctcctgcctcggcctcccgagtagatgggattgtaggctcctcccaccacgcccggctaatttttgtgtttttagtggagacggggtttccaccatgttggccagcgtggtcttgaactcctgacctcaggtgattcaccagcctcggcctcccaaggtgctgggattacaggtgtgagccactgcacctggcctattattatttttaaatttttttttttaattgatcattcttgggtgtttctcgcagaggtgggatttggcagggtcataggacaatagtggagggaaggtcagcagataatctgcaagtgctcacaggtctctggtattcctaggcagaggaccctgcagccttcccacggtgtttgtgtccctgggtacttgagattagggagtggtggatgactctttaacgagcatgctgccttcaagcatctgtttaacaaagcacatcttgcaccgccctgaatgccatttgaacccttaagtggaacaccagcacatgttttcagagagcaaggggttgggggtaaggttatagattaacagcatcccaaggcagaagaattttccttaagtaacaagaaaaatggagtctccctatgtcctacttctttcctacacaagacacaagtaacaatctgatctctctttcttttcccccacattgtcccccttttctttttgacagaaccaccatcgtcatcatggccctttcttcatggtcgctgtctctttggagctgtttggtacacctgcagaaaggctgtcacttcacacttggaagattgcacagcggccaggcagaggcactcctcacttcccagacgggcggtggccaggcagagacgctcctcacttcccagacggggtcgcggccgggcagaggcgctcctcacatcccagatggggcggcggggcagaggcgctccccacatctcagacgatgggcggctgggcagagacgctcctcacttcctagacgggatggcggccgggaagaggcgctcctcacttcccagactgggcagctgggcagaggggctcctcacatcccagacgatgggcggccaggcagagacgctcctcacttcccagaaggggtggcggccgggcagaggctgcaatctcggcactttgggaggccaaggcaggcggctgggaggtggaggttgtagcgagccgagatcacgccactgcactccagcctgggcaacattgagcattgagtgaacgagactccctctgcaatcccggcacctcgggaggccgaggctggcagatcactcgcggttaggagctggagaccagcccggccaacacagcgaaaccccgtctccaccaaaaaaatagaaaaaccagtcaggcgtggcggcgcgcgcctgcaatcccaggcacttggcaggctgaggcaggagaatcaggcagggaggttgcagtgagccgagatggcgggagtacagtccagcttcggcttggcatcagagggagactagggaaaggggagaggggagaggttagtattttcaaaaatcatcatatagtacgtggttacacaactctgaatatactaaaacacattgaattgtatactttaaaggagtgaactatatctcaatatataaggggtgagttatagctcaataaagctgttaacaacaaaacaaaaatgccataccaaaaaaaaaaaaaaaaa

SEQ ID NO: 114456 - DNA, 827 bp, Homo sapiens
tttttttttttttttttcgatttgtatttcccttttattatataaattaccaacaaaatcctgacctgggaatcaaaaatttaatataacctcagtttaacaccattaaataagctaaatcacagagagtaatactggaatgttacccaaataataaagtaggcaaaatggcccaattattacattcccctatttcaaaaaagaggcattaagcattcacgtcataagtttaattgacaaaacatatcctagtaagggcattatgagttcctaagtttggaccccacttcccaagaggctgcaccctccttaaaaatgctccttccatatcttgttaaaatggaggaacttgaaacatcctatatgttttaacgccagattgggttgtccttacctccaaggaagggtgtagcaaatgcagatcccaaagtacaaacagcatcttaggctagtaacggaccacttggttttccactggaaaatgggcaatttcttcccaggggccctcctcataggtgggctcctacggaccaccagaggttgtggaacctccgggatgcttctgggcccaacatagccgcttgctggaaagctctgcgaaaaggcggcagagaatcgagggacagatgaaatgggcggcacctccaccaagacctttttttttcacgaccttgttccctcggtgcgcaaggactgaaaagaaagatgggaaatggggcggagccttgaggaaacgcgacaaagcggaaatcgccctggattgtgggaattgtagttcagaccattgcggagccttatcagcccccgaaggattgtgggaaatgtag

SEQ ID NO: 114457 - DNA, 243 bp, Homo sapiens
atggagaggaatgcaccgacaggcaccagcatgccagcaggccaccgaccaggagaactatcctatacggagtttagctggggcactgagtggccggactccagtggaaaaccttcccactccatccccttctggcttcctccatctgctgagagctacctccgctcaataaaaccttgcactcactctccaagcccaggtgtgatccgattcttccagtgcaccaagatttcagcagtttga

SEQ ID NO: 114458 - DNA, 601 bp, Homo sapiens
tcttcactctagctcggagcgcatctatggtgctttagacgaccattcttcgtttcactaccaaagacatgtcggaatgcatttaggaccagcatctatagctgctggcatttttttcaaatagactgagctacattgaaaaggcagaccattatataacttgtgaagattaaatagccagagtatttctcgcatttgttctagcttacttacaaggtgaattaatgagcattctctccaaatgaagacatgacagcctcattcctaacacagaaagttatttatttcaaatacagtttcggtgggtaaataaggtggcgcattccttctacagaggacacacctaggagagcaagatacgtcccagtgaaacacagcttcgtcaccaacttcagtcaactctttggcaacatcacatcagcccatcaacttaacagatttcgagaagttttggcagaaaatgatgtactgccatgggaaatagtctacatcttcaagcaagtcctgaaagacttcctaagcagctctgacagagggagtgagcaagaggacctggaggactcagggagcatggactgctctgctccttctgtgatccaag

SEQ ID NO: 114459 - DNA, 439 bp, Homo sapiens
ctgcgtcctctgacctgagagcgaaggggaaagcggcgagatgactgaccgctacaccatccatagccagctggagcacctgcagtccaagtacatcggcacgggccacgccgacaccaccaagtgggagtggctggtgaaccaacaccgcgactcgtactgctcctacatgggccacttcgaccttctcaactacttcgccattgcggagaatgagagcaaagcgcgagtccgcttcaacttgatggaaaagatgcttcagccaccgcagtgcggggcacctctcccagcgtttctccggtttgccaatcctcttaagtattcctgtctccaaaggaccggctctccatggctcctgcgcctcgtgctttccgcgtacagaagtgcttgcccggggagtcccgcctgacctgccttcatgtggacccttagaacagca

SEQ ID NO: 114460 - DNA, 995 bp, Homo sapiens
  misc_feature (1)...(995): n = a,t,c or g
atcgagttcgctaccccatgnggnggaattccgccattcttctgcgacggcgcggacctggagcttccgcgcggtggcttcactctcctgtaaaacgctagagcggccgagttgttaccttgcgtcctctgacctgagagcgaaggggaaagcggcgagatgactgaccgctacaccatccatagccagttggagcacctgcagtccaaagtacatcggcacgggccacgccgatcaccaccaagtgggagttggctggtgaaaccaacacccgcgacttcgtacttgctcctacatggggccactttcgacctttctcaaactactttcgccatttgggaagaaatgagaagcaaagcgcagacgtccgctttcaactttgatggaaaaaagatgctttcagcccttgtggacccgcccaagccgaaaaaagccccgaggagaacctggagacctcctgcccttaaccccacccgaattgcggggcaaccttctccccaagcgtttttctccggggttttggcccaatccctccttaaagtattccctgtcctcccaaagggacccgggttttccatggggttcctgcggcttcgttgtttttccgcggtacagaaagtgcttgccccggggagtcccgcctgaccctgcctttcatgtggaccctttagaacagcactggggagacctagcgaggactcctgagaaactgtgctggttggagaggtcctagaagccggcgagcgtttgagaaagagggcatggcgcgtacagaagtgcttgcccggggagtcccgcctgacctgccttcatgtggacccttagaacagcactgggagaccagcaggactcctgagaactgtgctggtggagaggtcctagagccggcgagcgtttgagaagagggcatggcgctggagtgagatgggatttggcgtctcgtttttggctaattgattgtcattggctttttccataaagtttagaaatcgttc

SEQ ID NO: 114461 - DNA, 789 bp, Homo sapiens
atgcatgttcaggggaaggcagccatccttggaagacacttttccatcagttctcttctcccaggagctctattgctgctcaccgttatcaaaggccacactcacccagaggagaagagtccaggtgcccatgagaaagctgtgacgggtgaacccaagtgcctcggggccctgccgtactgtgattccggaggaaagaaggccacgaagaagaaagatgctggggaaatgagatcaagaataaaggatggtgtcctcgtactaaaatgtatcagtctgcaagtcggccttgcctcctggattgtgagttggctgaggaccgaggccacaggatacacctttgctctcctgcctcctggcacccatcacacggagcagacccccagtaaacatgagcaaaatggagctgaattgttctgcaactgcgtgtcttgctttgaagacccctgtccctgccaggtgcctgggacacagccaggaaaccgcctctctgaggagcaccaggcctcttcccaggctgacgtgaccaactcgtctgcccctaaacaaccgcacccaccaccggcaccatgcaagggtgtctgttcacattgctgagctgggcgagatcgtctggtcagtcattacataaaacaggagcccagtgacctttgcgaagtacacaaggtggaagtcatgagcgaaagagatcatgaacgcttcaaatatggctacggagttataagcgtcatcaccaactcactgaagattaaggaatctgggaacaaattagcctgttgtagacagtga

SEQ ID NO: 114462 - DNA, 1605 bp, Homo sapiens
atgggggcacgttatgtggggcccactgagcgggctgaggatgaggactttggtcttattactaatgttacagaccacaagttctgggatctgaatgcaactgaaattgacttgaggccaaaacagttttcccaacaagacttcattggagtttatgcctggaacatagataccctggagcgaatagccggctggaacaggaggacttggtggaggcgcacggcaccttctacacatcaactgcgtcagcgccagctgccggcacgaatacccgctaagctggatgaaggacttcctgaaggtggacctcctcctggtcatgggtacctcctgcaggtgcagccctttgcctccctcatcagcaaggcacccctctccacccctcgcctgctcatcacaaggagaaagctggccagggacgtggcctggctgggtgaatgcgaccagggctgcctggcccttctgagctccttggatggaagagtttcttggtcacaggacgtgaccccagccaggcctggtgttgaggtcaggacctttaccaggagaagtcaatacctaccagtccagaagattcccagaggtgtgtccctggaatctccaacctctgcatgccagacctgccccatctcctggcctttctatcagcagcagctactggaagaggaggaggaagaccttgaaggaaaggaggaaggaagggggacgaccctgaagaggaaggccctgaggacgtgctcaccattcacgtcagtctctggtcagggcccggagcagctacgtggccaggcagtaccgaagcttcgggtgcgcatcgcctcagattctgggggtccccacgggtctggggcccggccacggagctgcttcaggatgtgcggcacctccttactgacctcaggatcacctggcaaaggactcctacatcagggctgtctttggaagcagggtcctgggctccccaagaaggacgaggatccaggtaatgggaggactgaagggagcccccacgggttcaagccccggctggagacggcggtgtgccaggcggtgctggcgcccctgaagccggcctgtggacacgactccgcacactccgagcaccggagctgcggcggctgcgcggcgacagacagccctgcgggcgggggcggggcctccgggggcacagggccgggaccggaagggcagagccccgcccccgccttgcggagccgcatcacgagcgccttgcgcacctccacgctgcctgcgccccgcgccgcaagtcccctgggggccgacgccttcctgccggcgctgaccgaggaactcatcggagcccggacattggggacacgcagctggacctgggtctacctgaccacgtggtttggggcgctgcaccacattgcccactaccagccgaaacagaccgcgctccccgggggctcagctccgaggcccgcgcctcctgcaccagtggcaccgcaggcggacgctgcacagaaaggatcatcccaagcccaggtgactgcccatctggctgcaagtagaagggagggccaacctgcccttaaggagccatgggcagaagagactgtgacagggaccagtgacaactag

SEQ ID NO: 114463 - DNA, 351 bp, Homo sapiens
atggggcacctggctccaaccctcacgctacctggggcatctggccctctggctgctctcctacagaaacatccggaacccttcttcgccctcgccaaggaacttatcctgggcagttcaagtgcctgtggctgttccctgcagtcgtcagcagtgctgtcgctcttccctgcgccaaccatctgtcactacttcatgcgcctgctgaaggacaaggggctatcctgcgctgctacacgcagataccctggagcgaatagccgggctggaacaggaggacttggggaggcgcacggcaccttctacacatcacactgcgtcagcgccagctgcggcacgaatacccgctaa

SEQ ID NO: 114464 - DNA, 1136 bp, Homo sapiens
atggcagagccagaccgactcagattcagactctgagggaggagccgctggtggagaagcagacatggacttcctgcggaacttattctcccagacgctcagcctgggcagccagaaggagcgtctgctggacgagctgaccttggaaggggtggcccggtacatgcagagcgaacgctgtcgcagagtcatctgtttggtgggagctggaatctccacatccgcaggcatccccgactttcgctctccatccaccggcctctatgacaacctagagaagtaccatcttccctacccagaggccatctttgagatcagctatttcaagaaacatccggaacccttcttcgccctcgccaaggaactctatcctgggcagttcaagccaaccatctgtcactacttcatgcgcctgctgaaggacaaggggctactcctgcgctgctacacgcagaacatagataccctggagcgaatagccgggctggaacaggaggacttggtggaggcgcacggcacccttctacacatcacactgcgtcagcgccagctgccggcacgaatacccgctaagctggatgaaagagaagatcttctctgaggtgacgcccaagtgtgaagactgttcagagcctggtgaagcctgatatcgtcttttttggtgagagccttccagcgctttctttctcctgttattgcagttcagattttctgaaggttggaccttcttctgggtcattgggtacctcctttgcaggtgcagccctttgcctccctcatcagcaaggcacccctctccacccctcgcctgctcatcaacaaggagaaagctggccaagtcggaccctttcctggggatgattatgggcctcggaggaggcatggactttgacttccaagaaaggcctacaggggacgtggcctggctgggtgaatgcgaccagggctgcctggcccttgctgagctccttggatggaagaaggagctggaggaccttgtccggagggagcacgccagcatagatgcccagtcgggggcgggggtccccaaccccagcacttcagcttcccccaagaagtccccgccacctgccaaggacgaggccaggacaacagagagggagaaaccccagtga

SEQ ID NO: 114465 - DNA, 870 bp, Homo sapiens
atgaggaaccgtcttggaggtgctttactggaagaaagtaagaaccaccttcatccttccaaaatagagccagaccttggccaggcgctgtggtataatgccagcactttgggaggccaagaggaatggccattccagcaaataattaaatcctctgtgaatgttgtgatggaactgtggataagttctctagaagcacagaggatcaatgacaagctcaagaagccagagaaggcttttacagagaagaaggatgaacgcttcttgggcactgtctctgaagtccactcgccgccccaggttctccacgtgtgtcctgggggacagcagcacagggttgaggccaagcctgtgggtatctcctacgtggacatgagcttagtgcatctctttgacaaagatttggcaatgatgtattttattcaacacatcattctgaaagaacgttcagcagactgtacaggatctttttggcaggccccaagtaaagctgtcaatcctgatgaggctgtggccattggagctgcattcagggagattgaagttacatttgacattgatgccaatgggatagtacagtttctgctaaagataaaggcacaggacgtgagcagcagatgcaacaagctgaaagaagagatttccaaaatagggagctcctggctagaaaagacagcgaaacaggagaaaatattagacggcagcatcctctcttcagcaggcatcactgaagctgttcgaaatggcaacaaaaagatggatctgagcgagaaggctctggaagttctggcactggggaacaaaaggaaatcaaaaggaggaaaaacagtaataatagcagaaattttgaagccagaagacaacatatga

SEQ ID NO: 114466 - DNA, 2877 bp, Homo sapiens
ggtttccagaagcgctgccgccaccgcatcgcgcagctctttgccgtcggagcgcttgtttgctgcctcgtactcctccatttatccgccatgataagtgccagccgagctgcagcagcccgtctcgtgggcgccgcagcctcccggggccctacggccgcccgccaccaggatagctggaatggccttagtcatgaggcttttagacttgtttcaaggcgggattatgcatcagaagcaatcaagggagcagttgttggtattgatttgggtactaccaactcctgcgtggcagttatggaaggtaaacaagcaaaggtgctggagaatgctgaaggtgccagaaccaccccttcagttgtggcctttacagcagatggtgagcgacttgttggaatgccggccaagcgacaggctgtcaccaacccaaacaatacattttatgctaccaagcgtctcattggccggcgatatgatgatcctgaagtacagaaagacattaaaaatgttccctttaaaattgtccgtgcctccaatggtgatgcctgggttgaggctcatgggaaattgtattctccgagtcagattggagcatttgtgttgatgaagatgaaagagactgcagaaaattacttggggcacacagcaaaaaatgctgtgatcacagtcccagcttatttcaatgactcgcagagacaggccactaaagatgctggccagatatctggactgaatgtgcttcgggtgattaatgagcccacagctgctgctcttgcctatggtctagacaaatcagaagacaaagtcattgctgtatatgatttaggtggtggaacttttgatatttctatcctggaaattcagaaaggagtatttgaggtgaaatccacaaatggggataccttcttaggtggggaagactttgaccaggccttgctacggcacattgtgaaggagttcaagagagagacaggggttgatttgactaaagacaacatggcacttcagagggtacgggaagctgctgaaaaggctaaatgtgaactctcctcatctgtgcagactgacatcaatttgccctatcttacaatggattcttctggacccaagcatttgaatatgaagttgacccgtgctcaatttgaagggattgtcactgatctaatcagaaggactatcgctccatgccaaaaagctatgcaagatgcagaagtcagcaagagtgacataggagaagtgattcttgtgggtggcatgactaggatgcccaaggttcagcagactgtacaggatctttttggcagagccccaagtaaagctgtcaatcctgatgaggctgtggccattgggagctgccattcagggaggtgtgttggccggcgatgtcacggatgtgcttgctccttgatgtcactcccctgtctctggggtatttgaaactctagggagggtgtcttttacccaaacttattaataggaataccactattccaaccaagaagagccaggtattctctactgccgctgatggtcaaacgcaagtggaaattaaagtgtgtcagggtgaaagagagatggctggagacaacaaactccttggacagtttactttgattggaattccaccagcccctcgtggagttcctcagattgaagttacatttgacattgatgccaatgggatagtacatgtttctgctaaagataaaggcacaagacgtgagcagcagattgtaaatccagtcttctggtggattaagcaaagatgatattgaaaatatggttaaaaatgcagagaaatatgctgaagaagaccggcgaaagaaggaacgagttgaagcagttaatatggctgaaggaatcattcacgacacagaaaccaagatggaagaattcaaggacccaattaccctgcctgatgagtgcaacaagctgaaaggaaggagatttccaaaatgaggggagctccctggctagaaaaagaccagcgaaaactgggaggaaaatattagaccaggcagcatcctctcttcgagcgaggcatcgactgaagcttgttcgaaatggcataccaaaaagatgggcatctgagcggagaaggcttctggaagtttctggcactgggggaacaaaaaggaagatcaaaaaggaggaaaaacagtaataatagcagaaattttgaagccagaaggaccaacatatgaagcttaggagtgaagagacttcctgagcagaaatgggcgaaccttcagtccttttacctgtgtttttgcagtattcctatatataatttccttaatttgtaaatttagtgaccattagctagtgatcatttaattgacagtgattctaacagtataaaagtttcacaatattctatgtccctagcctgtcatttttccagctgcatgttaaaagggaggtagggatggattggttccttattaaaggttttaactatttttatgctggaagtgacccttttttccagggggtggaacccttctcggcacacagcaatgaaggtagtcatccatagacttgaaatgagaccacatatggggatgagatccttctagttagcctagtactgctgtactggcctgtatgtacatggggtccttcaactgaggccttgcaagtcaagctggctgtgccatgtttgtagatggggcagaggaatctagaacaatgggaaacttagctatttatattaggtacagctattaaaacaaggtaggaatgaggctagacctttaacttccctaaggcatacttttctagctaccttctgccctgtgtctggcacctacatccttgatgattgttctcttacccattctggaatttttttttttttaaataaatacagaaagc

SEQ ID NO: 114467 - DNA, 416 bp, Homo sapiens
gagaggtttctgctacgaaaactttctaccccatgcactggcggacctctggggcgcctggctcagaggcccccagcaaaggaggacagatcctaaaccggacagcaagctgcgtccagctggttctccctttccgtgactgcttcaaagctcttataaacaagacagtccaaagaaaggaggacaagtcagcaagggaggggacaccagcaagaggaggtgtggcactggacagccggctggctgaggcagtgacagcaaacctcagcacaaggcctgcagccactgtgctgaaacagccagggaaaaacagcctgccaactgggcccttctctctgggcttgcttgacaccagccagtgctttctgctctcccggcctccagggcctcctcgcctgtatgaggagggggtgtga

SEQ ID NO: 114468 - DNA, 670 bp, Homo sapiens
cccacgcgtccggaagtcccatggagtcacataattccatctgggagagacctggagccatcagccctcacaccccctcctcatacaggcgaggaggccctggaggcccggagagcagaaagcactggctggtgtcaagcaagcccagagagaagggcccagttggcaggctgtttttccctggctgtttcagcacagtggctgcaggccttgtgctgaggtttgctgtcactgcctttgggcgcacagagactgggaactcctgggaccggatgtggtcaggcttcctgagagtcgcctggcaggcgaggagtccccagctggcccaccctgagccctgacctcagccagccggctgtccagtgccacacctcctcttgctggtgtcccctcccttgctgacttgtcctcctttctttggactgtctgcagggagggaggacaagggccagcctagatctggcctgcaggacagaggcctcagtggctcaggacctttccctgcccctccccaggaacaagcagaggcagctgaggtagtagcagcctcctgcaggtttagagacagacaggccagggttcaaatcctagctcttcctctcactagccatgggattactgatgggtcacagagcatctgtaaaatgagacaagaacgctgatttcactg

SEQ ID NO: 114469 - DNA, 348 bp, Homo sapiens
ccctcctacctgcgcacgtggtgccgcccctgctgcctcccgctcgccctgaacccagtgcctgcagccatgggtcccgggccagttggggaggcccttacggagcggggcgcacaaattcatgggtatgcttgctccttctcaccaaaactttatgtttgcaaagatgggggggacaaagtaatgcacatggaagcaaagagggcattgaagacattcacgcttaacaagggtggaaaaacggaaaaggttgaggagagacagacctgctctttatgtaaaggtgaaattaagcttttgagcctgcaaggtgaaggactagcagctgaaggttttacatttagcgag

SEQ ID NO: 114470 - DNA, 1946 bp, Homo sapiens
aacttgcgcacgtggtgccgccgctgctgcctcccgctcgccctgaacccagtgcctgcagccatggctcccggccagctcgccttatttagtgtctctgacaaaaccggccttgtggaatttgcaagaaacctgaccgctcttggtttgaatctggtcgcttccggagggactgcaaaagctctcagggatgctggtctggcagtcagagatgtctctgagttgacgggatttcctgaaatgttggggggacgtgtgaaaactttgcatcctgcagtccatgctggaatcctagctcgtaatattccagaagataatgctgacatggccagacttgatttcaatcttataagagttgttgcctgcaatctctatccctttgtaaagacagtggcttctccaggtgtaactgttgaggaggctgtggagcaaattgacattggtggagtaaccttactgagagctgcagccaaaaaccacgctcgagtgacagtggtgtgtgaaccagaggactatgtggtggtgtccacggagatgcagagctccgagagtaaggacacctccttggagactagacgccagttagccttgaaggcattcactcatacggcacaatatgatgaagcaatttcagattatttcaggaaacagtacagcaaaggcgtatctcagatgcccttgagatatggaatgaacccacatcagacccctgcccagctgtacacactgcagcccaagcttcccatcacagttctaaatggagcccctggatttataaacttgtgcgatgctttgaacgcctggcagctggtgaaggaactcaaggaggctttaggtattccagccgctgcctctttcaaacatgtcagcccagcaggtgctgctgttggaattccactcagtgaagatgaggccaaagtctgcatggtttatgatctctataaaaccctcacacccatctcagcggcatatgcaagagcaagaggggctgataggatgtcttcatttggtgattttgttgcattgtccgatgtttgtgatgtaccaactgcaaaaattatttccagagaagtatctgatggtataattgccccaggatatgaagaagaagccttgacaatactttccaaaaagaaaaatggaaactattgtgtccttcagatggaccaatcttacaaaccagatgaaaatgaagttcgaactctctttggtcttcatttaagccagaagagaaataatggtgtcgtcgacaagtcattatttagcaatgttgttaccaaaaataaagatttgccagagtctgccctccgagacctcatcgtagccaccattgctgtcaagtacactcagtctaactctgtgtgctacgccaagaacgggcaggttatcggcattggagcaggacagcagtctcgtatacactgcactcgccttgcaggagataaggcaaactattggtggcttagacaccatccacaagtgctttcgatgaagtttaaaacaggagtgaagagagcagaaatctccaatgccatcgatcaatatgtgactggaaccattggcgaggatgaagatttgataaagtggaaggcactgtttgaggaagtccctgagttactcactgaggcagagaagaaggaatgggttgagaaactgactgaagtttctatcagctctgatgccttcttccctttccgagataacgtagacagagctaaaaggagtggtgtggcgtacattgcggctccctccggttctgctgctgacaaagttgtgattgaggcctgcgacgaactgggaatcatcctcgctcatacgaaccttcggctcttccaccactgattttaccacacactgttttttggcttgcttatgtgtaggtgaacagtcacgcctgaaactttgaggataactttttaaaaaaataaaacagtatctcttaaaaa

SEQ ID NO: 114471 - DNA, 321 bp, Homo sapiens
atggggcgcacacctaaagtcgtcccagaagtatttactattcttaaatatagccagttgtttggggaagaagatgctgatcaagaagtatctcctgcagagctgaccctgaagctgcctggctgccgcgtatccccggtcccgtcgcgtatgctcgtcgtgtctggcgtgcttgctgtgtgggcctgctggctcatgttgacttcggatgagcgacggctggctgcctctgtcgcattggtgcccagacatgatgtggacatggtcaagtctgtgcgtgctctcctgatgtgtcccggtatgtctttatcagcagcatga

SEQ ID NO: 114472 - DNA, 2651 bp, Homo sapiens
ggcacgagctccgccgcggctcgtggttgtcccgccatggcactgtcgcgggggctgccccgggagctggctgaggcggtggccgggggccgggtgctggtggtgggggcgggcggcatcggctgcgagctcctcaagaatctcgtgctcaccggtttctcccacatcgacctgattgatctggatactattgatgtaagcaacctcaacagacagtttttgtttcaaaagaaacatgttggaagatcaaaggcacaggttgccaaggaaagtgtactgcagttttacccgaaagctaatatcgttgcctaccatgacagcatcatgaaccctgactataatgtggaatttttccgacagtttatactggttatgaatgctttagataacagagctgcccgaaaccatgttaatagaatgtgcctggcagctgatgttcctcttattgaaagtggaacagctgggtatcttggacaagtaactactatcaaaaagggtgtgaccgagtgttatgagtgtcatcctaagccgacccagagaacctttcctgggctgtacaattcgtaacacaccttcagaacctatacattgcatcgtttgggcaaagtacttgttcaaccagttgtttggggaagaagatgctgatcaagaagtatctcctgacagagctgaccctgaagctgcctgggaaccaacggaagccgaagccagagcttagagcatctaatgaagatggtgacattaaacgtatttctactaaggaatgggctaaatcaactggatatgatccagttaaactttttaccaagcttttttaaaggtgacatcaggtatctgttgacaatggacaaactatggcggaaaaggaaaccttcagttccgttggactgggctgatgtacaaagtcaaggagaagaaacgaatgcatcagatcaacagaatgaaccccagttaggccggaaagaccagcaggttctagatgtaaagagctatgcacgtcttttttcaaagagcatcgagactttgagagttcatttagcagaaaagggggatggagctgagctcatatgggataaggatgacccatctgcaatggattttgtcacctctgctgcaaacctcaggatgcatattttcagtatgaatatgaagagtagatttgatatcaaatcaatggcagggaacattattcctgctattgctactactaatgcagtaattgctgggttgatagtattggaaggattgaagattttatcaggaaaaatagaccagtgcagaacaatttttttgaataaacaaccaaacccaagaaagaagcttcttgtgccttgtgcactggatcctcccaaccccaattgttatgtatgtgccagcaagccagaggtgactgtgcggctgaatgtccataaagtgactgttctcaccttacaagacaagatagtgaaagaaaaatttgctatggtagcaccagatgtccaaattgaagatgggaaaggaacaatcctaatatcttccgaagagggagagacggaagctaataatcacaagaagttgtcagaatttggaattagaaatggcagccggcttcaagcagatgacttcctccaggactatactttattgatcaacatccttcatagtgaagacctaggaaaggacgttgaatttgaagttgttggtgatgccccggaaaaagtggggcccaaacaagctgaagatgctgccaaaagcataaccaatggcagtgatgatggagctcagccctccacctccacagctcaagagcaagatgacgttctcatagttgattcggatgaagaagattcttcaaataatgccgacgtcagtgaagaagagagaagccgcaagaggaaattagatgagaaagagaatctcagtgcaaagaggtcacgtatagaacagaaggaagagcttgatgatgtcatagcattagattgaacagaaatgcctctaaacagaaccctcttactatttagtttatctgggcagaaccagattgttatgtcctttgttccaaagggaaaaaattgacagcagtgacttgaaaatgattctgctccctttgaaagcattcattttgctagaactgttagacacattgcagtatgctgtattgaaagtaggaatatagttttaaaaaccctttgaacaaagtgtgtgcataaccagtcatgagataaaacaacacaatgcatgttgcctttttaatgtaaatacccttaggtatcattaatagtttcaaaatattgtggtttagtaaagttgatacctggttataaatattatgcctttatttttggctagaagaagaattatttttagcctagatctaaccattttcatactcttaactgattgaaacagattcaaagaagtatcgagtgctatgcattgaaacttgtttttaaatgttagatggcactatgtatattaatgtaaaacaatgttaatttactcaagttttcagtttgtaccgcctggtatgtctgtgtaagaagccaatttttgtgtattgttacagtttcaggttatttatattcgatgttttgtaaaactcaaataacgactatacttatggaccaaataaatggcatctgcattcttgttacaaaaaaaaaaaaaaaaaa

SEQ ID NO: 114473 - DNA, 510 bp, Homo sapiens
atggttgtttctaatctggctgccaggcacagacggcacgtctgcagcacctgccagcccacgcactggcctgcctggacatcacaagtgaccagggttactcggcactatcatatctctcaaagaagaaacaactcctccaacggcaacatctgtggggctgcttttgaactatcagcaattcatttgagcaagagctgggagcatttttcccctgggcctgatcaactagggacaggggccatcttcccggatttcagggagtcgtcatcagatctaaacaatgtggattctgtcagcaggaagagagtgggcaatgtttgctggatgggcaaacgtggcatctatggggccatttggaaaagaactaattcctctatagagataagtgcagagggccctgacaagcctagcgtcgtgtcagggctgaactcgggccctggtcatgtgtggggccctctcctgggactactgctcctgcctcctctggtgttggctggaatcttctga

SEQ ID NO: 114474 - DNA, 1111 bp, Homo sapiens
caagacagagaggatcggctgtggttcccacttctgtgagaagctccagggtgttgaggagaccaacatcgaattactggtgtgcaactatgagcctccggggaacgtgaaggggaaacggccctaccaggaggggactccgggctcccaatgtccctctggctaccactgcaagaactccctctgtgaacccatcggaagcccggaagatgctcaggatttgccttacctggtaactgaggccccatccttccgggcgactgaagcatcagactctatgaaaatgggtactccttcttccctagcaacggggattccggctttcttggtaacagaggtctcaggctccctggcaaccaaggctctgcctgctgtggaaacccaggccccaacttccttagcaacgaaagacccgccctccatggcaacagaggctccaccttgcgtaacaactgaggtcccttccattttggcagctcacagcctgccctccttggatgaggagccagttaccttccccaaatcgacccatgttcctatcccaaaatcagcagacaaagtgacagacaaaacaaaagtgccctctaggagcccagagaactctctggaccccaagatgtccctgacaggggcaagggaactcctaccccatgcccaggaggaggctgaggctgaggctgagttgcctccttccagtgaggtcttggcctcagtttttccagcccaggacaagccaggtgagctgcaggccacactggaccacacggggcacaccttctccaagtccctgcccaatttccccaatacctctgccaccgctaatgccacgggtgggcgtgccctggctctgcagtcgtccttgccaggtgcagagggccctgacaagcctagcgtcgtgtcagggctgaactcgggccctggtcatgctgcaagctgggctccccccttactccccagtgttcaaatcctggattcactgctggaagtacctgagtgtgcaggacattcctgggcccaggagagcctgtgggtggggctgggccacgtggggaactggcagcagtaccaaccttgggttctcgtgttctgtaccgaagctacctctccgtag

SEQ ID NO: 114475 - DNA, 466 bp, Homo sapiens
ttttttttgttcttcagatttttatttaagttaaattggtaaaatacaaaaagaaaatctggattgagtttcaaatcatcttaaatagcaatcctatgaacaattataactgcaatttcaaacactaagacttaaatatacaacttgatcatacaattatctcaaaacatatgatcaaaaactttggtcaagagcttctttcatgaattcttcaaggacagctatcacatttttggcttcaggcatttcttcatgttccactttaacaatcttcaaaagtatatctccactaccacagttctttaggaacatgtaacatttaaacaaagcataatgattcatttctgcctgtcggataaatctcttcaaattgtttgtgtcttgtatggcctgcattgcagaactgaggctgggagctgctgcaatcgatgaccacagacttatgctgctcctctgtcatgggcca

SEQ ID NO: 114476 - DNA, 171 bp, Homo sapiens
ctgttaatgtctctctttgttttttcatctgattctttaacttcaacaggagtgtaactcaaagccacatattctgaagggttacgttcagagtctatcgttactgtttcaggaagcagtttttcattttggaaaaggcagtaataacaaccaactcggtaacctggaatt

SEQ ID NO: 114477 - DNA, 230 bp, Homo sapiens
gaagtaaccggttttgtgaggattggatgcaagcttttttaaatggtgccaaaggaggtaacccttttcttttccgacaagtactggagaactttaaactaaagaactgtggtagtggagatatacttttgaagattgttaaagtggaacatgaagaaatgcctgaagccaaaaatgtgatagctgtccttgaagaattcatgaaagaagctcttgaccaaagtttttga

SEQ ID NO: 114478 - DNA, 407 bp, Homo sapiens
tgttacatgttcctaaagaactgtggtagtggagatatacttttgaagattgttaaagtggaacatgaagaaatgcctgaagccaaaaatgtgatagctgtccttgaagaattcatgaaagaagctcttgaccaaagtttttgatcatatgttttgagataattgtatgatcaagttgtatatttaagtcttagtgtttgaaattgcaggcgtgggccactgtgcccagccagcttttaaagttttaaaaaggatttgttcagacatggaatatatttgtgtatattacttgtgtgctgtacacacagaggaaatgtatgtttgtcatgtatgaagaatggcttcagtttctccgtaattaatttggtaatattattattaaaacttagcttctcatcaaaaaaaaa

SEQ ID NO: 114479 - DNA, 1982 bp, Homo sapiens
  misc_feature (1)...(1982): n = a,t,c or g
atgagtttttctaccatcctcatgactgtggtaactcaacctctccaggaagttcttctgcttaaaactaaaatcaagtatatctcaagagactactgccgatctgaaatgcctctgtcatgtgttgtccgcaatcagaatcctcttttaaatgtagttgaaatgagagataaggaaactgacaatgttactgaatgggagatagaggccagtccttgcctgcgaacccggggaaaccagcggaacgcaggtgtgcgagggccgggagccggacgagccctgataccgacggctgcacgggagcaggggagcggtttggcggagacacagggccgctcagaggccgccggcaatgctcccctctttgcaggagtcgatggatggagatgaaaaggaactagagagcagcgaagagggaggctcagccgagggagcggagactcgagccgccggtccagcagccactactgtctttacagctatcgcggaagcagtattggcacagcaacgaggggacagtgaggacggaagcccaagtggcacaaatgcagaaactccctcctggtgatgatttcagcctctccttgggcagatactaatctaccatcccgaagtgggagccagagcttgcgcagttttcattgctaaggcgtcttttcaagagggtgcagtctttgaagggctgggtaatgtttgcatctgtgggagctaaaaattccagggttaccgagttggttgttattactgcctttttccaaaatgaaaaactgctttcctgaaaacagttaacgatagactctgaacgtaaccccttcagaatatgtggtctgttttttagggagggtctgaaaaaggacttgagctttttcaggcttgaattggacaagtacattcaagggctgaaaaataacatgaattgtgaggcaaggggcctggagagtcacataaaatcctatctgagcaagctggtttgaagatgttgtatgcccaatccaaagggttgttcttctctttcaggaaaagcttacctttctgctacatgctgcatttgagttacactcctgttgaagttaaagaatcagatgaaaaaacaaagagagacattaacaggtttctgagtgtggccagtcttcaaggacttattcatgaaggcaccatgacttctttgtgcatggccatgacaagaggagcagcataagtctgtggtcatcgattgcagcagctcccagcctcagttctgcaatgcaggaagtaaccggttttgtgaggattggatgcaagcttttttaaatggtgccaaaggaggtaacccttttcttttccgacaagtactggagaactttaaaccaaaggcccataccaagaccacaaacaatttgaagagattttatcccgacagggcagaaatgaatcaatatgccttggtttaaaaatgnttaccatggcccccaaagaaccgtggtaagtggagatatacttttgaagattgttaaaagtggaacatgaagaaatgccctgaagcccaaaaatgtgatagctgtcccttgaagaattccatgaaagaagctccttgacccaaagtttttgatcatatgttttgagataattgtatgatccaagttgtatatttaagtcttagtgtttgaaacttgcagttataattgttaatacagattgacattgtaagatgatttgaaactcaatggagattttctttttgtattttacaaatttaacttaaataaaaatctgaagaacatcttcactgagtcctagatagataatgtatgtgagagttgtgaaattttagtgtctcactggccccataaattccacgcttcaggaagttgttgcttaaaaaatttcagagatgattttgtttgtggcttttctcaggaaaagcctgagtttgctgcagtatttagcaacttttcttctcagaaaaaccataatacttccttttcagtggactgtagcttctt

SEQ ID NO: 114480 - DNA, 486 bp, Homo sapiens
tgaaggtcattttaaaaacaaagttaaagacaatctgagaaaaaaattgcacagaatacactcattaaataggtatggtttatggtgattaaaatcaaaataagggaaatatgttatcttctgcaattccagaaataggttctgttgtccggaaggttcttatacatccaaaaagagggaatgatcatggcaattaaagctgcctcttaatcatgtaaatctacagtagcaactaaatttttctgttcttcccattaagtcagtttcgatcttcaaactgtgccttgttttttaaaagataagatgctagaaattcaatgggatttggtggtctcaacgttgtctgtgagaccgtactcagagtgaggattttctgcaacctgcgtttgtccctcctgcatctgctctggctccatggcggaccctgcaagtcacagtccccggataccagtccgctcccaagccgttcgttcttaagagccctgc

SEQ ID NO: 114481 - DNA, 1115 bp, Homo sapiens
tttttttatcccctttgcaatgcttttattagtactccaactttaatgtacattagaatcacctgtgatacttgttaagccattgaagatgcccagatcccacccttagaaaggtccagaaacaatgctgagaaaaattggctgaattttttaaattatacttgactgctgtattttctctctgttgtaaaactctgcagcatttgaagacagaagaaaaagagaaattcataaaacaattcaatcatgtaaaatatttgtcatacagaacaaaaactactttaaaataatggtgttttgacagtttattttgaaggtcattttaaaaacaaagttaaagacaatctgagaaaaaaattgcacagaatacactcattaaaataggtatggtttaagggtgattaaatcaaaaataagggaaatatgttaaccttctgcaatcccagaaataggttctgttgtccggaaaggttcttgatacatccaaaaaggagggaatgaatcatggccaattaaagctgcctcttaatcatgtaaatctacagtaggcaacttaaatttttctgttcttccccatttaaggtcagtttcggatcttcaaaactggtgcccttgttttttaaaaggataaggatgctaggaaattcaatgggggatttgggtgggtctttcccttttgccaaggcacaggcaaggtcccctggtaatagggatagggggcaccactgtctgaatcccaggtaggcacgaagttggcaaaagactgggagatctaccttctgctttgatgacttttctgcattaatcttctcattttctactattctctcaacgttggtctgtgagaccgtactcagagtgatgggttttctgcaacctgcgtttgtccctccagcatctgctactggctccatggcggaccctgcaagtcgcagtcggcgtataccagtctgggcgcgggagcaccacgagcagtagagcagcagagtgggacagtccacgactgggcgcctacatggggtctggaaactttacgacagtcccaagtgcctagaataagtcagaaagtgggggaaagggagctgattacccgcgaacaagccgttcgttcttaa

SEQ ID NO: 114482 - DNA, 309 bp, Homo sapiens
aatctaaaagacactgctggcacccttgccagtgaggtggagggtaggatccagcgcccagaacatcacgggcattcagtaaaaattagtcgtgctgaaaacattatgctcgctgaaaaaagccagacaacaaaagaggagcagagtggtgtggcagagaaggagagaagacagaaacaattgaatgtcaaagaggcagctgaacggaaaggagttcagctatcccaaactccaggggaagattatcttcccactccatcccctttccagctctccatcccactgagagccacctccatcactcagtaa

SEQ ID NO: 114483 - DNA, 606 bp, Homo sapiens
cgccctggctgcacccctgtctcctatggcagctgcactgaaaccttgcggatgccaaactttcatggagatttcatggcaacaatggggagaatggccctctccctctttgagtcctacagcagggcttcctgggcccagtgtattacagaacttcccattctacccacacagcctgctgctagcttgttgctgaacccagatatgaagccacggacttgggctggggacaaatccaaggagtcatacctgtgcccttcttgggacctcccaggtcagccctctatgcccaactccttcttaagttcttattctctccaggaaactcctcatcgctcctgtacgtcatgtctggtgggtccgtgcgcccagttcagcagacctgctcaaaggcatgtctgatttccatgcgtattgagtcagtcctacccctacatccacctgctgccctgccacatgcacacgtgtgtgtacacgcatgctcgctcgtgtgatttaatcagcaaactgacgtttggggattggtgaaaggaatggtccttaagatgaaactctccttgcactaagaagacaccctaagcagctccctcctacctctgcttctca

SEQ ID NO: 114484 - DNA, 309 bp, Homo sapiens
atgcacccggcaggcttggcggcggcggctgcggggacgccccgctgcatcgaccgcttcatccccatcaccaagctcaagtttactttgctgtggacaccatcaatgctttcatcacctacgttttggtggctggtcttgcgctggggacccaggaaggatgattggcggggtcctcatgggcctctcttcgggaagattggctactacctggtgctgggctggtgctgcgtagcatctttgtgttcatggccgggtgtcaccgggaagtcccccttcacccgctccaagaccttgcctggcatttga

SEQ ID NO: 114485 - DNA, 742 bp, Homo sapiens
cggacgcgtgggcggacgcgtgggtggacactgtcaacaccgacctcaccaccatcgacctggtggccttcttgggctacaaatatgtcgggtgagtacccccgcccttcacgccagccccagcccttgggccttgtcctcacacagcctcctctccctcccccaggatgattggcggggtcctcatgggcctgctcttcgggaagattggctactacctggtgctgggctggtgctgcgtagccatctttgtgttcatgtttccccttttgccgggcgcggtggctcatgcttgtaatcccagcactttgggaggccgaggcggtcggatcacgagatccggacgctgcggctgaaagatcttgggcagacgcagcagctgagggggtcccggtgcgtggggcccggaaccagctgcgcatgtaacctgaccatggcggtggcggcggcgcagcctatgctcatgtactggctcaccttccacctggtgcggtgagcgcgcccgctgaacctcccgctgctgctgctgctgctgggggccactgtggccgccgaactcatctcctgcctgcaggccccaaggtccaccctgtctggccacaggcaccgcctccatcccatgtcccgcccagccccgcccccaacccaaggtgctgagagatctccagctgcacaggccaccgccccagggcgtggccgctgttacagaaacaataaaccctgatgggcatggaaaaaaaaa

SEQ ID NO: 114486 - DNA, 466 bp, Homo sapiens
gactctgatactgccacaacatgtcaactgtcctggaggaattaatgcctggaatactatcacctcttatatagacaaccaaatctgtcaagggcaaaagaacctttgcaataacactggggacccagaaatgtgtcctgagaatggatcttgtgtacctgatggtccaggtcttttcttcgggattctgggagccaccactctatccgtctccattctgctttggcgacccagcgccgaaaagccaagacttcatgaactacataggtcttaccattgacctaagatcaatctgaactatcttagcccagtcagggagctctgcttcctagaaaggcatctttcgccagtggattcgcctcaaggttgaggccgccattggaagatgaaaaattgcactcccttggtgtagacaaataccagttcccattggtgttgttgcctataataaacactttttctttta

SEQ ID NO: 114487 - DNA, 786 bp, Homo sapiens
atggcgcctcacgacccgggtagtcttacgaccctggtgccctgggctgccgccctgctcctcgctctgggcgtggaaagggctctggcgctacccgagatatgcacccaatgtccagggagcgtgcaaaatttgtcaaaagtggccttttattgtaaaacgacacgagagctaatgctgcatgcccgttgctgcctgaatcagaagggcaccatcttggggatactgccacaacatgtcaactgtcctggaggaattaatgcctggaatactatcacctcttatatagacaaccaaatctgtcaagggcaaaagaacctttgcaataacactggggacccagaaatgtgtcctgagaatggatcttgtgtacctgatggtccaggtcttttgcagtgtgtttgtgctgatggtttccatggatacaagtgtatgcgccagggctgcctgtcagctgcagctccacaggccctggctggcaagtggcctccaaaaaactgccaccttcccagctttgtggatggtcagccccagggacaaaaagaaccttgtaataattacccttccatatacacctttgtgcctgtgtgtgggcaaatctgtggcataaaaatgctaaaaacagaattgctgcatctgaagtactgggatattgggccaggaaataggaactcttataagtttgctgctgggaatgtaaagtttgcagtcactctggaaaacagtctgctaattcctcaaaaggctaaacgtaattaccacatgacccagcaattccgctcctag

SEQ ID NO: 114488 - DNA, 1312 bp, Homo sapiens
ccgagtttctgcgaagccgcgacctcggcgtccggacgcggtgaacaccgggccgagggagtctgcagtcggctccgggaagccgcgcggcgaccgggggaggccttcactaaaggggaaaaggaagagggggtcggccagtatccccgaaagagggctagggcgcatgaagaccagcgcaaagctccacgagcaggaaaagcccccaagcagccccagggcgacctggaccgggccgcttaggccacgcccggggaagagggccctgactgcgctgcggggcggggcgcgcggggccgggtcgcgcgagcagcggagcaccaagggaacggaaaatggcgcctcacggcccgggtagtcttacgaccctggtgccctgggctgccagccctgctcctcgctctgggcgtggaaagggctctaggcgctacccgagatatgcacccaatgtccaggggagcgtgcaaaatttgtcaaaagtggccttttatttgaaaacgacacgagagctaatgctgcatgcccagtgctgcctgaatcaaaagggcaccatcttggggctggatcttcagaactgttctctggaggaccctggtccaaacttttattaggcacataccactgttcatcatagacctgcaagcaaaccccctgcaaaggtgacttggccaacaccttcccgtggctttactcagctccagactctgatactgccacaacatgtcaacttgtcctggaggaattaatgcctgggaatactatcacctcttatatagacaaccaaatctgtcaaggggcaaaagaacctttgcaataacacttggggaccccagaaatgtgtcctgaagaatggaatcttgtgttacctgaatggtcccaaggtcttttggcagtgtggtttgtgctggatggtttcccatgggatacaagtgtatggcgccaggggctccgttctcactgcttatgttcttccgggattctgggagccagcactctatccgtctccattctgcttttggcggacccagcgccgaaaaagccaaggactttcatggaacttacatagggtctttaccatttgaccttaagatcaatctggaactatctttagcccaagtcaagggaagctctgcttcctaggaaaggcatctttcgcccagtgggatttcgcctcaaaggttgaaggccgccattgggaaggatggaaaaattggcactccccttggtgttaggacaaattaccagtttcccatttgggtgtttgttggcctataaattaaacacttttttcttttttaaaaaaaaaaaaaaa

SEQ ID NO: 114489 - DNA, 454 bp, Homo sapiens
cattgaagcgccgtcggtagatgccccgtaagacccgggccgacccacgcgtccgagaaacattaccctgtaagaataatttgaagtaaaaagcatttaaatgtaaatgcagcatgagtttttattcagctaaaagaatccagctgtttttctttccagccatattaattaggagacactggagggggatcctggggtttcccagcggatttggggtttgagatgttttgcacagagccgggctctcaaaaggagtggccccttctgcacatttggtgagcagggggggcctcgttttcctgggttctctctgctggtacccgttcacacagcttgtcgtgcatgtgggcatggacaccgccgccaaggcgatcattctggaacagtctggcaagaaccaaggctaccgggacgcctgacattcgcagcttctggtccgagggcggcgtgtgcc

SEQ ID NO: 114490 - DNA, 489 bp, Homo sapiens
atgattaaatcagtgcctgaactcgggcttgaagcctcttggtgcgactctagaagccccccctggtatacctgtatagggcacttagcgtcagtagagcttgcaggactggaagttgctctaggtgtcagtaaaaagatggcctatcagaaggtccatgcagatcaaagagctccaggacactcacagtacttagacaatgatgaccttcaagccactgcccttgacttagagtgggacatggagaaggaactagaggagtctggttttgaccaattccagctagacggtgctgagaatcagaacctagggcattcagagactatagacctcaatcttgattccattcaaccagcaacttcacccaaaggaagaagaaaagaagaatatagtctgggaattaagaattcatttcaagcactttatataacagaaattgcatgtcagttactcactttcgggcttgaaagcctctcggtgcgactctaa

SEQ ID NO: 114491 - DNA, 199 bp, Homo sapiens
atggactgggaaggcagccttcccttggtgtttaattattgcagggatgcctctctgattattcacccacgtttcaaaggtgtcagaccacgcagggacgcctgccttggtccttcacccttagcggcaagtcccgcttttctgggaaaggggcaaaccatcacggacgccgagcttcgggtaactctcacagtggagg

SEQ ID NO: 114492 - DNA, 239 bp, Homo sapiens
gcctggtggaaccgccatcaataaatcaagtgtgatcagggtgaggaacaggaaagaaggaaatctggggaaatggggtgaatgtcaggtggatcggagagatacagtcatgggggtcagggggcttctgaggcgatctggtagtgtcagtcttcagccgctaagccgagaagatctgggaaggagtcagtcagagagccttgggccagagttccaggggctctgggagtggctgccag

SEQ ID NO: 114493 - DNA, 423 bp, Homo sapiens
gtgagcaacaaggctgtttatttcacctgggtgcaggtgggatgagtccgaaaagagagtcagtgaagggagataggggtggggccattttataggatttgggtaggtaatggaaaattacagtcaaagggggttgttctctggctggcaggggtgggggtcataaggtgctcaatgggggagattttgagccagaaggaatttcacaaggcagtgtcatcagttaaggcaggaacaggccattctcacttcttttgtgattcttcagttacttcaggccatctggatgtatacccgatttaaaattggtgagatgttccttgggctggttggtctgaggacccgaggtcgtaggtggatctctctcatggagtaaagagcaggaggacaggggattgatctcccgagggaggtcccctgatc

SEQ ID NO: 114494 - DNA, 386 bp, Homo sapiens
caaggactggcatttgcacttattttgtggtggaatgtcatcagttaaggcggggcagcgcattttcacttcttttgcgattcttcggttacttcaggccacccgggcatataccttcaaatcacaggggatgcgatggcttggcttgggttcagaggccctccacttgagagtcacctgaagttgggcatctgtgatggtccagggggcttctgaggtgatcaggcagcattaatcttcagtcgctaagttgagcagatcagatttgaaattcgtgagatgtttcttgggctggtcagtctgaggacctgaggtcataggtggatcgttctcacagagcaaagagcaggaggacaggggattgatctcccaagggaggtccccca

SEQ ID NO: 114495 - DNA, 1896 bp, Homo sapiens
atgaataatgatccttacattcctgcatctgcttttggggctcgccctgttaaaaccacagaagctcccccactgagcaccttgagacccctgcccctgcccaccaaagaacaaccccctttgactgtaattttccattaccttcccaaatcctataaaacggccccacccctatctccctttgctgactctcttttcggactcagcccgcctgcacccaatgaaataaacagccatgttgctcacacaaagcctgtttggtggtctcttcacacggacgcgtatgaaatttggtgccgtgactcggatcgggggacctcccttgggagatcaatcccctgtcctcctgttctttgctccgtgagaaagatccacctacgacctcaggtcctcagacccaccagcccaaggaacatctcaccaattttaaatcagacaaaggagacatgttttatccgtggacccaaaactccagtgccggtcacggactgggaaggcagccttcccttggtgtttaataactgcagggacacctctctgattatacacccacgtttcaagggtgtcagaccacgcagggatgcctgccttggtccttcacccttagcggcaagtcccgcttttctggggaaggggcaagctgctcctcgccaggccgagctaggtcccaattcttcctcagcctctgctcctccaccctataatctttttatcacctcccctcctcacacctggtccggcttacagtttcgttctgtgactagccctcccccacctgcccagcaatttactcttaaaaaggtggctggagccaaaggcatagtcaagaccatcacagacgccgagcttcgggtaactctcacagtggaaggccgagacagtttaactaaattatctgcttccctgacgattcctggactacagccacatctcattgccgtccttctccccaacccaaagcctccttcgcgtcttcctctcatatccccctaccttaacccacaagtatgggacatctctactccttccctggcaactgatcacatgcccattaccatcccattaaaacctaatcacccttaccccactcaacgccaatatccaatccctcagcacgctttaaaaggattaaagcctgttatcactcgcctgctacagcatgggcttctaaaacctataaactctccttaccattcccccattttacctgtcctaaaaccagacaaggcttacaagttagttcagaatctgcgccttatcaaccaaattgttttgcctatccactccatgaatgctccttattttctctccgagtcgtggactctatgcctgctcatgtgtcaagacgtagctcaacttccaacttcactaaaattatcaacctcacgaactagctaccaagtgaccactttgacgagccttgaggaaaaggcggagggggctttagcacacactcagctaacgaaagtgtgccggttcatttcccacagctccacacaaactcccagggcctctgcagttctgggagaaccagtacccatcagtgctctagggctcccaagtcctgcagccttctgggaatgcctttcctttcccatctgccatcacactaatgataatagtcggccacctccaggatgccctaggattcccaaggccacatcacctacaccacttcttgacagagccaagagtgatgctggaaggggaagcaggaagcagaagaagaaagggacccagaacagtggaatgcaggagctcaggggccacgcaggagtgtggttctgcgtctggcccaggcacatcacacctgccttgggcatagtatcctcaaacctgctagttgaggggcgggaaaaattcacagaatattttagtgatttcttgctcagataa

SEQ ID NO: 114496 - DNA, 331 bp, Homo sapiens
atgttgctcacacaaagcctgtttggtggtctcttcacacggacgcacatgaaatttggtgccgtgactcagatcaggggacctcccttgggagataaatcccctgtcctcctgctctttgctctagagagacaaaggagacacgttttatccatggacccaaaactccggtgctggtcacggactgggaaggcagccttcccttggtgtttaatcattgcagagatgcctgattattcacccacgtttcaaaggtgtcagaccacgcagggacgcctgccttggtccttcacccttagcagcaagtcccgcttttctggggaaggggcaa

SEQ ID NO: 114497 - DNA, 344 bp, Homo sapiens
atcgggggacctcccttgggagatcaatcccctgtcctcctgttctttgctccatgagaaagatccacctatgacctcaggtcctcagaccaaccagcccaaggaacatctcaccaattttaaatcgggtgtcagaccacgcagggacgcctgccttggtccttcacccttagcggcaagtcccgcttttctggggaaggggcaagtaccccaaccccttatatctctgtgccccgatcccttatttccgcaccccaacctcatatctctgcgccccaatcccttatgtccgcaccccgacctcgtatctctgtgccctgacccctttcccgcttttctggagg

SEQ ID NO: 114498 - DNA, 434 bp, Homo sapiens
agacaaaggagacatgttttatccatggacccaaaactccggcgccggtcacggactgggaagacagccttcccttggtgtttaatcattgcagggacgcctctctattcacccacgtttcaaagcatgctttaaaaagattaaagcctcttatcactcgcctgctacagcatggccttttaaagcctataaactctccttacaattccccgattttacctgtcctaaaaccagataagccttacaagttagttcaggatctgcgccttagcaaccaaattgttttgcctatccaccctgtggtgcccaacccgtacactcttttgtcctcaataccttcctccacaactcactattccgtgcttgatcttaaagatgcttttttcactattcccctgcaccccttgtcccagcctctctttgctttcacttag

SEQ ID NO: 114499 - DNA, 595 bp, Homo sapiens
catggactctatgatgcgccagcaacacgttttgctttatccaacacatgtcctgttaagtcacggactagtgtggtctatgggctggcagaggtgaaaagatctcccttttcatgtagcttgcccacctacttacagcgttgcatcacagggtcaagtgtttctcctccacttcacgcagctcgggagccctcttgtctggaaaggctcttccctgctggtgcctccaggctgggctggttgttgctcctctatgctcccgaggtcctcagtgcctgcctttatcagaacagaggccacagcgcaccttggttaaatgtacagtctctgggaccagactgcctggactcacaactctggctccgccatttacagcccacctgcacccaggtgaaacaaccagccatgttgctcacacaaagcctgtttggtggtctcttcacacagacgcgcatgaaatttggtggatcaggggacctcccttgggagatcaatcccctgtcctcctgctctttgctccatgagaaagctccacctaccacctcaggtcctcagactgaccagcccaagaaacatctcaccaatttcaaatccg

SEQ ID NO: 114500 - DNA, 408 bp, Homo sapiens
  misc_feature (1)...(408): n = a,t,c or g
ttgnnnnnnnnnnnnnnnnnnnnnnnnnnnnnnnnnnnnnnnnnnnnnnnnnnnnnnnnnnnnnnnnnnnnnnnnnnnnnnnnnnnnnnnnnnnnnnnnnnnnnnnnnnnnnnnnnnnnnnnnnnnnnnnnnnnnnnnnnntgggttatgaaatttggtgccgtgactcggatcgaggaccttcccttgggagatcaatcccccgtcctcctgctctttgctccgtgagaaagatccacctacgacctcaggtcctcagacggaccagaccaagaaacatctcaccaatttcaaatctggtaagcggcctctttttactctcttctccaacttccctcactatccctcaacctctttcttctttcaatcttgacgatacacttcaatctctcccttctcttaatttca

SEQ ID NO: 114501 - DNA, 453 bp, Homo sapiens
  misc_feature (1)...(453): n = a,t,c or g
atcactactccagtgcggtggaattcgggagagcagagcacgtgtgtttttacgagaattatgctgagataggtaacagatgaggatgaaatttgggcttgactgaagtgggggggtgtgtctgtgaagccttgcggaagtacagcccagggcttccgaggcaaccgagcagcagtcttcagccgctaagccgagaagatctgggaaggagtcagtcagagagccttgggccggagttccaggggctctgggagtggctgcnnnnnnnnnnnnnnnnnnnnnnnnnnnnnnnnnnnnnnnnnnnnnnnnnnnnnnnnnnnnnnnnnnnnnnnnnnnnnnnnnnnnnnnnnnnnnnnnnnnnnnnnnnnnnnnnnnnnnnnnnnaggaaataatgatatgaaataacaaggagggggaagaaaataattgtcctccttgggtcaaccctctggt

SEQ ID NO: 114502 - DNA, 375 bp, Homo sapiens
gctgtgatggcttggagaaacagtgtaaaccggcagtgtaaacaagagcaggggcttccgaggcgatcgggcagtgtcagtcttcagctgctaagccgagaagatctgggaaggagtcagtcagagagccttgggccagagttccaggggctctggaagtggctgccagatgaatcctctgtctggccggccccaggttgtctgcttctttactgcacacatgttgacaaagaaaagggaagaaggagcctccatgttgaacatgccttgcttccagtgaaaggaagagatgatccaagcaaatttaggaccaatagcagactcttcacactgcctggggatagagggaccaccctgggctcctcttactcctgg

SEQ ID NO: 114503 - DNA, 437 bp, Homo sapiens
  misc_feature (1)...(437): n = a,t,c or g
caactcccttgtcttnaaaacaggttttgtttttttaaatccatctggaaaggtggtgggtgcccacacaanttaagctgtcttcccctctggcaggcaggcttcctgggaactacacattgggtaatcttgtcccataaaatgccgattggacacttattgtagaaatgccgagggcactgtagattcagatagtccccatcacaggcataggtggtgtggttttacaggagtttggttaggtaacctccactgtgagacaaaccccagccacatctccagcacacaagaacttccaaatgcctgaaccgcagcggccaggcgttactccagaaccttctcccccaggagcttgctacaagtgccagaaatctgactaccaggccaaggaatgcctgcagcccaggattcctcctaagccgcgtcccatctgtgcg

SEQ ID NO: 114504 - DNA, 357 bp, Homo sapiens
atggagagtgctcagaaagaggcagtagagatttttggtcagcctcatgctgcctccagcagtggtgatgttaaaccattgctattcattgatttttacaaatgctctggtgaaaaggttgtttgcatggaacatgctctcagagcttgctacatgtgccggaaatctggccactgggccaaggaatgcccgcagcccgggattcctcctaagctgtgtcccatctgtgcgggaccccactggaaatcagactgttcaactcacctggcagccactcccagagcccctggaactctggcccaaggctctctgactgactccttcccagatcttctgggcttagcggctgaagattga

SEQ ID NO: 114505 - DNA, 729 bp, Homo sapiens
atggaggcaagggaaacaggcccttggaaagaaggtaatgtggagcgggtagcctccgtattgattaagaaggggacgggcttaccttccactgtgagagttaccggaagctcggcgtccgtgatggtctacggggcttccgaggcgatcgggcagcatcagtcttcagccgctaagccgagaagatctgtgaaggagtcagtcagagagccttgggccagagttccaggggctctgggagtggctgccagcatgaagtcacatggacacaacaggtatcccatgtctcctcaggtcgggctcccgctcccggagcaagagccggagccggagccagagtcggagccggagcaagaaagagaaaagcaggagccccagcaaggacaagagcctgcagccgcagccatagcgctggcaagagccgcagcaagagcaaagaccaagctgaagagaagatccaaaacaatgacaatgtcgggaaacccaagagccggagtcctagcaggcataaaagagtcaggagaggagagtggaggaggagaagcgagggagtgtgagcaggggcaggagccaggagaagagcctccgccagagtcggagccggagcaggagcaaagcgggcagcaggagccggagcaggagccgcagcaagagcaaggacaagaggaagagcaggaagagaagcagagaggagagccgcagtcgcagtcgcagccgcagcaagagtga

SEQ ID NO: 114506 - DNA, 1287 bp, Homo sapiens
atgaattttgaaggaacagaaacccttcattgcaatggtcattgcaaggtcatagcaatgaccttgggtaaccaagaagtcaaccagagaaattttagcactgggacaacaggccccatggagggcatgtggctactatcctcaaattcacatcatagtctaaagtatgctggagctctggccatcctgtctgcattccagtatcaggaaagaggaagccaggcaggacatagggacagctggccagagacaaaggagacacattttatctgtggacccaaaactccggcgctggtcacggactgggaaggcagccttcccttggtgtttaaccattgcagggacgcctctctgatcattcacccacgtttcagcggtgtcagaccacgcagggatgcctgccttggtccttcacccttagcagcaactccacagaccatcacggacaccgagctttgggtaactctcacagtggaggtatgggacatctctactccttccctggcaactgatcacatgcccgttaccatcccattaaaacctaatcacccttaccccgctcaacgccaatatcccatcccacagcacgctttaaaaggattaaagcctgttatcactcgcctgctacagcatgggcttctaaaacctataaactctccttacaattcccccattttacctgtccaaaaactggacaagtcttacagattagttcagaatctgcgccttatcaacaaaattgtttcacctatccatcctgtggtgcccaacccaccagcctttactagtcaaatcacccaagcagtttctcaggctcttggtattcagtggaaccttcatatcccttatcatcctcaatcttcaggaaaggtagaacggactaatggtcttttaaaggtacacctcaccaagctcagcctccaacttaaaaaggattggacagtacttttacctcttgctcttctcagaattagagcctgtcctcgagatgctacagggtacagtcgatttgaacttttatatggacgcactttcttgcttggccccaacctcatcccagacaccagccctctaggcgactatcttccagtcctccagcaggctagacaggctgctaatcttctcttgcctactccagatccccagccacatgaagacaccctagctggacgatcagttcttgttaagaatctgacccctcaaactctacaacctcgatggaccggaccccacttcatcatctatagtaccccgactgccgtctgcctgcaggatcctccccactag

SEQ ID NO: 114507 - DNA, 410 bp, Homo sapiens
atgtccaagacaaaggcaccagcagatttggtgtctggtgagggcctgttcctcaaagaaggtacattctatttgtcttcccatggtggaagaagttgggatcagcttgggaccaggagatactctccctgtgagaaaaggggggcttctgaggcgattgggcagcgtcagtcttcagccgctaagccaagacgatctgggaaggagtcagtcagagagccttgggccggagttccaggggctctagaagtggctgccaggaccaacacctacaagttacttccagctccaagaggccgtgcagaggaaggggcctctgtgtgtaatttttctgtcaggataggccatctgttcctggtttgcattaagagtcttgtacgtgttggtgcactcctggcaatttggaccaa

SEQ ID NO: 114508 - DNA, 411 bp, Homo sapiens
atggtatggagagataatgggcgatgtttctcagggctgcttcgagcgggattaggggcggtgtgggaacctagagtgggagacattaagctgaaggaagattttatggggacttccgaggcaatcgggcagcatcagtcttcagccgctaagccaagaagatctgggaaggagtcagagagccttgggccagagttccaggggctctgggagtggctgccaggggcccaaggaccagtgtacaagggcccatcactgtcagtaactctgcccactccagtagtaaagcagccaaatgctcacatacccacacatgggcacaaggaccagtctggttggggcttgctgtggcagctatccccactcagtctagtggttgggatgccacatgaccaatccagaggcccatga

SEQ ID NO: 114509 - DNA, 420 bp, Homo sapiens
atgttgacactcaaggattcagaaattccacttcttggtatgcagcatcaagagattgttgaagatgtacaaggagacttatacaaggattttctttgcaacaagggggcttctgaggcgatcgggcagtgtcggtcttcagccgctaagccgagaagatctgggaaggagtcagagagccttgggccagagttccaggggctctgggagtggctgccaggctcccctgcaccactctcttcgcagaagtttgctaattatttaatccgtgcattgtcagagattctgcagaaacagagtgcctctggtggaaaatcagatcctaactggagaaacaaacatcctacatacctgcatgcacacatggttctaagaccatgtttggaaggtgacataaaacacttgggggaactggtttag

SEQ ID NO: 114510 - DNA, 555 bp, Homo sapiens
atgagtgaactcccattcacaattgcttcaaagagaataaaatacctaggaatccaacttacaagggatgtgaaggacctcttcaaggagaactacaaaccactgctcaatgaaattaaagaggacacaaacaaatggaagaacattccatgctcatgggtaggaagaatcaatatcgtgaaaatggccatactgcccaagctctgctggtcaacagacacagctgtgttcctcgtcaacaaacagcaacaactgcctgccatatcgggggacctcccttgggagatcaataccctgtcctcctgctctttgctccatgagaaagatccacctacgacctcaggtcctcagaccgaccagcccaagaaacatctcaccatttcaaatccggtggctgaagctaaaggcatagtcaaggttaatgctcctttttctttatcagacctctcccaaatcagtgagtgtttaggctctttcatcaaatatgaaaaacccagcccagttcatggctcgttcgtcagcaaccctgagatgctttacagctctagaccctaa

SEQ ID NO: 114511 - DNA, 1035 bp, Homo sapiens
atgaatcctcctgggagctccattaatgtgaaagatgactcaaagcacttgattgtaatgataagagagggagacacacagctggcggtgcagcaacaaccccctggtgccactggtcttccgaagacaaaggggacatcttttatccgtggacccaaaactccggcgccggtcacggactgggaaggcagccttcccttggtgtttaatcattgcagggacacctctctgatttttattcacccacgtttcagaggtgtcagaccaggcagggacgcctgccttggtccttcacccttagcggcaagtcccgcttttctgggggaggggcaagtaccccaacctcgtatctctgtgccccaatcccttatttccatgccccgacctctctctgtggcccaacctcttatctctgtgccccaacccctcatttccacgccccaacccctttcccgctttcctggaagatattttaatctttccctctgtgtcaactttgatgaccctgacagtgaaggtgagcatgataccgagatttctgagtgtcgtcttctcatcaggtgctcagataagagctcctatgctaggtcctttggacaacagagaaaaccaatgaagggtgtgcattctaggccccaaaatgtggaattcaaagccgtggtactgtactacatcacaggtcacccaggaaaacaatatctagccctcaataatagaagcaatgcctggaaaggttatggacaagctgctccctgcgggatggaagcagggacagacatactgggggcttataaagcctctgtcaataagaaaccgggctccacaataattttaaaccacaacaggaaacctggggccctgctcgatgattataaacagaaaactgtaaacttggacaaagaaaaggagaaaactaactgcttaagtataggtcgtgcccaagctgatctgaatgattcagaactaacagttatagcaacaggtcatgaagatggtcatgtagaaactagaggtcttcagtcaactcatgggtga

SEQ ID NO: 114512 - DNA, 807 bp, Homo sapiens
atgaatccactccatgaaggctgtcagtctgacacacggaactacgtggggtcttggcaaggaaaacactcagacacatacagatacttgggagctttagatactccagctcctgtcttcccaacaaaagtatctgcaactcctgcaaagcagaaggttagacctccatacatacccctgaggaaagagtttgaatcccagtatttgggtgacttagtcatttcagcctttgagctttgcagaaccctagctgactggggtgaaagtggtacctcagcacaagcacagcggctctatgaaagatcatacgccaatcctcttatggcagctgagccagcccaagctgtaaagcttgggtggagaccttcacccaagccacacattggagacaagtcagtatcattttggctcctgtggatggagacaaaggagacacattttatccgtggacccaaaactccggcgccggtcacggactgggaaggcagctttcccttggcgtttaatcattgcagggacacctctctgattattcacccacgtttcaagggtgtcagaccacgcagggatgcctgccttggtccttcacccttagcagaaagtcccgcttttcaggggaaggggcaagtaccccaaccccttctctccttgtctctaccccttctctgcttttccagggaaaaggcaatctggctttcagtacaggagatgcaaggagacagagtaaatgaacgagaaacacattatgtgaagtcactggcagcaatcaaggacaagccacacaaaaagcctgcaggaaccagatga

SEQ ID NO: 114513 - DNA, 1485 bp, Homo sapiens; identical to SEQ ID NO: 114306

SEQ ID NO: 114514 - DNA, 2963 bp, Homo sapiens
agacaaaggagacatgttttatccgtggacccaaaactccggtgccggtcacggactgggaaggcagccttcccttggtgtttaatcactgcagggacacctctgtgattattcacccacgtttcaaaggtgtcagaccacgcagggacgcctgccttggtccttcacccttagcggcaagtcctgcttttctggggaaggggcaagccgagctaggtcccaattcttcctcagcctctgctcctccaccctataatctttttatcgcctcccctcctcacacctggtccggcttacagtttcgttcggtgactagccctcccccacctgcccagcaatttactcttaaaaaggtggctggagccaaaggcatagtcaagcggctgaagactgacactgcccgatcgccttggaagacccctagaccatcacggacgccgagcttcagaaaagcagaacggactaaaggtcttttaaaaatacacctcaccaagctcagccaccaacttaaaaaggactggacaatacttttaccactttcccttctcagaattcaggcctgtcctcggaatgctacaagactggctactggccaattgggatatccttttatcagtcaaagctatgtcctggtcaatggatttcaaactgttgaggatctatgtgaagctgcagaccttcgagtgagtgttgcagaccttcgagtgagtgttacagctcttaaggtggcgcgtctggagttgttcgttcctcccggtgggctcgtggtctcgctggcttcagcagtgaagctgcagaccttcgcggtgttacagctcataaaagcaaaaagatgggactggggcaccttggagcagggggcggcgctcatcggggaggctcgggacgcacaggagcccacggagggggtgggaggctcaggcatggcgggctgcaggtccagagacctgccccgcgggaaggcagctaaggcccggcgagaaatcgagcgcagcgccgggctgacgatcaagaaggaaagatgcatacgaaatggatacagcaaagaaaaaatgaaactcatagttgtttctcatggcctccatgtaaatgacttgcagcataaactgacgcttttcaccaaggaaacatacacatacctagccagggattcagagaagcagaagcaggggtatctagcaggacttgaaggagcccatgccaacagggtgaaccagcagatcagtgacaacttagtagttaaaacaggggccttaccccctccttatagaaccaagggagaaaagctctatttttatatgtccagacagaactgccttttcagcgtatcagggcaactcctccaaggtttctttcctaatggaggacaagctgcacctaacccttatgctctgctttcccaaataccagaagaagcagaatggtttacagtcctggaccttaaggatgactttttctgcatcccttacatcctgactctcaattcttctttgcctttgaagatccttcgaacccaacgtctcaactcacctggactgttttaccccaaggtttcaggccatctatttggccaagcattagcccaagacttgagccagttctcatacttggacactctcgtcctttgtggggtgttaaagtctcccattattattgtgtgggagttgaatcaaatagacacaataaaaaatgataaaggggatatcaccaccgatcccacagaaatacaaactaccatcagagaatactataaacatctctacacaaataaactagaaaatctagaagaaatggataaattcctcaacacatacaccctcccaagactaaaccaggaagaagttgaatctctgaatagaccaataacaggagctgaaattgaggcaataattaatagcttaccaaccaaaaaaagtccaggaccagatggattcacagccgaattctaccagaggtacaaggaggagctggcttccgaggcaatcgggcagtctcagtcttcagctgctaagccgagaagatctgggaagaagtcagagaaccttgggccagagttccaggggctctgggagtggctgccaggtgagtcgaacagtccgattttcagtggggtcccacacagatgggacgcagcttaggaggaatcctgggcagcgggcattccttggcccagtggccagatttccggcacgtgtagcaagctccttgtctatgatgcaaagacctttgttcacgtgtttgtcggctgaccctctccccacaattgtcttgtgaccctgacacatccccctttgtcccttcctcagaaaatcgggacttgccgctaagggtgaaggaccaaggcaggtgtccctgtgtggtctgacacccttgaaacgtgagtgtataatcagagaggtgtccctgcaatgattaaacaccaagggaaggctgccttcccagtccatgaccggtgccggagttgggtccatggataaaacgtgtctcctttgtctcccttcttttaaaacaaatcttttgtctttgtcttcatttctgcattcgtccccttcgttcaatcctgtaggaattgacagtgatattggggagttcccatccctggatttgggatttcctcgagtttccagccctgtccttgtggccaaaaagtggcacagtttggtttttgaatcctgttcgtgacgccaaaaatattctgcaggtattgggagatccacagctaagacaccaggacctcctggaagcctagaaacagtgagagtgccggtccgacatccttcagttttattctgggcctgggttttagtactttctggagataaaccaagatacccactatggctatgtctgctaaaatgtctaatggatattagctcttgggtcactttctcccttaggaccacctgaagtatagagtgtagcctctcaagggagcaggtggcagccttggggctgaaaggcat

SEQ ID NO: 114515 - DNA, 991 bp, Homo sapiens
atgcccgggcaccaaaaagcacctctgagacccgcagtttccaaaaaggtagtcaatgttggagaaaggcaaaatcaagtaattattgaaaccggaggggattttgccgatttcggaaccaccatcaaacaggattttcgcctgctggggcaaaccagcgtggaccgcttgctgcaactctctcagggccaggcggtgaagggcaatcagctgttgcccgtctcactggtgaaaagaaaaaccaccctggcgcccaatacgcaaaccgcctctccccgcgcgttggccgattcattaatgcagctggcacgacaggtttcccgactggaaagcgggcaggggcttccgaggcgatcgggcagtgtcagtcttcagccactaagccgagaagatctgagaaggagtcagtcagagagctttgggccagagttccaggggctctgggagtggctgccaggtgagatgaacagtccgattttcggtggggtcccacacagatgggacgtggcttaggaggaataccgtgctgtgggcattccttggcccagtggcagatttccagcatgtgtagcaagctccagcatcccaaagctgaagacactgaagctgatcccttcagcatcccaaagctgaagacactgaagctgatcccttcagcatcccaaagctgcggcaaccagccagttatctgcacaccgttgcaggcgagatcaatttccatactctgccccggctggcgacaggcaatgactctgtcggcaagctgctgcatctcctggcactgtgtttcccagaaaatttcaccaaaagcgccatacggtaaatcccctgccgctcggaagcggcggaacaagcgttcggcatcatcctgctcaaccagtgcattcaataatggttgggacttttttaagaaaaccttccaattggccccgttgtagggaaaaatgtttgaaaaagttattttccggcctaatgaaatacaaaattccat

SEQ ID NO: 114516 - DNA, 2134 bp, Homo sapiens
aagctcccccactgagcaccttgagacccctgcccctgcccaccaaagaacaaccccctttgactgtaattttccattaccttcccaaatcctataaaacggccccacccctatctccctttgctgactctcttttcggactcagcccgcctgcacccaatgaaataaacagccatgttgctcacacaaagcctgtttggtggtctcttcacacggacgcgtatgaaatttggtgccgtgactcggatcgggggacctcccttgggagatcaatcccctgtcctcctgttctttgctccgtgagaaagatccacctacgacctcaggtcctcagacccaccagcccaagaaacattctcaccaatttcaaatccgagacaaaggagacacgttttatccgtggacccacaactccggcgccagtcacggactgggaaggcagccttcccttggtgtttaataactgcagggacggcctctctgatcattcagccacatttcaagggtgtcagaccatgcagggatgcctgccttggtccttcacccttagcggcaagtcccgcttttctggggaaggagcaagctgctccttgccaggctgagctaggtcccaattcttcctcagcctctgctcctccaccctataatccttttatcacctcccctcctcacacccggtccggcttacagtttcgttccgtgactagccctccccctcctgcccagcaatttactctgaaaaaggtggctggagctaaagacatagtcaaggatttaattaacctcgccttcaaggtgtacaataatagaaaaaagttgcaattccttgcctccactgtgagacgaaccccagccacatctccagcacacaagaacttccaaatgcctgaactgcagcggccaggccttcctccagaacctcctcctccaggagcttgctacaagtgccagaaatctggccaccaggccagggaattcctgcagcccaggattcctcctaagccacgtcccatctgtgccggaccccactggaaatcggactgttcagctcacctggcagccactcccagagcccctggaactctggcccaaggctgactgactccttcccagatcttctcggcttagcggctgaagactgacactgcttgatcgcctcggaagccccctgggtatattgcatgatgttgaggtttggggtatgattgattctgtcacccagatactgagtatagtacacaatagttaatttttcaattgtctcttctccctctctccctccatagtagtccccagtgtcttttgttgccatcagcagctgtatgacactgtccccaggtctcatgtctgtataaacatacacatcataggatatttcagggaaggttggcgtgttatcatttgcatccatcacttgaatattgacgatgactggctcactttcttgtacaccatcaaatgctgttatcgaaaaggtgtaagtttgctgttcttccctgtccactggttgaagtaaggtgaggtagcgagtaataccagtctgtgtgacggtgaagactgaggtgtagtcattcagaaaaaggtgaagctctgggtcttttgtatcttctatgtccttgtccagagctactattcttaaaggtgaagtcaaattgagactgtccgaaatggttgctcccactggggcagattccaggatatagccttgataactgggcattgtaaaatatggactttgattgttttcatccagtatttcaatgtgtagaccggcaaaggcaggaagaggatgaccattgtcttgttcagccttaataaccaaatcaaatttctggtgaaagtctctgtttactggctccaggagactaagttctgctgtcctaggatgcatatggaaaaatcgtgggtaatcctcaggagtccctttgctccagttaccaacaagttcctcatctctatctgagaccacctcagcctggttttcatcattaatatcattatcagcattttggtcaaagccattcggtaagtctctagagagttccaaactttctcgcatcttcctatcttctacagagccctgcaaactgttccaatctctgcctgttacccagttccaaagtcgtttctgcat

SEQ ID NO: 114517 - DNA, 2581 bp, Homo sapiens
atggctcagaccagctcatacttcatgctgatctcctgcctgatgtttctgtctcagagccaaggccaagaggcccagacagagttgccccaggcccggatcagctgcccagaaggcaccaatgcctatcgctcctactgctactactttaatgaagaccgtgagacctgggttgatgcagatctctattgccagaacatgaattcgggcaacctggtgtctgtgctcacccaggccgagggtgcctttgtggcctcactgattaaggagagtggcactgatgacttcaatgtctggattggcctccatgaccccaaaaaggatcacaactcctcatcagcaaggaaacaaaactggatagacaatgagtttgatgaattgacagaagtaggcttcagaaggtgggtaataacaaacccctctgagctgaaagagcatgttctaacccaatgcaagaaagctaagaatcttgataaaaggttacaggaactgtttcacgtgactcagaaagagagagactctgtttgcttgggcgaaagtaaggaaaaagaacaagagctgctacctggtaatacagagaattcttccagatcctgtccaagaacatcaaggcagtacctctatgagtatgcaagaaccacagtattactgggcttggagacaaaggagacacgttttatccgtggacccaaaactccggcgccggtcacagactgggaaggcagccttcccttggtgtttaatcattgcagggacacctctctgattattcacccaggtttcagaggtgccagaccacacagggacacctgccttggtccttcacccttagcggcaagtcccgcttttctggggaaggggcaagctgctccttgccaggcggagctaggtcccaattcttcctcagcctctgctcctccaccctataatccttttatcacctcccctcctcacacctggtccggcttacagtttcgttcggtgactagccctcccccacctgcccagcaatttactcttaaaaaggtgcctggagctaaaggcatagtcaaggttaatactcctttctctttatcccaaatcagatagtgtttaggctctttttcatcaaatataaaaatctagcccagttcatggctcgtttggcagcaaccctaagacactttacagccctagcccctaaaaggtcaaaaggccatcttattctcaaaatgcattttattttattacccaatctgctcctgacattaggaaaaaacttcaaaaattagaatctggccctcaaaccccacaacaggaattaatcaaccttgccttcaaggtggtccaatattaaaagtagaagcagccacgtagcaatgtatttctgagttgcaattcctccttgcctccactgtgagacaaaccccagccacatctccagcacacaagaacttccaaacgcctgaactgcagcggccaggcgtttcctccagaacctcctcccacaggagcttgctacacgtgccggaaatctggccactgggccaaggaatgcccgcagcccgggattcctcctaaggcgcgtccccatctgtgtgggaccccactgaaaatcggactgttcaacttcacctgggcagccactcccagagccccgtggaacctctggcccaaggctctcttgacttgactccttcccaagatctttgggcttagcaagctgaagactgacacttgcccgatcgcctcagaagccctccaaattttgccatggctactaatggtcatgtctagttgaaagtcagaagacaagggagacaaataaatgtcattactgtggttttgatttgcatttctctgatgaccagtgatgttgagcttttttctcctatgattgttggctgcatctatatcttcttttgtaaagtgtctgttcatgtcttttgcccactttttgatggggttgtttgatttttttcttgtaaatttgtttaagttctttgtagattctggatattagacctttgccagatgggtagattgcaaaaattttctcccattctgtaggttgcctgttcactctgatggtagtttcttttgctgtgcagaagctctttagtttaattagatcatgtgtttctattttggcttttgttgccattgcttttgccatcttcatcatgaaatctttgccagttcctgtgtcttgaatggtattgcctagattgtcttccaggacttttatagttttgggttttacatttaagtctctagtccatctggcagccacttccagagcccctggaactctggcccaaggctctctgactgactccttcccagatctcggcttagcagctgaagactgatactgccgaatcgcctgtggcttgtttttggtttggtttctatgctccatagctactgagactgacatctcttctcttgttgcaactttaatctgtccaaccaatatgcaggttagtctctccccacctgagagtttaggtaccaagtttcccaaggccttgccaattgctagcttctccctatatacctccagactcccaggagctatcccccatagatggccagacat

SEQ ID NO: 114518 - DNA, 2074 bp, Homo sapiens
  misc_feature (1)...(2074): n = a,t,c or g
atgactgacgagctgagagaagaaggcttcagacgatcaaattactctgagctacgggaggacattcaaaccaaaggcaaagaagttgaaaactttgaaaaaaatttagaagaatgtataactagaataaccaatacagagaagtgcttaaaggagctgatggagctgaaaaccaaggctcgagaactacccaggaagctgctggtctgtcctgcgagcttccctggggtcttctccatgcgagcgcagcagtgcccctcccgtgctccgactgttgtcatcactgcaagcctcgtgtttagctttcataaagccatcctgacaaatccgttccgctctttccttaatcattcctgctgcgattctctaaacaacgcccgatttgttgacatctccagggatgttcagctaagagctgtacatagaatccaggactcttttggagtcttcttggaggcgacaaccaaagataaagccacctcttacatttggtcatctttgcagacaggtaaagtggagtcaaaaggcaagagagcaaggactgcccttgagttttttggtgtcagaagagggtcagacattaaggattgtggcacattgcctaggtatgcaagtgccctgagctccctggtgttgaaaggcagctgcgcctatcaggactgtgagaccaagaggaggaatcttgcctctgtcatcatcaggatgagagtgtccattgcccatccacctatgacctcaggtcctcagaccgaccagcccaagaaacatctcaccaatttcaaatccgagacaaaagagacacgttttatctgtggacccaaaactccggcaccggtcacggactgggaaggcagccttctcttggtgtttaatcattgcagggacacctctctgattatacacccacgtttcaagggtgtcagaccacgcagggacgcctgcctcagtccttcacccttagcggcaagtcccgcttttctggggaaggggcaaatacccctcaaccccttctctccttgtctctaccccttctgtgcttttctggggcaggggcaaatacccctcaaccccctctccttcacccttagcggcaagccctgctttcctggggcaggggcaagtacccccaatcccttatctctgtgccccgatcccttatttctacaccccaacctcttataactttgcaccccgacccctttcccgcttttctggagggtaagaacccccgaaccccttccctgcgtgtctctactctctctttcctctggggttgcatccttcactatgggcaagcttctaccctgcattgccgcttctcccttaggctgtgttcttgaaagcctgaaaccgttttcactgacacgtgacctttttttgctccccaattcttttttccccaccccggacccttccactttttttggagggtaagaaaccccgaaccctttccctccggttttggactttttcttttctgggggctggcaccttcccttagggcaagtttttacccctccatttccccctttttccctggcagccactcccagagcccctggaactctggcccgaggctctctgactgactccttccctgatcttctccacttagcagctgaagactgacgctgccctatcacctcggaagccccgtagaccattcacggacgccgagcttcgcgtaactctcacagcggaaggtaagcctgtccccttcttaatcaatacggaggctacccactccacgttaccttcttttcaagggcctgtttcccttgcctccataacctgttgtgggtattgacgggccaggcttctaaacctcttaaaaactccccaactctggtgccaacttagacaatactcttttaagcactcctttttagttatccccatctgcccagttcccttattaggctgagacactttaactaaattatctgcttccctgactattcctggactacagctgtatctcattgccaccttcttcccaatccaaagctcctttgtgtctcctcttgtataccccancttanccacaagtataagatatctctactcctccttg

SEQ ID NO: 114519 - DNA, 594 bp, Homo sapiens
atggcccaacctcctccttcaggagaggcgattccccttattgtatgtctcttcgttgttcaactttccgccgacttcacctattttggccggtatgaaaatataaactatcgtctgactttccccgccgtcattactccgagagttgccgtcctttcgccggagctgaaaacgatctgtcccaattaccaacttatgaggcttgaggaaaacataatttcttctccctttcattttggcatagttggcaggaaattctgggccactttactcgttctgggacttgcagacacaatcctgggagaacagaacaggcagaagctggtaggaaaagataattcttacaaaggcagctctcccaaatctctacctgtagagcctggtcaagaggggaagtggagatttagtggtgccccccgcgcccaaatgtttaatagaaagagaagtggttttgacaatctttctgaagaaaaccacccaagtattctccgaacgcaaggcctaaaagctgctgatggcattgacttcgagaaactcccactcaatggtacagcagcacccaacaatcggcttggcaggggcccccctcactaa

SEQ ID NO: 114520 - DNA, 420 bp, Homo sapiens
gttactactttgtaacttttatttttatgtaactttattttaactttattttattgtaactttattttaaaaacaaagtatttgctattgtatttgttcaaaaaagcttacaaatcaaaatgagagaactattctgtttgtcaaccctgagaaactacttaatgttttctgactcctttcgatgtatagtcagcattcgactatccatatctgaacctcctacacacactgtctctttgatgtaaaaactgcaggcaaaaattccatattgcatgcatttttgccttaaacctttttaactgaaatgatatagatgaaaagaaaccatacagtggcggggggagtataaaaaaactagacaaaagtgaatgaaagcggacgcgtggatggcatcaattccgggcgtccgacggttcaaat

SEQ ID NO: 114521 - DNA, 387 bp, Homo sapiens
atgtgcttctggttagaacttcagaaagcttccacttatgatgaaagggaaaaagaaattgatgtgtgcagatcacatggtgagactaacacattaccagcagtggtgtccaaactcctgcttgaggaaagcagaggaaaatataaaggggaccttgtcttgcatcttaggtatcaactgccacaagggtgtggagcaccaagcgggctcttggggtccctgatcccaggacttgactcttggatggcatgtctagaccttccaaaggcaagaggggagcccattgccgaaggtttttacatcaaagagacagtgtgtgtaggaggttcagatatggatagtcgaatgctgactatacatcgaaaggagtcagaaaacattaagtag

SEQ ID NO: 114522 - DNA, 1800 bp, Homo sapiens
atgaatgaaaaaaagacccgtactgatgcacattattgtgaaatttcagaaagccaggataaagaaaaggttcagaaaaaaatagcccacatccgaacaatcaggaatcagaacattattggtcctggcagcagcaggagtagaagctcacaaagagctagagcccggttctgtaagtctttagctgaaatggtccagtacaaaagcactggaaatgagtgggctaggaggacaaggaccgtctcctgcgtgaggagttggttggaggtccccaaggccagacttagtgataaattcccaccaaggcaaccagacacatccatgggtgtcacagctcagagctgggatttactagcttatgtggaaagtccaaagacccaagtcagaaatctccagactctcccctgccagtcctaccggacagtatcaggcaatagttatagagaccccagggtggaagtgaggatctatcttgcatctcctacagatgtagctgtgtgtaaggcaccaaatattgggatggctaatgtaaaaagggtacctagctacatttccttctataaccaaaaaggagaagcctcatgcccatcagctctcattaatgtcttatcaatgcatccagaagggtccccagcccacattgtgtggagtcaggattcaatacacagttggattatccactacgtgaaagaggatccacctaaaggatctctacagggccaacgattccaaggaatcctgtacttccttgggagcactgaaccaccagatggtgcagcgcatcgtaggagcatttatttccgctgtgctgtgcaagctgatagagcagaggaaggcacaggcaatgctgatttaaatctatccaaccgtggagaggtgctcggtgttctgacggaggctaactctgcagcagcagcacagaggatgcaagcacagatcctgagggaggaagatgaggcttacaaaggtcacgtcttttctccctttcccctttctacattctggaatgcagagttaatggcaggaaacaaagcagccacattggaccatgagatgcaagccaagtatgaggatggcagggccacagaatcaccaaagaacaaagggagaatatttcagccatcttctagtatccagtggattggcagaattcttttaggaagggatataatcaggaaatttccatctccacagaaagtattactaaagaaaatgcatgttcctcccattatccaaatggatatggaggtcttgggccaggaacaaagctccgaacagctggatttagaggagatctcaaggaaaatttcattccttgacaaatggagggaaatctttagttatcacaggttgggaaccaataattcaactcctcagaatcatgaaggcaaccatacatctgctgatgaaaatgaagatggaacaggactatctcagcccaaaggacaaggacatttgccatcaagtggcctttgttctattcccaacccctctatcatctcttcaaaattgggtggctttcctatctccctagcaatggccacggccaaagctggaggtagtgccttggcaaatgtccaaaggaccagctgtcatggtcaaaaagatgccattggaaacttgggaagcagaggcaagggtcaagccaagatgcctgaagccacaggaagatgggcaggtatgcagagctcccggaacactgcactcagctcactggccttcaagcctctggatggagccttaacttgtatcttatatagatacttaatcgctgtcctttcaagcaacgaagatagataa

SEQ ID NO: 114523 - DNA, 606 bp, Homo sapiens
atgaatgaaaaaaagacccgtaatgatgcacattattgtgaaatttcagaaagccaggataaagaaaaggttcagaaaaaaatagcccacatccgaacaatcaggaatcagaacattattggtcctggcagcagcaggagacactgtagagtatcggttgctggcccttgtgatgctgtgactgactgggagctgcgcttagtgcctctacccagcattgagagtttcttatcgcttattactagcctgggaaaagaccaaaattcaaaactcaaagtgcggtttctaccgaatgcttataactttcagaccatcatgatgttgaaaaatcgaaccatcgtaggttgggatccatcctataagacgagctacactgccggaagtgtaagactgctatgctgccggaagatggggcatagtggacaactgcaagtcctgacaacaggaggactgcacgcaagtgagcagacaccaccgacttcctttctgcgtcaccagtgtcgtcagcagagagaggacagcacaggctcaaggttggtagtgaagtcaggttcggggtgcatgggctgtggtggtgttgatcagttgctccagtgtttgaaataa

SEQ ID NO: 114524 - DNA, 938 bp, Homo sapiens
ggcgtgggaatatctggcttaggactgtttctctctaagacaccattgttttcccttattttaaaagtgatttttttaaggacagaacttcttccaaaagagagggatggctttcccagaagacactcctggccatctgtggatttgtctgtgcacctattggctcttctagctgactcttctcgttgggcttagagtctgcctgtttctgctagctccgtgtttagtccacttgggtcatcagctctgccaagctgagcctggccaagctaggtggacagacccttgcagtgatgtccgtttgtccagattctgccagtcatcactggacacgtctcctccgcagctgcccctagcaaaggggagaccattgtggtcagctatcaagacatgggacagaaactgacttagtgctcacaaagccccctaacaccttctgggcttgaagatcaccccaagcttgtgttcagaattttcttactgtgcttaggactgcacgcaagtgagcagacaccaccgacttcctttttgcgtcaccagtgtcggtcagcaggagagaggacagcacaggcttcaaggttggtagtgaagtcaggtttcggggtgcatgggcttgtggtggtgttgatcagtttgctccagtgttttgaaataaagaagactcatgtttatgtctggaataagttctgtttgtgctgacaggtggcctaggtcctgggagatgagcaccctctctctggcctttaaggagtcccctcttaggacaggcactgcccaacagcaagggcagcagagatgggtgttaagttcctgaggagctcgaggtttcgagctgggctttagacattggtgggacccaggatggtttggcaggatgccctgatcctaagaagggggcctgtgggtgcgtgcatcctgtcggggagaccccactttgt

SEQ ID NO: 114525 - DNA, 1112 bp, Homo sapiens
atgcatgtgaagcccacacttagcacagggccagaacgtgctgcacccacctccaccctcacctgtgaccaggaccacagaagcaaaagttctcactcaaactgggtgtggccatctgccccctaccaccggcctcgcagcgtgctcgtatcgagcacctacgtgtatcaccgtgctgggtgtggggtccaaaagagaacccagcagatgggtccctgtgctgaggattcagtgaaatcacacatcgggtgccgagcatggtctcagcagacaggacatgtgcactcgaggttggggctaaaaggaaacaatagagaaagggagagtggccacgagggtgaatcacgccttccacacaaggaggatgccaaggatgggcgcttgttcaatgagcagaacttcttccaggggccgccaagcctctgcaaggtacctgacagggaactgggcaaggagggagataacaagtggaagaagctgtactcgaccccactgctggccatccctacctcatgggtttcggtgttcaccaggacaaatacaggtgactttggcaggctatggcttcgccttccgctattgcccaagtggaaacacgtggcctacgtggaaggcagcaggagccctcacgagggggacctgagttcattagcatggacctgcacaagggatgcgggccctcccgccgcagcgcctccagagcctgggctactgcatgctgaagtggctctacgggtttctgcatggacaaattgccttcccaacactgaggacatcatgaagcaaaaacaaagtttgttgataagccggggcccttcgtgggaccctgcggcactggatcaggccctcagagaccctgcagaagtaccgaaggtggtgatggccctcacgtatgaggagaagccgccctacgccatttatccaggccagcagctcggggtcctccccaacacccttgctcccccagcagcctcctccaaccttcggtcccggggcagaggcttcatcctgtttatcgatggagcgagcgcaggcttcccgtcgtcagtgccgctgtgtctcacagtgccttcctcacccagggcaaagggcatttagagcctgacacctga

SEQ ID NO: 114526 - DNA, 1544 bp, Homo sapiens
gacagttctgagtctgaagatactctgagttcctctgagagatccaaaggctccgggagcagacccccaacccccaaaagcagccctcagaagaccaggaagagccctcaggtgaccaggggtagccctcagaagaccagctgtagccctcagaagaccaggcagagccctcagacgctgaagcggagccgagtgaccacctcacttgaagctttgcccacagggacagtgctgacagacaagagtgggcgacagtggaagctgaagtccttccagaccagggacaaccagggcattctctatgaagctgcacccacctccaccctcacctgtgactcaggaccacagaagcaaaagttctcactcaaactggatgccaaggatgggcgcttgttcaatgagcagaacttcttccagcgggccgccaagcctctgcaagtcaacaagtggaagaagctgtactcgaccccactgctggccatccctacctgcatgggtttcggtgttcaccaaggacaaatacaggttcttggtgttacccagcctggggaaggaaccttcagtcggccctggatgtcaagcccaaagcatgtgctgtcagagaggtctgtgctgcaggtggcctgccggctgctggatgccctggagctcctccatgagaatgagtatgttcatggaaatgtgacagctgaaaatatctttgtggatccagaggaccagagtcaggtgactttggcaggctatggcttcgccttccgctattgcccaagtggcaaacacgtggcctacgtggaaggcagcaggagtccttcacgagggggaccttgagttcattagcatggacctgcacaagggatgcgggccctccccgccgcagcgacctcccagagccctgggctaactgcatgctgaaagtggctcctacgggtttcctgcccatggacaaattgcccttccccaacactgaggacatcatgaagcaaaaacagaatgtttgctgataagccggggcccttccgtgggaccctgcggtcactggatcaggccctcagagaccctgcagaagtacctgaagggtggtgatggccctcacgtatgaggagaagccgccctacgccatgctgaggaacaacctagaagctttgctgcaggatactgcgtgtgtctccatatgaccccattggcctcccgatggtgccctaggtggaatccaaaactttccatttgcagtgtgcaacagaaaaaaaaaaatgaagtaatgtgactcaaggcctgctgtttaatcacagataagcttctagaacaagccctggaatgtgcattcctgccactggtttcaggatactcatcagtcctgattagcctcccggagggccccagtttccctcccgtgaatgtgaagttccccatcttggtggcctgcccttcagccagtgtcctagcaaagctggatggggttgggccggcccacaggggggacccctcctacccttgacccctctgtgctttggtaataaattgaatttccagaaaaaaaaaaaaaa

SEQ ID NO: 114527 - DNA, 429 bp, Homo sapiens
ccaggactctggaaattcctcatgtaaataccgtatctgctccatggcttcccacgtcagggtcctgggcggggcaccaggcgcctccatttgcctccgaattttctggaatcggattgcttgtttctgtcgtttcagggtgctgggggaagagaaccaatggcagaagccatgcgtggaagcagaatggatgtttaaagagcctcaggctaaatcatggagcgcccagccctcttctctttgatcgcaagggcaaccgggccatgttgccggcttagagctgctccgtacacccagaaagctaacacctagaacaataactgcctgtaagcatgccgaactctctaaactgatgatgaaatacgtcactaatgaagggaccagtggtcccaggggagctgaacacctgacgctgcgcggacgcgtggg

SEQ ID NO: 114528 - DNA, 1251 bp, Homo sapiens
atgaataacagtgttaaggagagacactgctctcggtctgagagagctcaggttggagcgcgccctcaggctgagagagctcaggtgctagatccagacttggttgggaaggatcacttccctggctcactggctgacagaggagttgctgtggtgtcctgtgggcagaacttgttggcaatcctccctcgagagagccgggaaagctgttcatggggagctagttcacaggaggagctccataacaaaccatataaagggacagtgggcgaggaagctgagtgcgctgactaccataccctgcaggaactgaacgcaggagatgccgcacatgccacaggagttggaagcgctctgctacaaattcactgcgtgggaggggagggagatacttggatggcactgagcagcaaagaacacctcagaggaggcagtttatcctatttacttactggaggaaatagcaaatggctaagatttgccaaaggactaagtgccccttactatggcaggaaaaagtattccattcagtggggtggtagagtgggtcagattgggggtggaacaaggagtgggaccacaggtagagaagcttcgcccagtgttatactttctgccattattggtaggaattgggtgctagaggagagagccaatggcagaagccatgtgtggaagcaggatggatgtttgaagagcctcaggctaaatcatggagcacctagccctcttctctttgatagcaagggcaatcggtccgtatctgccagcttggagctgctctgtaaacccagaaacctaacacctagaataataactgcctgtaagcatgccgaactctctaaactggtgatgaaatatgtcactagtgaagggactagtggtcccaggggagctggacacctgacactgtgctctggacattggcctagggacttcgtgccctgtgtcctaggtgctccagccatggctaaaaggggccaagatacagttccggccatggtttcagagagtgcaagccccaaaccttggcagcttccatgtggtattgagcctgtgggcacacagaagtcaagaattgaggtttgggaatctgcacctagatgtcagaggatgtatggaaattccaggatgtccagacagaagtttgctgcagggaaggagccctcatggagaacctttgctagggcagtgcagaggaaatgtagggttgaagctcccacactgaagcactgcctagtggagctgtga

SEQ ID NO: 114529 - DNA, 765 bp, Homo sapiens
  misc_feature (1)...(765): n = a,t,c or g
atgaaagggaaatccccaggtgctagacaagaaaatgagctcaaagtcagagcagggaatcttactgaaaacagtggatccacaggcctactggctggtcacctgacttttgaatgccgcaattttctccgagtagaccctaaaagggacatagttttggatgtcagcagtacaagtagtgaagatagcgatgaagagaatgaagaactgaataaattgcaggcattacaggaaaaaagacagtattcaataaattacatgagatattcaatgctttattataaaataggctttgtgttagatgattttgcccaactagaggctaatgtagcccttatgtccactaaagtaaatgcttatgttgtagaagcatcgaacatcaaccaatgtcatggcacagcaccaaagattgcaaatacctcactatggtgcgcttagaaattttcaaattgataacctatagatacggctgcaggtgaattcatgatagtgaaatcagctaagtatacttaacctcacaggctagaaaggtttactgattcttgtttcacctggcacccaatgtggataccctcagtaagactcagggagccttataactcctcttaacatatgcttacccatgcttaaattctagggaagctgtatccacagccctctgcattgcagccatgagagctctcacgctttcaacccttccataacctaatttagtcatttgggcctctcaaaaggaaatgctnttgtttaaataggtcagtcagt

SEQ ID NO: 114530 - DNA, 495 bp, Homo sapiens
atgactaaattaggttatggaagggttgaaagcgtgagagctctcatggctgcaatgcagagggctgtggatacagcttccctagaatttaagcatgggatgtgtcgaagaggcatgggcactggaatttgggtgtatgtggggaaaggattgcaggtggaaggggaagtgaggtctggagtccagtacactgccaagacccaagcacaagacatcctgcttgcctttctgttgcttagcaacggccacctccttgattacccgagttgtcatagtttttctgtagctatctactctgacacccagtacattggcctacaaagaacaaggcaaaagcctggtcattcagcccaatacaagatgacttgcagtgataagccagtacacactagtatgggcagttctcagtacagggagcaacaagaccgatttcatgctgaacccaaacgtcgagtaccagacagggaagggaaggaaattccaccgattctgtaa

SEQ ID NO: 114531 - DNA, 373 bp, Homo sapiens
cgagggccagctccttggctgcagccatcccgcttagcctgcctcacccacacccgtgtggtaccttcagccctggccaagctttgaggctctgtcactgagcaatggtaactgcacctgggcagctcctccctgtgcccccagcctcagcccaacttcttacccgaaagcatcacctctactgtctcctccctgggctaagcaggggagaagcgggctgggggtagcctggatgtgggccaagtccactgtcctccttggcggcaaaagcccattgaagaagaaccagcccagcctgccccctatcttgtcctggaatatttttggggttggaactcaaaaaaaaaaaaaaaaaatcaatcttttctcaaaa

SEQ ID NO: 114532 - DNA, 1213 bp, Homo sapiens
ttttttttttttttttttgcctgagaaaagattgattttttttttttttttttttgagttccaacctgcaaaaatattccaggtacaagatagggggcaagcctgggctggtccttcttcaaatgggcttttgccgcccaaggaggacagtggaacttggccccaacatccccagcctaccccccaaacccgctttctcccctgctttagccccagggaaggaagacaattagaggtgaatgggggcagccgggagggaggggcccaaggcaagtgatgctttcgggtaaagaagttgggctgaaggctgggggcacagggaggagctgccccaggtgcagttaccattgctcagtgacagagcctcaaagcttggccagggctgaaggtaaccacacgggtgtgggttgaggcaggctaagccgggatggctgcagccaaaggagcctgtgtggagggccgggcttcaagggcttagccctctccgcttctaactggatgatctggccgagggtcgtcccgtagccctgtcaatgccgggcctggggaggccccctctgttggctgccccatctggaagggccaatggacatgctttccctttctgcagctgggctcttctgtgaaattccctcttatgctcctgcgctttctttcataaaaccagtctgggatcttccacggtagtgcccatcaattcttggtcacctgccaaagctgcccaaaagccatcaagggtcctctggaactggttgccatgtcctttgcctttcaaagaggttcaaagatcttgaaaaatgttagattttggacgaaccccatagtccttcagccgccttcaggaaatgaggcaacggctccgtcttgcttgaagaacaagaaggggggggtttttcgggcaccttcaaccggctttgaggcatcaggggtaaaggttgttcacagcctgtcaagaatcacggccattcttcagccagactgggaagcccaagggcccacggtctgggcggcccacatcagggccacactgcactatgatccactccaccagccgctcctccagctcctcgtcatacttcttctcgattttggactgcacttcgcggctcatgccataggaaggacccttgttggccatgtctggggaaagaaggcttcctcagggctcgcaggaaggagtgaagacttgtgtctgggttcggacagacaggat

SEQ ID NO: 114533 - DNA, 813 bp, Homo sapiens
  misc_feature (1)...(813): n = a,t,c or g
atgcagaggccctggagaggagtgtgggaagaggtatgtggaactttgaaacttgagggagatgatttcgggtatctggcagaagaaatttctaagcagcaaagcattcaagangcctgggaacttggtgccctgtgttccagccactccagccatggtaaaaggggccaaggtagagcttgggccacggctgcagagagtgcaagctccaagcctggccagtttccacatagtgttgagcctgtgggtgcacagaagtcaagaattgaggtttgggaacctccacctacatttcagaggatgtatggaaatgcctggatgtccaggccaaagtttgctgcaggggcagggcccttacagagaacctctactaggacattgaggaagggaaatgtggagttgaatcccccaaacagagtccccactgggaaactgcctagcggagctgtgagaagagagccaccgtccttcagagcccggaatggtagatccaccaacagcttgcactgtgtgactggaaaagacacagacactcaacgccagcctgtgaaagtagccaggagggaggctataccctgcaaagccacaggggcagagctgcccaagaccatgggaacccatttcttgcatcagtgtgacttggatgtgagacatggagtcaaaggagatcattttggagctttaggatttgactgccctgctggatttcagacttggtgtgggtcctgtagcccctttgttttggcctatttctcctatttggaatgggtgtatttatccaatgcctgtaccctcattgtatctaggaagtaa

SEQ ID NO: 114534 - DNA, 1239 bp, Homo sapiens
atggaatactatgcagccataaaaaaggatgagttcgtgtcctttgcagggacagggatgaagctggaaatcatcatcctcagcaaactaacacaggaacagaaaaccaaacaccgcatgttctcactcataactccccatccgtcctgtggagagccatctccatcacccaataaaatccccacattcaccatctttcaagtccgtgtgttacctgattcttcctggatgccagacaagaacctgggtaccaagagggcactcagctggttaacacttaagctgtctgtagatggcagactaagacagcactgtagcatgcccaggtctgcaggatggacccggcagctggtgccctgtgtgaggaacgctgcaacggactgcgacagaaccctcgaaaacgaaggtgaagagactgtgcagtcatgtgacagacacatcaaaccataccatggcgtggctaagacccaagctggtatcaaaaataaaggaaacgacgctgcaggacccgcagccccagacgatgtggcttcctccgatgacacaggccccagacattacctgggggaagctgaagaagacaactcaggaggccgagtgaatccttctctggacacagacaccatcactccagataatctgttccttgctatgctctctattgtaccttgcaactctcataggaagtcaagaactgaggtttcggaacctccacctagatttcagaggatgaatagaaatgcctggatctccaggcagaagtttgctggagaggcaaggatctcacggagaacctctgctaggacagtgcagaaggaaaagctgagatcacagccccaacacagagtccctactgaggcactgcctagtagagctgtgagaaggccaccatacgccagaccccagaatggtagatccactgacagcttgcactgtgtgcctacaaaagccacagacactcaacactggcccatgaagacagccaagaaggaggctgtaccctgcaaagccacaggggaagagttgcccaagaccttgggaacctaccttttgcatcagcatgacctggatgtgagaaatggagtcaaaggagatcactttggagctttaagatttgactgccccaccagattttggacttgcatgggacctgtagcccgtttgttttggccaatttcttccatttggattggctgtatcttcccaatgcctgtacccccaactatatctaggaagtaa

SEQ ID NO: 114535 - DNA, 585 bp, Homo sapiens
tttttttaggtttgagggagatgatttagggtatctggcagaagaaatttataagcagcaaagcattcaagaagtgacttaggtgctgttaaaagcattcagttttaaaagggaaaaagagcagaaaatttgcaccctgactatgcaataggaaagaaaaacccattttttgaggagaaattcaagctggctgcagaaatttgcataagtaacaaggagccaaatgttaatccccaaaacaagggggaaaatgtctccagggaatgtcataggtcttcatggcagcacctcctatcacagacccagaagcctcttgcatcagcatgacctggatgtgagacatggagtcaaaggagatcattttggaggtttagaatttgactgcccttcgtgccacgcactccagcctgggcgatgagcgagactccatagttctgcatggctgggaaggcctcaggaaacatacagtcatggtggaagggaagcaaacacgttcttcttcacatggtggcaggagaaagaagtgggtttcgatcggggtaggccaccgagcccctgcgaaaacccggagtaacggattcggcg

SEQ ID NO: 114536 - DNA, 851 bp, Homo sapiens
agaagtccatagtgatatgggtgcacattaggcctgtgatggtctgcattgcatttggcagcagaatggaagaaggacagcctgcaagtcaaggagccacaattggagttgattttatgattaagacagtggagattaatggtgaaaaagtaaagctacagatctgggacacagcaggtcaagagagatttcggtccattacccagagttactaccgaagcgccaatgccttgatcctcacctatgacattacctgtgaggaatccttccgttgccttcctgagtggctgcgggagatagaacaatatgccagcaacaaggtcatcactgtgttagtggataaaggaagggaaaaggatatcctcagcagaaaccaaaaagctcagaacaataacaacaagttcaaatgtaaccaagtggcttcctttgattactttcaggtggttgtgccaccacgacaccagattatcaacaacttcccagagttagtgggatgtgacagggtagaagggaatgtggagtcagagcccccacacagagtctctactggggcaatgcctagtggagctatgagaagagggccaccatcctccagatcccagaatggtagacccactgacagcttgtaccgtgagcctggaaaagccacagacactcaatgccagccagtgaaagcaactgagagggaggctgtaccctgcaaagccacaggggtggagctgcccaagaccatgggaacccacctcttgcatcagtgtgacctggatgtgagacctggagtcaaaggagatcattctggagctttaaaatttgactgcccactggatttcggacttgcatggggcctgtaa

SEQ ID NO: 114537 - DNA, 2006 bp, Homo sapiens
atgtacagcttcttggagaaccttgccccagccctgcaaggaattggcatccatctggtgctgtacctgagtcttccagaggccattccatcaagccacctgcttcaggatggtggagaacatgctaatttgacaggacatgctgagaaggtgggaatagaaaattttgagctcctgaaggtcctaggaactggagtaagatgctctggtaatcatgtttaccagattgaaataagcacacctggaggcatagctagtgtggtggatgaccaagtcaccatttcacaagattccagtaatctggaaagattaattttaggagtgattaatatgattcttcagttagtagaaattctctcgtatgacacagttgcttatggaaaagtatttctagttcgtaaaataagtggccatgatactggaaagctgtatgccatgaaagttttgaaaaaggcaacaatcgttcaaaaggccaaaaccacagagcatacaaggacagaacgacaagtcctggaacacattaggcagtcgccatttttggtaacattacattatgctttccagacagaaaccaaacttcatctcattttagtgtatgaactgcagaacaatggagagatttctgagttcaacgttaagtcaaatcagatgtgcaaagacgagcagcctgaaactgtgcaacaagagcgtttcacagagcatgaggtgcagatttatgttggagagattgtgcttgccctcgaacatctccacaagttggggattatatatcgtgatattaagcttgagaatattctacttgattctaatggccatgtggtgctgacagattttggtctgagtaaggagtttgtggctgatgaatctagggacttggtgccctgcttcccagctgctacagccatgactaaaaggagccaaggtacagctcaggctgttgcttcagaggatggaagcctcaagccttggcagcttccatgtggtagtgagcctgtgggtacacagaagtcaagaattgaggtttgggaacctccgcctagatttcaaaggatgtgtggaaacacctggatgcccaggcagacgtttgctgcaggaatggggccctcacggagaacctctgctagggcagtgcagaagggaaatgtagggtcagtgtccccctcctacagtccccaatgtggcactgcctagtggagctgtgaaaagagggccaccatcctccagaccccagaatggtatatcaaccaacagcttgcactgtgcacctggaaaaactgcagacactcaatgctaccccttgaaagcagccaagagttgggctacaccctgcaaagccacaggggtagagctgcccaagaaaatgggaacccacctcttgcatcagcatgacctggatgtgagacatggagtcaaaggagatcattttggagctttaagatttgactgccccagcggattttggactttcatggggcctgtagcccctttggtttggccaatttctcccatttggaacagctgtatttacccaattcctgtaccccccattgtatctaggaatcctattctctacacaacttgccaatttaacagatctggattcttgtaaaccaccctgtaagagtaggggccttaacgacactagtgcaaatggtaacatgaagggagaaactgccacactaattgatttggatcctgtaagaaccactggagaatttcttagtcctgccccagtggctgtggcgcgctgcacaccgaaggagactgttgatatcctgaatggtgaaattgaggaggagaggaaaatccagaagcataaaaccctccctaagatgtctggaggatgggagcggcagttaaatgggacagaagctaaattagtgggaaaagctgccggggaaagatcgctgtcactttcaacattaacaacagcatcccaccgacacttgatggcaaggaggaaccctcgaaagggcagcaagttggagaacaggagcctgaattga

SEQ ID NO: 114538 - DNA, 561 bp, Homo sapiens
atggtagatccactgacagcttgcactgtgtgcctggaaaaccaataccagcctgtgaaagcagctgggagggaggctgtaccctgcaaagccacaggggtggagctgcccaagaccatgggaacccacttcttgcatcaccatgacctggatgcgagacatggagtcaaaggagatcattttggagctttaagatttgactgccctgctggattttggacttgtctgtggcctgtagcatctttgtcctggccaatttctcctgtttggaatggctgtatttacccaatgcctgtatccctgttgcgggaagtcacggaccacgaatggagggactggctggagctgccgcagaggaacataaattgtgaagatctcattttaatatggacattttctttactgtggaatctcatcaaagacttggaagcaggggtggtgagaggggcctggggcgtggtgtggagggtcgagttctttgtcgtcccacagtcacccccaggaccaccttgcgaagccgaaaatacacatctgcattttaccgacaaggaacgccactga

SEQ ID NO: 114539 - DNA, 596 bp, Homo sapiens
ctgagtctttccccaaggttttttgacccccaaccgggtttgggaatgggtttaatgaattcattccgaaaggggcctccaaaaagaggcttgtggcttattagaggggtgtttaggccaaccaaagggcaagggaagtcctggacagttattgtgtcacccacagggctgtcattggtgcccaggaaattggatttgatttcatccaagccacgctgatgcaacaggtgggttcctatggtcttgggcagctccacccctgtggctttgcagggtacagcctccctcctggctgctttcataggctggtgttgagtgcctgcagcctttccaggtgcatggtacaagctgtcagcggatctaccattctggggtctggaggacagaggccctcttctcacagctccactaggcagtgccccagtagggactcggtgtgggggctctgaccccacatttcccttccacactgccctagcagaggttctccatgagatccccgcccctgcagcaaacttttgcttgggcatccaggcgtttccatacatcttcttaaatctaggtggaggttcccaaacctcaataatgacttccat

SEQ ID NO: 114540 - DNA, 777 bp, Homo sapiens
atgcatggggattccatcctccatgtctgtgttcatagcagcagcagtggcagtgtgaaccagagtgaagaggatggggcaactggtgtccatgtgcatgttcactctggcagccatgttggtgcagatgcaggacactggcagagttcaaggctgccagcctccatgcacatgttcacaccagcagcggcagtggcagcatgggatgcagaaaacactttcaataaaatccaacattacttcattataaaaacactcaacaaactaggcattgaaagaacatacctcaaaatagtaagagccatatatgacaaacacacagccaacatcataccgaacaggtatgtctttatcagcagcatgaaaacagatgaatacagtaaattggtaccagtagagtggggtgctgctgaaaatatacccaaaaatatggaagcgactttggaactgggtaacaggcagaggttggaacaacttggaggctcacaaggaaacagaaaaatgtgggaaggtttggaacttcctagagacttgttgaatggctttgcccaaaatgctgatagtgatatggacaataaagtccaggctgaagtggtctcaaatggagatgaggaacttgttgggaactggagtaaagacttagatgtagagaagcaggagcagaaacagcaaatattggtgccccatcctcaattcagtgcaaaacacattgtccagtgggaaattgtgaaagtaaatgaaataatgcctgagaagtaccgaaaacttttcgtttga

SEQ ID NO: 114541 - DNA, 645 bp, Homo sapiens
atgatctcctttgactccatgtctcacatccaggtcatgctgatgcaagaggtaggttcccatggtcttgggcagctccacccctgtggctttgcagggtatcttttcagcagcaccccactctactggtaccaatttactgtatcagtctgttttcacgatgctgataaagacatacctgagactgggaaatttgcaaaagaaagagatttaatggacttacagttccacatggctggggaggcctcacaatcatggtggaagagtggaatgggatcacaaagcaagagacttggccttccacgagacattaatgctgcagaggaaatctcttgccggaagccgtgccacagagcacacaggcagtttgcagagaaggatgcaacccacaccatgtccgaagcgggctctggggaaggcaaggggccagctgaagctacccgtacacatcgttttacaagccctgggctgtcaatgggtcttttaaaaccagctgaactgcgttttgcttttcagtgtgtgacaactgggctgcaattggagctcagagcagaactcaccaggaaggaagcagtgtgtgtttcacagtccactgttgagctaattattcccagaggcctacgggactacacaggcttatattga

SEQ ID NO: 114542 - DNA, 1749 bp, Homo sapiens
atggctgaaaggggccaatgtagagctcgggctgtgacttcagagggtgaaagccccaagccttggcagcttccacatggtgttgagcctgcagggataacctctgctaaggcagtgcagaagggaaatgtggggtcagagcccctgcacagagtccctactagggcaccaactagtggagctgtgagaagaaggccaccgccctccagaccccagaatggtagctccaccaacagcttgcacagtgagcctggaaaagccacagacactcaatgccagcccatgaaagcacccaggagaggggctatatcctgcaaagccacaggggcagagctgcccaagaccatgggaacctacctcttgcatcagcgtgacctggatgctaccagatgcttttgtctcatggctctgagaattatttctttcaacaaatggaagaacattccatgcttatggataggaagaatcaatgtcgtgaaaatggccatactgcccaaggtaatttatagattcaatgccatccccatcaagctaccaatgactttcttcacggaactggaaaaaactactttaaagttcatatggaaccaaaaaagagcccacattgccaagacaatcctaagccaaaagaacaaagctggaggcatcacactacctgacttcaaactgtactacaaggctacagtaaccaaaacagcatggtactggtaccaaaagagagatacagaccaacagaacagaacagaaccctcagaaataataccacacatctacaaccatctgatctttgacaaacctgagaaaaacaagcaatggggaaaggattccctatttaataaatggtgctgggaaaactggctagccatatgtagaaagctcaaactggatcccttccttacaccttatacaaaaattaattcaagatggattaaagacttaaatgttagacctaaaaccataaaaaccctagaagaaaacctaggcaataccattcaggacataggcacgggcaaggacttcatgtctaaaacaccaaaagcaatggcaacaaaagccaaaattgacaaatgggatctaattaaactaaagagcttctgcacagcaaaagaaactaccatcagagtgaataggcaacatacagaatgggagaaaatttttgcaacctactcatctgacaaagggctaatatccagaatctacaaagaactcaaacacatttacatgaaaaaaacaaacaaccccatcaaaaaaataaaagctggagagtgcagttttttagctgctgaagattctgagctgtgctgtagattagctagacattacaaaaagcccctcctgagtcagctaaacagtgaaatgaagttcctcaaagttggtttagcactgttaacgtggacccagaataaagttgagaaaagtcagctaccaattgaagaaaattctcagctttatggggcttatgtggttagatcccagaatggtacatccatcgacagcttgcactgtgcacctggagaagccacagatactcaatgccagcctgtgaaagcagccaggaaggaggctgtaccctgcaaagccacaggggtggagctgcccaagaccatgggaacccgcctcttgcatcagcatgacccagatgtgagacctggcgtcaaaggagatcattttggagctttaaggtttgactgccctgatggatttcggacttgcgtgtggctggtacatgctaaagatgcagacttttag

SEQ ID NO: 114543 - DNA, 1306 bp, Homo sapiens
cctcaggtatgtcttcatcagcagcatggaaactgatgaatacagtaaattggtaccagtagagtggggtgctgctgaaaagatactagaaaatatggaagcgactttggaactgggtaacaagcaaagagatttgtggaactctgaacttgagagagatgatttaaggtatctggaggaagaaatttttaagcagcaaagcattcaagagatgatttgggtgctgttaaaggcattcagttttgtaaggggagcagagcataaaagtttggaaaatctgcagcctgacagtgcagtagaaaagaaaatcccattttctgaggagaaattcaagcctgctgcagaaatttgcgtaagtagtgaggagccaaatgttaagccccaagaaaatagggaaaatgtcttcagggcatgtcagaagtcttcacagcagcctgtcccatcacaggcccagcagcctaggaggaaaaaatggttttgtgggctaggcctagagtcactgtgctgtgtgctgtctagggacttggtgccctgcatcctagctgcttcagcaccagccatggttaaaaggggccaagatacatttcaggccatggcttcagagggtgcaagccataagccttggcatctcccatgtggtgttgagcctatgggtatacagaagtcacaaactgaggtttgggaacctctacctagatttcagaggatgtataaaaatgcctggatgtctaggcagaagtttgctgcaggggcagagccctcatggagaacctctgctagggcagtgctgaagggaaatgtggggtcagagccccccacacagagtccctactggtgcactacctaatggagctatgagaagaaggccaccatcctccagaccccagaatgatggatcaaccaacagcttgcaccttgtgcctggaaaagccacagacactcaaggccagcccatgaaagcagccatgagggagaacataccctgcaaagccacaggggtggagctgcccaagaccatggggaacccacctcgtgcatcagcatgacctggatgctggagacatggagtcaaaggagatcattttggagctttaagatttgactgcccttcgtgccacgcactccagcctgggcgatgagcgagactccatagttctgcatggctgggaaggcctcaggaaacatacagtcatggtggaagggaagcaaacacgttcttcttcacatggtggcaggagaaagaagtgggtttcgatcggggtaggccaccgagcccctgcgaaaacccggagtaacggattcggcg

SEQ ID NO: 114544 - DNA, 392 bp, Homo sapiens
ttagtaatataaggtgtagagtgaggcaatgtttcctatagttttaggttctacaatcttgtgggcagtgttctatagtcttatgattaggtctcagcgaatccttatgcctctatactgtgaactttaaatgtgcttctgagtcataggatggctagtgtgggctggagttgtgtattaaccttccccaagttccattatgctctggttacatctggagggcaggccttgttaagaagcaaatgctgtggcatatttcaaaatgttcccttccctccaatcttcttggaagcatgaggagatttttctccaatattcactgtgagactctggttgagctcttggatataaaatctgtaaaggtgtgggggctcacctataactgggtcccc

SEQ ID NO: 114545 - DNA, 407 bp, Homo sapiens
agtcccaaccttcgccgatacatggcaggtagaaatggtgacatcactgaggtaggtcggcaaactcttgaatcttagatgtgtgatgtttcagagttaagccttcgaagttttcttcttctaccccacatccattgcctgaaacttcaatgagatccactccatagtccttaagctttagatcaatattagtggcaccagcatccagactgttttctactaactccttcaccgcagtgcttagactcggtaccaccggcccagagcaaatctgatggactgacttccgatcaataggtttgatggccttagcaggttctgtactcgagctctcagctcgctccaaggatgcaacaccggatccgcctcggggaatgggaaagttccctccacacgaaatcgtcgac

SEQ ID NO: 114546 - DNA, 300 bp, Homo sapiens
gtcttttttctttttgggggggatggagtctcgctctgtcacccaggctggagtgcggtggcgtgaacccaggaggcagaggaaccatttgtgcagatcatctagaagaacctggaccattcttgatggagctgaatacagtgatcacgttgtcctcctaggagcaggggtggggggaggggggtggggtccttctaggagtccttggagaaaagtaagaaaccaggagcgtttcttacggacttgcagtccaggaggatttgaaggcacaatgcaggggctcagattgggacagaattc

SEQ ID NO: 114547 - DNA, 394 bp, Homo sapiens
ctgcatgtcacttttggcagctttcgcagcattgaaaatatcattggctggtggctctgactgtttccggctatgacgatgtaccgcttgggaccctttctttggatattttgccacctggtacatcagcatggcgcaaccaaaacaagacagggtggcgcgtgccacacaccaaccgtcggaaaccgccagacaccaaccgtccagaaaccgccagacaccaacgctcggaaaccgccagacaccaacgctcggaatacacgccacaccactactgcacggcgaccacctctcttctgactctgctgcgggcgttcggaaaaaaaaacgcatccggtgtgctgtgattggtccaggctctttgacgtcacggactcgacctttgacagagcca

SEQ ID NO: 114548 - DNA, 197 bp, Homo sapiens
ttaaggataagtatcagtaatctgacggcctccactgccacactgtactctctgtccacgatcatggaaaccatccagtcctgcatgtcacttttggcagctttcgcagcattgaaaatatcattggctggtggctctgactgtttccggctatgacgatgtaccgcttgggaccctttctttggatattttgccac

SEQ ID NO: 114549 - DNA, 712 bp, Homo sapiens
agtgaatgagtggcccctgcctctcctatgggtcctttgggatctgagctctgggccacagtctggccgcagccctgaagctcctagcccctctactctcagctcttcgggacagttctctgcctggcacacaaaagaccctcctgacaccagccgacctagacacaccccctccaaagatcccatcggagcccaccatcctgggagcatcacccaaaacccttcctctggcttctcggatttgcatctgaccttcgaatacccctccatcctgcaatttccaaatgagtacagtcaccccaacactgagccggacgctctcctggtggtgcccctgagcagcaacctgatttctgtcctcagctacctggccaatgacatggaggaggacgacgaggaccccaaacaaaacatcttctacttcctgtatgggaagacccgctctcgcatacccttggtccgtaaccgtcggttccagttatgccgttgcatgaacccgagggccaggaagaaccgctctcagatagccctgttccagaaacttcggttccagttcttctgttccatgagcggcagggcttgggtttcccgggaggagttggaggagaacaccggacccacgggagatgtggattttcagcaggaacttaattccaatgctaatggcagtcaacaggaaagaggagaggaaccatttgtgcagatcatctag

SEQ ID NO: 114550 - DNA, 1104 bp, Homo sapiens
atggacagaacggagactaggttccgtaagaggggacagattaagggaaagatcacgaccagccgtcaaccgcacccccagaatgagcagagtccccagcggagcacctcggggtactccctccaggaggtggtggatgatgaagtgttgggatcatcagcccctggggtagatcccagccccccatgtaggtcccttggctggaaaaggaagaaggagtggtcagatgaatctgaggaggagccggagaaggagctcgcccctgagcctgaggagacctgggtagtggagatgctgtgtgggctcaagatgaagctgaagcaacagcgagtgtcacccatcctccctgagcaccacaaggacttcaacagtcagcttgcccctggggtagatcccagccccccgcataggtccttttgctggaaaaggaagagggagtggtgggacgaatctgaggagtcgttggaggaggagccacggaaggtgctcgcccctgagcctgaggagatctgggtggcggagatgctgtgtggcctcaagatgaagctgaagcgacggcgagtgtcgctcgtgctccctgagcaccacgaggccttcaacaggctgcttgaggatcctgtcattaaaagattcctggcctgggacaaagatctgagggtgtcggacaagtatctcctggctatggtcatagcgtatttcagccgggccggcctcccctcctggcaataccaacgcattcatttcttcctggctctctacctggccaatgacatggaggaggacgacgaggaccccaaacaaaacatcttctacttcctgtatgggaagacccgctctcgcatacccttggtccgtaaccgtcggttccagttatgccgttgcttgaacccgagggccaggaagaaccgctctcagatagccctgttccagaaacttcggttccagttcttctgttccatgagcggcagggcttgggtttcccgggaggagttggaggagaacaccggacccaggggagatgtggattttcagcaggaactttattccaatgctaatggcagacaacaggaaagaggagaggaaccatttgtgcagatcatctag

SEQ ID NO: 114551 - DNA, 1096 bp, Homo sapiens
gactcgactggtgtttgatcacgatgggagaatcatccagaaaaccccctacccccaccccagagggacccacagtcagcgtgaagcagttattttctacgctacctgtgcgccataaggaatttcaaaggaatattaagaagaaacgtgcctgcttccccttcgccttctgccgtgattgtcagtttcttgagggctccccagccatgcttcctgtacagcctgcaaaacttacagaacctgctaaggccatcaaacctattgatcggaagtcagtccatcagatttgctctgggccggtggtactgagtctaagcactgcggtgaagaagatagtaggaaacagtctggatgctggtgccactaatattgatctaaagcttaaggactatggaatggatctcattgaagtttcaggcaatggatgtggggtagaagaagaaaacttcgaaggcttatctctttcagctctgaaacatcacacatctaagattcgagagtttgccgacctaactcgggttgaaacttttggctttcaggggaaagctctgagctcactttgtgcactgagtgatgtcaccatttctacctgccacgtatcggcgaaggttgggactcgactggtgtttgatcacgatgggaaaatcatcaagaaaaccccctacccccaccccagagggaccacagtcagcgtgaagcagttattttctacgctacctgtgcgccataaggaatttcaaaggaatattaagaagaaacgtgcctgcttccccttcgccttctgccgtgattgtcagtttcttgagggctccccagccatgcttcctgtacagcctgcaaaactgactgtaactggagagctacgggcatgcagaagttggaagacgagggaaggcatcacagaggctgtggggtgaaccgacttcaaggaatgggtccttcccttcagaaccacatgtgtgcgggacacccagacagaaaacacaaatgcaaagtcaagtggagggcatttggaaggagcagtgaagccaagccaggaaacaccaagatggcgagccagtgtggttgtagagattgcagagagggacaagataag

SEQ ID NO: 114552 - DNA, 329 bp, Homo sapiens
ctgggaaacatcattaaatcacaactcctaaaagacccgcaagtgctatttgctggctacaaagtcccccaccccttggagcacaagatcatcatccgagtgcagaccacgccggactacagcccccaggaagcctttaccaacgccatcaccgacctcatcagcgagctgtccctgctggaggagcgcttccggacgtgcctgcttccccttcgccttctgccgtgattgccagtttcctgaggcctccccaaccacgcttcctgtacagcctgcagaactctgccccagagcacatcagctatgtgccccagctctcaaacgacacc

SEQ ID NO: 114553 - DNA, 2172 bp, Homo sapiens
atgctgctgtgtcttttggaggaagaacccttcgagagctccagtgaagaagagtttggtggtgaggaccatcagagcctaaattccattgttgatgttgaagatttgggcaaaattatggatcacgtgaagaaagaaaaggtttcttcggaatcctattatggccctatacagagaagagcggctgctggggactggtattatctactgacggggtggtgcgtaacggcaaaagcaccgccggacatcagcgctatctctgctctcactgccgtaaaacatggcaactgcagttcacttacaccgcttctcaacccgccgggcagtgacgtcatcgtctgcgcggaaatggacgaacagtggggctatgtcggggctaaatcgcgccagcgctggctgttttacgcgtatgacagtctccggaagacggttgttgcgcacgtattcggtgaacgcactatggcgacgctggggcgtcttatgagcctgctgtcaccctttgacgtggtgatatggatgacggatggctggccgctgtatgaatcccgcctgaagggaaagctgcacgtaatcagcaagcgatatacgcagcgaattgagcggcataacctgaatctgaggcagcacctggcacggctgggacggaagtcgctgtcgttctcaaaatcggtggagctgcatgacaaagaggagctcgcagccctcttctctgagctgaagcaggagcagaagaaggtggatgagctcatcgccaaactggtgaaaaaccggacccgaatcgtcaatgagtcggatgtcttcagctgggtgatccgccgcgagttccaggagctgcgccacccggtggacgaggagaaggcccgctgcctggaggggatagggggtcacacccgtggcctggtggcctccctggacatgcagctggagcaggcccagggaacccgggagcggctggcccaagccgagtgtgtgctggaacagttcggaaatgaggaccaccatgagttcatctggaagttccactccatggcctccagtgtccagaagaaggccatggacagaacggagactaggttccgtaagaggggacagattacgggaaagatcacgaccagccgtcaaccgcacccccagaatgagcagagtccccagcggagcacctcggggtaccccctccaggaggtggtggatgatgaagtgttgggaccatcagatgaggggactggtggaagaagaggtgggataggattgactaagacgaaggaagggggccgggagctcgcccctgagcctgaggagacctgggtagtggagacgctgtgtgggctcaagatgaagctgaagcaacagcgagtgtcacccatcctccctgagcaccacaaggacttcaacagtcagcttgcccctggggtagatcccagccccccgcataggtccttttgctggaaaaggaagatggagtggtgggacaaatctgaggagtcgttggaggaggagccacggaaggtgctcgcccctgagcctgaggagatctgggtggcggagatgctgtgtggcctcaagatgaagctgaagcgacggcgagtgtcgctcgtgctccctgagcaccacgaggccttcaacaggctgcttgaggatcctgtcattaaaagattcctggcctgggacaaaggtctgagggtgtcggacaagatcccatcggagcccaccatcctgggagcatcacccaaaacccttcctctggcttctcggatttgcatccgaccttcgaatacccctccatcccgcaatttccaaatgagtacagtcaccccaacactgagctacctggccaatgacatggaggaggacgacgaggaccccaaacaaaacatcttctacttcctgtatgggaagacccgctctcgcatacccttgctccgtaagcgtcggttccagttatgccgttgcatgaacccgagggccaggaagaaccgctctcagatagtcctgttccagaaacttcggttccagttcttctgttccatgagctgcagggcttgggtttccccggaggagttggaggagaacaccggacccaggggagatgtggattttcagcaggaactttattccaatgctaatggcagacaccaggaagaaggagaggaaccatttgtgcagatcatctag

SEQ ID NO: 114554 - DNA, 1338 bp, Homo sapiens
atgaacgatgacatcagagattccgaccttcctgattggagggaccggactccgtgtgtccagaagaaggccatggacagaacgaagactaggttccgtaagaggggacagattacgggaaagatcacgaccagccgtcaaccgcacccccagaatgagcagagtctccagcggagcacctcggggtaccccctccaggaggtggtggatgatgaagtgttgggaccatcagcccctggggtagatcccagccccccatgtaggtcccttggctggaaaaggaagaaggagtggtcagatgaatctgaggaggagccggagaaggagctcgcccctgagcctgaggagacctgggtagtggagatgctgtgtgggctcaagatgaagctgaagcaacagcgagtgtcacccatcctccctgagcaccacaaggacttcaacagtcagcttgcccctggggtagatcccagccccccgcataggtccttttgctggaaaaggaagagggagtggtgggacgaatctgaggagtcgttggaggaggagccacggaaggtgctcgcccctgagcctgaggagatctgggtggcggagatgctgtgtggcctcaagatgaagctgaagcgacggcgagtgtcgctcgtgctccctgagcaccacgaggccttcaacaggctgcttgaggatcctgtcattaaaagattcctggcctgggacaaagatctgagggtgtcggacaagatcccatcggagcccaccatcctgggagcatcacccaaaacccttcctctggcttctcagatttgcatccgaccttcgaatacccctccatcccgcaatttccaaatgagtacagtcaccccaacactgagggtgggtgccagtcctgagctagggacagtcccttaccttcctctctgggaagctgacctcagccggaggcctctcctggtggtgcccctgagcaccaacctgatttctgtcctcagctacctggccaatgacatggaggaggacgacgaggaccccaaacaaaacatcttctacttcctgtatgggaagacccgctctcgcatacccttggtccgtaaccgtcggttccagttatgccgttgcttgaacccgagggccaggaagaaccgctctcagatagccctgttccagaaacttcggttccagttcttctgttccatgagcggcagggcttgggtttcccgggaggagttggaggagaacaccggacccaggggagatgtggattttcagcaggaactttattccaatgctaatggcagacaacaggaaagaggagaggaaccatttgtgcagatcatctag

SEQ ID NO: 114555 - DNA, 795 bp, Homo sapiens
atgtgtccttggcggcctagactaggccgtcgctgtatggtgagccccagggaggcggatctgggcccccagaaggacacccgcctggatttgccccgtagcccggcccgggcccctcgggagcagaacagccttggtgaggtggacaggaggggacctcgcgagcagacgcgcgcgccagcgacagcagccccgccccggcctctcgggagccggggggcagaggctgcggagccccaggagggtctatcagccacagtctctgcatgtttccaagagcaacaggaaatgaacacattgcaggggccagtgtcattcaaagatgtggctgtggatttcacccaggaggagtggcggcaactggaccctgatgagaagatagcatacggggatgtgatgttggagaactacagccatctagtttctgtggggtatgattatcaccaagccaaacatcatcatggagtggaggtgaaggaagtggagcagggagaggagccgtggataatggaaggtgaatttccatgtcaacatagtccagaacctgctaaggccatcaaacctattgatcggaagtcagtccatcagatttgctctgggccagtggtactgagtctaagcactgcagtgaaggagttagtagaaaacagtctggatgctggtgccactaatattgatctaaagcttaaggactatggagtggatctcattgaagtttcagacaatggatgtggggtagaagaagaaaactttgaaggcttaatctctttcagctctgaaacatcacacatgtaa

SEQ ID NO: 114556 - DNA, 410 bp, Homo sapiens
caaaaaaaatcccttcacattttaactcaggagataacaccaacaagtcacttccggcagacctcatggccacactgcatgtcacttttgggcagctttcgcagcattgaaaagatcattggctggtggctctgactgtttccagctatgacgatgtaccacttgggaccctttctttgaatgttttgccaccggcattgttttcagtggtcgttttgttgctttcttcttcacaccgcgattgaagctgtcctcaaatcattttcttgtcttcttgtctggtacatcggggtggcgcgtgccagacaccaacggtcggaaaccgccagacaccaacgctcggaatccacgccaggccacgacggagggagaatacctcccttaaaaccctgctgctggcgttcacgaaa

SEQ ID NO: 114557 - DNA, 1322 bp, Homo sapiens
ggtcaagtccagggctgcgttactgggtcctggagcccaagtcctctggaagtgtccagaagaaggccatggacagaacggagactaggttccgtaagaggggacagattacgggaaagatcacgaccagccgtcaaccgcacccccagaatgagcagagtccccagcggagcacctcggggtaccccctccaggaggtggtggatgatgaaatgttgggaccatcagcccctggggtagatcccagccccccatgtaggtcccttggctggaaaaggaagagggagtggtcagatgaatctgaggaggagccggagaaggagctcgcccctgagcctgaggagacctgggtagtggagatgctgtgtgggctcaagatgaagctgaagcaacagcgagtgtcatccatcctccctgagcaccacaaggacttcaacagtcagcttgcccctggggtaaatcccagccccccgcataggtccttttgctggaaaaggaagatggagtggtgggaccaatctgaggagtcgttggaggaggagccacggaaggtgctcgcccctgagcctgaggagatctgggtggcggagatgctgtgtggcctcaagatgaagctgaagcgacggcgagtgtcgctcgtgctccctgagcaccacgaggccttcaacaggctgcttgaggatcctgtcattaaaagattcctggcctgggacaaagatctgagggtgtcggacaagtatctcctggctatggtcatagcgtatttcagccgggccggcttcccctcctggcaataccaacgcattcatttcttcctggctctctacctggccaatgacatggaggaggacgacgaggactccaaacaaaacatcttccacttcctgtataggaagaaccgctctcgcatacccttgctccgtaagcgttggttccagttaggccattccatgaacccgagggccaggaagaaccgctctcgcatacccttgctccgtaagcgtcggttccagttataccgttccacgaacccgagggccaggaagaaccgctctcgcatacccttgctctgtaagcgtcggttccagttataccgttccatgaactcgagggccaggaagaaccgctctcagatagtcctgttccagaaacgacggttccacttcttctgttccatgagctgcagggcttgggtttccccagaggagttggaggagaacaccggacccaggggagatgtggattttcagcaggaactttattccaatgctaatggcagacaccaggcaggaggagaggaaccatttgtgcagatcatctag

SEQ ID NO: 114558 - DNA, 1315 bp, Homo sapiens
gcaccccttccatgttcttaaggataagtatcagtaatctgacggcctccactgccacactgtactctctgtccatgatcatggaaaccatccagtccttgaagcggccagtgaagagctccaggcgtgcggtcaggtcccggttaccgtacagccctttcagagccttcacgcacttcacgcggacttctcggtgcttatcatgcagagtccacccaatatattttaaatagctgtcggtgaggaaagacgtgctgtagctttgcatccaacacccaatttcctcaatgcagatagcacggatctcaggaaggacatccctgcatgtcacttttggcagctttcgcagcattgaaaatatcattggctggtggctctgactgtttccggctatgacgatgtaccgcttgggaccctttctttggatattttgccaccggcgttgttttcagtggtcgttttgctgctttcttcttcacaccgcgattgaagctgtcctcaaatcattttcttgtcttcttgtctgcaagtggccagtgccaagtgctgggccgccgctcctgccgtgcatgttggggagccagtacatgcaggtgggctccacacggagaggggcgcagacccggtgatagggctttacctggtacatcggcatggcgcaaccaaagcaagagagggtggcgcgtgccagacaccaacggtcggaaaccgccagacaccaacggtcggaaaccgccaagacaccaacgctcggaaaccgccagacaccaacgctcggaaaccgccagacaccaaggctcggaatacacgccagaccacgacggagggcgaccacctcccttctgaccctgctgcgggcgttcggaaaaaaaacgcagtccgtacagaacctgctaaggccatcaaacctattgatcggaagtcagtccatcagatttgctctgggccggtggtactgagtctaagcactgcggtgaagaagatagtaggaaacagtctggatgctggtgccactaatattgatctaaagcttaaggactatggaatggatctcattgaagtttcaggcaatggatgtggggtagaagaagaaaacttcgaaggcttaagttgggactcaactggtgtttttgatcacgatgggaaaatcatccagaaaaccccctacccccaccccagagggaccacagtcagcgtgaagcagttattttctacgctacctgtgcgccataaggaatttcaaaggaatattaagaagccagttggtgagaagtacatgcggtctgtggacacccaagcttgcagctgcatctga

SEQ ID NO: 114559 - DNA, 461 bp, Homo sapiens
ttttttttttttttttttaatttatgaagaaaagaggtttaattgactcacagttctgcaggctgtacaggaagcgtggctggggaggcctcaggaaactgacaatcacggcagaaggcgaaggggaagcaggcacgtctggccatgttggagcaggagagacagagagagtgaagcgggaggtgctgcacacttttcaacaagcagatcccacgagggctcactcactgtcacgagaacagcaaggggggaagtcggcccccatgagccaatcacctcccaccagggtccctgccacaacactgggaattacaatttgacatgacattttgggttgtggatacagagctgaaccatgtcaagggtagttcaaccgctgagattgattgattgattgattgactgagatggagtcctgctctgttacctaggctggagtgcagtggcacaatctcggctca

SEQ ID NO: 114560 - DNA, 826 bp, Homo sapiens
atggggctaccctgggggcagcctcacctagggctgcagatgctcctcctggcgttgaactgtctccggcccagcctgagcctggagctggtgccctacacaccacagataacagcttgggacctggaagggaaggtcacagccaccaccttctccctggagcagccgcgctgtgtcttcgatgggcttgccagcgccagcgataccgtctggctcgtggtggccttcagcaatgcctccaggggcttccagaacccggagacactggctgacattccggcctccccacagctgctgaccgatggccactacatgacgctgcccctgtctccggaccagctgccctgtggcgaccccatggcgggcagcggaggcgcccccgtgctgcgggtgggccatgaccacggctgccaccagcagcccttctgcaacgcgcccctccctggccctggaccctatcgggaagacccccggatccatcgacacctggccagggcggcgaagtggcagcatgatcgtcattacctccatcctctcttctctggccggcctcctactcttggccttcttggcagcctctaccatgcgcttctccagcctgtggtggccggagaggccccggagcagctgcggatcggctccttcatgggcaagcgctacatgacccaccacatcccacccagagaggccgccacactgccgaaacgtgcctgcttccccttcgccttctgccgtgattgtcagtttcttgagggctccccagccatgcttcctgtacagcctgcaaaactgtgagtcaattaaacctcttttcttcataaaaaaa

SEQ ID NO: 114561 - DNA, 3420 bp, Homo sapiens
atggatgttggctgggacctcggtgaggactgctggcaagaacacctacacacggccttttcctttgactgctggccttgctcacagaatggtgaccgggttcccagtgtgaacccagtgggcgggggggccccgcgctcctacctgcaagtggccagtgccgagtgctgggccgccgctcctgccgtgcatgttggggagccagtacatgcaggtgggctccacacggagaggggcgccgaccccgtgatagggctttacctggtacatcggggtggcgcgtgccagacaccaacggtcggaaaccgccagacaccaacgctcggaatccacgccaggccacgacggagggcgactacctcccttctgaccctgctgctggcgttcggaaaaaacgcagtccgtacagaacctgctaaggccatcaaacctattgatcggaagtcagtccatcagatttgctctgggccggtggtaccgagtctaagcactgcggtgaaggagttagtagaaaacagtctggatgctggtgccactaatattgatctaaagcttaaggactatggagtggatctcattgaagtttcaggcaatggatgtggggtagaagaagaaaacttcgaaggcttaactctgaaacatcacacatctaagattcaagagtttgccgacctacctcaggttgaaacttttggctttcggggggaagctctgagctcactttgtgcactgagtgatgtcaccatttctacctgccatgtatcggcgaaggttgggactcgactggtgtttgatcactatgggaaaatcatccagaaaaccccctacccccaccccagagggatgacagtcagtgtgaagcagttattttctacgctacctgtgcaccataaagaatttcaaaggaatattaagaagaaacgtgcctgcttccccttcgccttctgccgtgattgtcagtttcctgaggcctccccagccatgcttcctgtacagcctgcagaactggcccctctcctgcctggacggctctgctggtctccccgtcccctggagaagaacaaggccatgggtcggcccctgctgctgcccctactgcccttgctgctgccgccagcatttctgcagcctagtggctccacaggatctggtccaagctacctttatggggtcactcaaccaaaacacctctcagcctccatgggtggctctgtggaaatccccttctccttctattacccctgggagttagccacagctcccgacgtgagaatatcctggagacggggccacttccacaggcagtccttctacagcacaaggccgccttccattcacaaggattatgtgaaccggctctttctgaactggacagagggtcagaagagcggcttcctcaggatctccaacctgcagaagcaggaccagtctgtgtatttctgccgagttgagctggacacacggagctcagggaggcagcagtggcagtccatcgaggggaccaaactctccatcacccagggctccagcgcggcccaagcctccacgaggagcgccgccccctgctccacggcgcccggtcccatcgaccgcccaagggccgaggagtgcgggagcaaggcgcagaactggcaggcagctctacctgctgcctggtcccttggctgcaaaaggaagagggagtgtttggatgaatctgatgatgagccagagaaggagctcgcccctgagcctgaggagacctgggtggcagagacgctgtgtggcctcaagatgaaggcgaagcgacggcgagtgtcgctcgtgctccctgagtactacgaggccttcaacaggctgcttgcccctggggtagatcccagccccccacgtaggtcccttggctgcaaaaggaagagggagtgtttggatgaatctgatgatgagccagagaaggagctcgcccctgagcctgaggagacctgggtggcagagacgctgtgtggcctcaagatgaaggcgaagcgacggcgagtgtcgctcgtgctccctgagtactacgaggccttcaacaggctgcttgcccctggggtagatcccagccccccacgtaggtcccttggctgcaaaaggaagagggagtgtttggatgaatctgatgatgagccagagaaggagctcgcccctgagcctgaggagacctgggtggcagagacgctgtgtggcctcaagatgaaggcgaagcgacggcgagtgtcgctcgtgctccctgagtactacgaggccttcaacaggctgcttgcccctggggtagatcccagccccccgcgtaggtcccttggctgcaaaaggaagagggagtgtttggatgaatctgatgatgagccagagaaggagctcgcccctgagcctgaggagacctgggtggcggagacgctgtgtggcctcaagatgaaggcgaagcgacggcgagtgtcgctcgtgctccctgagtactacgaggccttcaacaggctgcttgaggatcctgtcattaaaagattcctggcctgggacaaagatctgagggtgtcagacaagatcccatcggagcccaccatcctgggagcatcacctaaaacccttcctccggcttctcggatttgcatccgaccttcgaatacccctccaccccgcaatttccacatgagcacagtcaccccaatgctgagctatctggccaatgacatggaggaggacgacgaggcccccaaacaaaagatcttctacttcctgtacgggaagacccactctcacatacccttgcgccctaagcattggttccagttatgccgtcccatgaacccgagggccaggaagaactgctctcagatagccttgttccagaagcgtcggttccagttcttctgttccatgcgctgcagggcttgggtttccccggaggagttggaggagaacaccggacccaggggagatgtggattttcagcaggaactttattccagtgctaatggcagacatcaggaaggaggagaggagccatttgtgcagatcatctagaagaacctggaccattcttgacagagctgaatacagtgatcacgttgtcctccaaggagcaggggtggggtggggtacttctaggagtcagttctgcaggcttttaaagggtataaaattttatagcatgaaagatgatattttagtcatacattaatggcccaaaaataatgtcccatctttttactcatcatccctactgtggactaagaattaagtacaagtgggtattatatccaggaaaaatgtcaaaaagcaacctcatcataatcttctaattcacacacaaaggcaacagccagaacaagaattacgctaagtatctgaaacttggtggagccaaagcctctgaagcacaaaacagtcccgtgcttttctgag

SEQ ID NO: 114562 - DNA, 1177 bp, Homo sapiens
cggacgcgtggataaaatgcaaagtgtgcatgattctatctgttacaatctgtggcactgatatttcacaaaagaattctgtcccaatctgagcccctgcattgtgccttcaaatcctccctggactgcaagtccgtaagaaacaggacctccaggttccgccccagggaggttggaattcagcaatataaaaagggtggtggtgccgcaggaaagggtggaactggaaacgctcctggtttcttacttttctccaaggactcctagaaggaccccacccccctccccccacccctgctcctaggaggacaacgtgatcactgtattcagctccatcaagaatggtccaggttcttctagatgatctgcacaaatgggttcctctcctcctgcctggtgtctgccattagcattgggaataaagttcctgctgaaaatccacatctccccttgggttccggtgttcttggaagcgagagagacaatgtcacacttcaaggaggcagctctctagacaggaaagttattcacgtcccatgtcaagtctagagttcagagcaattgagaaatgcaattttatctgctgcctttcattctataccctgcttctgaaccatcgtgttcaactgtgaaactcacactttggtgaccatgactccaaaactcacttaatacacccaaggtcagcccccagtgatctgcttcatagcagggactttgggtgggtctgcccagggagtagggcaccctcagagaatgtggctttggactttatcacagctggggccttttgtgtcacttaagatctaaacttgtaaccatgctagatgtgttttctaatgtgacaacatcacgaaccacgagtccagaagcctaatccttaatcctacctcctcatgatgaagtctcatgctctgtgctcaacgtggttagctgcacaagatgtaaaccaaagcttcactgaaccctcgacccaaatcagtaactcaagtgcgtcaatcataatgaacctccccaaactcagtatttatgattatttttgaggcagggtctcactctgtcgcccagactggagtgcagtggcaggatcagggctccgtgcagccccaaccttccaggctccagcaatcctcccgcctcagcctcctgagtagttgggattacaggtgcccgccac

SEQ ID NO: 114563 - DNA, 3319 bp, Homo sapiens
  misc_feature (1)...(3319): n = a,t,c or g
tcagtccagggggacttccacgggaaaccagcactgggtgtccagggccagtggcagaaccatgggcccttccttcatcgaaccaatacgtttgggtgggggcgagctcctctcgcctgatttttcaattgctccctgcacaatggcagaaattcctggagattctcctaggaggtggaaggtccctggccctggctccatgtggcacgtgctctggtccttctccagcagcaggcttgtcagaccctcccagtccttcagctgagtccctgcacagtcccacaggttgtctactaagtaagcagcgtggtcgtggagcttgctctccacaaagaaggacagcagaagctggaagaaagtcctctgggcacctgggctctggcgttgctctcttccacccatcgttcttatctcgcactcagggtagaaaagtacaatggggtagacgctctcacagtccacgtccatcagcaccccttccatgttcttaaggataagtatcagtaatctgacggcctccactgccacactgtactctctgtccacgatcatggaaaccatccagtccttgaagcggccagtgaagagctccaggcgtgcggtcaggtcccggttaccgtacagccctttcagagccttcacgcacttcacgcggacttctcggtgctgcatgtcacttttggcagctttcgcagcattgaaaagatcattggctggtggctctgacatgtttccggctatgacgatgtaccgcttgggaccctttctttggatattttgccaccggcgttgttttcagtggtcagttttgctgctttcttcttcacaccgccgattgaagctgtcctcaaatcattttcttgtcttcttgtctggtacatcggcatggcgcaaccaaagcaagagagggtggcgcgtgccagacaccaacggtcggaaaccgccagacaccaacgctcggaaaccgccaagacaccaacgctcggaaaccgccagacaccaaggctcggaatacacgccagaccacgacggagggcgaccacctcccttctgaccctgctgcgggcgttcggaaaaaaaacgcagtccgtacagaacctgctaaggccatcaaacctattgatcggaagtcagtccatcagatttgctctgggccggtggtactgagtctaagcactgcggtgaagaagatagtaggaaacagtctggatgctggtgccactaatattgatctaaagcttaaggactatggaatggatctcattgaagtttcaggcaatggatgtggggtagaagaagaaaacttcgaaggcttaactctgaaacatcacacatctaagattcaagagtttgccgacctaactcgggttgaaacttttggctttcgggggaaagctctgagctcactttgtgcactgagtgatgtcaccatttctacctgccacgtatcggcgaaggttgggactcgactggtgtttgatcacgatgggaaaatcatccagaaaaccccctacccccaccccagagggaccacagtcagcgtgaagcagttattttctacgctacctgtggcgccataaggaatttcaaaggaatattaagaaggctcagaggctcaggcaagagctacagatgctcatgaccgaatgtctcacctgggcccggaatggcagcagcaagcaccctctcagcctagcccagaagccagagttcctatttcatcagttgcaaagcagagacaatgccatctgcccgatagcagagcaaaaggcagaggggaagttctcttcaaggtacagaaaccacgactccgcagagaaccgcagagatggcagcatgaccagaccacggacagactggactctgaaacgggcatgtacagagaagaggagaccccaacacgcttcaagctttgagtggagaggacacagcctctgctgggacagggaacagagggatgcggagaccctgaagatgcttttggacagtggtctgagtgtccagaagaagatcaaggacagaacagagactaggtttggtgagatgggacagattttgggaaagatcatgatgagccatcaaccgcagccccaggaagagcagagcccccagcggagcacctcagggtaccccctccaggaggtggtggatgatgaagtgtcgggaccatcagcccctggggtagatcccagccccccacgtaggtcccttggctggaaaaggaagagggaatgtttggatgaatctgatgatgagccagagaaggagctcgcccctgagcctgaggagacctgggtggcggagacgctgtgtggcctcaagatgaaggcgaagcgacggcgagtgtcgctcgtgctccctgagtactacgaggccttcaacaggctgcttgaggatcctgtcattaaaagactcctggcctgggacaaagatctgagggtgtcggacaagatcccatcggagcccaccatcctgggagcatcaccgaaaacccttcctccggcttctcggatttgcatccgaccttcgaatacccctccaccccgcaatttccacatgagcacagtcaccccaatgctgagctatctggccaatgacatggaggaggacgatgaggcccccaaacaaaacatcttctacttcctgtacgaggagacccgctctcatatacccttgctccgtgagctttggttccagttatgccgttacatgaacccgagggccaggaagaactgctctcagatagccttgttccggaagtatcggttccacttcttttgttccatgcgctgcagggcttgggtttccctggaggagttggaagagaacaccggacccaggggagatgtggattttcagcaggaactttattccaatgctaatggcagacatcaggaaggaggagaggaaccatttgtgcagatcatctagaagaacctggaccattcttgacagagctgaatacagtgatcacgttgtcctccaaggagcaggggtggggtgggggtacttctaggagtcagttctgcaggctgtacaggaagcatggctggggaggcctcaggaaactgacaatcacggcagaaggcgaaggggaagcaggcacgtttctggccatggtggagcaggagagacagagagagtgaagcaggaggtgctgcatgcttctaaacaaccagatcccatgagcgctcactcacttcttaatattcctttgaaattccttatggcgcacaagtaggcgttaaaaaatacctggtttacgctgactggtggtcctctggtggtatagtggggctnttttctctataaatatttt

SEQ ID NO: 114564 - DNA, 2378 bp, Homo sapiens
  misc_feature (1)...(2378): n = a,t,c or g
gctaagtctcaaaaaaaaaaaaaaaggaacatgctctctcattcaaggttacccccttcctatcactcccaaggattcaccccataatcttatctttcttgatatgttacactcactaaaatgttcacatcaaatcaagtttgtagacacttgtccttaccaccttacaaaaaagtgagatggtatcaacaagaggtaagacactgctttacctgcatgtcacttttggcagctttggcagcattgaaaagatcattggctgggtggctctaactgtttccagctatgacgatgtaccacttgggaccctttctttggatgttttgccaccggcattgttttcagtggtcgttttgttgctttcttcttcacaccgcgattgaagctgtcctcaaatcattttcttgtcttcttgtctgcaagtggccagtgccgagtgctgggccgccgctcgtcccggtgcatgtggggcagccagtacatgcaggtgggctccacgcggagaggggcgcggtcgcctgagatagggcttttcatggtacctcgggctggcgcgtgccagacaccaacgagtcggaagccgccagacaccaacgctcggaatccacgccaggccacgacggagggcgactacctcccttctgaccctgctgctggcgttcggaaaaaacgcagtccggtgtgctctgattggtccaggctctttgacgtcacggactcgacctttgacagagccactaggcgaaaaggagagacgggaagtattttttccgccccgcccggaaagggtggagcacaacgtcgaaagcagccgttgggagcccaggaggcggggcgcctgtgggagccgtggagggaactttcccagtccccgaggcgggatccggttgttgcatcctggaagcgagctgagagctcgagtccagaacctgttaagcccatcaaacttatggacggaagtccagtccttcagatttgttcggggccgggggtaccgagtctaaggccgaatgcggtgaaggagttagtagaaaacagtctggatgctggtgcccactaatgttgatctaaagcttaaggactatggagtggatctcattgaagtttcaggcaaatggatgtggggtagaagaagaaaacttcgaaggccttaatctctttcagctctgaaacatcacacatctaagattcgagagtttgccgacctaactcgggttgaaacttttggctttcaggggaaagctctgagcctcactttgtgcactgagtgatgttaccatttctacctgccacgtatcggcgaagggttgggactctgactggtgtttttgatcacgatgggaaaatcatcccagaaaacccccctaacccccaccccagagggaccacagtcagcgtgaagcagttattttctacgctacctgtgcgccataaggaatttcaaaggaatattaagaagaaacgtgccttgcttccccttcgccttctgccgtgattgtcagtttcctgaggcctccccagccatgcttcctgtacagccctgcaaaatttgnatttcctagaagtaccccaaccccacccctgctccttggaggacaagcgtgatccctgtattcagctcttgtcaagaatggtccaggttcttctagatgatctgcacaaatggttcctctcctccttcctgatgtctgccattagcattggaataaagttcctgctgaaaatccacatctcccctgggtccggtgttctggaagtgagagagacaatgtcacacctcaaggagacagctctctagacaggaaggttattcacgtcccatgtcaagtctagctagagttcagagcaattgagaagtgcgattttatctcctgcctttcattctataccctgcttctgaaccatcgtgttcaactgtgaaactcacgctttggtgaccctgactccaaaacttaatacacccaaggtcagccccagtgatctgcttcatagcaaggactttgggtgggtcttcccagggagtagggcacccttcagagaatgtggctttggacttcatcacagctggggccttttgtgtcacttcagatctaaacttgtaaccgtgctagatctgtttctaacgtgacaacatcacgaaccacgagtccagaagcctaatccataatcctccctcctcatgacaaagtctcatgctctgtgctcaacatggttagctgcacaagatgtaaaccaaagcttcactgaaccctcgacccagatcggtaactcaagtgcatcaatcataatgaacctccccgaactcagtatttatgattatttttgaggcagggtctcaatctgtcggccgggctgggagtgcagtggcaggatcaggg

SEQ ID NO: 114565 - DNA, 750 bp, Homo sapiens
gggccaaagccaccctaggcccccaccagaaccaatgggttttcccagtgaaagacagcaggaaccatcctttccatacttaggattttctttgttttaccatcagatttgggttatgtttgagtgacttttattgcttcagccacttagctttctggtttattgggatgctctgcttctggccgccctgaaaggctggcactgctgaaaaacccgcctccctcagggcaagcaggggctggagtgatgaggccatgtagtattagttccgctgagcagctgctgctggcaatttctggtgttggaaaagaatgggaagctgttccagttagaattaaagcttacatcttaagagagtgttttctctctcctgagagagtctgcagatatgcagccgctggctccaggaagtctttagggaccccacgtcgccttccccagggtactgggatctcctactcgtgggacaaggtggagacgtttgttttcctggcagcagtttggaaactgccggcgcgatacttcggctttcaccccatttgctggaacttagtcccgtggccgtacccagatgcagagaagccttggaaatatgcccacttaaaaattccattatgtgaaagaagacgagaaaggggggatattaggggccaaagagcaacctctgtcacagaaccttgggaaagaaacagtgagatctttaccattatttctcaaggaaaaattgcttttcatacaacatatgtttaa

SEQ ID NO: 114566 - DNA, 585 bp, Homo sapiens
gagaaacgagatgggggtgaagctggagatatttcggatgataatctacctcactttccctgtggctatgttctgggtttccaatcaggccgagtggtttgaggacgatgtcatacagcgcaaggtgggcataagaggagtgtttgagggttcattccaggggtgggagagggtgtggggcagcagtctgctggggactaatgtctgcctcccataagccgaccctgccctgatgtggggctctggaggcctttggctcgtgtcccatttgtgacttttccttacagagggagctgtggcgcacctgagaagccatgacttcaagagatagaggaattcaaagagaggttacggaagcggaagcggcgggaggagaagctccttcgcgacgcccaacaaaaactcctgaggcctccaagtgggagtcctagcccctcccctgatgaaatatacatatactcagttccttgttattcaaaagaaaaaaaagaaaattttttttattaaggggccgaaggttttttcctttaagggggggtaattttaacttggccctggcccgggttttaacaccgtgggaacgga

SEQ ID NO: 114567 - DNA, 413 bp, Homo sapiens
atggggaagtgggatggaggttttaatttcatggtcttttgtgttttggaaaatacctgcagtttgaacaggtctttgctggaaaacctcatctttgctacactcaagatcagctggggtggtgcagggattaagggctggaatcatatgaaggctcagttgctcacatgtgtggtgtttgatgctggctttcagttaagtccacagggttctctagagcaaaagcacctcatcctttaccctgaactcacaggacctatagagttggacccaatttgttaccaccaccatctttcaaatctgctctcacaaacacccaaagcatcctttgaagttttacaccagaatcactgaaaagcatccagcagattttctactggcagctttcaaggagcagctgtagctgaaaagac

SEQ ID NO: 114568 - DNA, 1578 bp, Homo sapiens
tttcagtctgaactcccacctgtctttccacctcagcattcaggatagttgttgatataaggaaagtacttggatacttgtagtcaaggacatacctcatgctgagaggggggccatggtggtgctgaaggctgccagatgcatgaagccaccagaatgcgtcagtgggatcagcgggaggtaaaagttctatttttgtgaatgtgaaatcagtgtgtccggaattggtgggttcttcgtctcactgacttcaagaatgaagctgcggaccctcccggtgagtgttacagttcttaaaggcggcgtgtccggagtttgttccttctgatgttcagatgtgttcggagtttcttccttctggttggttcgtggtctcgctggcctctggcgtgaagctgcagaccttcacgatgttacagctcataaaggcagtgcagacccaggataagcagcagcaagatttattggaaagatcaaaagaacaaagcttcctatgtggaaggatgccgttgactccagagccgccctctgggcgcgtggaggggccccccgcatgggaagcagccccatggccctcactgccctgtgggccctgcatccccatcatgctggtcctggccaccctggctgcgctcttcatcctcaccaccgctgtgttggctgaacgcctgttccgccgtgctctccgcccagaccccagccaccgtgcacccaccctggtgtggcgcccaggaggagagctgtggattgagcccatgggcaccgcccgagagcgctctgaggactggtatggctctgcggtccccctgctgacagatcgggcccctgagcctcccacccagcaacttgggcccccagaccgtactggaggtcccagcccggagcaccttctgggggccccagccctgggaggggaggccccccgccacaggcctgtgtttaccgaagccaccaataccaaagagaacgggtcctgcggtgctgaacagcctcggtgtggcgatgacagctggcaggagatgacaggaatccagtttcccagagccacaaatcctgttctccttggccactcacccactgtgaggtcctctaggaaaatacacaaagagaggaccagaccaggcagaggaacattttgtttcatatgaactgtggctttgacccccaaactgcaaggaggaacttgctgggccaagctgcagcggcgctgtcttgctggagtggggacctagagtcagagaaaacccacaggctcctctgcccattctcctccatctgcacacgtctcagcctcggaccctcaccactccatggtgaggaaggccatggccaggggaaactgagtttcatccaatgtggagaggagcgttgtccagagagacagatttgccacaagctaggcttacttataatgctccaccctacagaaatgggaccccaagtacccgatcttccctttaggagaggcaggcaggtgggtgagcagcagatgtagtttccatttccctgggggtttaattttccaaactttgtcttttttttttttttttttttgagacagagttgagattctgtctc

SEQ ID NO: 114569 - DNA, 888 bp, Homo sapiens
atgaggcctgtggaccccgatgggactgagcattcactcttctgcccactgacagctttacggggaatggtgaactcgagaatccagaagtctccagggaagcccagtgtgtgcgacgtgcctcttcctatctcccctgggcagtcttcccagctccatggaaaagtctttggtcagctgaacgcaggcaaggctgctgaattcctgaagtccccgcctgaccaccaggcccaggcagcatccacctctgggccacagaagacgaccctgagcaaacgtggcttaaggctccaaccctgtcaactccactcagccccacactccttccagctccttccactcacacaaaagagcacctgggacttgagaggcagcgcgcctctccacgcagcacagacttcactttccgagttctcctgccaccgacctgacgtggaagacacacttggcacaaaaggaccagacaaaacccagtgccagtcagagaattccacacggccacagtacagtccagaaaccagccagaaccagcccgtgggcaagggaacagacctgaaagtcacaaagcttggcgtgccctccctgatggcccaagatggggtcaactactcggtgaaaacagaggcccattccacaggcaccactgctgagcctctgagttcccaggacagggctgtccgaggacacaacactgacagccatgtgcagacccccgacctgggcgaggataccgccctctgagactcagtcgcctgtctacaaaaaaggaaaagataccacattaccgtgaccatctagtctaatgaaaatgccaccaggatcaaagaccataacgcaaagccctctgtttgcaccttagtccgaacaagcacccaggatacactcgct

SEQ ID NO: 114570 - DNA, 796 bp, Homo sapiens
gggagatccaaatgatctgacccaaccacagaatggccagaaaaaggttgcaagtcagaacaagggttggtggtctggccaaacagtgacagggcaaactatcaatcaagacccagaagagtggtggtatgaaggaggtgagtatgggactggtgtgggagactcaatcatggaagtgggggaaatggggaaaagggagtgtgaggagatgtggatttgtctgaaatcccttctgtgggcttctggggatttctgtggctgtgaggatttctctaaatacccgcaggacagactagtgcagattcagtatgtgaggagaccacccaaaagcatggatactagaaggcgccaatcgcagggggccatttcagaagctgactaccacaaccaaggattaaagagagtttcttcagccaaaaggcgaatgtctgttgagtggaaaggagaggacggagtcgatgttgtcccctgtgagatgtcatgtctcaggcagtatgctggacattcccgagacgccagctctgctcaggtgacttgtgtgccctgcccttgtaagcctcgaattactcatcgtgaaattgagttttctgctgcagccatttggacagtgttgattagttttcctgaggtgctgtttgggcgtctccccagccacctaggtacagatggagtgtgtttggcttgtgatggtgacagaggggcggctgcccttcctcgtacttcttctggcattgaagaagcagctctgaaatctccaactgggataggccaagaaaatttggatgtggatacatga

SEQ ID NO: 114571 - DNA, 456 bp, Homo sapiens
atgcccaaggagccagggaaggccttgcggtgggaagaccggtctaagggaaatagccaagaaggcaaagccaggcgtttgaaagctgtaggaaaaatcgttcgggaaaaagggaatgaatggcctataggaagaggatgtattaatgttcggacaaaattcaagggtttaacatctgttctgaaacttgttttacgttgttacagaaagattactggctgttcggtgctggcatcctgctataaatttgttcgcttgctgaagcagaaagaactggctcatatgcaggctcttgcagaggaatggaagaaaagggaccgagaaagagaatcactagtaaagaaaaagggaacctcagcttctcaagcacgcaaaggaacaaagcatggagcggagaacaactgtgagcaagttgagacgaagaaggcatcagaagaccgaaatactctgaattaa

SEQ ID NO: 114572 - DNA, 487 bp, Homo sapiens
ttttccgggttcggagccgttccggatgctttaggctgccggatgtctgatctccggataactgaggcgtttctgtacatggattatctgtgttttagagcactttgctgcaagggaccaccacctgcacgaccagaatatgacctggtttgcataggcctcacaggttctggcaaaaccagtctgttgtccaaactctgcagtgaaagccccgataacgtcgtgtcgaccacaggttttagtattaaagcagtgccattccagaatgccatcttgaatgtaaaagaacttggaggggctgataacatccggaaatactggagccgctactaccaaggatctcaaggggtaatatttgtattagacagtgcctcttcagaggatgatttagaagctgctagaaatgagctgcactcagctctttcacattcacaggtatgcactttaccctttttaatattggccaatcatcaagacaagccagcag

SEQ ID NO: 114573 - DNA, 834 bp, Homo sapiens
atgcacagactttctcagtacagccttaagtgtaatcctagaaggcactggcaaatctctgccaggccaatctgcagtcgaaaacgagtgcatgtgtccaacaagatgacaggagggtcaatgtttctaaccgttacttcaactctgcatggcaatagcggttctgcccaacatgcacagcctggcctaaacagccgggttccaatccgtgcacagtggaaccgcggacgcacccaagaccggaatggtggggctatacctgtccctactcagtccgttcgtgccagcctgcgaggtagtttagacccgtctgctttatgggagagaggaaaactctgctcccccggaaagaaagtcctctgcggagagcgcagagggaagccagaagccgatcgcgggcaggggacgcgccgccgcggccgccccatctctcagcagccccagcgcgaccctcgccctgcagccgtgctggcccaggccgcactttacctgtcagctccaccacccacccgccctggaggctgcccctccggtccagggaaaggcttaccagccggctgcgggagaaagaaccccagaggatcctatcccaaagaaagaaagcaaaaaggctgctcctcaaggcaggggccatcgggcacgccgagatccgagaggcgacatgccacccctgccctgccctaccagataatccatgtacagaaacgcctcagttattcggagatcagcatccggcagcctaaagcatccggaacggctccgaacccggaaaaaaaagcagcgtctctggctgcgagcgagcagctcctgaaaaagccagcaacaggaaaatag

SEQ ID NO: 114574 - DNA, 246 bp, Homo sapiens
atgtcctgttcctcccggtgctctggcaaaattaactgcgtgctgttaactaggaagcctggacagatgcaggctcagaacgcccagcagctccatgaacgaatccagtcctcgagtatggatgccaagctggaagccctgaaggacttggccagcctctcccgggatgtcacgtttgcccaggagtttataaacctggacggtatctctctcctcacgcagatggtggagagcggcactgagtaa

SEQ ID NO: 114575 - DNA, 372 bp, Homo sapiens
atggcacatcatgccaagacccgtaagccagaaatgaagctcctgcagcatgcatttgacgaggaccattccaatgacacaagggaactgatgtcagaggctaagagggggccagtgacaccagaggggatacacaaataccactgggttacaactgcctatggtattcagtacagtaacacgctgtacaggtttacagccgaggagcaacaggctctacaatgtggcccagagctgcagctccccaggctggctgaggccacacctacacagctctgcacacggcacctagcaatccaccaggtggaacaggagccctcaggacagccccgcaccgacacgtgcgccagcggtccacagaggatgcgctaa

SEQ ID NO: 114576 - DNA, 411 bp, Homo sapiens
tgatcacactggcagttaggaaaattgctatgatgggtgagttgtcctcctcacctccaagccaactctgaatcaacatgatttcttcttcagtgtgtcaaccagggaacaagcagtcacatccacagtcttcaaactcttatctgtccttctcattggttacttccaggagctgtttttcttttattttggtttccttctgctataatatccttcaccttcacatgcaatttggtgtccatcagcttcagtttttgagaacggatgcactggataccagcattatggggtttgagaagccttgatcagggaagaatcatagacgcaggacatacaggtctcagaaatgtctctcacaaggctgctctagaaatcccggtagacaaggtgaagatacaggaattggatccg

SEQ ID NO: 114577 - DNA, 484 bp, Homo sapiens
ttaatttgaagctctcaaattatttattttcaattcaagtgaagacaattaggccactgcagtcatttcctcatctgaatcacttgattcatcgtttagttccaattcccccaaatcttggtctacagttatagtagttttcctcttgcacgtcttgggaattgcatcattagcgcaaatttttctcattttaatgtttggtaatttcttcagatcaaagtcccattccctaaatgttttcagattacttgcatttagaatgtctggaatctctttcaattagttcacaagcatctttctttgaatatctcttttttgggggatcaagatgattttgaaaccattgcagtttttcaccaacaaggttgagacgcaaggccttttcattcttcaatttttcctttttttcttgtttgtgggcctctctcgtaatttgagctgcttttctactatatggatggatgactattttttcccgtcctgc

SEQ ID NO: 114578 - DNA, 459 bp, Homo sapiens
atggacttcaggacctggaagcagacgcacttaaaatcttccatgccgacataccaagatccttccaaatgggttcttggcctcgctgacttcaagaatgaagccgcggacccttgcgtggtctcactgacttcaggagtgaagctgcagaccttcgcagtgaatgttacagctcttaaagttggcatgtccggagttgtttgttcctcccagtgggttcgtgggcttgctgacttcaggaatgaagctgcagacccttgcagtgaatgttgcagctcggaatgggactttgatctgaagaaattaccaaacattaaaatgagaaaaatttgcgctaatgatgcaattcccaagacgtgcaagaggaaaactattataactgtagaccaagatttgggggaattggaactaaacgatgaatcaagtgattcagatgaggaaatgactgcagtggcctaa

SEQ ID NO: 114579 - DNA, 1887 bp, Homo sapiens
gtctggctgtccgttgggctagagcttaaaagcccaacacgggcgaaaaagacgcggtctcagttaacggggacgctttagagaaacgcactcgcctctcctgttccggttgggtcggcgcgggcttctcaggcgccacgtgggattcggctccgggtgctcttgtgagctgctgctcctgcgggtggtgagattacctgggtctagagtgcggagctgctccgtggccacgaggacgtcaccatgcccaaagcaccaaagggaaaaagtgcaggacgggaaaaaaaagtcatccatccatatagtagaaaagcagctcaaattacgagagaggcccacaaacaagaaaaaaaggaaaaattgaagaatgaaaaggccttgcgtctcaaccttgttggtgaaaaactgcaatggtttcaaaatcatcttgatcccccaaaaaaagagatattcaaagaaagatgcttgtgaactaattgaaaggtacttaaatcgattcagcagtgagctggagcagattggagttacataacagtatcagggacaggcaggggaggcggcacttgttcccgggagacccgtcatcaagcagacgatggagcgggagcgacagcagttttggaggggatatgggccttgagattccagacattctaaatgcaagtaatctgaaaacatttagggaatgggactttgatctgaagaaattaccaaacattaaaatgagaaaaatttgcgctaatgatgcaattcccaagacgtgcaagaggaaaactactataactgtagaccaagatttgggggaattggaactaaacgatgaatcaagtgattcagatgaggaaatgactgcagtggcctaattgtcttcacttgaattgaaaataaataatttgagagcttcaaattatattcattgattatggtacctaattgtcatgatacaaaaatttgatactgacattctcttatatgatgagagtttcatttgcgtttcaaaaatggtgttatgatacttattttaaaatgaagattgcttttcatttccattaagttgctaaaatagatagatgtgatctgcagaagttgtttagtcttcatctgaatttcaggctgggagggagcaatataactaaggacaaaaaatgttttgtttttcttgtgtatttatgatcacctaatttcacgttttgtgaaatggacagtaacctgtttcctgaaagattcctgtgggtactttttgagctgtgataatagcaaaattgtttttcggtaataatatcacactaatgcttcttttaaacattaaacctattttccttttttacagaataagggaaaatgtgataagaagtttgtatacatttctggattatagattattatttatcttttgaaccagaggctaatggtacaagtaaaaaaaatcagtgatgattgttaggtggatcccccacaattaatttatcttttgacaagggggataaagagtttccagtttagctcccttttgattgtatattattttttgcttttttattgtgaaaagaggtaggttttatttgtggagagagagttgaagattagggaaccagtgattttaattatgctactttttcttctaagagataaattgatatatcattcagtgtcatgaaaaacatgaatgttgtacaattttctdhcctcaaaaaactttttaaatgtaagtatccttatttttttttttaaaagagcacaatgtaggtgtatttgagtattttcaagaaaagaataaaaacattaatgcagtattaggttaactggatatcaactaagccttgttaacagttaaagtattataactttttttaacttctgaaaattaaaaataaaatttwtttctgc

SEQ ID NO: 114580 - DNA, 424 bp, Homo sapiens
  misc_feature (1)...(424): n = a,t,c or g
cccacgcgtacgacaggcccttcccgaccgtagcgagggtgctgctgcgctgggggaaggaaaacgccgctttgactgtgccttgttctcacagctggcgggaagcaagcgccttttcgaaagccagaggctcgagttacccctcttaccaccgtcatggcagtcccagctggtcacctgacttttgaatgccgcaattttctccgagtagaccctaaaagggacatagttttggatgtcagcagtacaagtagtgaagatagcgatgaagagaatgaagaactgaataaattgccggcattacaggaaaaaaagaataattgaggaagaggaaaagaataaagaaaaaagcacagaaaaaatcaaattgnnnnnnnnnnggaaaagggcttactcatccagttccactgaagaggacacttca

SEQ ID NO: 114581 - DNA, 624 bp, Homo sapiens
  misc_feature (1)...(624): n = a,t,c or g
gggaaaacgccgctttgactgtgccttgttctcacagctggcgggaagaagcgccttttcgaaagccagagntcggagttacccctcttaccaccgtcatggcagtcccagttgttgaaattacctccaacattcatgtcagtgattcaccactctccatgaagagctgaactggcacaagtggcaacgtaatgttactgatgtaattggcacgaaactgttttcttattatctccttcactgaagccctatagccaaggttgcaacaaggacagtgtcagagcaggctgtaaaaaatgtgggctaccctgggtcacctgactttttgaatgccgcaattttctccgagtaggaccctaaaaggggacatagttttggatgtcagcagtacaagtagtgaagatagcgatgaagagaatgaagaactgaataaattgcaggcattacaggaaaaaagaataaatgaagaagaggaaaagaagaaagaaaaaagcaaagaaaaaatcaaattgaaaaaaaaaaaggaaaaggtcttactcatccagttccactgaagaggacacttcaaaacaaaagaaacgaagatatcagaagaaagaaaagaaaaaaagagtaaatcaataa

SEQ ID NO: 114582 - DNA, 529 bp, Homo sapiens
tgattcggttcgggaaacccgggccgacgatttcgtggagacgcacgcagctgactttgttttctttttacgactgatacagagggctccagagccttgtctctcctggtaggtttcggctcaggaccctgaatcctggcccacagacaagcctgatgggacgtgcggggtattacttgtatggggagacgcgggaaggaggaagaagcacatctgtcctccgcggcctttagctctgagcatccggccgcgggccctgactttgccgctcagtttggggcgcagcgggggccgtgccctggcggaggagcagaaggcagagggtagcagctgcggctcagcggagagactttgtgcatttgcagctaaaaccaggccctacttgtccttgctctggattgtttgggtagatactgacagggcagataccgtcctcacaatacctgcccagaaagacgagaaagaggaggaagaattcctccttccaccaggaattctgtgggaagcacataagatttcatgctactag

SEQ ID NO: 114583 - DNA, 1400 bp, Homo sapiens
ctccttttctcgttcacgttctctttccctttctcgttcccgttctcgcctatctcgttccctttcacgctccctctctctttctctccgttctttctcaatttcctgtctttctttgtcctttaggcctttctcttcttccagtttattatgtgtgtctctgaatatgctgatctctcgagatatcaggtctcttttgtcttcttccatttctatagcatttatatcctccttagtgatgagtggataagggatcagtggggcccctggaaatctgcggaaaatgacgcacgcagcctgactttgtcttctccgcacggctgttacagaggtctccagagccttctctctcctgtgcaaaatggcaactattaagcaaaaactcattgcaccagttgcggaagagcgaggcgaacagttccaaacaataagatcacctgtagtgggtgttggacaagttggtatggcgtgtgctatcagcattcctgggaaagtctcctggcctgatgaacttgctcttgtggatgttttggaagataagcttaaaggagaaatgatggatctgcagcatgggagcttatttcttcagacacctaaaaattgtgggcaggataaagattatttctgtggaccgccaaattctaaagatttgtaagtggtaactgccagggagtcccgtccagccaagaagggggaaagtccggctcaaatctgggtgcagagaaatgttaatgtcttcaaattcattattcctcagatcgtcaagtacagtcctgaattgcatcataattgtggtttccaacccagtgggacattcttacgtatgttacctggaaactaagtgggattacccaaacaccgcgtgattggaagtggatgtaatctggattctgctagatttcgctaccttatggctgaaaaaacttggcattcatcccagcaagctgccatggatggaattttggggggaacatggcgactcaagtgtggcttggtgttggaatggtgtgaatgtggcaggtgtttctctccaggaattgaatccagaaatgggaactgacaatgatagtgaaaattggaaggaagtgcataagatggtggttgaaagtgcctatgaagtcatcaagctaaaaggatataccaactgggctattggattaagtgtggctgatcttattgaatccatgttgaaaaatctatccaggattcatcccgtgtcaacaatggtaaaggggatgtatggcattgagaatgaagtcttcctgagccttccatgtatcctcaatgcccggggattaaccagcgttatcaaccagaagctaaaggatgatgaggttgctcagctcaagaaaagtgcagataccctgtgggacatccagaaggacctaaaagacctgtga

SEQ ID NO: 114584 - DNA, 441 bp, Homo sapiens
atgtctgggcaagttagggcacagcaagagcaggagggctgcttgcaggctaaaaatgagaaagtacaagaagacattgactcagatcgacattactgctcatgcctaaccttctatgaggcagagatcaatcttcaggtacaaaaacctttactagctaaagtacagtcgaaggcttgcctgggtttgatctataccgtgtatgtggacagcctgaatgtctccttggaaagtctaattgcaaacctttgtgcctgccttgtcccagcggctggagggtctcagaaaaaatggaaaatgaaagcagactgggggaacaatggtggggagcagcaaatgactttgtttgatggtcccttctgtttaggtcattccctgaaaggagaagtaaatcaaagaatgacagaagaaaataatgtccacatggatgaagcttgttga

SEQ ID NO: 114585 - DNA, 327 bp, Homo sapiens
atgcacatgtctgaaactgaaagcatacttaaaatctggctaaactatgaacgtgctccaacccatgcaaaattggtcagcaccccccagacatccaaactatgtcagctcctgcttgtgcttccaaagaggcaacacagaaacaagtcccttaggcagcttcctcaacagccagaatttgggatgcaagctccactcttccctcctccctgtacccccaagcctgagagagttgaggaaggggctgatacaggtcattccctgaaaggagaagtaaatcaaagaatgacagaagaaaataatgtccacatggatgaagcttgttga

SEQ ID NO: 114586 - DNA, 909 bp, Homo sapiens
atggcggggtacgacttaactactcgcatcacgcaccttttggatcggcatctagtctttccgctccttgagtttctctctgtaaaggagatatataaagaaaaggaattattacaaggtaaattggaccttcttagtgatgccaacatggtagactttgctatggatgcatacaaaaacctttattctgatgatattcctcatgctttgaaagagaatagaaccacagttgttgcacaactgaaacagcttcaggcagaaacagaactaattgtgaaaatgtttgaagatccagaaacgacaaggcaaatgcggtcaaccagggatggtaggatgctctttgactacctggcggacaagcatggttttaggcaggagtatttagatacattctacacatatgcaaaattccagtatgaatgtgggaattactcaggagcagcagaatatctttattttttcagagtgttggttccagcaacagacagaaatgctgtaagttcactctggggaaagctggcctctgaaatcttaaagcagaattgggatgcagacatggaagaccttacatggttaaaagagaccatagataataattctattaactttgacttagatggggctaagaaaaagctgagagaatgtgaatcagtgcttgtgaacgacttcttggtggcttgtcttaaggatttcattgacaatgcccatctcttcatatttgagactttctgtcacatccaccagtgtatcagcattaacatgttggcagacaaattgaacatgactccagatgaaactgaaaggtggattgtaaatgtgattagaaatgcaagactggatgccaagattgattctaaattaggtcatgtggttatggtaacaatgtactctcaccctatcagcaagtga

SEQ ID NO: 114587 - DNA, 560 bp, Homo sapiens
ctacaaatagagggatctgtttccgtcactcgcgccctaacgcaaagggtgggacaacccgcgcgcatgcgtcgttgtcctctgctctccagggtaaaccccgcccctttctttaggccagttttaccacagcacatgcgcagtacaggatctgtctgttcgtttgtcggcgctaccaataaagttttagtgagcacagactcccttttctttggcaagatggcggagtacgacttgactactcgcatcgcgcactttttggatcggcatctagtctttccgcttcttgaatttctctctgtaaaggaggtgagggggtctttgggcgcaaggaaggcgtgggggcggatgaggtgctgagcaaggccgaaaggtggtgtctgtagtcctaggcctgacacgtgcgaggcggtcgcgagtttggttcctggacggacactaaggatcttctggtagtttagcgtcgtctcagttaagaagcaccgcaaaatgcagttagctctctgttctgcatctgtggattcagccaactgcagattgaaaatattcagggaaagaaa

SEQ ID NO: 114588 - DNA, 1584 bp, Homo sapiens
aacctttttttttttttttttaaaatgaatcaatttaattcccaattcttcaaaatttatacgtaatatgtgtgtttccaaaagtgtgagtgaccgctttatataatagatctattatttcatctttctttgatagtttttttttttcatcttttctttatggttcttcagtagaagcccagaatcttggagttgcccccgttagggagccttctgacctgctattctgatttaggttctttctcattattcatgggccaacatctgggcttctaaaggaaaggcttttgggtcttttcaatcacttgctgatagggtgagactgcattgttacccataaccacattgacctaatttaagaatcaatcttgggcatccagtcttggcatttctaatcaaatttacaatccacctttcaagcttcttctgggagtcatgttcaatttatctggccaacatggttaatggcggatacactggggggatgcgacagaaagtctcaaatatgaagagacgggcattttcaatgaaatcctcaagacaagccaccaaggaagaagtcattcacaagcactgattcacattcccctcagctttttctggagccccatcaaagtcaaggttaacatataaaccattcaacaaattctgtaaattgggtcttttattgtgtaagaactcctgtttgataaaacttaactagatcttttagaacccctgcgacgtttcgaaacatcctttgtttgttatgactgctgatagtcaaatagcgaagaatgtgtggacacattgtctgaattgcattaagatattgtggctgataaaggaagaggtcaataatattatcgcgaccctttggggtgattgaagaaaacaaccagagaccagtgaatgagccatgttctctgctgaagagactgaagtggagaactcacagaattattatctatggtctcttttaaccgtgtaaggtcttccatgggctgcatcccaattctgcatttaagatttcagaggccagctttcccccggagtgaacttaaagcatttctatctgttgcctggaaccaggcactctaaaaaaataaagatattctgctgctcctgaagtaattccccacattcaatactgggaattttgcatatgtgtaagaatgtatcctaaatactccctgccctaaaacccatgcttgtccggcccaggtagtccaaagagcaccctaccatcccctggttgaccgcatttgccttgtagtttcctggatcttcaaacatcttcacaattggttctgtttctgcctgaagctgtttcaggttgtgcaaccactgtggttcttttctctctcaaagcatgaggaatatcatcagaataaaggtttttgtatacatccatagcaaagtctaccatgttggtatcactaagaaggtccaatttaccttgtaataattccttttcattatatatctcctttacagagagaaattcaagaagcggaaagactagatgccgatccaaaaaagtagccgatgcgagtacgtcaagtcgtactccgccatcttgccaaagaaaagggagtctgtgct

SEQ ID NO: 114589 - DNA, 826 bp, Homo sapiens
atgggcaattctaataataattctaacagtgatgacagggtttactgttcccattttgtgtccacgtgtactcagtgtttagctcccacttacatcagaggcaaagaggaaccctcattcagagaccacctgcaccagcgcttccgggctgggtcagaaaaacaggtcgtcctcgccgcccgcgccgggcgcctgcagcaggttcctcttctgggagccagcacgcagccagagctccagggaggggggtgcacccggggttagtccaggtcttggggaagatgttgagaagatggtatgtcgctgtcttacctggctgagtagccacaagcaacaagccaaagggcaccctgaggggagaacactgtggctctcagtggccgcctcgggagaaacagcagcagctacacctgcaggcctgcaggggagaggaactttcacccacgtgggggcccctcctccactgcagctcttcatcttagaaagatgccagggaccccccaatgtgagggccgcagagctgtgcccagggctttacccgaaacctgaatgcttcagggaccaggcacaaccaggtgaagccctccagggcctctcgccttctcacccccatcaagccccacaggtcctcagaaggtcaaaagcctcggaaacagttcagccagaacaattttgccacccaaatggtgactcaaggagggaggcagaagaatgcgtttctggcaaccagaactgtgaagaaatacatttctgttgtttgaagccatcagtaattggtgacggcagccccagggaacaaatacaccaagtgttcgcctggctttga

SEQ ID NO: 114590 - DNA, 340 bp, Homo sapiens
tgctactcaaaatgtggtcctcagaactgcagcatcagcatcatctgagagcttgttacaaatatcaattcttgggactcacctcaaatcttcagagggaggactccagaatctctgtttcaccaagctctccaagcaactgttacgcgtgctaaaatttgagaagcacactgtttgccttgactgcttaaaacaaggaattcatgggcaagtcagaagatgagtgcttcccaaaaattttcctgtgacagatgcgtccttccaagtatgtacaccaaaaagagggggaaaaaatccaataacctgtaacaccacaataaaaattgcaatgtgtttcaag

SEQ ID NO: 114591 - DNA, 1909 bp, Homo sapiens
gctacattcttgaagatatacggaagagacgtattattaatgcttgacatatatcatcttgcctttcttggtctagactgacttctaatgactaactcaaagtcaaggcaactgagtaatgtcagctcagcaaagtgcagcaaacccatctcccacaggcctccaaaccctggctgttcacagaaccacaaagggcagatgctgcacagaaaactagagaaggggtcataggttcatggttttgtttgagatattgttgctactgtttttctgttttgaattttcttctttgtgctgattttactttatttaaggggactaggtgtttctgatattttagctttcttgtttggtttgctttgtgttgtctgcgaatggggctttaactgtggatgaatggaccttatctgttggcttaaaggactggtaccatcagaccattttattcttcacgtgaatgttttactttccaaagtgctctcctctgcaccagcagtaataaatacaatgccataatcccttaggtttgcctagtgcttttgcaattttcaaagcacttccataagcattccttccacctccttgataggcatttatggaaagcctgctacatgtcaatcatactgttaggcacaggggacctaaagacacataaaaggatgggatttctgctcattaaattgcaaaacctaatgaaagtgactgcttggtaaacaaattattattattttataaaatgctataaaagagccatattgaaagtgccctgttggagacagggcaaatgccacaaaaatgatgtaaatttacatggaggaaaagtagaatctgcctggtttgtaggcagcagaagacatttttcatcagtgggcaggtgttctttaccttttgtagaaatgggagtcaagtctcaaataggaggctccacaaaatctcatgccaggtctctgataccttattcacagaagttctttgaagtatttattgttattttctttgacttatggggaaaactggggacacaggaagacaggtaaattacccaaccttcacacgtttaagtccaggaactggggagccataatttttgtatcccctgggtataaatagacaatctctcgaagaaatgaagagatgaccatagaaaaacatccgagatatctccagctctaaaatcctttgtttcaatgttgtttggcatatgttatctttggaatttagtgtctgagcctctgtctgttactgtagtatttaaaatgcatgtattataatcatataatcataactgctgttaattcttgattatatacctagggacaatgtgtaatgtaagattactaattgggttctgcccaatctccttttcagattttattaggaaaaaaaaataaacctcctggatcggagacaatgtattaaatcagaagtgtaaactgccagttctatatagcatgaaatgaaaagacagctaatttggtccaacaaacatgactgggtctagggcacccaggctgattcagctgatttcctaccagcctttgcctcttccttgcaatgtggtttccatggggattttgcttcagaaaagccaagtattgggctgttcagaagttcacacctggcatttcctcagctcttctagaggggctaagagacttggtacggggccagggaagaattatgtggcagagctccttggaaattaatgcagattaggtggcatttttgtcagctctgtggtttattgttgggactattctttaaaatatccattgttcactacagtgaaaatctctgatttgaccgtgtactatccacatgcattgctttcatttttccctcgccgctcagtatatgagcgcacaatgtaggtaatgaccatctcatatttaattaaatggtatagtcg

SEQ ID NO: 114592 - DNA, 211 bp, Homo sapiens
atgggttatttaatgagtctcgtggatgagaagaaaaagcctacccaactgctactggattttgctgttacagacaatcttagtagtgactgtggaagcacagttgatacggatggggcagtaccaagccatcgcatgggaggatagttgctgtgggagagtcacacagattcttcacctgactttgtttgagcaacctttaagttcctga

SEQ ID NO: 114593 - DNA, 395 bp, Homo sapiens
gtgcttcaaaacaacaaacaaatgacagcatggtgagaaagagtttgacacgtgtggcactgaaaagcttcctcgtattgtcaaagccagtaagccccgaattggactccatttccttcaacatttattctcctaatagcctaagcagaagtagctccagcagcaacctgtttactaatccttaaaatttaaacaaggccgatcagtcagggctgggagtatttacatcaccagcaattcaccatggccttcagctgtagttgctacctgtaacacataataagcaacttggaagcaaacaagaaatagacaaacaaattagttccaagctcctagagggctaacctacatccccgatcctttaaaaagtagagcaaaaatcagggcatatcaat

SEQ ID NO: 114594 - DNA, 789 bp, Homo sapiens
atggtgagaaagagtttgacacgtgtggcactgaaaagcttcctcgtactgtcaaagccagtgggagaggccttgcatctcaccagaggggctgaaagacagctggctgcggtgaggggacactatgtgaccatagaatgcacaacttcaactgcctcaccctggggcctttacatctgtctccctgggatcccagttgagcagatggacttcaggttagcatccactgtgaccctggcctatggtaacagcaatgacagtaacagcaatgccagtgatctagtgaagtcaattgaggcagatgatgatgatgacaacaaagatgatgatgaagccaaggctctccctaccgaccaaacgctcaacaatgtggtcactccttccctagtgacaaacccccacagtcagccattggctgggacaacgaagggctgtatgttttatgacatcgttcatggccaccaaactgccacttctactccttggaaatcagccaaaaactccaagccacctcctttcccaaacatctttcttcgaggacaaggtatattcccagaagaaatgtgtacatctgtgcatcaagaaacatgtgaaaatgttcaaggcagcattgtttataataacttcaagctggaaacaacccatgtgtccatcaagaactatacgcagcaacatgaagaatccacaaacatgaaaatgagtgaaagaagccagatgcaaaaaagggcacacagcgtgattccatttatgagaggtttaaaaacaagcaaaacaaattgcagtgcctaa

SEQ ID NO: 114595 - DNA, 374 bp, Homo sapiens
ccacccagaccaagacctgttcccactgaacgggtcttccctggagaacgatgcattctcagacaagtcggagagagagaaccctgaggagtcagataccgagacccaggaccatagccggaagacggagagtggcagcgaccagtcagagacccctggggccccggtgcggagagggaccacctatgtggagcaggtccaggaggagctgggggagctgggcgaggcgtcccaggtggagacagtgtcagaggagaacaagagtctgatgtggaccctgctgaagcagctacggccaggcatggacctgtcccgcgtggtgctacccacgttcgtactggagccgcgctcctcctgaacaagctctccgacta

SEQ ID NO: 114596 - DNA, 907 bp, Homo sapiens
atggggcttaccacctgtggtgatgatgctgcgtctccattcctggaaagacctggagaaaggtcacagaggaaagcacggcccgctgcacctgccgacgcacctgcagagaaggctggcgacctggggaccatcctgagaaaccaggatatatgtgcattaccaaatacacagagccggcaggacccctgcaaccctgaccagtgcttcccagtgaagaggaccctcctccctaactccacctgcagaaacctgtgggtggccgtcagagtgggaggctggttccgagtgttctggtttgtgaccgtggagggtcgctgctggctggacgccctggagctggccctgcgctgctctagcctactgagactgggcacctgcaagccgggccgagacggggagccagggacctcgccagacgcatcaccctcatcgctctgtgggctgccagcctcagccactgtccacccagaccaagacctgttcccactgaacgggtcttccctggagaacgatgcattctcagacaagtcggagagagagaaccctgaggagtcagataccgagacccaggaccatagccggaagacggagagtggcagcgaccagtcagagacccctggggccccggccgagggccggcacccacggagatcagagggtgccacgtgggagcacgcgctcctacaaagcacaaacggctcttggtgcccacactggcacctgcttttccgacctgcagagagctcttcctgtcctggccccaggatgtgcaagacagcagggtggagatttgtgggaaagtggggcgtcctcggcagcatcaggccagtccaccgccccaggaccagccatggggacaccccacgtgcagaagctagactcacggagcatcagtgacacatga

SEQ ID NO: 114597 - DNA, 728 bp, Homo sapiens
atgctcaaccaaaagctcctatatacagaggccaattctagacactggagtgaaggaagtaggcttctagcagacattgccaaggttcttctccaggccttcaaggccctagggccacaacggctgggtaacccagatgctactaccccgcagttcccggacatgatcctctccgcctctcgagggcaccaccacgaggcgatttgtgggccataccaaggatgtgctgagtgtgccttctcctctgacaaccggcagattgtctctggatctcgagataaaacatcaagctatggaataccctgggtcctgaaggaaaaaacggtctctctgtgcgtatataaaggatgggcctgtccccaggaccctgtgagagggaagcccaatgtccaccagacttgctgctgctgccaccattagcgccgacgccaacggaaccagcgctgctgtcaccctccatgcacctgcccaccctccaaggctcctaccacttggcctccaggcccccctcctaccgctcaggccgccctcttactgctccagccccgcctaccgctcaggccgccctcttactgctccagcccccctcctaccgcccggccgccctcttactgctccagcccccctcctaccgctcaggccgcctcttactgctccagctcccgcctaccgctcaggccgccatgttactgctcagccccctcctacggctcaggccgccctcctaa

SEQ ID NO: 114598 - DNA, 944 bp, Homo sapiens
gcggaattcggcacgaggcaaggcggcggcaggagaggttgtggtgctagtttctctaagccatccagtgccatcctcgtcgctgcagcgacacacgctctcgccgccgccatgactgagcagatgacccttcgtggcaccctcaagggccacaacggctgggtaacccagatcgctactaccccgcagttcccggacatgatcctctccgcctctcgaggtacggactaagataaaaccatcatcatgtggaaactgacccagggttgggacccaactatgggaattccacaagcgtgctctgcggggtcactcccacttttgttagtgatgtggttatctcctcagatgggcaattttggcctctcaagctcctggggattgaaaccctgcgcctctgggaatctcacaaacgggcaacaacacgaggcgatttgtgggctcataccaaggatgttgctgagttgtggccttctcctctggacaaccgggcagattgtctctggatctcgagataaaaaccatcaagctatgggaataccctgggtgtgtgcaaatacacctgtccaggatgagagccactcagagtgggtttcttgttttccgcttctcgcccaacagcagcaaccctatcatcgtctcctgtggctgggacaagctggtcaaggtatggaacctggctaactgcaagctgaagaccaaccacattggccacacaggctatctgaacacggtgactgtctctccaagatggatccctctgtgcttctggaggcaaggatggccagggcattgtttatggggatcttcaaacgaaggcaaacacctttttacacggttagatgggttggggacatcatcaacggccctgtggcttcagccctaaaccgctactggctgtgtgctgccaaaaggcccagcttagaatctgggtttagaggaaa

SEQ ID NO: 114599 - DNA, 387 bp, Homo sapiens
ggggctgccttccaggaggatgatgtcatcgtgctcaatggcaccaaggaggatgtggacgtgctgaagacaaggatggaggagagaaggctgatagcgaagctggaaaagaagccccagggccatcaaaagttaagacagggaagcctgaagaagccagccttgattctagagagaagaaaaccaacttggctcccaaaagcacagcaatgaatgagagctcttctggaaaagctgggaagcctccgtgtggagccacaaagaggtccatcgctgacagtgaagaatcggaggcctacaagtccctctttaccactcacagctccgccaagcgctccaaggaggagtctgcccactgggtcacccacacgtcctactgcttctgag

SEQ ID NO: 114600 - DNA, 585 bp, Homo sapiens
atggcgggaaccctcccaaaatccaagttcccagacaccatccaggcaccagccttgcaagtgatagcactcttaacctgctacgctgacactttgctgtgtgcgggaactttccaaaccaaggctttgaccagaaagccgtgtggggctgccttccaggaggatgatgtcatcatgctcaatggcaccaaggaggatgtggacgtgctgaagacaaggatggaggagagaaggctgagagcgaagctggaaaagaaaacaaagaaacccaaggcagcagagtctgtttcaaaaccagatgtcagtgaagaagccccagggccatcaaaagttaagacagggaagcctgaagaagccagccttgattctagagagaagaaaaccaacttggctcccaaaagcacagcaatgaatgagagctcttctggaaaagctgggaagcctccgtgtggagccacaaagaggtccatcgctgacagtgaagaatcggaggcctacaagtccctctttaccactcacagctccgccaagcgctccaaggaggagtctgcccactgggtcacccacacgtcctactgcttctga

SEQ ID NO: 114601 - DNA, 606 bp, Homo sapiens
gcgcttggcggagctgtgagtgataaagagggacttgtaggcctccgattcttcactgtcagcgatggacctctttgtggctccacacggaggcttcccagcttttccagaagagctctcattcattgctgtgcttttgggagccaagttggttttcttctctctagaatcaaggctggcttcttcaggcttccctgtcttaacttttgatggccctggggcttcttcactgacatctggttttgaaacagactctgctgccttgggtttctatgttttcttttccagcttcgctctcagccttctctcctccatccttgtcttcagcacgtccacatcctccttggtgccattgagcacgatgacatcatcctcctggaaggcagccccacacgtgtggcaaacttccgcttttatctctttcaaggctcgctcagaaaacacacagccgcagcaccgaaggaagcagaccctgtgtcggccgttcatctccaggcccacaacggggcagatgaaacgcgcccgctgcaggtcatcgtgcttgtcacctttagtgtttcctttatccccttcccaggcaggattatcagaaagcttcggacgcgt

SEQ ID NO: 114602 - DNA, 987 bp, Homo sapiens
atgggagccatggacatcagctctgccatgctctactgggtggaaacaggtcactcacggtttgaataccaggaatgggacccagctgcaaagacgctgctccagcatgagcacgtccacatcctccttggtgccattgagcatgatgacatcatcctcctggaaggcagccccacactggagagggcaaacaagagagggcagattccatcaccagtcaatggggaggccacgcttcagtcccccactctcagccccaagcagtggcccccaggctccgaaaaatctgtgtccctcttcagtgcactggactcttcggtgcactggatgctcaatgcaggcactaagttttgtctgacttaccactggttgtatgccctgctcacagctgagacaagacctgaaggattgctaaagaatgcccttggtaacaactgtttctccaggaccttgtttggcttccccctggctgggtggaacccgctgtgtgcagccttcgcagggagcccacttccagctggctttggcacccactgtccctcctctcagattcactcttgtcaaggtcaccaggaatacccggtgcacagtacaacaggcacttccatgtcctcgcgggatgggtcttcccagctgcacttgacgcagctgacccaggagagaaccaacgaccctcatgcattgctttttggcaagggaaatgaaggattcaggacagtgggcactgggcacccacagggtttattcaagcagccgaagctcctgcttcagaaccttggcacgtacacccgtgggaagaggagtcggggcatcccttgctggaaataccccagccctgaaggttgctggcaaaaccaccatttaattcagaacaaaaagtctgctccaggagcccctgagagcgtcaaaaagaacaagccaactcaatgtgaagatgacgaggacgaagacctttacgatgatccacttccactttgggaacagtga

SEQ ID NO: 114603 - DNA, 416 bp, Homo sapiens
  misc_feature (1)...(416): n = a,t,c or g
tttcgtgtcagctggtccgcagggaagcctttggcttccccaccggcaatggagcggttgacgttgcctctcggcggcgcggcggcggtggacgagtacctggagtaccggaggtataaacaacataaaactgacttggaagcgattcctcagcagtgccccattgatctgccccgccaagtgactggctgccagtgcagggcttacctttatgtccccttgaatggtagccagcccattcgctgcaggtgcaaacactttgctgatcagcacagtgctgcgcctggctttacatgcaatacatgttccaagtgttcaggattccatagctgcttcacttgtgcttgtggtcagcctgcatatgcccatgacacagtagtggaaactaagcaagaaagattggctcaggaaaaacn

SEQ ID NO: 114604 - DNA, 416 bp, Homo sapiens
ttcaggattccatagctgcttcacttgtgcttgtggtcagcctgcatatgcccatgacacagtagtggaaactaagcaagaaagattggctcaggaaaaaccagtgggacaggacattccttatgcagccatgggaggattaactggtttcagctcgctggcggaaggctacatgcggttagatgacagtgggattgtaggtacaagtagtcaagtttcttcattaaggagacctgaagaggatgatatggctttctttgaaagacgataccaggaaaggatgaaaatggaaaaggctgctaagtggaaaggaaaagctccattgccatcagctacaaaaccttcatgaagactattggagaaattaaaaccatcatccaaaactaaaaatgcctattacttttgtcaaaactcaa

SEQ ID NO: 114605 - DNA, 1098 bp, Homo sapiens
cggttccaggagggaacgggacgggtcgggcttcgagggcagctggtccgcaaggaagcctttggcttccccaccggcaatggagcgggtgacgttgcctctcggcggcgcggcggcggtggacaagtacctggagtaccggagaattgttggtgaggatgatggagggaaactttttactcctgaagaatatgaagaatacaaaagaaaagttttacctctgcgcttacaaaacagattatttgtgagctggcggccaccaacagggatggattgttaacttgtgggcccagagacactgtgtttttgtacacataggcattaacaacataaaactgacttggaagcgattcctcagcagtgccccattgatctgccctgccaagtgactggctgccagtgcagggcttacctttatgtccccttgaatggtagccagcccattcgctgcaggtgcaaacactttgctgattcagcacagtgctgcgcctggctttacatgcaatacatgttccaagtgtttcaggattccatagctgcttcacttgtgcttgtggtcagcctgcatatgcccatgacacagtagtggaaactaagcaagaaagattggctcaggaaaaaccagtgggacaggacattccttatgcagccatgggaggattaactggtttcagctcgctggcggaaggctacatgcggttagatgacagtgggattggtgtaccttcagttgaatttttagaatctcccattacggcagtagacagcccattcctaaaagcatttcaagcatcatctagttcttctccagaaacgttaacagatgtaggtacaagtagtcaagtttcttcattaaggagacctgaagaggatgatatggctttctttgaaagacgataccaggaaagggaatgctgtgaaagccagagtccctctgtagcactttcaggaaactcatctgcagatgcagggcagactgtgctgccaatgaggcccaaatctaatagtaaaggtggcagggctgcagaggagacagaatgcacagccttgctagtccccagcaaagtcagtgctgacacaaaaacagtggaaccctaa

SEQ ID NO: 114606 - DNA, 1364 bp, Homo sapiens
atgcacatcatcacaccatcagcttcagagaatggcagccatttatttgtcccgtgggaaccaatctgcccttttgaagaaaagacaaaggtagaaaggatggtggaggactacctggcaagtggttatcaggattcagtgacgtttgatgatgtggctgtggacttcaccccagaggagtgggctttactggacacaactgagaaatacctctacagagatgtgatgctggagaactacatgaacctggcctctacaagaggctacagtggatggaaactctgtgactgtaagaattgtggagaggtcttcagggaacagttttgccttaagacacacatgagagttcagaatggagggaatacttctgagggtaattgttatggaaaagacaccctcagtgtgcacaaggaagcctctactggacaggaactttccaaatttaatccatgtggaaaagtctttactctaactccaggtcttgctgtacatcttgaagttctcaatgcaagacaaccctacaaatgtaaggaatgtggaaaaggctttaagtattttgcaagccttgataatcatatgggaatccacactgatgagaaactctgtgaatttcaggaatatgggagagctgtcacagcttcttcacacctaaagcagtgtgtagcagttcatacaggaaagaaatccaaaaagactaagaaatgtgggaaatccttcactaatttttctcaacttttatgcacctgtgaaaactcataaaggagagaagtcctttggaatgtaaagaatgtggaagatcctttagaaattcctcatgccttaatgatcacattcaaattcacactggaataaaaccacacaagtgtacatactgtgggaaagccttcactagatcaactcaacttactgaacatgtaagaactcacactggaataaaaccctatgaatgtaaggaatgtggccaagcctttgctcagtactcgggcctttctatacacatacgaagtcacagtggaaagaaaccctatcagtgtaaggaatgtgggaaagccttcactacatccacaagtcttattcagcatacaagaattcacacaggagagaagccttatgaatgtgttgaatgtgggaagaccttcattacttcttcccgtcgtagtaaacatttgaaaactcatagtggagaaaagccctttgtatgcaagatatgtgggaaagcatttctatattcctcacgccttaatgttcacctgcgaactcataccggagagaaacccttcgtatgtaaagaatgtgggaaagcatttgctgtttcctcacgcctaagtagacatgaaagaattcactctggggagaaaccttag

SEQ ID NO: 114607 - DNA, 1294 bp, Homo sapiens
atgagagctcagaatggagggaacacttttgagggtaattgttatggaaaagacagcatcagtgtgcacaaggaagcctctattggacaagaactttccaaatttaatccatgtggaaaagtcttcaccttaactccaggccttgctgtgcatcttgaaattctcaatggaagacaaccctacaaatgtaaggaatgtggaaaaggctttaagtattttgcaagccttgataatcacatgggaatccacattggagagaaactctgtgaatttcaggaatgtgagagagccatcacaacttcctcacacctaaagcaagtgtgtaactgttcatactggaaagaaatctaaaaagactaagaaacatgggaaatccttcactaatttttctcaactttctgcacatgtgaaaattcataaaggagagaagtcctttgaatgtaaagaatgtggaagatcctttagaaattcctcatcctttaatgttcacattcaaattcacactggaataaaaccacacaaatatacggaatgtgggaaagccttcactaggtcaactcaccttactcaacatgtaagaactcacactggaataaaaccctatgaatgtaaggaatgtggccaagccttcactcagtacacgggccttgctatacacatacgaaatcacactggagagaaaccctatcagtgtaaggaatgtgggaaagccttcaatagatcttcaacgcttactcaacatagaagaattcacacaggagagaagccttatgaatgtgttgaatgtgggaagaccttcattacttcttcccatcgtagtaaacatttgaaaactcacagtggagaaagagagaaaccttttgtatgtaaagaatttgggaaagcatttgctctttcctcatgcctaagtatgcatgaaagaattcacactggggagaaatactatgaatcggttaagatcgatggcaaggtccgaactgatataacctaccctgctggattaatggatgtcatcaacactgacaagatgggagagaattcccaactgacctgtgacaccaagggtcactttgctgtacaacgtattacacctgaggaggccaagtacatgttatgcaaactgagaaaaatctttgtgggcacaaaaggaatccctcatctggtgactcttgatactcacgccatctgctaccctgatccccttatcaaggtgaatgataccattcagattgatttagagactggcaagattactgatttcatcaagattgacactggaacctgtgtatggtga

SEQ ID NO: 114608 - DNA, 1995 bp, Homo sapiens
atgacaggcagcagcagtactagtaggaaagggacagttaaggaaggttcttgctccacacaccaagggaaatcagcaccaaaagtcctgtcagacccaacaccagaagaatcatggcaggaattggtaccagcagtaccccctccttatcgagaggaaggggtccccactcctgagcccacagcacctatacctctgccagatagccacactcctagaccacccagagtggacaaaagaggaagtgaagctgtgggagaaactcctcctttggcagctcgcttacagcccaagactggaatccaaacacccctgagagagcagcgatatactggggtagatgaggatggagacgtggtggaaaggcatgcctttgtgtgtcaacctttcacctctgttgacctcctcaattggaaaaataatactccatcttacaccaaaaagcctcaagctttaattgacttgctccaaactattatgcagactcataatcctacttgggctgattgccaccagctactcatgtacctctttaatacagacgaacagcgaaggaagttaagcctggggcccaaccagttagataaaagcagtatccggttcccagagaagctcttgaaggaatccaggttcatctcatccagggaccaaggactaccggccagcacaggacttgcgcttggtcaaccaagctacagtgactctgcaccaacagttcctaacccttacacattgttagagctgctgccagctgaggacagctggtttacctgtctggacttaaaagacaccttctttagcatcagactagctcctgagagccagaagctgtttgcctttcaatgggaagatctggggtcaggtgtcactactcagtacacatggacctggcttccccaagggttcaagaactcccctactatcttcagggaggccctggctcgagacctgcaaaagcttcctgctgaagacctaggctgcgtcttgctcctgtacatggacgacgttctgctgggacactccacagcagttgggtgcacaaaagggacggatgccctgctttggcacctggaagactgtggatataaggtgtccaagaagaaagctaagacctgcagacagcacgtacgctacctgggattcactattcggaaaggggagcacaccctggggcagaaagaaagcaggtcatctgcaacctaccagaacctaaaaccagaaggcaacttatgtacggctccttttgaggatcttcaggtggatttcacagaaatgccgaaatgtggaggtaacaattatttgctggttcttgtgtgtacttactctgggtgggtggaggcttatccaacatcaactgaaaaggtctacgagacaagaagctacagtggatggaaactctgtaagaattgtgaagaggtcttcagggagctgtttttccttaagacacacatgagagctcagaatggagggaacacttttgagggtaattgttatggaaaagacacccttagtgtgcacaaagaagcctctattggacaggaactttctaaatttaatccatgtggaaaagtcttcaccctaactccaggccttgctgaacatcttgaagttctcaatgcaagacaaccgtacaaatgtaaggaatgtggaaaaggctttaagtgttttgcaagccttgataatcacatgggaattcacgctgactgtgggaaagccttcactagatcaattcaacttactgaacatgtaagaactcacactggggtaaaaccctatgaatgtaaggaatgtgggaaagccttcactcagtacacgggccttgctatacacttacgaagtcacagtggagagaaaccctatcagtgtaacaaatgtggaaaagccttcactagatcctcaggccttactcaacatacaataattcagatgggagagaagccttatgaatgtgttgaatgtggaaaaaccttcattacttcttcccatcgtacttaa

SEQ ID NO: 114609 - DNA, 279 bp, Homo sapiens
atggagcatctaaggagacccatctcaagagaacaaaatgatgttattctattaattatggacctgaagccgggtccaggtggcttgttgtcagaggccccaaatgaaaaactcttcttcgtggacactggctccaaggaaaaagacacttttctctaccagatgaggaagctgcctctgttcctggctagctatctccttcttatgaatgctgaaaacgattcggacaagcggtcctgcatctaccgcaaacatctcagcatctctccagtcacgtga

SEQ ID NO: 114610 - DNA, 748 bp, Homo sapiens
tttagattaaaatgtatatatttcaaaagagaaaaggaagcagtaagaaataagatagaggagggcctttgacaagatggcggcaggaggcagtggcagttggtgggaagcgcacgtcgaaaagagatgccgattctggtttcctggggctgcggcccacttcggtggacccagcgctgaggcggcggcggcggcgaggcccaagaaataagaagcggggctggccgggggcttggcttcaggagccgctggggctggaggttgaccagttcctggaagacgtgcggctacaggatgcgcacgagcggtaggcttgttgtcagaggccccaaatgaaaaactcttcttcagtggacactggctccaaggaaaaagggctgacaaagaagagaaccaaagtcccagaagaagtcacttgcttctcaagaaaccccttccgggtttgacctcatcctccgagaacacatccaaagtccctgccccccaaagacgtcctccgcccaccaggttccccaaacgccaagaagctcaggcggtaaggagcagctatgggagaagctggccaagcagggcgatgctgccccgggaggtgcgcagggcccaggcccggctcctcaacccttctgcaacagatgccaagcccgggccccaggacaccgtagagcggcccttctacgacctctgggcctcagacaaccccctggacaggccgttggttggccaggatgagtttttcctggagcagacc

SEQ ID NO: 114611 - DNA, 678 bp, Homo sapiens
atggttcagacattttcccgttgcatcttgtgttccaaggatgaagtggacttggatgagttattagctgctagattggtaacgtttctgatggacaattaccaggaaattctgaaagtccctttggccttgcagacctctatagaggagcgtgtggctcatctacgaagagtccagataaaatacccaggagctgatatggatatcactttatctgctccatcattttgccgtcaaattagtccagaggaatttgaatatcaaagatcatatgggctctcagggaacctctgggcagccttgttgggagggaagtcattaacaggatggccaaactctccaacaaagagaaaaagaagaaactgaagcagtttcagaaatcctatcctgaagtctatcaagaacgatttcctacaccagaaagtgcagcacttctgtttcctggaaaaacccaaaccgaaaccacagctgctaatgtgggcactaaagaagcctttccaaccatttcaaagaactagaagttttcgaatgtaataatacttccacagcaacaggtgctagagaccactgttgttgttttgaatgaatggtggttaggagaaagactttggtggtggaagaaagaaaagcataaaacaaagactactgaaatatagataaagattgccttagttttta

SEQ ID NO: 114612 - DNA, 1717 bp, Homo sapiens
tttcttaaatcaaatcaagctgtattgataatgatgatttagcaggaaccactctaaaaatcagaaacaattagaatgccttccccatcaaattattttattaggttaattaaacagcttaaagatgattccttttgtgtggtacccttctagaaaatatttcaagttttgaagtgaacttccaatacataaaacaaaattactttagcatacacaaatttcagatcaaaatacaacactctgtttctgttttcttacagttataaaatccagtcaatacaaacgtacataaaaaagataaaacactttcactgatccttggttcaagaaaaacagcttgaaggcaaaattgttccccaagcacaggtcctgggttcgtgagaagggaccaaccccacaatatactgaagcatgtaaacaaagtgcgtgctacttaatttaggttaacaaatccctttttgcatcagtattacttgtaaaccataaagcaacttttaaaaagaaaggttattaattaaaaattacttctgactgctaaatttcttatcagcaagtgaacagaaaattattccacaaaacaaactagtacctttggaccacaggatgtgagacgtgacatttcaatgaaatcaacttagcacgacttctctactatcctactgaacttggggagtacaattttacaagttgcagccttctagcacttccaatattttgaactttctaaacctgcctatttagctatgattttcattgcaaatccctgtttttcagtagtaggactttattaaagataggataatatcacacacaatacaatcttcactgaatatgtgtctaagcagacctacttggaattctactagataataaagttgcaggatttaaaagaaatactattctgcaggtcccatgtcagaaaacacagatatgttcaacagattggtgtggtatttatatggtattcgtggcattttccttatagtattcaaagcatcccaaatgacccaatcaagactgttaaaaaccagtcttggacaagggtgacagtcacatactcgagggtccagcacaacactggcatgagccaacaggagccacgccggccacctgctgggccagggaccactgcaaagagcagccctgaatttgggagggtcaaatcgaatttacaaatcttgttttcaggaatttcccttaaatagttttcttcaaggccagaagacctatacccgtgatggaaaacaaaagaatgtacacatttctagtgtgtcatgaatgggtctcactcacagataggtacagacatcactgtcactgctaacacacaatgaagtctgcctacgcctacctgaggagcatccgcgataccgtttctgatgaggacaggactctgcggagggcctcccaccaccccatgttgagaggtgacataatcatggtggcagcaacagtggtcactgcacacaaggcactctcccagctgcttacagtcatcacccagttaatcctcacaacaacccgcagaggcaagctgacagacactagggaggatggaggcgaccacgtgtggagtgcagaaggcgcataccggaggaaggtgagggatgttccacagatacatggaacaaatcacatcattcatgattttcagtatcatccaactctatatagttctgccaacctcaactctgcactgaggaaacactttaagtga

SEQ ID NO: 114613 - DNA, 1349 bp, Homo sapiens
caatttggagggctcagaagaagacaggaaaatgtgggaaagtttggaacttcctagatacttgttaaatggctttgaccaaaatgctaatgatatggacaatgaaatccaggcttgggtggtctcagatggagatgaggaacttgttgggaactggaataaaggtgactcttgctatgttttagcaaagagattggcagcattttgggtgtattcagagggtgcaagccccaagccttggcagcttcgtgatgttgagcctgctggagcacagaaatcaataagtaaggttggggaacctctgcctagatttcagaggatgtatgaaaacgcctggatgtccaggcagaaatttgctgtaggggcaggatccttacggagaacctctgctatggcaatgcagaaggtaaacgtggggttgaagtccccacacaaagtacccactggggcactgcctagtggagctgtgagaagagggccaccgtcctccagaccccagaatggtagatccactgacagcttgcactgtgtgcctggaaaagctgcagacagtcaatgccagcccatgaaagcagccaggagggaggctggatgctgcaaagccacaggagcggaactgctcaagaccatgggaacccacctcttgaatcagcattgcataaatgtgagacatggaatcaaaggagataattttggagctttaagatttgactgccctgctggatttcagacttgcaaggggcatgtagctcctatgttttggctaattcctcccatttggaatggctgtatttagccaatgcctgtacctccgttgtatctaggaagtaactaactagcctttgattttacaggctcataggtggaagggacttgccttgtttcagatgagactttggagtatggacttttgagttaatgctgaaatgagttaagactttgggggactgttgggaaggcatgattgatttttaaatgagaggacatgagatttgggtaggggccccagggagagaatgatatggtttgggctgtgtccccccatcccaaatatcaccttaaattgtagctccccataattcccatgtgtcgtgggagggaccctggtggggagataatttgaatcataggggcattttctcccttactgttctgggtggtagtgaataagtctcatgagatctgatggttttataaggggaaacctctttcgcttggttctcatttctcccttgtctgctgccatgtaagacatgcctttcgccttctgccatcattgtgaggcctccccagccacatggaactgtgagttcattaaacctctttttcttcataaaaaaaaaaaaaaa

SEQ ID NO: 114614 - DNA, 1384 bp, Homo sapiens
tttttttttttttgttttgttgattttgttactttattaaaaattgaatccttgaacttttttaaaattaactcctaatccttgtagaataagtgtacttcatgcttcatactctggaggtactggctgtgctgctctgagtctttcagggagcaccatcactgtgcagcccaagcttttcccagacacttctggacaagtgctcctaagaggcacattcacaagcaaacatgatccaaacagcacatgcagattcagggtaagtaaatactcggacacgaactgccagtcgcacttggtctccacggcaacagattatttcttcacagaaaggagatcgaagacatgtggcaaatgcacgtcttgcatttctatacacaaaatgtattgggaaccctttaaatgtgtgaccatcaggtacagcccttcttatggcatcttgaaattcttcattgcctgctgatatacttgttgtacgctcaaattcataagaagccaaagctggtgataaaaggtaggagagctggtcttcccaaacagtagtgaggccaagatctctgttgtcctggctgggctgccgtggcgtggtctcggttccttgctctctgtgcctcgcaggttccagcgtttctcgtgtctctgtctcttgggtctctgggattcgctctatctttctggttggcctggtgctttttgtttttttagtcgggcctggctttgtttttgttgtctgggctggtctcttcgtcctgacctggggtggtccccccctttgggcgtcccaaagtgctgggattcctggggtaattttctgttgctcgtccctgttttcctttttttcaccaaaagacctattgatatttgttactgacgcgtcaattgtggatgcacacagaggtggaaagggaggaagggatgttgtagctccaggagcacacacagatttaattgcttcctcactcatgggtttccatttggattcatcgttcaaatcaaatacacaggtttctactgcatcagagggttgacaatttcccaggaacatctgatggttgaaaacacaaccaattgttcgatatgggtacagtggtttgggctgttcagcaactggaggttcatcaggattggtaggtttatggatgtacctgtgtcctgttaaactctcccaaaaagtgatggccccatcagttccacaagtcataacccatgcatgaggtactccttttgccttggtcccaacacaaacaaaggcttctaatccatatccaagaagaagggctttgctttctgtatgctttctgtccttctgggtggtgtcgcatatatttttaaaaccacattcagtgtgatgaacacttgttggtacacttctaaggttagtcat

SEQ ID NO: 114615 - DNA, 1501 bp, Homo sapiens
atggatgtccatggtagaataagagaaatccttgctgagactatacgggaagaattggcacctgatcaacagcatttatcaacagaagatttgatcaaagcccttagacgtcgaggaatcattgacgatgtgatgaaagaacttaattttgttactgttttgggtggaaaagctttcttggaacatctgcaagaacctgagcctttacctggacaagtttgttcaacgtttactttatgtttacattatcgaaaccaacgttttcgttctaaacctgttccatgtgcctgtgaaccagattttcatgatggctttttacttgaagtacacagagaaagcttgggtgatggaactagaatggctgattcaacaacaatgttatcaataagtgatccaattcatatggtgctaatcaaaacagacatatttggtgagacgactttagtagcatcatattttctggaatggccgatcggttttgggctcagaaaatggagtgaccagtctgactgtggaacttatgggtgtagactgtggtggtgattccaggaatctacacgtgataaaactgcacagaacttacacgcacacacaaatgagtgcatgtaaaactggtgaaacctggatggactgtattgtttcaggttcccaggatcttggcctcactactgtttgggaagaccagctctcctaccttttatcacccagctttggcttcttatgaatttgagcgtacaacaagtatatcagccgggcaatgaagaatttcaagatgcccataagaagggctgtacctgatggtcacacatttaaagggttcccaatacattttgtgtatagaaatgcaagacgtgcatttgccacatgtcttcgatctcctttctgtgaagaaataatctgttgccgtggagaccaagtgcgactggcagttcgtgtccgagtatttacctaccccgaaccctgcatgtgcctgtttggatcatgtttgccttgtaaatatcgcctcggtattatagggcccaatatttatataagatttatacctgtgtttaattggaattttacacattgtacattacttagctatttagaggtttgttattttaaaatcacaatctggcttgaatggcatacttcaattttgtatatacttgactggtaatgtttaaaaaaaatcatgcattcctttaaaaattaaggctgaaaaacttgtataaatctccctggaatttagtataaattaagtgtatattctattttaataaatgctactttgtttacagttatcagtagtttaaatattaatataaaatgcattcagttttctttacacaaacaggtaatcaaagagatgtttgtctaagggtttgagccctagacaaatcagtatgatcattacttttcacaggttaatggaattattttatacagattaggagaaattaacctcatgacagatttatttattgcattggtgaaaataaatgttaatgaattacca

SEQ ID NO: 114616 - DNA, 501 bp, Homo sapiens
cagagtgagactctgtttcaaaaaaaaaaaatcatttccttggtgcaagctggagggtggaggaagagggagcaaactcaggtcctcacccgtgcccccatgtagaaaggcagactgtggagcccaaggtgtgaccctgataagaaactggtttaagaaagattcacacagggtgtgccccaggagggtagaggcaggcgttatcccattgtcccctggtgaccctggccccagaggcctttatcctttcagtctccaaggcaaggatttccgaaggtttcagggaaaaatgcccaagcccatcccccacgacttgaaaaactagtctgttagattcaagagcccaacacttaggtcaatggcaggggcaggggtttcacagacctccctcctggtggccccggtgctccagagaggagatcagctcagtggacaaacatttggccaactcttcacaattgccagggtgtggaaccagctgagttgtcaacagagaagccg

SEQ ID NO: 114617 - DNA, 1076 bp, Homo sapiens
ggcacgaggtggtggggggtcgccagcaggttccctctccccggccccagctctggacgctcaccccagtgcaacgccctgagtgacggaaagaggtctggcggcttctctgttgacaactcagctggttccacaccctggcaattgtgaagagttggccaaatgtttgtccactgagctgatctcctctctggagcaccgaggccaccaaggagggagccaagacaatgcaaactcccagttgaacattcccgtgcctgtgctccggctgccccggggccctggatggcttcagccgtggctttggcgcctgaatggacgcagagccccccttgaggccagaggttcctgaaatccaggagtgtcccatagctcaagaatccctggaatcccaggagcagcgggcacgagccgcccttcgggagcgttacctccgcagcctgctggccatgggtgggtcatcaggtgagcttcacgttgcaacgagggtgtgcgtgtggccgcccactttgggagccaccgacctgggatgtgggccaacttcttacgtgttcacagctgcagattcccataggtgttgcaagcagaggcgctgttccgatgttagttgacattattttcatattacctttcaagccttaaagatattgtgtttcatttttctgcttgaggctaaggcactgtatcccatggcctgccaatgttcccgaagccaggaactctgggccccatggagttatgagctccccttggaattttggagccaagctttaagcaagttctgggactcctgagaccttcctgggtcttagttcagttaaaatttctggcaactctaggaattctaagatcccattggaaggaattgctctacctcacagaactctgaaccctacaggaaatatgggcttgctgccatttcctgaagacccgggcatcggggtggggtgataaaaggatacaacctgcacagggcgaagttattaaagaggctgcaaagtccagccaccctgaagatactccccagtgctccccccctgctaaagaaccagttaccccaggaaaaaaaaaaaaaa

SEQ ID NO: 114618 - DNA, 1842 bp, Homo sapiens
gtccctcccacaacatgtgggaattatggaagtacaattcaagatgagatttggatggggacacagaaccaaaccatatcagtatctgaagagatgatgttccaagcagaggaaatagccagcgcacagaaaatgtggaatcagcatcatatcacaccttccaaagttgaccacatagttggaagtaaagcactcttcagcaaatgtaaaagaacagaaattataacaaactatctctcagaccacagtgcaatcaaactaaaactcaggattaagaaactcactcaaaaccgctcaactacatggaaactgaacaacctgctcctgaatgactactgggtacataacgaaatgaaggcagaaataaagatattctttgaaaccaatgagaacaaagacacaacatgccagaatctgtgggacacatttaaagcaatgtgtagagggaaatttataacattaaatgcccacaagagaaagcagcaaagatgtaaaattgacaccctaacatcacaattaaaagaactagagaagcaagagcaaacacattcaaaagctagcagaaggcaagaaataactaagatcagagcagaactgaaggaaatagaggcacaaaaaacccttcaaaaaatcaatgaatccaggagctggatttttgaaaagatcaacaaaactgatagactgctagcaagaataataaagaagaaaagagagatgaatcaaatagatgcaataaaaaatgataaaggggatatcaccaccaatcccacagaaatacaaactaccatcagagaatactgtaaacacctctatgcaaataaactagaaaatctagaagaaatggataaattcctcaacacatacaccctcccaagactaaaccaggaagaaattgaatctctgaatagaccaataacaggatctgaaattgaggcaataattaatagcctgccaaccaaaaaaagtccaggaccagacggattcacagccgaattctaccagaggtacaaggaggagatgattgaaaaaaaggcctttgacaaaagtcaacagcccttcatgctaaaaactctcaataaattaggtattgatgggacgtttctcaaaataagaagagctatctatgacaaacccacagccaatatcatactgaatgggcaaaaactggaagcattccctttgaaaactggcacaagacagggatgccctctctcaccactcctattcaacatagtgttggaggttctggccagggaaatcaggcaggggaaagaaataaagcatattcaattaggaaaagaggaagtcaaattttccctgtttgcagatgatgtgattgcatatttagaaaaccccatagtctcagcccaaaatctccttaagctcataagcaacttcagcaaagtctcaggatacaaaatcaacgtgcaaaaattgcaagcattcttatacaccaataacagacaaacagagagccaaatcatgagtgaattcccattcacaattgcttcaaagagaataaaatacctaggaatccaacttacaagggatgtgaaggacctcttcaaggagaactataaaccactgctcaacaaaataaaagaggacacaaacaaatggaagaacattccatgctcatggataggaagaatcaatatcatgaaaatggccatactgcacaaggtaattgatagattcagtgccatccccttcaagctacaaaggactcttcacagaattggaaaaaactactttaaagttcatatggaaccaaaaaaggccccgcatttccaagacaatcctaagcaaaaagaacaaagctggaggcatcacgctacgtaa

SEQ ID NO: 114619 - DNA, 1570 bp, Homo sapiens
atgctgaagtactacagcacgcatttaccaccgtctccccgggacctggtggaggcgtctgtcacagtccctggtgaaggacacctggagtgccttcatggggcctgtagccccagccctggtcccacccccacccgcgaagctgctctcaggggagaacccagaatacagaccctgccggtggcctctgccctcagcagtcaccgcaccggccctcccccaatcagccccagcaagaggaagttcagcatggagccaggtgacgaggacctagactgtgacaacgaccacgtctccaaaatgagtcgcatcttcaacccccatctccccctgctgccagtccagagagcacgtgcactgccccatgacacccactgctccggggttccaggaacaaggttaaggttctactacaaagacagtcatggccaaggcggctggtctggcagtctagaagaagggggggctgtgcagggtacccagccaaggcagagtccagaggaagtcaaggaagagtatgaatgtccctcccacaacacgtgggaattatgggagctacaattcaagatgagatttgggtggggacacagccaaaccatatcagatgtccaacatcgtcagccatcaaggaaatgcgaatcaataccacaaagagataccactaacacctgttaggatggctatgatcaaaagacaatacaaaagtgttagcaaggatgtggagaagctggaacacgtgtacgctgctgttccactccacgatacctgcctttcttacacggtcacccatatgctgcttctcttcattcacccgttaagtctctgtgcacccctggtagcaagcgtaatgagacaggagggactcgacgccctcagaggctgccgtgtgaacaagactgccaatggagactgccgcagagacccccgggagcggagccgcagccccatcgagcgcgctgtggcccccaccatgagcctgcacggcagccacctgtacacctccctccccagccttggcctggagcagcccctcgcactgaccaagaacagcctggacgccagcaggccagccggcctctcgcccacactgaccccgggggagcggcagcaggcagaacctggctctctggccattgccactgctgttggggagtccctgaaggacacgggaacatctgtcagccctggggtccacatatctcctagccagctggacaacaggggtcatctggaatcccacactgggacctatgccctcttccctccacctttccctggcctcttctacattcagggccagatctcggccaggtaccactttggctctgtggcattgggtataaaggaaacagcactggacttggggcaagacgctcccaattttggatccgggctctaccagccaccagctctctgtgggctagctcgtttctcaggactcagtttccccgcaggaaaatacatctctccattttaccaccaaccatacagaggttatcaaggatacataaaacaactggaaagcacagacccagaacctggcaccgagcagggcctcaggaaatgttaa

SEQ ID NO: 114620 - DNA, 1734 bp, Homo sapiens
atggggggatcctctagactcagctggggtcagcccccagtgatgcttttttggcaggtggagaactggacacgcacagctgaccaagcgaggctacttcagaataaaattaacactgagttacaaactgaagtggcaatgttgaaatccatggttctgtggttaggagaacaggaatcactgaccctggaggatgtggctgtggagttcacttgggaggagtggcagctcctcggccctgctcagaaggacctgtaccgagacgtgatgttggagaactatagcaacctcgtgtcagtggggggatcctctagagtcgaccgcagtgcatgcaactcagtcccattctcctcagaggattcacccgggaagaaccccttagagggccaagaagtgggaaaagcccttcacccccaaagtcagtactcaaatgaccaccaaagaacgcaaccagaaaagaggcccggattttgccgatttcggaaccaccatcaaacaggattttcgcctgctggggcaaaccagcgtggaccgcttgctgcaactctctcagggccaggcggtgaagggcaatcagctgttgcccgtctcactggtgaaaagaaaaaccaccctggcgcccaatacgcaaaccgcctctccccgcgcgttggccgattcattaatgcagctggcacgacaggtttcccgactggaaagcgggcagtgagcgcaacgcaattaatgagatgggacaagccatgtgggtgccctcaaggtgcatgcgaccatggaatgggagactggaggaacccagggtggccaaccatgggcccagtccctctctgtacgagctatgagtcagctgagcctgagtgcaaagatggagagaaggccaaccagagtcataagggattttgccgatttcggaaccaccatcaaacaggattttcgcctgctggggcaaaccagcgtggaccgcttgctgcaactctctcagggccaggcggtgaagggcaatcagctgttgcccgtctcactggtgaaaagaaaaaccaccctggcgcccaatacgcaaaccgcctctccccgcgcgttggccgattcattaatgcagctggcacgacaggttttccggactggaaagcgggcagtgagcgcaacgcaattaatgttcttcgtcccttgtatgtcaacccaaggattcactggggatctagaactgcgcaggccagtctaggaagagagagacaggaaagagaagaagaggagagcaaaggctatgaaataaagaactctgttgagtttactggaaatggggactcctttcttcatgctaaccatgaacgacttcatactgcaattaaattccctgcaagtcaaaaactcatcagcactaagtcccaattcatcagtcccaagcatcagaaaacacgaaaattagagaagcatcatgtgtgcagtgaatgtgggaaagccttcatcaagggggtatcctctagagtcagcctaggtatctctcttaaatgtgtgatcaaggaattaccaccaatacagaacagtaacacaggagaaaaattccaagcagtgatgttggaaggacatgaaagctatgacactgaaaatttttacttcagggaaatccggaaaaatctacaggaagttgactttcaatggaaagatggtgaaataaattataaagaagggccgatgacccataaaaacaatcttactggtcaaagaggttcgacatag

SEQ ID NO: 114621 - DNA, 810 bp, Homo sapiens
atgattattatttacaaaaaagaagaagaagaaggaggaagggaggaggagaaggaagagaaaagaggagaaaagaagagaaaagaggagggagaggagagaaaagagattttgagaatgaattacgatgtgagcctggcacgacagactaaaggaattgggcctcctagaaaggccacttttatgcctgacggcgactatccagggtcggaggcgtcccagcgtttgcgcagatgcaagatggccgcgccctcgtcgccttggctcatgggggccgccatctttgagtatctgacgtacacaaggcaaagggcggttttggcgctggtgaccggggggacctttgacattcagggatgtagccatagaattctctcagaggagtggaaatccctggaccctgtgcagaaagctttgtactgggatggatgttggagaactacaggaacctggtcttcctgggtctccacagactataccataaaagtgcatttttctcaccctcctaaaaatccctggactcctagttttactacaaataaaccaggattctatttccagtatgaaaagtttgtcagaaaaaaagagactggcctgcgcagttctagatccccagtgaatccttgggtgacatacaagggacgaagaacctataggaaagggaaatctctagctctcgaggtggctttttggatgtctggatgcattcataaccatcctcgtgttgcagaaaggggtcctgatccagatcctgaaaccgccattgcaaattataatgagaattattacagtgaaagggatccgacctaa

SEQ ID NO: 114622 - DNA, 1548 bp, Homo sapiens
gccctttcccttgcgggtcgcaccccgcccaggcccctctcccgccccaggtctctcagtcttttttctcagggcgtgtagcttcctgcacacccggaagcagatcgcgcggggaaaagatcacagcgctgcgcgtcagtttccgtctacctggactaaacatttgcttcgccccgtctgcctgaatcgaacgtgcacttggcagtcttcccttgtccatacccgtttcctggggatcgctacggaccttaaaataccagcaacagccccttcgccccaaggtcttgctctgtcagactagagtacagtgccatgatctccgctcactgcagcctcaacctcctgggctcaagcagtctttctgcctcagagtgctgggaatacagaccggaagccaccacgccaggcctacgagatttgacttgtaaagaattaattatattgactgagagagaagcccagaagaggaagaagaggaaagaaaaggagtcagggatggctcttacacagggaccttttgacattcagggatgtagccatagaattctctcaggaggagtggaaatccctggaccctgtgcagaaagctttgtactggggatgtgatgttgggagaactacaggaacctggtcttcctgggtatccttcctaaatgtatgaccaaggaattaccaccaatagggaacagtaatacaggagaaaaatgccaaacagtgacgctggaaagacatgaatgttatgatgttgaaaatttttacttaagggaaatccagaaaaatctacaggaccttgagtttcaatggaaagatggtgaaataaattataaagaagtgccaatgacctataaaaacaatcttaatggtaaaagaggtcaacatagtcaagaggatgtagaaaacaaatgtattgaaaatcagcttacattaagctttcagtcacgtctgactgaactgcagaaatttcaaactgaagggaaaatttatgagtgtaaccaatctgagaagacagttaataacagttccctagtttcaccacttcaaagaattcttcctagtgtccaaaccaacatttctaaaaaatatgagaatgagtttttgcagctgtcattacccacccaacttgagaaaacacacattagggaaaaaccttatatatgtaaagggtgtggcaaagcctttagagtgtcttcaagtcttattaaccatcagatggtacatactacagagaaaccttacaaatgcaatgaatgtggcaaagcctttcatcggggctcactactaactatacatcagatagtccatacaagggggaagccatatcaatgtggtgtatgtggcaagatcttcagacaaaattcagatcttgtaaatcaccggagaagtcacactggagagaaaccgtacaaatgtaatgaatgtggcaagtcctttagtcaaagttacaaccttgcaatacatcagagaattcacactggagagaaaccttacaaatgtaatgagtgtgggaaaaccttcaaacaggctcatgcctcactacacatcagataa

SEQ ID NO: 114623 - DNA, 462 bp, Homo sapiens
atgatgcaatggaattgctggaggatcttaatgatttaagaatggagggagtaacaaccctggtaccttctgggagcaaatttaaccaaggccgtcctacttaccctgctgagcctcaggccaaggtcacactgaacatctgttcaaggtgtgccaggcttcaaggagacaacctggaagaaaggacagaagagtcactaccaatactccattctccagatgaaaaaatcccagattcattcgattccttgcctgggactgaagaagcactaatggaggagggtgacgaatttgagaaagcatctaaactaacaggacctggagaagcctccagtggagtaggacactcactgaaaaactacatggaagaagatgaatccttaaagcaattgcaggtagttcatcaaccatggatcttgccaagtgacacagaaagtgaaggagtggaagcagaacaagaga

SEQ ID NO: 114624 - DNA, 567 bp, Homo sapiens
atgcaatccccaagtcttacagcttcccacgtggtgttgggcctgctgctgcgcaaaagacgagagttcagctttgggagcctccatctagatttcagagaatgtatggagatgtctgaatgtccaagcagaaatctgctgcaggtcagagccctcaaggagaacctctgctacagcagtgcagaggatcttaatgatttaagaatggagggagtaacaaccctggtaccttctgggagcaaatttaaccaaggccgtcctacttaccctgctgagcctcaggccaaggtcacactgaacatctgttcaaggtgtgccaggatttttggacgttcgagaatatctgtgatatgtggaagagaaattcaggaaaagcctaaggccacccagagaataagcatcctacaattagggaatgaaaacagtatactggccgctatgaaaaagaataaaatccttttcgtcctttgcagcagcatggatgagctggaggctattattttaagtgaaatagctaagaaacagaaaataaaataccacatgttcttgcttataagtgggagctaa

SEQ ID NO: 114625 - DNA, 567 bp, Homo sapiens
atggtgccctgtgtcccagccaccccagctccagccgtggctaaaagggccccagtgaagaaggatgtgtttgcttcctcttctgccatgactataaagagaaaatcagccaggagctccaaagagacctactctatcaaagatccaaattccacgtgtgagaaccaggaaacgaaagagtctcagatccacactcctgtaacattttataagggcatgtttggcagctctgatctgaggctcacgcagcctgactcagatcaagctgcatttgcgaatccagtgctggagggaaggggagtttgggagaagcaattactgggttgcatcggagacaccattgtatctcctgcattcggtgacagagtctcacttttctccactgtcagtgattgccctgagtgtgatgacagtgctcaagtgtctttcaaagcacgtttggctcaaacatatacacatttgcaagcttgccaaggccttcgagtacacatggatgttctaaatgataaaccagtgccagtattagctttaactaacactgaacgctttgggaaaagtaatgcatga

SEQ ID NO: 114626 - DNA, 789 bp, Homo sapiens
atgaccccagatgcctttggagacccccgggatcgaactactgcgtggcccatccggtcaagagacgaagcaatcccatacggggtggaccttcattccgcgacacctgtcgtaggggggggggcgaccatttgcggcaagctccgccctcgcggtgcgatccgaagcaatcgatatgtcctttcttcccaaaaacgcacacccaacaaaaaaactggaagcctctgctttgagaatgacattcaagacagtagtgcggaggacatcagcatcacaggtccagttgaacagctgatgaatctaccccgaacagtccagcgaaaccctatttttcgtccagatggggttttaccgcggccgccgggaataaagagaaagtcagccaggagctccaaagagacctactctatcaaagatccaaattccacgtgtgagaaccaggaaacgaaagagtctcagatccacactcctgtaacattttataagggcatgtttggcagctctgatctgaggctcacgcagcctgactcagatcaagctgcatttgcgaatccagtgctggagggaaggggagtttgggagaagcaattactgggttgcatcggagacaccattgtatctcctgcattcggtgacagagtctcacttttctccactatccctaaacagcagcaaaacgaaaaataccaagtgcctcaattcgatcaatcaacgattaaaaatattgagtctgcaaaagacttgatgtgtgggacagctggccgctgcaaaacgctgacggaacagtag

SEQ ID NO: 114627 - DNA, 3187 bp, Homo sapiens
cgccgcagccgccggcgctgtggagatattctctaagccgctttcatcatgggagaaatagagcagaggccgaccccaggatcacgactgggggccccggaaaattcggggatcagtaccttggaacgtggacagaagccgcccccaacaccttcaggaaaactcgtgtccatcaaaatccagatgctggatgacacccaggaggcatttgaagttccacaaagagctcctgggaaggtgctgctggatgcagtttgcaaccacctcaacctcgtggaaggtgactattttggcctcgagtttcctgatcacaaaaagatcacggtgtggctggatctcctaaaacccattgtgaaacagattagaaggccaaagcacgttgttgttaagtttgtggtgaaattctttccgcctgaccacacacaactccaagaagaactcacaaggtacctgttcgcgctgcaggtgaagcaggacttggctcaaggcaggttgacgtgtaatgacaccagcgcagctctcttgatttcacacattgtgcaatctgagattggggattttgatgaagccttggacagagagcacttagcaaaaaataaatacatacctcagcaagacgcactagaggacaaaatcgtggaatttcaccataaccacattggacaaacaccagcagaatcagatttccagctcctagagattgcccgtcggctagagatgtatggaatccggttgcacccggccaaggacagggaaggcacgaagatcaatctggccgttgccaacacgggaattctagtgtttcagggtttcactaagatcaatgccttcaactgggccaaggtgcggaagctgagcttcaagaggaagcgctttctcatcaagctccggccagatgccaatagtgcgtaccaggataccttggaattcctgatggccagtcgggatttctgcaagtccttctggaaaatctgtgttgaacatcatgccttctttagactttttgaagagcccaaaccaaagcccaagcccgtcctctttagccgggggtcatcatttcggttcagtggtcggactcagaagcaggttctcgactatgttaaagaaggaggacataagaaggtgcagtttgaaaggaagcacagcaagattcattctatccggagccttgcttcacagcctacagaactgaattcggaagtgctggagcagtctcagcagagcaccagccttacatttggagagaggtgccgaatttccagggggccagagctgccggcgaggaaaggaaccgaaggtttccgccggggagccggggtcgcacccgagccctgcgccgaggagaagccccgcgggtaacaagcaggcggacggagccgcctcggagcccacggaggaagaggaggaggtcgttaaggataggacccagcagagtaaacctcagccctcgcagccaagcacaggctccctgactggcagtcctcacctttccgagctgtctgtgaactcgcaggggggagtggcccctgccaacgtgaccttgtctcccaacctgagccccgacaccaagcaggcctctcccttgatcagcccgctgctgaatgaccaggcctgcccccggacggacgatgaggatgagggccggaggaagagattcccaactgataaagcgtacttcatagctaaggaagtgtctaccaccgagcgaacatatctgaaggatctcgaagttatcacttcgtggtttcagagcacagtgagcaaagaggacgccatgccggaagcactgaaaagtctcatattcccgaattttgaacctttgcacaaatttcatactaattttctcaaggaaattgagcaacgacttgccctgtgggaaggccgctcaaatgcccaaatcagagattaccaaagaatcggcgatgtcatgctgaagaacattcagggcatgaagcacctggcggctcacctgtggaagcacagcgaggccttggaggccctggagaatggaatcaagagctcccggcggctggagaacttctgcagagactttgagctgcagaaggtgtgttacctaccgctcaacaccttcctcctgcggccactgcaccggctcatgcactacaagcaggtcctggagcggctgtgcaaacaccacccgccgagccacgccgacttcagggactgccgagccgctttggcagagatcacggagatggtggcacagctccacggtacgatgatcaagatggagaatttccagaagctgcacgaactcaagaaagatttgattggcattgacaatcttgtggttccgggaagggagttcatccgtctgggcagcctcagcaagctctcggggaaggggctccagcagcgcatgttcttcctgttcaacgacgtcctgctatacacgagccgggggctgacggcctccaatcagtttaaagtccacgggcagctcccgctctatggcatgacgattgaggagagcgaagacgagtggggggtgccccactgcctgaccctccggggccagcggcagtccatcatcgtggccgccagttctcggtccgagatggagaagtgggttgaggacatccagatggccattgacctggcggagaagagcagcagccccgcccctgagttcctggccagcagcccccctgacaacaagtcccctgatgaagccaccgcggctgaccaggagtcagaggatgacctgagcgcctcgcgcacatcgctggagcgccaggccccgcaccgcggcaacacaatggtgcacgtgtgctggcaccgcaacaccagcgtctccatggtggacttcagcatcgcagtggagaatcagttgtctggaaacctgctgaggaaattcaaaaacagcaacgggtggcagaagctgtgggtggtgttcacaaacttctgcctgttcttctacaaatcacaccaggacaatcatccccttgccagcctgcctctgctcggctactcgctcaccatcccctctgagtccgagaacatccagaaagactacgtgttcaagctgcacttcaagtcccacgtctactacttcagggcggaaagcgagtacacgttcgaaaggtggatggaagtgatccgcagtgccaccagctctgcctcgcgaccccacgtgttgagccacaaagagtctcttgtgtattga

SEQ ID NO: 114628 - DNA, 1824 bp, Homo sapiens
atgaatgatccgaacagctgtgtggacaatgcaacagtttgctctggtgcatcctgtgtggtacctgagagcaatttcaataacatcctaagtgtggtcctaagtacggtgctgaccatcctgttggccttggtgatgttctccatgggatgcaacgtggaaatcaagaaatttctagggcacataaagcggccgtggggcatttgtgttggcttcctctgtcagtttggaatcatgcccctcacaggattcatcctgtcggtggcctttgacatcctcccgctccaggccgtagtgaaacttatctacgatgctgatgtgatgctgctgatccatcctttgaggatgcctacagaagctgctcttactgcaagtgcggttcatggcatcaacctcacccaggagcttgttagaaatgcaggaccttgggcctcctcccagacttactggggtaagaagctgcagtttaacaagatccccagtttgatagataggaatagattaaaactgactctcagatgggttctggaaggagccacagccctggccatcctccctgagaagagacagagtgagtccatcagcggcaggatactctgccttgacttcacagctaatcatatttccccagatctgagaagagactcagcagaatctaagggccccagaggagaatcagatatcattaacccttttattggagatgttattggttttctctgcctgccaggccctgtttcatccctgatacgatggttggttgtcatcgccttccttgacactgctgtgtggctgccagcactctggttagtgtggtctctccccgcctttaagagttgcaggccactgagtcctgttgccccgcaacgctgctgcggcactgctgcttctataagaaaggaagatttcctccttgaattactaaagccatctgagccttttagtgaaagcctgcttattccattcctctctcctttctccttaggtaactggggaaatgcacttgaagacagcttcagacaacagttaaagacaccaccttgtatctcatcaactttgccgaacacctactctgtctgttattcagctggctgcaataaaagcagaaagaaaagcgcatccccaccagaaaagcagcacttagagccactcaagaaagatcagaatcgtgggattgtactggtggttgggcagatagacaccgctggtcagatcaccctcataattgtcatttgtttgggaccgggaccgggatcgggaccgggatcgggacgcttgttctctaagaaggtcgtattcgctatctacgtcactgcagtcaatgaaaggaatggaagtactgctgcctctggcagcccgggatgctggacctgtgcttggctgcgggggctgaggtttactctgctgggtcctatccttaacgacctcctcctcttcctccgtgggcgccgaggcggctccgtccgcctgcttgttacccgcggggcttctcctcggcgcagggctcgggtgcgaccccggctccccggcggaaaccttcggttcctttcctcgccggcagctctggccccctggagattcggcaccttctccaaatgtaaggctggtgctctgctgagactgggtggggtggggaaaaaggtgcggagagatagagaagagggagactgttattccaaggctgaaaacagaaaaggagagccaggcaagaacacccgaggcctctgcggcgggagaactgccccggagctctctggcctagcagcaatcacggaggcacatctgggcatgatccagaaggttccttcagggcgtggcggctga

SEQ ID NO: 114629 - DNA, 1413 bp, Homo sapiens
aaacttatctacgatgctgatgtgatgctgctgatccatcctttgaggatgcctacagaagctgctcctactgcaagtgcggttcatggcatcaacctcacccaggagcttgttagaaatgcaggaccttgggcctcctcccagacttactggggtaagaagctgcagtttaacaagatccccagtttgatagataggaatagattaaaactgactctcagatgggttctggaaggagccacagccctggccatcctccctgagaagagacagagtgagtccatcagcggcaggatactctgccttgacttcacagctaatcatatttccccagatctgagaagagactcagcagaatctaagggccccagaggagaatcaggtatcattaacccttttattggagatgttattggttttcttgcacagagctccctccagataaagagaaaatcagccaggagctccaaagagacctactctatcaaagatccaaattccacgtgtgagaaccaggaaacgaaagagtctcagatccacactcctgtaacattttataagggcatgtttggcagctctgatctgaggctcacgcagcctgactcagatcaagctgcatttgcgaatccagtgctggagggaaggggagtttgggagaagcaattactgggttgcatcggagacaccattgtatctcctgcattcggtgacagagtctcacttttctccactgtcagtgattgccctgagtgtgatgacagtgctcaagcagcagacccagcaatgaatgatccgaacagctgtgtggacaatgcaacagtttgctctggtgcatcctgtgtggtacctgagagcaatttcaataacatcctaagtgtggtcctaagtacggtgctgaccatcctgttggccttggtgatgttctccatgggatgcaacgtggaaatcaagaaatttctagggcacataaagcggccgtggggcatttgtgttggcttcctctgtcagtttggaatcatgcccctcacaggattcatcctgtcggtggcctttgacatcctcccgctccaggccgtagtggtgctcattataggatgctgccctggaggaactgcctccaatatcttggcctattgggtcgatggcgacatggacctgaggtttcaaaatggtaacaataattttctggaaactccacctcaccctgtaaaagtgaagattgggcagggtcagcccctctcagagctgagcgtttcacaggatgaagtgtctttcaaagcacgtttggctcaaacatatacacatttgcaagcttgccaaggccttcgagtacacatggatgttctaaatgataaaccagtgccagtattagctttaactaacactgaacgctttgggaaaagtaatgcatga

SEQ ID NO: 114630 - DNA, 1572 bp, Homo sapiens
atgaaagaaacaaaacaccacaacaatcctgtgtccttgattgaggtgaatgggctgagacacctccacgaccccaagggtgcacaaacatcaaaacctgtcagtttaatgtctgatgttcagctaatgtctgagtcatcaaaaggaggatttgtgggagtatccaaccctgtaacaaacgtatgcagggaccaggaagccgactggagagaaatgtgcatggcctcatctgatccaaatcggtgtcataagaacatgttggaagaaatcagattggtcctgggaagtgccagtcatcttttagggctgcagctcattataaaaatgttcacagcagatagaatcttgcttcagcaccgcactattttagagctggcagacacagaaatcgctcatatttacacaatgagcattaaggtcaagtttcaagccctaatcctcagaaaactgacatcagaatcatcaatactgttagtatttagtgtgtccatggagaaacttatctacgatgctgatgtgatgctgctgatccatcctttgaggatgcctacagaagctgctcctactgcaagtgcggttcatggcatcaacctcacccaggagcttgttagaaatgcaggaccttgggcctcctcccagacttactggggtaagaagctgcagtttaacaagatccccagtttgatagataggaatagattaaaactgactctcagatgggttctggaaggagccacagccctggccatcctccctgagaagagacagagtgagtccatcagcggcaggatactctgccttgacttcacagctaatcatatttccccagatctgagaagagactcagcagaatctaagggccccagaggagaatcaggtatcattaacccttttattggagatgttattggttttctcaccaacaaccagggccctcaggacatgaccctgagagtcctccttgacgtggttctcatccgcttcactcaaataattcaccatgaagtcctactggtagaactacctggcttcagtttcatcaccaccactgactcgctgattgacattggaccagccgtcctggctgatcctcagccgagccgacagggacattcatctgagaaagaagattctaatgggggtgggaagcagtggtgcatggcaggggtagtgggtccccaggagttgtggtctagaagggtcatgagacgcttcccgcggaaatctgcatatccacatgttggcggtcctacagagggacgatttctgcctgagggagtcagagaaggtgtctggtgtagttgggatgatctgaggataacaacagatccaatgaggcaaaagtatgagtcctcatgcatgcaaatcggggaagagaaatttgcagctggggattatcctggcggcgccaagactaacaaacaatggagggacaaagcccgtggacatggggagactgaatcatttttactgaggatgatggtttctagcttcatctatgtccctgtaaaggatgtgaactcattcggggccctggatgttgcacgtgtatttgagaaaccctcagcttag

SEQ ID NO: 114631 - DNA, 468 bp, Homo sapiens
  misc_feature (1)...(468): n = a,t,c or g
tttagcatggagtaaaacatttattttcaaatgtcatagaaacaatatttataagtcctcttctccacctcttgtgtggtgatttactgatttcttgctacccggtccagttgatcttctgttttcattaaatcaagaggacctgtcccatgttacccctggagtttcagctctctacatgtgtacgttaaaagtttaagtggacgaagccagtaagggagcccaggaactcggtttaagccgcactttgacagtctgtgaatctgtttgacaactttctcccctctctgcctctgtgaacgcctgtgcaccaacgaaatagccacctagatccgctgtggtcagcgtcaggaaaacagcaagacccagctatgaatctgttgtcttcgtcctcctttaaatctcagcaatatttcagagagagagagagggaganaaaaaatactgttcagctcaaaaatttcctct

SEQ ID NO: 114632 - DNA, 293 bp, Homo sapiens
gctgttttccctgacgctgaccacagcggatctagtttctctgcagaagacagcaagatgccccagggaatgtttgtgaaaaaggatgactggatgggaagcaagctgaagaaaaagaaggaaagaaagagagaaatcagtcaatcaccacacaagagctggagaagaggacttataaatattgtttctatgacatttgaaaataaatgttttactccatgctaatagtgaatgtgatgtcttcagtttgaagggctttaagtgaagctcattaaaacccactattttccaaa

SEQ ID NO: 114633 - DNA, 406 bp, Homo sapiens
agcaactactggtttgtgggcacacagaaggtgcccaagcccctgtgcgagaaaggtctggcagccaagtgctttgacatgccagtgtccctggatggagataccaacacatccacccaggaggtggtacaatacaactgggagactggggatgaccggttctccttccggagcttccggagtggcatgtggctatcctgtgaggaaactgtggaagaaccagcactgctccatccccagtcctggaaacaatttaagagccctcggtccagtggtacagcggcagcaaaaggggagaggtgcccaagtttcattgaacttacatcaccacacaagaggtggagaagaggacttataaatattgtttctatgacatttgaaaataaatgttttactccatgctaaa

SEQ ID NO: 114634 - DNA, 645 bp, Homo sapiens
atggcgccgggcgggcagagcagggcgcgggcgcggcgggcgtcaaggcgagcggcacggggcggtcggcggcggccggatctgcagctggctcaggcactcctggcagaaggtgtgcaagcacgccagcagcttgggcgcgcgcgtgtccgcgtcgaagtagttgtagcagattttgcactcgtagtcctcaagcggagggaggccggagaccgtctccgctgcgtcccgggctcctgcgtctccgcagtccggggctcccttcgcggcgaccccagctccctcccggctcccggggctgctgcttgggctctgctggctgccgccgctgtcgctcgccggcgctgccatggcatgatccgcccctcatcgggggcaagtttctctgcagaagacagcaagatgccccagggaatgtttgtgaaaaaggatgactggatgggaagcaagctgaagaaaaagaaggaaagaaagagagaaatcagtaaatcaccacacaagaggtggagaagaggacttataaatattgtttctatgacatttgaaaataaatgttttacctccatcctaatagtgaatcttactcagtgtgaagacaacaaagacgtagacctttataatgacccacttccacttaatgactag

SEQ ID NO: 114635 - DNA, 821 bp, Homo sapiens
ctcttcgtgaaaatcgtgatctcatctctccgtccatgggcgaaaaaacagccatcaccaggccattcacgctttgtgcttttgttagcagagccaggcagccctgcagcccacatctagggtacaaacggaacggcaggcgttttccttgtatcatttagaggaaatttttgagctgaacagtattttttttctccctctctctctctctgaaatattgctgagatttaaaggaggacgaagacaacagattcatagctgggtcttgctgttttcctgacgctgaccacagcggatctaggtggctatttcgttggtgcacaggcgttcacagaggcagacgcgcggagaaagttgtcaaacagattcacagactgtcaaagtgcggcttaaaccgagttcctgggctccctcactggcttcgtccacttaaaacttttaacgtacacatgtagagagctgaaactccaggggtaacatgggacaggtcctcttgatttaatgaaaacagaagatcaactggaccgggtagcaagaaataaggcttaagaagcactggtttctctgcagaagacagcaagatgccccagggaatgtttgtgaaaaaggatgactggatgggaagcaagctgaagaaaaagaaggaaagaaagagagaaatcagtaaatcaccacacaagaggtggagaagaggacttataaatattgtttctatgacatttgaaaataaatgttttactccatgctaatagtgaatgtgatgtcttcagtttgaagggctttaagtgaagctcattaaaacccactattttccaaaaaaa

SEQ ID NO: 114636 - DNA, 491 bp, Homo sapiens
  misc_feature (1)...(491): n = a,t,c or g
nagcgttnntnnccacgataatcgtgtcgcgtgtgctggaattcccgtggccaggcagaggtctgtggagtggagaggcgaggcctcacggtggaactctcagatgtgagttccaacaaattggttcaaaaagaggggggataaacacgctggcccatgctgggcaagcatggcaccaccttccaggcactgtcttcttctgatcagcactctgggtgtctttgcacttaactgcttcaccaaaggtcagaagaacagcacgctcatcttcacaagggaaaacaccattcggaactgcagctgttctgcggacatccgggattgtgactacagtttggccaacctgatgtgcaactgtaaaaccgtcctgccccttgcagtagagcgaaccagctacaatggccatctgaccatctggttcacggacacatctgcgctgggccacctgctgaacttcacgctggtccaagacctgaagctttccctgtgca

SEQ ID NO: 114637 - DNA, 584 bp, Homo sapiens
  misc_feature (1)...(584): n = a,t,c or g
aaaccagctgtcaagccagggtgaaggatccgtggccaggcagaggtctgtggagtggagaggcgaggcctcacggtggaactctcagatgacagcatgcaggcaccaagagagtggacgcacatacagaagacagccatgcactgagctggggacatgcaacaataacaggccatacaatgaaagtcgctgaagaagaatatgaattttgcctgcggatttgctaacactcgacaatcctaggaggtgagttccaacaaattggttcaaaaagaggggggataaacacgctggcccatgctgggcaagcatggcaccaccttccaggcactgtcttcttctgatcagcactctgggtgtctttgcacttaactgcttcaccaaaggtcagaagaacagcacgctcatcttacaaaggaaaaacaccattcggaactgcagctgttctgcggacatccgggattgtgactacagtttggccaacctgatgtgcaactgtaaaaccgtcctgccccttgcagttaggagcgaaccagctacaatgggccttttgaccttntggttcacggacacatttgcgttgg

SEQ ID NO: 114638 - DNA, 1074 bp, Homo sapiens
atgcttggcctccatgttgatgcgcagcctcttcagaccacaaatagccaggtattcagtggggagagtgttggtgctgcacagggaaagcttcaggtcttggaccagcgtgaagttcagcaggtggcccagcgcagatgtgtccgtgaaccagatggtcagatggccattgtagctggttcgctctactgcaaggggcaggacggttttacagttgcacatcaggttggccaaactgtagtcacaatcccggatgtccgcagaacagctgcagttccgaatggtgttttcccttgtgaagatgagcgtgctgttcttctgacctttggtgaagcagttaagtgcaaagacacccagagtgctgatcagaagaagacagtgcctggaagcacactgttggacttcatttctgagcttctggtagtgaagtggtaccatgtgattgagttctggccaatggaatatggtggaagattccacgaaggaaccgacggccctagaagatggcagaactgtagacaaaaggctgaatccctgaatgattgctctttggataaatttgtttcaatatctggaatcctcaaggggatggagagaaccaagaatgtaggattgagaagagagatagcaaggatcaaacagaaagtatgggaggagtgtggggtggagacccacgctgggctccagaaacaagtggtcacctgttctcaggtccagtgcccacttgtccagggctgtgcaacccctcttcccgttgagaatagtcacactatgttggacccagccaagcccaaatggatacatctggctacgtcttatgagttgagggggaaccatcttcaggtggttaattgcatacatggaattgttgaaggagagcgaagacgatatgggagggcccagggcagggaagagcagagggatgggacagtggcatttgtgtctttccagcccaaacgtatgcctgaggctgagtccggattgtcgagtgttagcaaatccgcaggcaaaattcatattcttcttcagcgactttcattgtatggcctagacatggcagaaaaaccagaatga

SEQ ID NO: 114639 - DNA, 443 bp, Homo sapiens
  misc_feature (1)...(443): n = a,t,c or g
nnnnnnnnnnnnnnnnnnnnaatttaggtttgttttatttaagtttaatgttaattccatgctgtgtttcagtaagaacaatacagattctgtatctgtggctccagtcagatatccagtagtacaaattagcttcaagttacacatactgaacaaaagaggttgagcgaatcatttttagcttgtcttctcctcccttgttttcttctttctgttcaatgctgctgattattctccaggaggctcttctagctccaatcacattcttatatgcaacagataggaggtttctttcttcaactgtcagctccacatccatccctgctactttcttcattgactccaccatttcgtcgtatcgctcagcctgctcggccagcttcgcctggtacaccagatcctctcgatcatccatagcggcagcggctccggcagggtctgcg

SEQ ID NO: 114640 - DNA, 1704 bp, Homo sapiens
gagtcggagcactatccgcttccatccgtcgcgcagaccctgccggagccgctgccgctatggatgatcgagaggatctggtgtaccaggcgaagttggccgagcaggctgagcgatacgacgaaatggtggagtcaatgaagaaagtagcagggatggatgtggagctgacagttgaagaaagaaacctcctatctgttgcatataagaatgtaattggagctagaagagcctcctggagaataatcagcagcattgaacagaaagaagaaaacaagggaggagaagacaagctaaaaatgattcgggaatatcggcaaatggttgagactgagctaaagttaatctgttgtgacatcctggatgtactggacaaacacctcattccagcagctaacactggcgagtccaaggttttctattataaaatgaaaggggactaccacaggtatctggcagaatttgccacaggaaacgacaggaaggaggctgcggagaacagcctagtggcttataaagctgctagtgatattgcaatgacagaacttccaccaacgcatcctattcgcttaggtcttgctctcaatttttccgtattctactacgaaattcttaattcccctgaccgtgcctgcaggttggcaaaagcagcttttgatgatgcaattgcagaactggatacgctgagtgaagaaagctataaggactctacacttatcatgcagttgttacgtgataatctgacactatggacttcagacatgcagggtgacggtgaagagcagaataaagaagcgctgcaggacgtggaagacgaaaatcagtgagacataagccaacaagagaaaccatctctgaccaccccctcctccccatcccaccctttggaaactccccattgtcactgagaaccaccaaatctgacttttacatttggtctcagaatttaggttcctgccctgttggttttttttttttttttttttaaacagttttcaaaagttcttaaaggcaagagtgaatttctgtggattttactggtcccagcttttaggttctttaagacactaacaggactacatagaggctttttcagcattactgtgtcgtctccgtgccagatgtggcaagatcaccattagcaaatggaaattacatttgaaagccattagacttataggtgatgcaagcatctaagagagaggttaatcacactatagaggcaataagtggtatcagttttcatttttctaattgtttaaactgtgttttataccagtgtttgcaagtaattgggtgttagcttgagatggttaaaggtggtttggggagggacttcgttgtaatggttttgctgttgctgaaaagcatggtgctggtaacagttcaacaatccgtggctgctcattcttgcctactttactctcccactgaagcaggttagctgttgaaggtggtatggaaaagcctgcatgcctgttcaattcttttgtttcttctccttccccctccccctacctccttcccctcactcctcccctccttcgctcgctcaacctcttttgttcagtatgtgtaacttgaagctaatttgtactactggatatctgactggagccacagatacagaatctgtattgttcttactgaaacacagcatggaattaacattaaacttaaataaaacaaacctaaattaaaaaa

SEQ ID NO: 114641 - DNA, 2010 bp, Homo sapiens
  misc_feature (1)...(2010): n = a,t,c or g
ccggcctcggaattctcgggacgacgatttcgttttttgctgcccggacgcggagcgagaggctgagagagtctgagacactatccgcttccatccgtcgcgcagaccctgccggagccgctgccgctatggatgatcgagaggatctggtgtaccaggcgaagctggccgagcaggctgagcgatacgacgaaatggtggagtcaatgaagaaagtagcagggatggatgtggagctgacagttgaagaaagaaacctcctatctgttgcatataagaatgtgattggagctacgaagagcctcctggagaataatcagcacgcattgaacagaaagaagaaaacaagggaggagaagacaagctaaaaatgattcggggaatatcggcaaatggtttgaagactgagctaaagttaatctgttgttgaccattctggatgtactggacaaacacctccattcccagcagctaacactggcgagtccaaggttttctattataaaaatgaaagggggactaccacaggtatctggcagaatttgccacaggaaacgacaggaaggaggctgcggagaacagcctagtggcttataaagctgctagtgatattgcaatgacagaacttccaccaacgcatcctattcgcttaggtcttgctctcaatttttccgtattctactacggaaattcttaattcccctgaccgtgcctgcaggttggcaaaagcagcttttgatgatgcaattgcagaactggatacgctggagtggaagaaagctataagggactctacacttatcatgcagttgttacggtggataatctgacactatggacttccagacatgccagggtgacggtgaagagcagaataaagaagcgctgcaggacgtggaagacgaaaatcagtgagacataagccaacaagagaaaccatctctgaccaccccctcctccccatcccaccctttggaaactccccattgtcactgagaaccaccaaatctgacttttacatttggtctcagaatttaggttcctgccctgttggttttttttttttttttttttaaacagttttcaaaagttcttaaaggcaagagtgaatttctgtggattttactcggtcccagcttttaggttctttaagacactaacaggactacatagaggctttttcagcattactgtgtcgtctccgtgccagatgtggaaagatcacccattagcaaatgggaaattacattggaaagcccattagacttataggtgatgcaagcatctaagagagagggttaatcacactatagggggcataaagtggtatccagttttcatttttctcaaaatggtttaaaaccgggggttttaaaccacaggtgttggcaaattaattggggtggttagcttggagatggttaaaaggtgggttttgggggaagggacttccgttgtaaatggttttgcctgtaaaaaaaatgttttccaaactccggctggaaaatgttgctgaaaaaagcatgggtgctgggtaacaagttcaaacaatcccgtgggctgctccattccttggcctacttttactctccccactggaagcagggttagcggttgaagggtgggtatggaaaaagcctggcatgccctgttcaattccttttggttcttctccttcccccctcccccctaccctccttcccctcactccttcccctcctttcggctcggctcaaacctcttttgttcagtatgtgtaacttgaagctaatttgtactactggatatctgtggctccagtcagatatccagaatctgtattgttcttactgaaaacacagcatggaattaacattaaacttaaataaaacaaacctaaattaaaaatgcccccaaaagaactaaaaaattttaaatttaattctaaattataaaattttnnaaaaatnnnnnttnnnttntntttttggggggggcccctttaaaaaattcttggggggcccttttttg

SEQ ID NO: 114642 - DNA, 362 bp, Homo sapiens
  misc_feature (1)...(362): n = a,t,c or g
tttttttttttttttttcacgcacacagtctggtttattggctcatcatacacacacacatcaaatatgtacacaaacataaatattccaatgtacaaagtttacatgggactcacagatcacccctcgtctctttcatccagcacccccaacttggtgccgtcctcttcctgtttcaggatgaaggcgtgtgaggggctggcactangaggcagggatctggaggagggagaggtcctgctcccctctcctcacaggcacctccgaagggtcctgtcccttttcaatggcaccttagggcagagggctaaatccctcatccctgcttctccatctctgtgtctgttcccacagtgcccctc

SEQ ID NO: 114643 - DNA, 570 bp, Homo sapiens
tttttttttttttttctgtctgccacgcacacagtctggtttattggctcatcatacacacacacatcaaatatgtacacaaacataaatattccaatgtacaaagtttacatgggactcacagatcacccctcgtctctttcatccagcacccccaacttggtgccgtcctcttcctgtttcaggatgaaggcgtgtgaggggctggcactatgaggcagggatctggaggagggagaggtcctgctcccctctcctcacaggcacctccgaagggtcctgtcccttttcaatgggaccttagggcacagggctaaaatccctcatccctctctgctgcagctcaaatccccaactctccttgatccctttgactctccctcctaaatttccttggcttcgtcctctcagcatgtccctgcttctccatctctgtgtctgttcccccagtgcctgcagggaggaggggtctttgggccatggagtccttctggcccctctgccctcttcctgggccttataggaggctaggactacggtgcagctcagcagaggggttggtgccattgg

SEQ ID NO: 114644 - DNA, 702 bp, Homo sapiens
atgaagcagtgtatgtatgaggaagtgcccacaggagtgtgcctccgggatgaagcaaagcaacagagatccaagcaggagaggctgcaacaggctggagatatgcagagtcttcatgggggaggtgtgtatctaataattgctgaagctggaatttccttcgtgtgcagtcagccacacctcgctatacctgtcaaaccatctcaattatccactccaattgtcatgcctctcgtggtgttcttccagctccgtgccccacatccacccactgtcctcagacctcagctggggctgcaccccaaccctgagtgtgacagagagaagatgagtgttagagatcatgatcctgaagtgctgacgagaaattcaggaagcctgcaagcctagaggtcagctcagtggccaccttctgaagcccagggcaccattggaagctgcctagtttgaggcacggatggaagaggaaaacactgagaacaacatccctcttcctgaggaatgcatacaagggtgcttgggggtaggttggggatcccaaggcaggagagccaaagctggagtcagaggaagctcttcttctgaaacctgtaatttcaatgtcttttcctttcccttcaaaattgtaatttccttctgaaatcattctaaccctttagtaaagacattaatttaaagatgtttaaaaaaaaaaaaaaaaaa

SEQ ID NO: 114645 - DNA, 426 bp, Homo sapiens
gtgagaatttatggtgctttttccgggcctgctcatggaccaatcagcatgcacttcctcccttctgagcccataaaaaccctggattcagccagacttggacagatgtcaatactaccaactgtgggaagaagctacccacttcaggactccttgactcctcaggatgacctgcctacagaaagaagctacccactatgggtcttctctctgctgagagctggatactcgtcaggatgacctgcctgcagaaagagctacccaccatgggtctcctctgaactgttctgttgcccaataaagctcctctcctttttgctcaccctccagctgtctgcatacctcattcttcctggccgcaggacaagaactcgggacccaccgaatggtgggactgaaagaggtgtaacacaaataaagctgaaa

SEQ ID NO: 114646 - DNA, 585 bp, Homo sapiens
atggagactgaaaaggatggagacagtggggtgtgcttgtatatttttagaggaccaccccagaggattgctgtatccctgtgctatggacccagggagctggatatagctggtactggccagtgcggacagtccagctggtggtcccaccattcggtgggtcccgagttcttgtcctgcgggcaggaagatgaggtatgcagacagctggagggtgagcaaaaaggagaggagctttatgggcaacagaaaagatcagaggagacccatggacacctctttgatgcgaatacacacaaagtgaagaagtttgttctacacaccattaccctgggcattataatttcaacatttatcatcgctgtggttcaagatcccactagccataaagaaagaaaacgcagatggtcagacagaacatgcacgacctacagcaagtgggacaacatccaggagctcctgggccccctgtggagaagcctgttgtcctgcacaggtgagtgggagtttgatgtcccggccaccccacctgactcctcagagcccagaaagcccagggaagccggcacagtggatgttgcttaa

SEQ ID NO: 114647 - DNA, 826 bp, Homo sapiens
gctgtttcctgggcaatgtctatgctgagagtgtagatgttcttcgagatggaactggacctgcaggtttacgacttcgcctacttgctgcaggttgtggacctggcctattagcagatgccaagatgcgggtatttgaacgttcagtgtattttggtgattcctgccaagatgttcttagcatgcttggctctccacacaaagtcttctataaatcagaagacaagatgaaaattcattctccttcccctcataaacaagttccatcgaagtgtaatgactacttttttaactacttcactcttggagtggacatcctctttgatgcgaatacacacaaagtgaagaagtttgttctacacaccaattaccctgggcattataatttcaacatttatcatcgctgtgagttcaagattccacttacccttaaggaaagaaaacgcagatggtcagacataaacatgcacgacctacagtaggtgggacaacatccaggagctactgggccaccctgtggagaagacctgtgtacatgcacaggtcttactccccaaacaacaccaacccattaggatccacattctgctttggtcttcaacgaatgatctttgaggtcatgcagaacaaccacattgcctcggtgaccctgtatggcccctccaggcctgtgacccacctgagaacagcggaactcccctagggacaccaccacccatgcccctctgtcccgtggaactgtgcatcacatcctgctcaatgggcctctgtaccaccctgtgggttttcttggacacctggccagtgctgaagggctgttgtgatg

SEQ ID NO: 114648 - DNA, 368 bp, Homo sapiens
cgctgttgtccatgatagagaagtggtcattttctaccacaagggagaatatcatgctatggatattcgctgttaccgattttgatggacgaccgtgtatagtttgcccctggcataaatacaaaattactttggcaacaggagaaggtctgtaccagtctataaaccctaaagatccatcagcaaaacccaagtggtgctccaaaggaataaagcaaaggattcacacagtgacagtagacaacggaaatatttatgtgactctttctaatgaaccttttaagtgtgactctgatttttatgccactggagacttcaaagtaattaagagttcttcctgataaaaaatatatagaaatgaaaaaaaa

SEQ ID NO: 114649 - DNA, 400 bp, Homo sapiens
atgaatcttgatggctctgcacaagatcctgaaaagagggaatattcttctgtgtgtgtgggcagagaagatgacattaaaaaatctgaaagaatgacagctgttgtccatgatagagaagtggtcattttctaccacaagggagaatatcatgctatggatattcgctgttaccgtgaaattattttggcccttcatcaattagatcttcttcagaaaactattgtcatatactcctcagaccatggagagctggccatggaacatcgacagttttataaaatgagcatgtacgaggctagtgcacatgttccgcttttgatgatgggaccaggaattaaagccggcctacaagtatcaaatgtggtttctcttgtggatatttaccctaccatgcttg

SEQ ID NO: 114650 - DNA, 711 bp, Homo sapiens
atgttgagagctgtcctatggaaagatccatgtggcaaggaaccaatgtctctggccaacagcaatgaagacctgggtcctgtcaatagccatatagactcaactgagagatggtccaattccaagctcactcgtgtgccttttggctgcttcagaagatctactccaaagttcactcccatggttgctgggaaccctcagttccttaccatgtggcctctccatagactgcttcagtatgtcctcagctggcttccctctctcagggccacctcacaacctggcggattgtcccatgatgactcggaaagtaaaggaactctaggggatcttattcccaattgttcccacacccatacgccctttacaacaagattgtgtatacttcttccagaaaagttcttcaacacctgcccacatatccacccaacaggtttgattggcatggattttgatggacgaccgtgtatagtttgcccctggcataaatacaaaattactttggcaacaggagaaggtctgtaccagtctataaaccctaaagatccatcagcaaaacccaagtggtgctccaaaggaataaagcaaaggattcacacagtgacagtagacaacggaaatatttatgtgactctttctaatgaaccttttaagtgtgactctgatttttatgccactggagacttcaaagtaattaagagttcttcctga

SEQ ID NO: 114651 - DNA, 639 bp, Homo sapiens
atggaccactctacggatcttgcctctctacaacctctctttccacctgacctctaaatgttgaagtgttttcaggaaattgtcttagaccttcttcccttatctacacttcctctcccaacatggaatccttggatggctctgccaccaagatccttaaaagagggaatattccttctggtgtgttgtgggccagagaagatgacattaaaaaatctgaaagaatgacagctgttgtccatgatagagaagaggtcattttctaccacacgggagaatatcatgctatggatattcgctgttaccactcaggaggacctttacatttgggagatatagaggattttgatggacgaccgtgtaaagtttgcccctggcataaatacaaaattactttgggcaacaggagaaggtctgtaccagtctattaaaccctaaagatccatcagcaaaacccaagtggtgctccaaagggaattaaaggcaaaggatttacacacagtgacagtagacaacggaaatatttatgtgactctttctaatgaaccttttaagtgtgactctgatttttatgccactggagacttcaaagtaattaagagttcttcctgataaaaaatatatagaaatgaaaaaaaa

SEQ ID NO: 114652 - DNA, 1330 bp, Homo sapiens
atgtcctgtggacgccaaagggaacagaaacctgagagaaagaacctggaggcctgcagtcttccagctcctccccaccccgtggacaaaggcattctgcttggagacacagttgctcataccccggaaaaggaagctgagtgccagcggcagcttccacagagggtctggaagcaggcagggacctggaacccatgctccttcccacaagaaaggtggtacatgctgaacacattcatcagtttgctcctctgggcacagcgaggtatcatcatccagccccttggctttaattaccaattccatgccaatgaccccaacatttgtatctccaaccccaacttctcccccaagcttcagattcatatttccaaccacttactgacatctccacgagaaagttcttacaggcatctcaaaagtaacacatctaaacagaacacttttgacattgtccgtaaaactactgatcctgaagtcttgcctagtcaatcagttgacagcatgcgagtctatataccctgcataagccagaaacctgagagactgcctactcaaaataacaccataaagtttaactttcttcaaaaggtcagtcaacttagtgggctcaatgccatccctactgttggggcaaacaacatgagaacaaatatcagtgactggcataagaagctgcccggtccacaaagtcccactaacatcaagcatgatctcacccttaaacagagctacagagcctccaaacatctgcatactcaccaactagtagtacaagagcccacacggtgcaggaaacaacccatcaaccgggaggacgccctccaacacctgctgatgacggactggctcactgggccgggcacccgagggcccttcgcgctacccgggcccggggccgccgtcggctgcgacaaagggtcagagaacaagacgacccctctgcgcgcgtcccccgcaggcctcccggatgcgccgctgtcccggccgcgcccaccccgacgctgccgctaccttgtcctcgggtggcgcaaccggctcatgggccaccctctgcctcagctctgtcatcctgggaaaatcggccctgttgtcgccacgagctagcaacgaagcccccggagcaggcagctcggcgcgggcacgcgcggactcccacggccggccccgccccgcccgggaggcgcgcggctctgagcggctcacagttcccttagcagcccagcagccagccctggagctcggccccacccagtgccgtcaccgccctttcacccgggccgagcgggcattgcctttggtgtttcctgttctttctattcactgccct

SEQ ID NO: 114653 - DNA, 835 bp, Homo sapiens
atgcccggcggccctcagctcctgccgttctgccggccgggccgggcccccgggtgcttagaggaaggctttcagcttttgcctattcagtatgatgttagccttgggtttgtcatatatggcctttattatgttgaggtcagtcaacttagtgggctcaatgccatccctactgttggggcaaacaacatgagaacaaatatcagtgactggcataggaagctgcccggtccacaaagtcccactaacatcaagcatgatctcacccttaaacagagctacagagcctccaaacatctgcatactcaccaactagtagtacaagagcccacacggtgcaggaaacaacccatcaaccgggaggacgccctccaacacctgctgatgacggactggctcactgggccgggcacccgagggcccttcgcgctacccgggcccggggccgccgtcggctgcgacaaagggtcagagaacaagacgacccctctgcgcgcgtcccccgcaggcctcccggatgcgccgctgtcccggccgcgcccaccccgacgctgccgctaccttgtcctcgggtggcgcaaccggctcatgggccaccctctgcctcagctctgtcatcctgggaaaatcggcccgacgtcgccgcgagctagcagcgaagccgccggagcaggcagctcggcgcgggcacgcgcggactcccacggccggccccgccccgcccgggaggcgcgcggctctgagcggctcacagttcccttagcagcccagcagccagccctggagctcggccccacccagtgccgtcaccgccctttcacccgggccgagcggg

SEQ ID NO: 114654 - DNA, 421 bp, Homo sapiens
  misc_feature (1)...(421): n = a,t,c or g
ngcagcattttctcagaactggacgggggcaacaagagggtctccttcattctaatatcggggggcttgttccatgcagtcatggtattaggttctggggatgctgcacacagtgacacacactcagtcactgccctgatggggtttttnnnnnnnnnnnnnnnnnnnnnnnnnnnnnnnnnnnnnnnnnnnnnnnnnnnnnnnnnnnnnnnnnnnnnnnnnnnnnnnnnnnnnnnnnnnnnnnnnnnnnnnnnnnnnnnnnnnnnnnnnnnnnnnnnnnnnnnnnnnnnnnnnnnnnnnnnnnnnnnnnnnnnnnnnnnnnnnnnnnnnnnnnnnnnnnnnnnnnnnnnnnnnnnnnnnnnnnnnnnnnnnnnnnnnnnnnnnnnnnnnnncgcgatatcgctgtgagcctgcctctctg

SEQ ID NO: 114655 - DNA, 3174 bp, Homo sapiens
atgtgcatttccaaaagaaataagtggattcagcagaccttcaaggaagcggcttctggggtccaggctggaggggacagtggctttgctaaggggctgggtggtgccaatggagagatcttcgcaggacaaaccaaggagaccttcgggatggactggagatgggagatgctggagagggagaggccgagcctggcaaactcttactcatccctcaaggcccactcaactgtcacctctgagaatccttcctgggctctcccagatggcattcacatgaagacccagctggtgatcaattcgtggcaaaaagtgtcagaagctagaagacttatctccgagccttccaacatcagaaataattcaggctatcggacctggactttgcagtccatgtcttcaagcagacagttaccgggtatgatgaatgcgatgtggccaagctgccatgatgacccattagcatcgttggggggtacaccggaaactgacatcatgggtacatctggagaagaagaaccaggtgttacaggatacagggatgaggaaaaggagactgagggatcgggggctatcctaggtgatggggttacgcggagtctcaccacagatgctcaaggcttgacaggcgggaaagacaggacgtcctcatcacgacaaatgcttattatcagtcctgactgtgcagatgaaggaacaggcatagagaggctaagtgactttcctcagggcctaaagctggtagtggcctttgcctctctcttcttcatcctggtctccatcaccactttctgcctggagacccatgaggcctttaatatcgaccgcaacgtgacagagatcctccgcgtagggaacatcaccagcgtgcacttccggcgggaggtagagacagagcccatcctgacctacatcgagggcgtatgtgtgctgtggttcacactggagttcctggtgcgcatcgtgtgctgccccgacacgctggacttcgtcaagaacctgctcaacatcatcgactttgtggccatcctgcccttctacctggaggtggggctgagcggcctgtcatccaaggcggcccgcgacgtgctgggcttcctgcgcgtggtgcgcttcgtgcgcatcctgcgtatcttcaagctcacacgccacttcgtggggctacgcgtgctgggccacaccctgagggccagcaccaatgagttcctgctgcttatcatcttcctggccctgggtgtgctcatctttgccaccatgatctactacgctgagcgcattggggccaggccctccgaccctcggggtaatgaccacaccgacttcaagaacatccccattggcttctggtgggctgtggtcaccatgacgacactgggctacggagacatgtaccccaagacgtggtcaggcatgctggtaggggcactgtgtgcactggctggcgtgctcaccatcgccatgccggtgcctgtcatcgtcaacaacttcggcatgtactactccctggccatggccaagcagaagctgcccaagaaacggaagaagcacgtgccacggccggcgcagctggagtcacccatgtactgcaagtctgaggagacttccccccgggacagcacctgcagtgataccagcccccctgcccgggaagagggtatgatcgagaggaaacgggcagactctaagcagaatggcgatgccaacgcagtgctgtctgatgaggagggagctggcctcacccaaccctggcctcctccccgacccccgaggagcgccgggccctgcgacgctccaccactcgagacagaaacaagaaggcagctgcctgcttcctgctcagcactggggactatgcctgcgccgatggtagtgtccggaaagggtgtttggagggcagcggccgccccaagccggagccccgcagcgcttcttatgatcagctcggtgtgtgtctcctcctaccgcgggcgcaagtcggggaacaagcctccgtccaaaacatgtctgaaggaggagatggccaagggcgaggcgtcggagaagatcatcatcaacgtgggcggcacgcgacatgagacctaccgcagcaccctgcgcaccctaccgggaacccgcctcgcctggctggccgaccccgacggcgggggccggcccgagaccgatggcggcggtgtgggtagcagcggcagcagcggcggcgggggctgcgagttcttcttcgacaggcacccgggcgtcttcgcctacgtgctcaactactaccgcaccggcaagctgcactgccccgcggacgtgtgcgggccgctcttcgaagaggagctcaccttctggggcatcgacgagaccgacgtggaaccctgctgctggatgacctaccggcagcaccgcgacgccgaggaggcgctcgacatcttcgagagcccggacggaggcggcagcggcgcggggcccagcgacgaggccggcgacgatgagcgggagctggccctgcagcgactgggcccccacgagggaggcgcggcccatggcgcccgggttctggggggctgcccccggcctgccagcccccgcaatgtgggccgcttctttcgaaggaatcccctaacttcccttcccccggggcccggcttaaagggggttgaatttgggcaagggagccccggtgttcttccccaattctttgggttcttgcaaaggggttcccgtggttgggctggttgtgtaaggggtccggtgaccttggattgtggtgcttttcctgcgaatggataccgcaaccgagctttgttgtgtaaggacacttcagggatacccaagaccctcagagtactacattccaatgcttacagtactggtggcttcactgaccttattgtgccctacttgtggctacccttgaccccgatggcggaacgggattcttacttgggttatataccaaggaagagaggttgggcacccccttccaaatttggggacagaagacgtttccgtatcccgttcgccaactttcatggacgatcccgtgtaattcatggattgtccccgttgtgtaaccatattcggttcaagggattcgcacaccacgggcacaatttgggggatccgaaacggggacactcgcaccgcccatcattcccatttgctttccacccttggacccgggcgaactag

SEQ ID NO: 114656 - DNA, 444 bp, Homo sapiens
atggcaaccagctcccagggcgcctgggggcgggatgttgagggcagcagggaggtgaggaaactggagagtaatttgatggagatctcacagatagatttcacaggcgattttgaccatgcttctacactggctctgtggccagccccttggcaccagcaccaccactgccatcgatttctggtccacggccagattgctaattctggctccactggctttgccacttatggcattcacatgaagacccagctggtgatcaattcgtggcaaaaagtgtcagaagctagaagacttatctccggttgtaaaaaccccatcagggcagtgactgagtgtgtgtcactgtgtgcagcatccccagaacctaataccatgactgcatggaacaagcacccggatataggaatgaaggacgctactggtggccccgtccagttctga

SEQ ID NO: 114657 - DNA, 1671 bp, Homo sapiens; identical to SEQ ID NO: 114304

SEQ ID NO: 114658 - DNA, 603 bp, Homo sapiens
atggccacagcaggcccagaaattggtcccagtggtctccaaggtttctctggcttgaagcacatcgaaggccctcaggctccccggattctgctgagctcagatcccaagtctcagattgtcttgggacttccagacatggaactggggctttatttttggctctgggcatctatgctgcttcctgttatgttgccagattcatacgtgtcagaccacacagggacgcttactcactgcagggacgcctctctgatcattcacccacgtttcaagggtgtcagaccacgcagggacgcctgccttggtccttcacccttagcggcaagtcccgcttttctggggaaggggcaaccacatctccggcacacaagaacttccaaacacctgaaccgcagtggccaggcattcctccagaacctcctcccacaggagcttgctacacgtgccggaaatctggccactgggccaaggaatgcccgcaggccaggattcctcctaagccgcatcccatctgtgtgggaccccactgaaaatcggactgttcaactcacctggcagccactcccagagcccctggaactctggcccaaggctctctga

SEQ ID NO: 114659 - DNA, 462 bp, Homo sapiens; identical to SEQ ID NO: 114307

SEQ ID NO: 114660 - DNA, 383 bp, Homo sapiens
ctgcacccaggtgaaataaacagctttattgctcacacaaagcctgtttggtggtctcttcacacggacgcgcatgaaatttggtgccatgactcggatcgggggacctcccttgggagatcaatcccctgtcctcctgctctttgctctgtgagaaacatccgcctacgacctcaggtcctcagaccgaccagcccaagaaacatctcaccaatttcaaatccggagcttgctacatgtgccggaaatctggccactgggccaaggaatgcccgcagcctgggattcctcctaagccgcgtcccatctgtgtgggaccccacttgaaaattcggacttgttcaactcaccttgggcaagccactcccagagccccttgaact

SEQ ID NO: 114661 - DNA, 771 bp, Homo sapiens
atggcaaagagcttttcaggcagtggaaagagcgtgtgcaaaagtcccaaaggcaaaaataacacatgggagaccaggatgattggggatggtggactccaggaaggaagtctgacaatgaaatttgaagatgggaaatacctttttggatttaacatcattgagggagatttctgtgaagacagcaattttcaaactggagagtcagtgtcagatgtgtattttgaaaatgtaagtgccctgcagagagagtccacgggctctggcattgcccaggaaagaaatgatgagggcttagaatcaggtagggctgtcctgtgcattgaagaatgtttatcagcatccctggcttctacctctcaatcgtcaatagaacaaccattgcccacaagttctcacaaccaaaacaaaacaaaacatgactccagacattgccgaatatccccagtgggcaatatggacatcgctgaaaacaactacaatagttttaaggccgagctaggtcctaattcttcctcagcctccactcctccaccctataatctttttatcgcctcccctcctcacacctgctccggcttacagtttcattccaccatcacagacgccgagcttcgggtaactctcacagtggaaggaaacagaatgtctgtggtcagaagttccttcttgggactaaaccagttgaagctggcaaaatccatgatggcagcttactcgatctttgaagaacctctagcttcattatactccaacttccatactaaatga

SEQ ID NO: 114662 - DNA, 1767 bp, Homo sapiens
atgacctgtgatgccggacgaccgccagctcggcttgggcaaccgattgggggtgccccaccatgggcggctccacccccagatcgggatctccccgttcctccccaccgaggcggcggccgtcgaaacccgccaccatgccgaacacttccagcgcttcgagatcatggcccgccgcgcaggcagcttgttgtggagttccctgagaatagaactccacttctgctgcccatgccatcagtggccaccctgcaccaggtgccagctctggagactgaccagcgagaaagcaccatctgtgaaccagaaagtgggccttcatcagaccctgaatctgccagtgccttgattacggacctcccaacctcgagaactgagttggaggagaggtctggggtgaacaaggcctctgaagatggggaagatctggacagggatgtgagtgttgccagcaatatagagccttggactgggtggtgtagggagacacctcccagcaggggtcaacagacacttcatacaggagagctccggctgcatctggtgggtgcccctctgggacgaagcttccagaggacggaacaggcaacaatctttgctgttctgcagcctctgctggtgatagccaggcaaacagggtctggaatggacctccaacaaacgccagcagaccggcagcaaaggggtctgactgttaaaaggaaaagtaacaaacagaaaggaatagcatcaacatcaacaaaaaggacattcacacgaaaactccatctgaaggtcaccaacatcaaagaccaaagaaccaatgacaaaaaccacatgattatctcaatagactcagaaaaggccttcaataaaattcaacatcgcttcattttaaaaactctcaataaactagatattgatggaatgtatctcaaaataagagctatttatgacaaactcacagccaatatcatactgaatgggcaaaaactggaagcattccctttgaaaaccggctcccgaccacaccgacaggggtgttcgggctatagcggtcaggtttcagcatgcgatccgccaccgggcccaggcggagttcctgtcactctttctcaatctggctgccaccactggcaaggaggtcatgaatgtgagggccgtggcgacagacgcctcaagcaagggcgtcaaggcggcctattttcccggaaacaatccggcgcgttcatcgacagcatcgttgcccgaaaggggaacgccgacgagaatttcagcaacatccgtatcgcaggcgatggtggatcggctgcgatgtcgttcgactatgcgttcaagatcgacgacgtggtcccgaactctggcatggaacattggcttcttgtaaacacgaacaatggatggcggatcgtatcggtggcttggtcggctgctcctctccaggccgatctaggtcccaattcttcctcagcctctgctcctccaccctataatccttttatcacctctcctcctcacacctggtccggcttacagtttcgttccgtgactagccctcccccacctgcccagcaatttactcttaaaaaggtggctggagccaaaggcatagtcaaggagcttgctacacttgccggaaatctggccactgggccaaggaatgcccgcagcccgggattcctcctaagccacgtcccatctgtgtgggaccccactgaaaatcggactgttcaactcacctggcagccaatcccagagcccctggaactctggcccaaggctctctga

SEQ ID NO: 114663 - DNA, 801 bp, Homo sapiens
atgtgtcatttcctggagaaagcatttcctggagatagcacagaatactgccactatgtcctcctcttggtgtatggaaagcataagaacagacagagcctttctcagtccttgactaagaatactacagactggataatttgtaaagaagagagctttatttcttacagttctggaagttggggagttgaagggcatatggtgctggtgtctggtgagggcctttgggctgcatcatcccgttgtggaaaagtggaagggcaagttgttcctcgccaggccgagctaggtcccaattcttcctcagcctctgctcctccaccctataatctttttatcgcctcccctcctcacacctggtcgggcttacagtttcgttccgtgactagccctccccctcctgcccagcaatttactcttaaaaaggtggctggagctaaaggcatagtcaagcacgctttaaaaagattaaagcctgttatcactcgcctgctacagcatggccttttaaagcctataaactctccttacaattcccccattttacctgtcctaaaaccaggcaagccttacaagttagttcaggatctgcgccttatcaaccaaattgttttgcctatccaccccgtggtgccaaacccatatactctcctatcctcgatacctgcctctacaacccattattctgttctagatctcaaacatgctttctttactattcctttgcacccttcatcccagcctttcttcgctttcacttggactgaccctgacacccatcaggctcagcaaattacctag

SEQ ID NO: 114664 - DNA, 1062 bp, Homo sapiens
atggaggcaagggaaacaggcccttggaaagaaggtaatgtggagcgggtagcctccgtattgattaagaaggggacgggcttaccttccactgtgagagttaccggaagctcggcgtccgtgatggtctacggggcttccgaggcgatcgggcagcatcagtcttcagccgctaagccgagaaggagtcagtcagagagccttgggccagagttccaggggctctgggagtggctgccagggcctagggctgtgaagcgtctcagggttatatttgatgaaaaagagcctaaacgctatctgatttgggataaagaaaaaggagcattaaccttgactatgcctttggctccagccacctttttaagagtaaattgctgggcagctgtggaagtttatgacggcaatggtgtagattttctaggggaaggggcaccaggttgtttttcaggccaggtgcatgtggatgcagcaagccagcagcttgtgtggcaggctctccaagaaggtgctgctgtcaggctggatgttggattgagtgtgagtatgcataccagataccatgatattgaatcttccattgcttattataaaggaaattggattcctggttttctgaaagtgttgatgcaggagcagggtactgatgggggtggagctggtgggctctgttcctgccaatgctctgactacagtggtactgtggtgggggaagaggtagtgggatgcactcacgccagccgtagtggcacagcatggtacatcagcacattggcaccggtggggaaggcaagcacccatgcacacatgctccagcaaagcaatgtagggggtgctgttgggcaagtgtttgcagacagagtgccgggggaaggctgcagtgggggcagggcacaggcaggcttgtgtgggtccacagggccatctctgctggagcactctgccagtcatgtgcagtccaccaatgcaggagctatatatgggcctccaggaagtattggggactacacttcaaggaggcccaaccttattgggaacccaggagagcccattagaccatga

SEQ ID NO: 114665 - DNA, 3131 bp, Homo sapiens; identical to SEQ ID NO: 114310

SEQ ID NO: 114666 - DNA, 1615 bp, Homo sapiens
  misc_feature (1)...(1615): n = a,t,c or g
cctcggcgctcctaatgtttcgcggggcttttggagccctcagcaagcgtccttttccagccagtaagccaagagggagtcagtcagagacccttggcccaaagttcccaggggctctgggagtggctgcccaggtgaagttgaacagtccgacttttcaagtggggtcccacacagatggggacgcggcttaggaggaatcccgggctgcgggcattcccttgcccagtgcccagatttccggcacgtgtagcaagctcctgtgggaggaggttctggaggaaccgcctggctgctgccggtccagccgtttggaagttcttgtgtgctggaagatgtggctggggttngtcctcacagtggaggcaaggaggaattgcaactcagaaatatgttgctacttggctgcctctactctattattgtacaccttgatggcgaggttaattaaatcctgttgtgggggtttgagggccggaatttaatttttggagttttatttaatgtcgggaagcagattgggtaatacaactgtatacttgagaataagatggccttttgaccttttagggtctagggctgtaaaacgtctcagggttgctgccgaacaagccatgaactgggctgggtttttcatatttgataaaaaaagagcctaaatgctatctgatttgggataaagaaaaaggagcattaaccttgactatgcctttggctccagccacctttttaagagtaaattgctgagcaagttgggggagggctaagtcacggaacgaaactgtaagccggaccaggtgtgagggaggggaggtgataaaaagattatagggtggaggagcagaggctgatggaagaattgggacctagctcggcctggcaaggagcatgcctggggaggaggggagaggtcacatgggtctgtcgaaaaggaagattagaatgactcagcgacgcttggggttgggactgaggggacaggtgggagggaaagaaggaagatttgggacgagttgcactgggcacagagactaggaagggactgatgtgtaaaagaatgcctggacatcaggcacctcagaccatttgtcaattttaggacaagaattatttagatcttgtaggatggaaaaattgaaagtgccattttccggctatttggaactactgtcgagtttgtattggggtcaagcggcattgcagaagaaaataagtcatttagattttaggtcaggtgtgagttgaagaggttttaagtttttgagaacacaggctaagggagaagaaggaggaatggaaggtggaagcttgcccatagtgaaggaggcaagcccagagaaaagagtagagacatggagaaggggtgggggggttcttgccctccaggaaagcagagaaggggttggggcagggaaataagggattggggcacagagataagaggtcagggtgcagaaataagtgattggggcacagagataagaggttggggtgcggcggaaataagcgattggggggttcttgccccctaggaaagcgggacttgccgctaagggtgaaggagaaggggttgaggggtacttgcccctgccccaggaaacagcacttgctgcta

SEQ ID NO: 114667 - DNA, 336 bp, Homo sapiens
tcaaatggtaatatctatgtggcggtagggtgctgaggttgccacgagctaatctgcctgctgtgtagtaactagtagcttttcttactgttagtgaacttgttttagtctgaaggaaggcacccatgccccaggtgaagtccagctgagttcagtgaggacgatggagacccttggtcttggcacccttctgccttacactgggaatgcctcaggcttgctcctgctgtgtgtctgtggatgcccactttctgctggtctccgagagactgattcaggtgttcaggagtctgttcgctattacatcacctccttgtgagaaataaagtggagcag

SEQ ID NO: 114668 - DNA, 385 bp, Homo sapiens
atgaaatatattgaacacaaatcgagcaaatatgacttggtcgttaacatccctctgattaaacaggagtgctgctatgagaacgggctgtgccattctgcaggcacacgagagtcgctgggttttagggtagtctctgtggagaatggtgactggaccacgtgggagaggggcttgaggcaggaagggattcaacaccagcctgttggcagtggacctgaccctgaccagtcacggaagccaactgggaaccaacgagggcaacagttagctgctctcagtgccacaacggacgaggatatggggactaatgctgaaaagccacagggcgttgataaggcactagcgataatcactgacctgagcccgttcttattcaaattca

SEQ ID NO: 114669 - DNA, 869 bp, Homo sapiens
attatctccctgttcttgaccacttgttctgcattttctccatcttccctgggattagaacctcaaccaaatgtcggtgattggactcgcaggcatttactttgcctctaaaataggcagagctccactcccatgggtcctaattttaatcaaatcggtcatttttttccaagcctcatcagcttcgtgcctccactaacggacttttagtttgcatgtctctacgtggattattgttgctgctggacagagctgatcaggaaggaaatttattgcacaagaatgggaagaaattatcaagttaactgatgtgtaagggaggtgtacctggaagatactctttaataggcaatgcaatgtgtggggatatttttaagttttatcggtacaaatgaaatatattgaacacaaatcgagcaaatatgacttggtcgttaacatccctctgattaaacaggagtgctgctatgagaacgggctgtgcaattctgcaggcacacgagagtcgctgggttttagggtagtctctgtggagaatggtgactggaccacgtgggagaggggcttgaggcaggaaggtgagcagactccagagttcaagagatgtttgcatacagcgccctctttgtttccccttacagtgtggctgtggccagtattgaggaaccaagtgttcaggaactcatgctgggcctgccgggtcccacctgacctgagagtggcggggcactcagcgtttcagcaagctgctttcctcaacgatgcttttgatctcttattgttgctgggggaggctggagttccaccccaaatcaagtgggaagtgctgtcagctgctacgtctctcacctaggagctttagaggctca

SEQ ID NO: 114670 - DNA, 345 bp, Homo sapiens
ctccttctggctatgacctcagcatggctatcatgagggatgtctcctgcggcaaagataggacaccaggtgaagacatatggaagctggagagggtctggttcctagaagctagaacacagcagtcccaccagcacccaggatggtcatgtagctcctggagagctttgccagaaggggaaaagcggccagcttactagagacagcagcccgctggtggactctaaagacccccgcataaacagggaagttgatgaaactttgggttgggggatgcacgtcccgaaacttacattaagaaaagctctttcaattaacaaaatcgaattcagagcaaacgggtga

SEQ ID NO: 114671 - DNA, 327 bp, Homo sapiens
  misc_feature (1)...(327): n = a,t,c or g
gagaaaactgggtgcccacggaggagaaacggaatgcaaggagattgcaatctgtgctttgaaccagatgcactattactaatagctggaggaaattttgaagatcagcttagagaagaagtggtccagagagtttctctnctccttctctattacattattcatcaggaagagatctgttcttcaaagctcaacatgagtaataaagagtataanttttacctacacagcctactgagcctcaggcaggatgaagattcctctttcctttcacagaatgtagacagangattatcttggntttcaccaggcagtactttgacactt

SEQ ID NO: 114672 - DNA, 1767 bp, Homo sapiens
atgaggacacacacatgcacacagagggatgaccacatgagaacatatggagaagatggcatctacaagcccatgagagaggctttgggaggaaccagccctgcccacaccttgatcttggactttcatgctccacgatggtccctcacttgggctctgcttttggtggaaattgaacttaaacacccacctaaacactcaacaggaaatctctgcttctccatcaaagagaataaaaagtctcatccttccctctcgctggcctcaggagtgaagctgcagaccttcgcagtgagtgttacagctcttaaaggcagcatgtctggagttgctggttccttctggtgggttcctggtctccctggcttcaggagtgaagctgcagatcttcatgtgtggggtctgccgagccagcgcctacacagaactcaagctggcaccagagtgctgcccacagtcacggttcccgctggcgcctctccctccacacctcctggcaagcagagggagccagctccacctctgtcagcccagagaggggctcccacagtgcagcgtttgacagtatttgatagagggcttatcggtaatgtggatacagaaggctccaattgtttcagtgaagtgtgtagttggtctttggagctgaagagtgaaggaacatcaagaagcctgatgacacagctagattctgttgaaggagagaaagaaaagaaagaaagaaagaaagaaagaaagaaagaaagaaagaaagaaagagagagaaagaaagaaaaaagaaagaaagagagagagagaaagaaaggaaggaaggaagaaagaaaggaaggaaggaaggaagaaaggaaggaaggaagaaagaaagaaagagagagagaaagagagagagaaagagagagaaagaaagaaagaaagaagaaaagaaaaggaaggaagggagggaggaaggaagggaaggaagaaggaaagaaaagaaagaaagaaagaaagggaaagaaagaaaggaaaagggaaggagggagggagggagacactcccgcacgcacggagggagggaggaaggaaggaaggagaaagaaagtaagaaagagagagaaagaaacaaagaaagaaagaaagaagaaagaaagaaaaagagaaagaaagaaagaaagaaagaaagaaagaaagaaagaaagaaagaaagaaagagagaaagagagagagaaagaaaaaggaaagagagagaaaaaggaaagagagagaaaaagaaaggaacagcaggcttcagcggtaccagggaaaaagttggggcctggcagccccactatactgccagccagggagaacaagtcacaattacgaattatcacaataattagtgtctgttcttggggtatctgcaaagtgtgcaaagtgaggaggccccagctccccctcacggagcttgctttagagacaatgatattccttcagcctgatggaattgatgttgatgaacctggtggcattaattggctcctaatcgccctgcacattcatgctcaccagctcctcattttagagagacagtggggactcctgtctgagtatgtccacctggctcttgaagacaggcacctgcactttcccttccactcactcctgggacttggtgatgcagtggtggacaaattcacattcagggctgtgccagaaactggtgtacaccagctcagcaaatttcacgcccaggccttgtttgattttgcactcttcctgattcatggtgaaggcctcgatgtgtaa

SEQ ID NO: 114673 - DNA, 1222 bp, Homo sapiens
ggcgtgcgagagtggacgagggaacctttcctgtttcaaccggggcctcgccccggcatcctggaagaacttagggcaaattaagggagatcttggcaagttttcagatgaccctgatagatatatagaggctttccatgatttcactcaaatatttgaactctcctggagagatgtaatgttacttttgaatcagaccctaacagacaatgagaagcaggctgctctgcaagtagcagagagatttggggatgagctttgtttcacatatagtgtcagggaagggggcaaacattatccagctggaagagaagcagtaccaatgaatgaccctaaatgggatcccaatgatgaggtggaagtctcagaccgccctggcctgccatgtccccatcctgtgcctctaaaaacccgagaccctagcagggcagagacagaagcagctggacgtcgaaaggagcacatcagcggaggaacacacaggtggctggacgtggaaaggaaagcaccagcaccggcatgccaacaggccactgaccggcagaaccacatggagtttggctggggcagttggaggaaagcctggctgccagcaacatggatggaagatagccaaagtgaactaacacagaaacagacaacaaaatgccacatgttctcacttataagtggatgcgaagcattgagtacatatggacacaaagaagggaacaacagacaccagggcctacttgggggtggaggtttagagggtgaggatcgaaaaacaacctatcagagaatcaaggagtgtctgaacatagatcaagggcatgatgatgtgtccggagttggttccttccagtgcgttcttggactcgctgacttcaagaatgaagctgcaaaccctcgtgatgttcagatgtgtccggagtttcttccttctggtgggttcgtggtcttgctgacttcaggagtgaagctgcagaccttcgcagtgagtgttacagttcttaaagtttgtgcagacccaaagagtgagcagcagcaagatttacggcgaagagcgaaagaacaaagcttccacagcgtggaaggggacccaagcaggttgccgctgctggctcaggacaccccaactgctgttgggaattacccgatgaccactctagctacttcctgctggacaggggcaaagaaggggccctgcagtgatagtgtcctccagaggggaactctttag

SEQ ID NO: 114674 - DNA, 1328 bp, Homo sapiens
atggacccttgcgatgttcagatatgtccggagtttcttccttctggtgggttcgtggtctcgctgacttcaggagtgaagctgcagaccttcgcggtgagtgttatagctcttaaaggcagcacgtctggagttgtttgttccttctggtgggttcatggtcttgctggcttcaggagtgaagctgcagaccttcccgaaattcctttggttacaagtttaccccataaacggcaacacactcacctccatccaagacagactcaaggtggaggaagcgtggaaatgtgcttccggacaaagctctcagtatcctgggtgccattgtttcttctactcagccgtgttttttctactgagacagacaaaccctcagcccaggatagcagaagccgtgggagttcaggccaaccggcagacctgctacaggttctctctgctggtgaccacccaccccacaaccactcaagaagcctcatcaaaacattgttggagaaaactgggtgcccacggaggagaaacggaatgcaaggagattgcaatctggttagtgaaatagaatggggtcagtgctttgaaccagatgcactattactaatagctggaggaaattttgaagatcagcttagagaagaagtggtccagagagtttctcttctccttctctattacattattcatcaggaagagatctgttcttcaaagctcaacatgagtaataaagagtataaattttacctacacagcctactgagcctcaggcaggatgaagattcctctttcctttcacagaatgagacagaagatatcttggctttcaccaggcagtactttgacacttctcaaagccagtgtatggaaaccaaaacgctgcagaaaaaatctggaatagtgagcagtgaaggtgctaatgaaagtacgcttcctcagttggcagccatgatcattactttgtccctccagggtgtttgtctgggacaaggaaacttgccttccccagactactttacagaatatattttcagttccttgaatcgtacagaataccctccgcctatcataactataccaactcctcaacactctttggaccagaagtgcttggatcacaatgagaaaatccatccatttcgaaggaaacaaaacaacataataacccatgatgcaggactattctaatttctcttcatccatggaaaaagagtctgaggatggtccaatatcctgggatgagacctgcttctctgttaagcagctgccgcgcatatttctacagaaaggcctctcactcatttctaaggaggactttctgcagatgagtccaggga

SEQ ID NO: 114675 - DNA, 339 bp, Homo sapiens
cagagagctgccgatataggcagctgctcagaaaacctctaccctttttcagcttccctcaccctcagcacctctgctgggcttggtagcttacctgatggtgtgaccccaaccttcattcctaagcgatctgagcccttcttggtcaccatgcctctcatgtatgaggccatgatggatgcccagttagaaaagaactctaaaagggtcccacaggcgacgccatgggctcggatggatgctacccactccatgggctgccgtgaagctgtggaactcaaggccaaaggttcagcatactttgagaaagcagcaaacactgtggcaagcagcaaataa

SEQ ID NO: 114676 - DNA, 408 bp, Homo sapiens
ttgtgtgtgccaggagagtggcagtgccatgctgctgggagctgccccggagagcagcccaggaccccggcggggccgcccctcgtcctctctcgtccccgaggggtcgggcaggaaggaaaatcaaactttattcccctctgtgacttcctctgtgtgtgtgcatggggaaccggctccctcgagatggatgctgcattgcttcaggaggcaagcttcatcctcttgggtccttaaaggtgcttttgggggtcctttcgagggctactgtataagcgtgttcacgcgtgcctgaagcgggaagggtggtcagcaggcacaggagaagcgaatatgggagtggaggaagaggtgaagatgtggaaagcccagagagttggagagttgagagaaggaagaaagcagtta

SEQ ID NO: 114677 - DNA, 669 bp, Homo sapiens
cccacgcgtccgcccacgcgtccgctccaaaccataaagctaataaatggaagagctgggattcaaatccatttgtgactttagggcctctgctcttaaccactgaattatattaatattcatagaaaaaagaaggaacaaaaagaagcaaaaagggtgatggtagacttgatgagacttggaattggctgggagtacaaagtgaagactctaaaatggctatgggtcttaaagcctgagagactgaccaaaaagtttgacgtacaattaattgaaatcggaaacattggagtggagcaggtttgggaacatattttacttcagggacttagagggatggagtcctcctatgtcaccaaggctggaatgcagtggtgcttttgggggtcctttcgagggctactgtataagcgtgttcacgcgtgcctgaagcgggaagggtggtcagcaggcacaggagaagcgaatatgaaatgtttagatatacaaatacttaccactgtgttacagttgctgacagtattcagcacagtaacatggtatacagtctcatctttcacctttgttttcttttctctaatccaaattgccgaagggagtggaggaagaggtgaagatgtggaaagcccagagagttggagagttgagagaaggaagaaagcagttaag

SEQ ID NO: 114678 - DNA, 842 bp, Homo sapiens
tttttttctgtttcaatataattttattagcagttattacatcaaaattcacatttagaggatccagaggactgtcttagaaaattctaaagcatatttaattaggttttaacagtaagggagaacttaatataacacagcccttaaaaagtcaagactactactgaaaattaagtgcagttctatcaagaactagaaatgaactgcacgcgtagtgtcacttaaagcaaagcttcatgaaaatataatacacttctatgaatgtatcagtggcaaacatcattggcttccaaaaaactgacactaaaggaatttccaatcaaaacacaagcacagtggctttcattcaatatagagctatgataagtctatcaagagaccctgaatccttacgtacttgtaataatgatttttatgctgtgacactagtaccaaaaccacatcaacttcttaatgcattaggatgaccgaccacatgataacacggatacccaaggaaaagccttttttctatatcaggaaaattgccaaggttctccaggtactgtgtagggctcggtcattgctgatccagtgaaattctacgtcctccagcttgagcagtattataggattcacaaatcttacatttcatgcctaatatatgaaactgaacagtggatcggtccattacagtcattgcagagaatatccacagtcatgttctgatattctgatggcataggagtctgtgctacttcatcatccagctgtctccaatacctggtcatatctaaagcagagtgcatacataatggacatctgtagcctctatgtaaaagatgtccacatggcaagacatg

SEQ ID NO: 114679 - DNA, 1038 bp, Homo sapiens
atgaagaggtcgatgtggctgggagaaataataagtgggagagaagggagccaggtaatggggccagatcatatagggcctagtaaggaaggagagagggagaaagagaagtggggtgaagaaaggtatgatgttgctgtggaaacacaaagcccaaatcctcaaagaacactctgttctagtcccagctgctgtatccatctgcgttgtatctcattagcagaagagcctagtgagataggagttgcatctctgctcatccagatctctagagaagggatctacccctggactttttcctggcttaagctaaaagggggaaattacgggataagtgcaaggctatttcctgccaaacagtcagatagtacagtgggatctcaggacattcacacatcccgtgttgttgctcatgtcttgccatgtggacatcttttacatagaggctacagatgtccattatgtatgcactctgctttagatatgaccaggtattggagacagctggatgatgaagtagcacagactcctatgccatcagaatatcagaacatgactgtggatggtagatcctaccctgtggggaggaaggtcttcagtcagcgactatgtggccaactgccagagggctttcagggtcacaactgtagctccgccctgcagttttatccaatgtcaggcccatttgctgcaggactgctggagtttgctggaggtccactccagtccctgtttgccttggtgtcaccagcagaggctgcagaacagcaaagattgctgcctgttccttcctctggaagtttcatagcagagaggcacccactccagaagttagccagagctctcctgtataaggtgtttgtcaatccctgctgggaggccctcaacggattggatgatgcctctccacggtccacatcggtgagggtgattgtctttactcagcctattgattcaaacactaatctcttctggaaacactctcagactcacccagaagtaatgtttggccagccatcggagcatcctctggcttag

SEQ ID NO: 114680 - DNA, 4701 bp, Homo sapiens
gactgcctgcttgcaggctgtgtcacagaagagaacatggcagaacagtatgctcaggagttgataccaagttgaaattcactcttgagccatctttaggtcaaaatggttttcagcagtggtacgatgctctcaaggcagttgccaggctatccacaggaataccaaaggaatggaggagaaaggtttggttgaccttggcagatcattatttgcacagtatagccattgactgggacaaaaccatgcgcttcactttcaatgaaaggagtaatcctgatgatgactccatgggaattcagatagtcaaggaccttcaccgcacaggctgtagttcttactgtggccaggaggctgagcaggacagggttgtgttgaagcgggtgctgctggcctatgcccgatggaacaaaactgttgggtactgccaaggctttaacatcctggctgcactaattctggaagtgatggaaggcaatgaaggggatgccctgaaaattatgatttaccttattgataaggtacttcccgaaagctatttcgtcaataatctccgggcattgtctgtggatatggctgtcttcagagaccttttaagaatgaagctgccggaattatctcagcacctggatactcttcagagaactgcaaacaaagaaagtggaggtggatatgagcccccacttacaaatgtcttcacgatgcagtggtttctgactctctttgccacatgcctccctaatcagaccgttttaaagatctgggattcagtcttctttgaaggttcagaaatcatcctaagggtgtcgctggctatctgggcaaaattaggagagcagatagaatgttgtgaaacagcagatgaattctacagcaccatggggcgccttacccaggagatgctagagaatgatcttctgcaaagccatgaactcatgcagactgtttattccatggctccgttccctttcccacaattggcagagttgagggaaaaatacacctacaacattacaccgttcccagccacagttaaacccacctcagtttctggacgacatagtaaggccagagacagtgatgaagagaatgacccagacgatgaggatgctgtcgttaatgcagtggggtgtcttggaccttttagtgggttcctggctcctgaactgcagaagtaccaaaaacaaattaaagagccaaatgaggagcagagtctgagatctaataacattgcagagctgagtccaggagcaatcaattcctgtcgaagtgaataccatgcagcttttaacagtatgatgatggaacgcatgaccacagatatcaatgcactgaagcggcagtactctcgaattaaaaagaagcaacagcagcaggttcatcaggtgtacatcagggcagacaaagggccagtgaccagcattctcccgtctcaggtaaacagttctccagttataaaccaccttcttttaggaaagaagatgaaaatgactaacagagctgccaagaatgctgtcatccacatccctggtcacacaggagggaaaatatctcctgtcccctacgaagaccttaagacgaagctcaactccccgtggcgaactcacatccgagtccacaaaaagaacatgccaaggaccaagagtcatccgggctgtggggacaccgtagggctgatagatgagcagaacgaggccagcaagaccaatgggctgggggcagcagaggcattcccctctggttgtacagcgacagctgggagagaaggcagcagccctgaaggcagtaccaggaggacgatcgaggggcagtctccggagccggtgttcggagatgctgatgtggatgtgtctgcagttcaggcgaagttgggagccctggaactgaaccagagggatgctgcagctgaaactgagctcagggtgcacccaccctgccagcggcactgcccagagccgccgagtgcacccgaagaaaacaaagccaccagcaaagctccccaaggcagcaactcaaaaacccccatctttagcccttttcccagcgtcaagcccctgcggaaatctgctactgccaggaacttgggattatatggccctacagaaagaaccccaactgtgcactttcctcaaatgagtaggagcttcagcaaacccggcggtggaaacagtggcactaaaaaacgatgatgtctccccgaaactttgtatctggactcaccttttcacagtagtataagggttgcagctgaatggctctaaaagagttttatttgtccagtgaaaatgaataggttcagggatgagcaacagcccataaaaaatgggaactggaagttttataataggagttagaacagggctgttttcccagctacttgctaactgacgaagtggattcttgtggcaaaataaatattgtggttttatagtgtgaagttttcccaatttttcattgtgagctgtttaaaaaagactatatctagattgttaactctcgtccatccttctgttctgggggccttcagagtccctgtgacagcacccccaaaccttccagttctctgggtgttactaatactcaagcatgcacataccagcttgctaggacagaaactgtaaaaagaaagtaagtttcttcgttacaaaaaacttcctgattttccttttcatgctttacggaggggattgtgtcgtgtgagatttcccacagtaccagtttcaaatttttttttattcttatgctaaatcataggagaaaaatctagatggcctttctttaactgtctatttctacctgcaaaatgaagaaaacctttcatctgttgaaatttcaatcgataacccagctgaagatcttatgcacaggacacacttggcatatgctttacgcagttgctccggacagcttgctcgcgccactgagcttttcctgaggtttgtgttcgcctctcaaggagagctttgatcctcagtggtacggatgacttgatgggctccatgcggagcctggcctgcatcccccaccacacagctcactcacccaccagctctagactgcagacgcacaaggcctctgctcagaagccagaacacagcacctgtgactctgttacttgaattttgtgctttttgattggagtcctttgttgagtactttgttaattgaacactgcctttctctggagaaggccccagtgctttctagctccctctcactcctgccctttctagctctctctcacccagcgggtcagggatagcacctcttgtctccactatgcagatgggaactctgagccacacagaggtgaagtagcacttcagttactcaaggtcagtactctcggtattccaagtgacttagccacatttccttcagtgcaataggtgggtttaatgctctttgtacacagatgtattggctacatagcgtgtaaaaaccaagactgggaagccattcactaaaatccctcctgactcaaaggacctgtctccagatggtacagagtcccttgatggcattttacaaaaccagctctgacttccttatcctgaacagggagtttattttaaaaatgcttcatgcacctgttatttggctgaacagaaggctcactcctcaatccccttctcctcgccatcattagaggaatagactcagccttcatgtttgtctctggaagacgattggcgatacttgcaggaatattgttgatgcagccaatattaatttgagctaatggattgttaattctgaaacgaaaactgtaactgtagagcaggcttttactatgagaggtactactttttataatagagaatgtggttgtgtgggctttttttgaacagaaaacacaacaatgacctataccgtgagaaaagccattttatcttcttcgtggtatttttacccccaaaggaactgaagatggaaaatatgactaataagttattgcagttttggtcttgaattctgtgccatctgaagttagcatccagcttcttaaaaagcagccacgcctacagcctgttttttgggaaggctgtaggtggagagatgggcttattttgcataccaccctcagggcccagagacccactgcattttccaaagttaagcatgacaccattttcttccatcagctaaactttacagataatagtgtttccacctcatatccttttctttgccccttctcaaatgagtcagaatagtcatgttccccttgagggatgtctgacttgaatggagaattgttctttcctctcttgaatcagctcactagctccctgatggtctgggttcaaggaaatggttaatgaggtagaggccacttatacaagtccttgggattgtaccattgctgtccacaaacttagtatcaacaacacatgctgtgccctgtgaacactctcctctcacctatttccagggttggtcttcctgagaaggggatggatgaggtaacacacagtttgggatacgtatctgttgaatgaatgaataagtgaaaggataatagtcctctgaggtaaaaatggccttgtcagaattttgaaaatccaacagattcctattaaagcactctgtgtaccaataacatgcatgcattgtaccaagtaatcacaatgtgaattggtcaatttatgagccttgcctactttagaaaataaagaaacctgcagtagcctctaccac

SEQ ID NO: 114681 - DNA, 600 bp, Homo sapiens
atggagcgaatgccacgctctgtttccattgcgttctgtcagacaaatcccacaaatatgctgcttgggctcccagattttatggaacttggtgacacagctcttcatgttttgctcacagtcactctgccctcaacaggactcctccgggaatgcagatggaaccggaatgggccatcactgtcaccggaagtacatgggcagaggtggaggagggctggctccccaagcaaaattaaggcaatgttgccaaagcatagtaaattctgggcagcaaagacggcaattgtccacaacaaaccctatgagattgaaattattctcattgtacagatgtggaaattgaagcagcctgaactgagtcagacattcagcattgggagatggccagcagggaacggcatgaaagctgacccaatacctacagtaccagtccccattcaggccaggctccgcatggagcccatcaagtcatccgtaccactgaggatcaaagctctccttgagaggcgaacacaaacctcaggaaaagctcagtggcgcgagcaagctgtccggagcaactgcgtaaagcatatgccaagtgtgtcctgtgcataa

SEQ ID NO: 114682 - DNA, 348 bp, Homo sapiens
ggcacgaggggaacgctgaggtcccgcgctccccgaccgaggtatatctgcatgaataacctaaatgatcccccaaattggaatatccggcctaattccagggcggatggtggtgatggaagcatgtggaattatgccctgttggctccaatgctgggaatggctgcttttcgttggatttggtctagggagtcccagaaagaagtataacaagagagagaagtctaccatcggagaactgctggttttcaacaggatctggcagccaagtaccacgccatgatctcagaacatcggcgtgctgtctctcacttgcccttggaactctgaaaggaccatcccacaacg

SEQ ID NO: 114683 - DNA, 1766 bp, Homo sapiens
ctgtgcaggcaagcacatagttaaaactgaaggaaaaatttcttgaataaaagtagttaacgtttttattctttacttcaaggtatatctccatggaataacctaaatgatcccccaaattgggaatatccgggcctaattccggggcggatgggtgggtgatgggaagcaggtgggaattatggccctgttgggttccaatgctggggattgggctgcttttcgttggatttggtctaggggagtcccagaaagaagtagaaaaagagagagaagcctaccgtcgggagaactgctgcttttcaacaggatctggtaagccaagttaccacggccatgattcttaagaaaatcggcgtgctgtcgctcaggttgtccttggaactcgaaaaggaacaaaacagaactgctagttaccgaggaagcccttatctctcagggacgcaagttggtagaagaaaagaagcttctggaacaggaacgggcccaggtgatgcaagaaaaaagacaggtgcagcctttgagaagtgcgtatttgagctgcctgcaaagggaagaaaactggcaaaggagagccaggcttttgctgaaagaatttgaagctgttctcacagaaagacagaatatctactgcagtctgtttcttcctcgcagcaagcggctgggagatagagaagagcttactggtgcgagcgtccgttcgaccccgtcgcccgctggacctaggagatgggcagccggttttcaccgacatatttcagcatgatacatactgtgggtgatgtctgggaacacccaacaaacgccccggatggcagactcattgtggctctatcttcaaatactgggaactcgtttgttcgaactgaaggaagttttaagagagtagaggaagcccatactagaaaagtaagacaagagtgaaatcaaaacggcttttagtgactcgagcccgggcaagtcatgcgccttctgggtctccggcgtcttccgttcccgtgctgccccgtgtcaaggcccaaaccgtcaccccttcggcagcggacctcccactcccgcccaccgtctgagcagaagtgcaccgaagccctcagagacagagggtctcctcccgatgctctgccgctgttggggatatggtttcttgaagcatttttaggctgccagtattgtatttcagcatgatacatactgtggtgatgtctggaacaccaacaaacgccagaatggcagactcatgtggctctatctcaaatactgggaactcgctgcagggcggaggaggggcagccactgtaatccttgtctggagtgaacattgtatatgaggttgcagtggcttataaaggaaggacttttgcggggaggggttgagattgtactttctaatttcgcttgcttcagacttgactttggaatgaagttcgaaggcatcacaattgacctggacattccaaaaacaaaactgaagaggcagcatttctcttccgtagtccagtcagctcatttggtagatgcgctttttcctcctttgcgcttattcatccataaggatatataatttgcatatatatttcatatgcgtgcatatgtgtgtgtatgtgtgaactggcaggtgttgatttcataaggacaaaattgttctgcaaaccttgcaccaattatggggtgtttcaacggaaaaacttcaccaaatgatctgtgtgttctttcaaagagaagttatgtctaattaaaatgtgtaacggactaaaaaaaaaaaaaaa

SEQ ID NO: 114684 - DNA, 1062 bp, Homo sapiens
atggggaccagggggacaggcacaccagaggaggtctactttgtgcacagactttgggaaggaccagatgtgcctctgactccccccaaaactgcagtcaaggtggctaagctgtctgtggctggacagccactgttagctccttctagtgcatttgtggtctggctgacttcaagaatagagccacggacctttgccatgtgtgttacagttctcaaaggtggcaccgacccaaacactgagcagcagcaagatttattgcaaacagcaaagaacaaagcctccacaacatggaaaacgaccctggcagattggcgctgctggctgcggtggccagcttttattcccttatttgtccctgcccaaattctgctgattggtccattttacagagtgctgattggtccattttacagagtgctgattggtccattttacaaacctctagctagccacagagcactgattgaaggccagctgccttcacctctcactaccacgaaagtagtagagcttgggtttggctgccatgactcctggctcagggttttcaaggacacagatgaagagatgcagagggtgacatacggggcaagatgcctggatttcctgtgccctccccaggtactaccctccaggaggtatgatgatgagaagattaaaagatcattgaacaaacattcacagaaggcctacaagagctcaggaagcaaagaaaacggacgaagtgtcatcacggaacttgtattctatggggtagagggaatagatgataaacaaaactattccctcctggacatgaggccaccaccaactgcgatgatcactttaaacaattccgtttactggcaggaatttgaagatacctgtgtctatgagtgtctggatggcaaagactgtcagagcttcttctgctgctatgaagaatgtaaatcaggatcctggaggaaagggcgtattcacatagacatcttggagctggactcgtactcccgggtctttttccccacgtccttcctgctctttaacctggtctactgggttggatacctgtatctctaa

SEQ ID NO: 114685 - DNA, 909 bp, Homo sapiens
atgggtaaagaattgaaggggcatccaaaccaagcaacaggaaatctggattctaatcatggttctgcctcaaaatgtcattatgacgtagggcaaatcgcagaccctgtggtccagttttcctcatctggagaaaagataattaaggccaggtgggatgcatacagtaaaagagggcacctgaacaaacaagcattgaatttggagaatgcctacgagtctgtgctgggctacgttcccaagacagactcagaagttacctgccctgccagagtgctgattggtccattttacagagcactgattggtccattttacaaacctctagctagccacagaccgctgattggtgcattttacaatcctagctacagagtgctgattggtgcattttacaaacctctagctagccacagagtgctgattggtgcatttaacagagcactgattgttgcgttttacaaacctctagctagccacagagcactgattggtgcgttttacagtcctagctacagagtgctgattggcgcattttacaatcctctttgtccaaaactgctaaatgttggattgagggatgctcacactggaagagcagatggaaagtggatagggatgggagacctggtgactgtggggtgcactgttccagagaatggtgtttggaactatgttaagaaatggaatctggcagcattgcctaggattagagaaaagggtggggagactgaaggagggaagccagataagaatgcagataaagataatgagagcaggaagtcccacaaggccaaaatgaaggttttgatccagatgggcttttacctggaggctacggggaagaatccatttccagactctttcagggtgttggaggaatccatatccttacagttgtgggactga

SEQ ID NO: 114686 - DNA, 348 bp, Homo sapiens
ttttacttaaatctatttattgaaaaggtcacaataaatagaatgccactaccacttgtcctaaacaataaagtagccaataaaaatataccattaaaacaaaaacagtgctaaaaaagtctggaattttttccacctgccctaagcccaagtcctgctatgattttgtgccacttaatgcaggccccataccacctaaaagtatcttgggaaccaacggacccacccacactttggaaatgctggactaacgtctcaacaaacccacccctatcagccctcagaggtcaccgctgactcaggtgggacacaggtagacaaggccaaccaggaggaggccacgaacac

SEQ ID NO: 114687 - DNA, 1165 bp, Homo sapiens
cgcgcttcctgtgaggtcaggtgggaggaaaccgcctggagccgccgggagtggacgccgccgaggcccggagtcgcgcctgcagacacagcatctactcagcgtgggtcacctctgtgaacatcactgactgcaagcctccctcaatttctggtaaattttttccttcaagctttttgaggtcagggggaaaatcctccacagatcttcacgagtctggtcccagatcactaacagctaaaggttttgtggtggggagaacttctgtgccacttggcttccattagcctgcccaccctgaccacacaatgcaggtgcagcccatcagggacccacagcgccctgggaaggatggtgcggatcttggccaatggggaaatcgtgcaggacagacgacccccgagtgaggaccactacccagccaccaagaggtagcattcctcgacagagctttcttcaacaggggccatggtgctcccccagggggtccgtggcccccgccagcaagcaggcaaggtgccaaggctgggtgctgctcagttcccccttcaatgaccttaaaccggcagctggtgaaacatgggctttccgcagttggcatcttcggcaaccattgcttgtgggagccggtgaagatccatcctgcctcctcttcctgctcatgatgcttggtgttcgtggcctcctcctggttggccttgtctacctggtgtcccacctggagtcagcggtgacctctgagggctgataggggtgggtttgttgagagggacttgctgggccttggtgtgagagcaggcatatttggaggggatctggtggtgccttgaaaggtatgaatcagaagagggggaaccacaggtgtgtgttttccctttggtgttaagcgttgaggcagagggagacgttagtccagcatttccaaagtgtgggtgggtccgttggttcccaagatacttttaggtggtatggggcctgcattaagtggcacaaaatcagagcaggacttgggcttagggcaggtggaaaaaattccagacttttttagcactgtttttgttttaatggtatatttttattggctactttattgtttaggacaagtggtagtggcattctatttattgtgaccttttcaataaatagatttaagtaaaaatgaaaa

SEQ ID NO: 114688 - DNA, 587 bp, Homo sapiens
tcccacctgagtcagcggtgacctctgagggctgataggggtgggtttgttgagagggacttgctgggccttggtgtgagagcaggcatatttggaggggatctggtggtgccttgaaggttatgatcagagaggggccccacaggtgtgtgtttccccctttgtgttaaagcgtgaggccagagggagacgttagtcccagcatttcccaaagtgtgggtgggtccgttggttccccgagatacttttaggtggtaatggggcctgcattaagtggcacaaaatcagagcaagaaagcgatgcccttcccaattctctcaaatccttttatgccgagaagatttcaagtggaagcccaacaggttccgatgcctgtggaagacatgccgacgtctcctctgcctagggagcaaggacttgggcttagggcaggtggaaaaaattccagacttttttagcactgtttttgttttaatggtatatttttattggctactttattgtttaggacaagtggtagtggcattctatttattgtgaccttttcaataaatagatttaagtaaaaatgaaaaaaaaaaaaaaa

SEQ ID NO: 114689 - DNA, 999 bp, Homo sapiens
atgcctgagcctccccgccactccgtgggctcctgtgcggcccgagcctccccgatgagcgccgcctcctgctccacggcgcccagtcccatcgaccatccaagggctgaggagtgcaggcacacggcgcgggactggcaggcagctccacctgcagcccccgtgggggatccactgggtgaagccagctgggctcctgggtctgtctgcagcttcacccctgaagccagggagaccacgaacccatccggaggaacgaacaactccagacgcgcggctttaagtgctgtaacactcactgcgaaagtctgcagcttcactcctgagccagcgaaaccacaaacccaccagaaggaagaaactccgaacacatccgaacatcagaaggaacaaactgcgaacacgccgcctttaagaactgtaacactcaccgcgagggtccacggcttcattcttgaagctgaaaacataatgtttctggagttggatgtgtcccctccagctgtctttgagatggaattctctcacgaccaagaacaagaccctcgtgcgctacacatggagaggctcatgcgattggacagctttctggaaagaccttccacgtctaaagtccgaaagtccagatcctggagcaagaaaaaaagaaaggagggcaccgacaggaaaaaaagggacagggaaggagaaaaagaggagaaagggaaggaagaaagagagaaagggaaaacgaacagaaggggaaacaaaaaagcgaaaaacagagacgaaaccggaagggagaaagaagagaagaacacgggggcagagaagcagagagcaccgaagagaccaagaaaaagttgcgaaagagaagagaagagagttggacacggcaaaccagaaaaaaagccaggagggccacaggtgatccaaacgcgagccacccaaaaaagctcacagggctctcccacacagcttaatggaactgtttctgggattttgggcattgataagtaa

SEQ ID NO: 114690 - DNA, 654 bp, Homo sapiens
atgtggccacgcctggattcaaggcagtctgaggaggtgagtgtttcaaagaggcacatggatgccacagacaaaatcaagtttccatggttgaaggagaagaggacgatagagtttggggaggcagcaggctacgtctgccacagaagatataaagatatggagccacacgagaagatgggggaggctgccaaaaaagtccactgggtacagatgaggagcagggctcgggacctgcagcccgccatgcctgagcctcccacccactcaaagggctcctgtgcggcccgagcctccccgacgagcaccaccccctgctccacgacgcccagtcccatcgaccacccaagggctgaggagtgcaagcacacggcacaggactggcaggcagctccacctgcagccccagtgtggggtccactaggtgaagccagctgggctcctgagtctggccctagaaacaagaaccaatccagcagcaacaagcatctctggcagtctatcatttcccttcaactgaaatcagatcttcttaaagaaatgcttggctctcagactgggaacggaaatgtacaagatgtgcttcgatatctggtcaaatcagaaactcaaaaagctatcaaagtctctttggactgtgtcagaaagaggtga

SEQ ID NO: 114691 - DNA, 528 bp, Homo sapiens
atgaatatggatattgtggttcttcgtctcactgacttaaagaagccgtggaccctcacagtgagtgttacagctcataaaggcgccgcacgtggatttgctcgttgtgacattcggatgctgatgacagtttcctccttctgctgggttcacgctctcactgacttcagaaaggaagctgtaaacctccgcactagacataaatgttctccaaatccccaccagactcaggagcccagctggcttcacccagtggatcccccactggggccgcaggtggagctgcctgccagtcctgcgcctgcgccttcactcctcagcccttgggtggtcgatgggactgggcgtcggggagcagggggcagcgctcgtcggggaggctcaggcatggtgtttggatttatagcaagttttatgttcctacttgactttatcactatgctgtatgaaaaacgacaggagtcccagctgagaaaacctgaaaataccactagggctgaagccctcactgagccacttaatgcctaa

SEQ ID NO: 114692 - DNA, 1283 bp, Homo sapiens
atgactgtatttgaagataaggcctttggaaggataggagccagaagcgctggtgcaagtcaagccttcatcgacattttgaccacacacgtaatgggtttttcagctggaagtctgacgatccagccagccagtgcttctcagcccccttgcagtaagaagcagccagtgggagctcagatgaggcaggaatctagctcccgtaggcctgacagtacctcaggcagcgattcgcgaagggccatctgcagatttttgagggtccctgaatccaatttaggaaggtatgaagtcaaaactcttcgtaacaatagtaagacgtttgcctttgtcactgtgttgatatttgtactgatgcccttggctgcaagtaaggcaggggctgtcgagttggcagctgagtgtgcagctaagaagaaaaggagaacgggctctgagagggctcgggacctgcagtctgccatgcctgagcctcccacccactccatgggctcctgtgtggcccgagcctccccgacgagctccaccccctgctccacggcgcccagtcccatcgaccacccaagggctgaggaatgcgagcgcatggcgcaggactggcaggcagctccacctgcagccccggtgcgggatccactaggtgaagccagctgggctcctgagtctggtggggacttggagaacctttatgtctagctaagggattgtaaatacaccgatgggcactctgtatctagctcaaggtttgtaaacacaccaatcagcaccctgtgtctagctcagtgtttgtgaatgcaccaatccacactctgtatctggctactctggtggggacttggagaacctttgtgtccacactctgtatctagctaatctagtggggatgtggagaacctttgtgtctagctcagggatcgtaaacgcaccaatcagcaccctgtcaaaacagaccacttgactctctgtaaaatggaccaatcagcaggatgtgggtggggcgagacaagagaataaaagcaggctgcctgagccagcagtgacaacccccctcgggtcccctcccacgccgtggaagctttgttctttcgctctttgcaataaatcttgctgctgttcactctttggctccacactgcctttatgagctgtaacactcaccacgaaggtctgcagcttcactcctgaagccagcaagaccacgaacccaccgggaggaatgaacaactccagatgcgccaccttaagagctgtaacattcaccaggaaggtctgcagcttcactc

SEQ ID NO: 114693 - DNA, 906 bp, Homo sapiens
gagcggtgtacagccccactacggaggaggacccgggccccgccagaggcccccggagcggcctcgctgcctactttttcatgggccggctcccattgctccggcgcgttctcaagggcttgcagctgttgctgtctctgctggccttcatctgtgaagaagttgtatcacaatgtactttatgtggaggactttatttttttgagtttgtaagctgcagtgcctttcttctgagtctccttatactgattgtgtattgcactcccatttttatgagagagttgataccacaaaagtaaaatcatcggatttttatattactttgggaacaggatgtgtgtttttgttggcatccatcatttttgtttccacacatgacaggacttcagctgagattgctgcaattgtgtttggatttatagcaagttttatgttcctacttgactttatcactatgctgtatgaaaaacgacagtaggtcccagctgagaaaacctgaaaataccagctagggctgaagccctcaacttgagccacttaaatgcctaaagactctgggggagcaatgttacctaaggtagtgaccctgcattgtggtgcctgagccctggcagaagcttcttgtaaaattttgttaattgtttaaaccacttctttttggagagcaagggggaaggtcaagaaggcagttttctcaatattgtgtcagtccccacaaagtaggccagataagttaaaaaaaatttttttttaaataataattgaaacttatctccaattggagattttggtgggaggaggagaaaacaattgtttttaaaatcacacagctcaacggttgataaatgattctgtccattctgttacaggtcattcttttactagggcttagcttccaaattatgg

SEQ ID NO: 114694 - DNA, 345 bp, Homo sapiens
atgggctgctgccaagacaaggactttgagatgtctgatgagcagtccaaggaggaagagtctgaggacggcagggaagatgagaccacagacacacaaagagggcccagggagtgtgagagggggcttcccgagggtaggggcgccgaagatatcgacttgaactccccggaccatccgaatcacaagtcgaacgaaagccttctgattaccgtgctgtggcggcgactatccacgttcggtcgtcggggctcctcgcggccaagcaagaggcaaccagaccagattcggaagcaggagagtccgatccgagaaggcaaccaggaggagccggagaagggatga

SEQ ID NO: 114695 - DNA, 443 bp, Homo sapiens
tctctcggaattctgcaggtatacgttagaaattttattctctggaggttggggcggactgagagcaggtcttgggtcatttcttctccggctcctcctggttgccttctcggatcggactctcctgcttccgaatctggtctggttgcctcttgcttggccgcgaggagccccgacgaccgaacgtggatagtcgccgccacagcacggtatgaactacataaggcagaaacccaggtccctgtcacccattcaaagccgtgtcactaagagtttgcctgtcgccatcattccagtatcctcagggagcatcaacgctctcccttcggccctgagtttagcgaggggattggtcttacccgtcggcctgggcgaggccacggaacatgccctccccgcccgggcagtgtctctgaccctggaatatgccatcctcggtgctg

SEQ ID NO: 114696 - DNA, 440 bp, Homo sapiens
tttatacgttagaaattttattctctggaggttggggcggactgagagcaggtctggggtcatcccttctccggctcctcctggttgccttctcggatcggactctcctgcttccgaatctggtctggttgcctcttgcttggccgcgaggagccccgacgaccgaacgtggatagtcgccgccacagcacggtaatcagaaggctttcgttcgacttgtgattcggatggtccggggagttcaagtcgatatcttcggcgcctgaggggacgacgaggcctctgagctcacccctaccctcgggaagccccctctcacactccctgggccctctttgtgtgtctgtggtctcatcttccctgccgtcctcagactcttcctccttggactgctcatcagacatctcaaagtccttgtcttggcagcagcccatggcccc

SEQ ID NO: 114697 - DNA, 504 bp, Homo sapiens
atgattcctccatccaatgggcaccacgtaggtgtagcttatcttagtcactttgggcagcttgaacaacagacatttatttctcacagttctggaggctggaaattcatcaaggcaccagctgatctagtgttggataacggcccacttcatgattttcagacaatgcttcttgctgtttcctcacatggcagagacagacgcagagagaaaatgccctcctgtagcttttccatgcactggaccttgtactggttagactcatcagggttcagtgagggacccatgcagaaatacctcggcaatgggcagatatatagacgtgaagaaatgtctttcagctatagtaactccaagactgaaatttacagcaagtcttacacaaaacaagatggtgactgggaaaagggagggctccaggagagccctcaggccatgcacaagcccaggacatccggcccagccccagcgagcacactggcctcgagcacactggcctcatga

SEQ ID NO: 114698 - DNA, 3872 bp, Homo sapiens
gtgaggcgcgtgttcgggctcttgccgtccccgcacccgcaccgcggttactggcttgcggtccgccgttcgacaaccagcccttgggtccccgcccgccacggacatgccgcgcgtctacataggacgcctgagctacaacgtccgggagaaggacatccagcgctttttcagtggctatggccgcctcctcgaagtagacctcaaaaatgggtacggcttcgtggagttcgaggactcccgcgacgccgacgacgccgtttacgagctgaacggcaaggagctctgcggcgagcgcgtgatcgtagagcacgcccggggcccgcgtcgcgatcgcgacggctacagctacggaagccgcagtggtggaggtggatacagcagtcggagaacatctggcagagacaaatacggaccacctgttcgtacagaatacaggcttattgtagaaaatctttctagtcgggtgcagttggcaagatttaaaggattttatgcgaccaagcaggtgaagtaacctatgcgatgccccacaaggaacgaacaaaatgaggggtgtaattgagtttcgctcctactctgacatgaagcgtgctttggacaaactggatggcacagaaataaatggcagaaatattaggcttattgaagataagccacgcacaagccataggcgatcttactctggaagcagatccaggtctcgatctagaagacggttatgaagtattttgtcgcaggagcagccgcagtagatctcgaaggatctcaaaaagtcgctcccgttccaggtcgcggagcaaaggtcgatcacgttctcgatcaaaaggcaggaaatctagatcaaagagcaaatctaagccccaagtctgatcggggctcccattcacattctcgaagcagatctaaggatgagtatgagaaatctcgaagcaggtctcggtcccgatcccccaaagaaaatggaaagggtgatataaagtcaaaatccagatcaaggagccagtcccgttccaattcgccgctacctgttccaccctcaaaggcccgttctgtgtcccctccaccaaaaagagctacttcaagatcccgttctagatctcgctcaaagtcaagatcaaggtccaggtcgagttccagagattaactcagaactccttgtttgcacattattatggaacactttcctacttaggcagttactcttccatgtttatacttggcctcttctgcaagaggaatctcttgaaaacaggggcacacagaaatttgatttgtggccaaattggatgaaaaagatgaggctctaaggaaatggtggcatgaagaccctctcccttctttgtagaattaagataactttgattttatagcttttgagctaacgtaacttttgtaaagattaagctcatttagtgttgtttttttttttttttttttttttttttttttttttttagtatttcagcaggatctgctggcagggttttttttgttttatttgtttgcttatttttaaattaactgcatttgagctttgaataccttaaggctttagaggagagaacccaacttttcacattatgttcggctttttataacagcttgagttatgtaagatttaaataaaagtttgctaccaagatgattgccttattgaatacggtcactattaaattcctttaaatgttgatatctgccatttgtggaaacaaccgtaaattctacttaagtgtaaacaaggcaagcctcagaccagcaataaattactcagtttggataacattattttgtgcagttaatcaaatttgccaaagtctttatctgcccctttaacaagttgagtaaaaataaaaggtattttttacgtcaatgtgttccatgacttttgccttaaattaatacttttaaggtaatgggaacttttttcaaagggcaaatttaaactatttaagaaatagctcctaatacttgggatcttgtttaggggattccactttctggaagatctcagcataattagtgttgagagtggttcatgtgtctttaatgattgacatgtggaaatggaagtagcctctttttgttctgacattgagtatattcacagtgctgaagcacatactgcattttctgatgaaagatcattatgattaacaggcacttaatctcagcaaagtcagctgccagttaagttccacccagtaagtcaagtcccctttgtagttagtgggattatttgataattggttagatcatacttgtaaattttaatgctttgtgtaattgggttgaaaaacagtgaaatgggtaaaccgcaaaaacttttgtactttattacggagtaaagtgtaatgagtactgtgggaaacccaaatttggaatactgccaaatttgtagggagttactagggttagccaatttggtcccataccatcccataagcctggatgagttgaaattgcagtttgagaagtgaattaacccttacatccctttggttccagataccttaaaaggtacctttatttaaaaagccatttattaaatcttagtctgaaatcaaaatatagattaattggctcagctttaatacctttcctaggaggtgtcacaatgtagggtaccaagggttgggattgtgatggggcatggtccgtaccaccggctcattggtgccacagggtgtgactggaaagcatgatattctagggttggtttgtagattcaaataatccagaaatatgcctaataagattgagtgaaaaatttgagtcaaatatctagggcattcacagagtagctgtgaggttcttggtaatgtgaaaaaggccttgtttttcagaaattcctgggtttcctgttaaaaaatcttaaagcccaaccttaggaatatagtgccccaaaaggcggatgcttcttccattatcttattttctttgatactttatttaattagatgtttataaagaaatgggtttatttttccagcataaacctcagaatttaaggaaagaaaatgatgtcctgttgtttatagttccattgttttgccctactcagcagaagtgatgactctttaaaaattggctttgaccaaaagttctcttgttttcagggaaaagaacataaaagctttttggaactacagcctttttaaaaagagggatggggaggatattacagtaaggaaattaggctttcctaaaaggtatgaaaccatccttcaactggggctccccttgttaatgggaccatccataggggtaatagactgggttggactatattggttagctgcccacagtaagccaggtcattgtatagggtaaaatgccctgcaccccataatttttcctaggtaattagcccacgacccaaattttatttaaccagtccagggcccttatcccttgccctggtaagttctccaagtccactgggatgccacaaaatcacctgtgtaaacattgggctcaacttaggggagcataggggttgactgataaaatgtttaattcccttgctaagcttgtgagaagaatgagttgatgacatgctcccataccaaggggctagatggagtattaaggtggagcagaaaagaagtgagaacatcttgattcccctttcttttacttgatggtgtttatgaacaatgccgtagtgcctttatggcccagtttgagtcctgcctactttgacttttacgttcccatttcctgtgttaccactttcttccggatttgttcccccacttttgtgctttaaatctcaataataaaaatactgagggaaaaaaaggggacattaaacaatgccggggggcgcctttttaaagaaacaaattttatctcgcggggcaggcgga

SEQ ID NO: 114699 - DNA, 576 bp, Homo sapiens
atgaaaggcttttctcctaagattgggaacacgggacataaaaaccagggggaaccgcatgaggaagatcaaagcaaatgtgatgacacccccaactccatgtttcccagcctcctcttctgctcaggagactggggtgtttctgctgaagagggcaggcagtttattaggcacctgctgggtatcacgtgtggagacaagctggacaacgtaacaatccgcaaggcagctacggccttgccctggagctcccagtctagcaggggtggaaaacagtggcctgtggtggaccccagatccacagacacaggccctctccgcacaagggctcacgtggtccccagccaaggcccctacagcactttctacggagccctcttcccaaacatgcacatccagcttgcctctcagccaccccgcctccatctcagctccaaggaggccttggcagcaggctcggggcgccatggaacggttcactgcgtctctgccctggcctcacgtgctgccggctggccttgccattcatcttctgaaggctattctctgatggctctgctggccaccttgatctga

SEQ ID NO: 114700 - DNA, 804 bp, Homo sapiens
ctagacaatccctattctccaaggcaactgtagttgttctttcttttctttctttctttgtttagagccagcaacacgagcgcaggacagcccacatccggagaagagtgctctcagaaaacagccgcagcggacgacctcgtccggagccggtaaaggagccagcccacagcagatatttctatctgcattcacgaaggtgcatagaaagcttatggaaaaggctttttcagaaatcttgtagacaaaaatatgcagattgcccaaaactgtggcctctacacgctccacgcacattgcttgcttttcccaggacagcacgctgagcaggcacaccttcctttctgcccaatttcctgcatccccacttggagactgaccactccccgcaccctcagcaatcctggatctgtttttttgtccctatggttttgcctttgccagaaagtcttatcaatggaatcacataagatgagtttcccgtggtccatgcaacaactgagcataaacttgtggcttaaaacaatggaaactggttctctcacggactgggggccagaagtctgaaatccaagtgtaagcaggctccctccatttgggggctataggggaggacctttcctggcctcttcacctgcagcaggctcaggcactccctggcttgtggctgcatcaccctaatctatgcccactggggtcatgcagccttcaagtcctcttctgtatacattaaatctgtccctctcttacgaggacactagtcatgacaaacagggaccacccagataatgcagaaaaacaaaa

SEQ ID NO: 114701 - DNA, 522 bp, Homo sapiens
atgttgctcacacaaagcctgtttggtggtctcttcacacggacgcacatgaaatttggtgccgtgactcagatcaggggacctcccttgggagataaatcccctgtcctcctgctctttgctctagagagacaaaggagacacgttttatccatggacccaaaactccggtgctggtcacggactgggaaggcagccttcccttggtgtttaatcattgcagagatgcctgattattcacccacgtttcaaaggtgtcagaccacgcagggacgcctgccttggtccttcacccttagcagcaagtcccgcttttctggggaaggggcaagagcttgctacaagtgccagaaatctgaccaccaggccaaggaatgcccgcaacccgggattcctcctaagccatgtcccatctgtgcgggaccacactggaaatcggactgttcaactcacctggcagccactcccagagcccctggaactctggcccaaggctctctgactgactccttcttggcttag

SEQ ID NO: 114702 - DNA, 423 bp, Homo sapiens
atggtctacggggcttctgaggcgatcgggcagcatcagtcttcagccggtaagccaagaaggagtcagtcagagagccctgggccagagttccaggagctctgggagtggctgccaggaaagcgggacttgccactaagggtgaaggagaaggggttgaggggtacttgcccctgccccaggaaagcgagacttgccaccaagggtgaaggaccaagtcaggcatccctgcgtggtctgacatccttgaaactccgtgaccggcaccggagttttgggttcacggataaaacatgtctcttttgtctctaccagaaaatgaaaggaattgaaattaagagaagggagagattgaagtgtggttccaagattgaaaggagaaagaggttgagggataatgagggaggttggagaagagagtaa

SEQ ID NO: 114703 - DNA, 436 bp, Homo sapiens
  misc_feature (1)...(436): n = a,t,c or g
nnnnnnnnnnnnnnnnnnnnnnnnnnnnnnnnnnngcttggcgtccgtgatggtctacagggcttccgaggcgatccagcagcgtcagtcttcagccgctaagccgagaaggagtcagagagccttgggccagagttccaggggctgtgggagtggctgccaggtgagttgaacagtccgatttccagtggggtccggatttgaaattggtgagatgtttcttgggctggtcggtctgagggcctgaggtcgtaggtggatctttctcacggagcaaagagcaggaggacgggggattgatctcctaagggaggtcccccgatcccagtcacggcgccaaannnnnnnnnnnnnnnnnnnnnnnnnnnnnnnnnnnnnnnnnnnnnnnnnnnnnnnnnngtttatgtctccttantcagagctggtccgcatatgc

SEQ ID NO: 114704 - DNA, 516 bp, Homo sapiens
atgacctcaggtcctcagaccgaccagcccaagaaacatctcaccaatttcaaatccgagacaaaagagacacgttttatctgtggacccaaaactccggcaccggtcacggactgggaaggcagccttctcttggtgtttaatcattgcagggacacctctctgattatacacccacgtttcaagggtgtcagaccacgcagggacgcctgcctcagtccttcacccttagcggcaagtcccgcttttctggggaaggggcaagtaccccaaccccttctctccttgtctctaccccttccctgcttttccggggacagggagcttgctacaagtgccagaaatctatctgaccaccaggccaaggaatgcctgcagcccaggattcctcctaagccgtgtcccatctttgcgggaccccactggaaatcggactgttcaactcacctggcagacactcccagagcccctggaactctggcccaaggctttctgaccgactccttctcggcttag

SEQ ID NO: 114705 - DNA, 615 bp, Homo sapiens
atggtctacgggacttccgaagctatcgggcagcgtcagtcttcagccgctaagctgagaaggagtcagtcagagagccttcggccagagttccaggggctctgggagtggctgccagtccgtgaccggcaccggagttttgggtctacggataaaacgtgtctcctttgtctctaccagaaaatgaaaggaactgaaattaaaagaagggagagattgaagtgtggcgccaagattgaaaggagaaagaggctgagggttagggaggttggagaagagagtaaaaagaggccgcttactggatttgaaattgaagagaggggagaggctcctctttactgccacaaggaggacgaagtccaggctcctctcgtggcctgcaccagagaattattcactgtaaggagatcagccttatttctaaataccaggcagagaagtgaagagatggaagggaagagtaatgagaaacaaaagatttgttcaacagaacacctgaaaccttttgaaattggggacaccagtacagtggaaggggcaaaggaggacaagatcatggagatgaagacagagagattatttgatggtttctcaaaggatcttttagacctctaa

SEQ ID NO: 114706 - DNA, 495 bp, Homo sapiens
atgacctcttctttaaagaagccttttgcttctttgagagagtctcaatgggcagatctccctctaatctataacgtcagtgttaacagtgtgtacactgttgagctctatggagctcaacaaacagcacatgttccttttggtgcaaaggggcttccgaggcgatcgggcagcgtcaatcttcagctgctaagccgagaaggactcagtcagagagccttgggccagagttccaggggctctgggagtggctgccagaaaatgaaaggaattgaaattaagagaagggagagattgaagtgtgacgccaagattgaaaggagaaagtggttgagggatagtgagggaggttggagaagagtaaaaagaggccgcttaccagatttgaaattgaaaggctttgtggcaaatgtttatgagcgaagaactttttacctcctctttgtggctgagatccagaaggccaagtgtgcagaaactctgtccctggaataa

SEQ ID NO: 114707 - DNA, 771 bp, Homo sapiens
  misc_feature (1)...(771): n = a,t,c or g
atgcgggcaccacctaaaagtggacagctgcagcactgcaggccctcaaggggcgccctaagatcgggggacctcccttgggagatcaatcccctgtcctcctgttctttgctccatgagaaagatccacctatgacctcaggtcctcagaccaaccagcccaaggaacatctcaccaattttaaatcgggtgtcagaccacgcagggacgcctgccttggtccttcacccttagcggcaagtcccgcttttctggggaaggggcaagtaccccaaccccttatatctctgtgccccgatcccttatttccgcaccccaacctcatatctctgcgccccaatcccttatgtccgcaccccgacctcgtatctctgtgccctgacccctttcccgcttttctggaggcacataagaacttccaaacgcctgaaccgcagcagcccggcattccaccagaacctcctcccccaggagcttgctacaagtgccagaaatctgaccaccaggccaaggaatgcctgcagcccaggattcctcctaagccatgtcccatctgtgcgggaccccactggaaatcagactgttcaactcacctggcagccactcccagagcccctggaactctggccgaaggctctctgactgactccttctcggcttagcggctgaagactgatgctgcccgatcacctcagaagcnnnnnnnnnnnnnnnnnnnnnnnnnnnnnnnnnnnnnnnnnnnntcttccttcttcgaattccaccgcact

SEQ ID NO: 114708 - DNA, 1812 bp, Homo sapiens
atgtccactcaagacgagaggcagatcaatactgaatatgctgtgtcattgttggaacagttgaaactgttttatgaacagcagttgtttactgacatagtgttaattgttgagggcactgaattcccttgtcataagatggttcttgcaacatgtagctcttatttcagaaaacaccagtttgatcatggagagctatttggatggctcttttgcaaagtacatcctggtgctgttgtttttgctatattagcagcaatgtcaataccaggttcagcaaatctgcaaacccagtggaatactgtaggggagttcagcaacttgccacaagaatttatagaatggatcaaatatagtactaaaccagtgttggaagttctggccagggcaattaggcaggagaaggaaataaagggtattcaattaggaaaagaggaagtcaaattgtccctgtttgcagatgacatgattgtatatctagaaaaccccattgtctcagcccaaaatctccttaagctgataagcaacttcagcaaagtctcaggatacaaaatcaatgtacaaaaatcacaagcattcttatacaccaataacagacaaacagagagccaaatcatgagtgaactcccattcacaattgcttcaaagagaataaaatacctaggaatccaacttacaagggacgtgaaggacctcttcaaggagaactacaaaccactgctcaaggaaataaaagaggatacaaacaaatggaagaacattccatgctcatgggtaggaagaatcaataccgtgaaaatggccatactgcccaaggtaatttatagattcaatgccatccccatcaagctaccaatgactttcttcacagaattggaaaaaactactttaaagttcatatggaaccaaaaaagggcccgcatcgccaagtcaatcttaagccaaaagaacaaagctggaggcatcacactatctgacttcaaactatactacaaggctacagtaaccaaaacagcatggtactgctaccaaaacagagatatagatcaatggaacagaacagagccctcagaaataacgccgcatatctacaactatctgatctttgacaaacctgagaaaaacaagcaatggggaaaggattccctatttaataaatgtgccagaacaaaaatagtatactcaatgtatagtcagaaagcagctgaagaagtgaagcgagaactgatagttaaaagtgaactattacattctagaaaagtcatggtgtgtaagaagatccaactgaagactgacactgcccgatcgcctcagaagcctataggaccttcacagatgctctgggtaaccctcacagtggaggggcttctgaggcgatcgggcagcatgagtcttcaaccgctaagccgagaaggagtcagtcagagagccttgggccagagttccaggggctccgggagtggctgccagcttggccatttactatctgaaatcctgaacttctgcgagcctcagtttcctcatcggaacgtatggaatcaatactacttagcttgcagtgttgttgtgagaggcagcgacaagaaacccaatgcaatgctcaacactcacatcaatgggatcctatacatagacaccattattgtcaacacctttgtggaaagcctccccttaaggaggctgaatggagaaggcacagcattcttcttaatagatgtccactttgatgtgggtctaatgttagggggtgatgtcaggactctggacacactgcattctgaagcagcaaacaggcagcaaaaagatagttga

SEQ ID NO: 114709 - DNA, 1401 bp, Homo sapiens
atggcctacggggcttccgaggcgatcgggcagcatcagtcttcagccgctaagccgagaaggagtcagtcagagagcctcgggccagagttccaggggctcggggagtggctgccaggccttcagctcccccaggtgagggagacctttgctttgttcaccgacatatcccaagcattagaactgcgcctggcaccagcaggctggatgctggctgggaaccggccccgcagctccggcgtccccgcctgcctgcgcggccttcagctggggttacggagggctcccagcgccgatccaaaccgcgttccaggcggggtgggcgggcccctggccagcgaggccgaagcaaaacaacccgcccaggcgtccagagcgtatccaaccctggagaacctgccccggaaccaagagccgcagccagctcaggcctctcgagtggggcctttccagcccctgcaacagatcccgggatctgtagttgggcggaggggctcgttatgggaaagggtcatcatcatcgaccctccatctctgcaagaattccatgttttcacgtataacctgtacgtgaaaaaaacaaaaacgtgtttttcctctgctctcacaacaatcaccaacacagaagccttctgtgaccaaatgtgtggggtttttccccacacaccaagtagtggacaccagctgggcatcctccagctcaattcccacaggggactgccagctgtcaatcagctcattagcatgcagaaacatcactttggagattctaaggatttttggagttgtatggcaggaaacagggttaaagaccagagatgtattgacttcatggccattcaacaggtgtttgacggtttgactgcatcccctgcctacctgtatgctggctgtccagctcaggcctgcaacaggaggagcctagaatgcctagcagctttggacactggggcagaagatcaggggaaaattgcggatgatctgaatgatagcagtgaccaccagcaacctacagagctgcccaaccaggaaattgtcagatggaagcaacgcttgcaggcaaagaaggctgaagcaggccaaggcaggaatgaaacagtcataaatgttggagtgaagcgactgacctccccggtccacaccccggcccagcgtcctgcatctgctggaggatggtggagaccatgtggaggatggggacttggcagtggaggagaacatggaagcaggatatggcagtcccctagcgtcccagccacaagtcctctgaagagtgtggatgacgatggtgacttaggtgcatccttcgaatgtcctgagggggagactggagaagcagacacgcaattgtgggaagaaatcaaaggcataaagaactcacagcacaagtccaaagtctga

SEQ ID NO: 114710 - DNA, 1151 bp, Homo sapiens
acaataaaatacctaggaatccaacttacaagggatgtgaaggacctcttcaaggagaactacaaaccactgctcaaggaaataaaagaggatacaaacaaatggaagaacatttcatgctcatgggtagcaagaatcaatatcgtgaaaatggccatactgcccaagagaagcttctctatgccttccacaatatctcccttaaacaatcctccagcttatctctgtctcagaactttcctaataatgaaaacaatgatggcagcaaagatgatgatgatggaggtgatgatgatgatgactgtcaggcctctgaggccaagccaaactcagcctgcctgcacccaggtgaaataaacagccatgttgctcacacaaagcctgtttggtggtctcttcacacggacacgcatgaaaatgacaatggtgatgttggtgatgataatgttgatgatgatgttgatgatgatggtggtgatgatggtaaagatgatggtgatgatgatgatggtgatacggtgatggtggtgatgatgataatgatgatggtgttgatggtggtgatgatagtggtggtggtggtggttgtggtagtggtggcaagcaggaaagcatttctatttttgattaatggagaggagagtgaactagagtctcatttaacaggctttgccaacatcccaaatcatcacttaaccgtccaacacatttatacacctacgttgccaagtggagagacaaaggagacacgttttatctgtggacccaaaactccggcgctggtcacggactgggaaggcagccttcccttggtgtttaatccttgcagggatgcctccctgattattcaaccacgtttcaaagcggcaagtcccgctattctgggggaggggcaagtacccctcaaccccttctccttcacccttagcggcaagtcccgcttttctggggaaggggcaagagcttactacaagtgccggaaatctgaccaccaggccaaggaatgcccacagcccaggattcctcctaagctgtgtcccatctgtgcgggaccccactggaaatcggactgttcaactcacctggcagccgctcccagaacccctggaactctggcccaaggctctctgactgactccttcttggcttag

SEQ ID NO: 114711 - DNA, 555 bp, Homo sapiens
atggaggcaagggaaacaggcccttggaaagaaggtaatgtggagcgggtagcctccgtattgattaagaaggggacgggcttaccttccactgtgagagttaccggaagctcggcgtccgtgatggtctacggggcttccgaggcgatcgggcagcatcagtcttcagccgctaagccgagaaggagtcagtcagagagccttgggccagagttccaggggctctgggagtggctgccagggcctagggctgtgaagcgtctcagggttatatttgatgaaaaagagcctaaacgctatctgatttgggataaagaaaaaggagcattaaccttgactatgcctttggctccagccacctttttaagagtaaattgctgggcaggtgggggagggctagtcacggaacgaaactgtaagcccgaccagaaaatgaaaggaattgaaattaagagaagggagagattgaagtgtggctccaagattgaaaggagaaagaggttgagggatagtgagggaggttggagaagagtagaggccgcttaccggatttga

SEQ ID NO: 114712 - DNA, 1189 bp, Homo sapiens
atgtcaggagccaagggattcacaggaggcattccaggggcaggagggggtgtgaaagagggtggggaaccaagggttggcatcctggatactgtggctgtggcacaggatgaggggctccacttgggggaaaagttggattgccctgcagagctcctcagggaggaggaaaggggcctggggaaagggtggattgataggtgtgggttcttggtctcgctgacttcaagaatgaagccgcggaccctcgctgtgagtgttacagttcttaaagatggtgtgtctggagtttgttccttcagatgtccagatgtgtccagagcttcttccttccggtgggttcatggtcttgctgactttaggagtgaagccgcagaccttcacaagtcaaggttttccggcttgggtagccaggtgtcacggcccagtgtccacctgcagctgctttctgtgtcagtcctctgcaccgccaaggtcatagaggtggttgagacaaaagagacatgttttatccgtgaacccaaaactccggcaccggtcatggactgggaaggcagccttcccttggtgtttaatcattgcagggacgcctctctgatgatacactcacgtttcaagggtgtcagaccacgcagggacgcctgccttggtccttcacccttagcggcaagtcccgctttcctggggcaggggcaagtacccctcaaccccttctcctttacccttagcgcacataagaacttccaaacacctgaaccgcagcagccaggtgttcctccagaacctcctcccccaggagcttgctacaagtgccagaaatctgaccaccaggccaaggaatgcctgcagcccaggattcctcctaagccgtgtcccatctgtgcgggaccccactggaaactggactgttcaactcacctggcagccactcccagatcccctggaactctggcccgaggctctctgactgactccttctcggcttagcagctgaagactgatgctgcccgatcgcctcggaagccccgtagaccatcacggatgctgagctttgggtaactctccctgtgattgagctgaatgagcccagatctcttctatgcttccgatttctcctaaaacctttgaaaagtagcttttaaatccatcattactcttaaaatcttcctctatttatgtgattagaaaa

SEQ ID NO: 114713 - DNA, 1221 bp, Homo sapiens
atgagcaaatcattacaaaaacccaccattctgaatgttgaaactgtagcccgttcccgactgtttaccgtcgagagcgtggatctggagttcagcaatggcgtgcggcgtgtttatgaacgaatgcgtccaaccaaccgggaagcagtgatgattgtgccgattgtggacgatcacctgatcctgatccgcgaatacgcagtgggaactgaatcctacgaattaggtttttcgaaaggattaattgatccgggtgaaagcgtctacgaagccgctaaccgcgagctaaaagaagagataagagttaggggccatgatgactccttcctcaagaaccatctagtgtttctggtgatttatggcacaaatggaaccttcaaccagaccctggttactgataacaatggcctagctccctttaccttggagacatccggttggaatgggacagacgtttctctggagggaaagtttcaaatggaagacttagtatataatccggaacaagtgccacgttactaccaaaatgcctacctgcacctgcgacccttctacagcacaacccgcagcttccttggcatccaccggctaaacggccccttgaaatgtggccagccccaggaagtgctggtggattattacatcgacccggccgatgcaagccctgaccaagagatcagcttctcctactatttaatagggaaaggaagtttggtgatggaggggcagaaacacctgaactctaagaagaaaggactgaaagcctccttctctctctcactgaccttcacttcgagactggcccctgatccttccctggtgatctatgccatttttcccagtggaggtgttgtagctgacaaaattcagttctcagtcgagatgtgctttgacaatcaggggacagacttaacttccactgtgagagttacccgaagctcggcatccgtgatggtctacggagcttccgaggcaatcgggcagcgtcagtcttcagctgctaagccgagaaggagtcagtcagacagccttgggccagagttccaggggctctgggagcggctgccaggaaagcgggacttgccactaagggtgaaggagaaggggttgaggggtacttgcccctgccccaggaaagagggacttgccgccaagggtgaaggaccaagtcaggcatccctgcgtggtctgacacccttgaaacaaaatgaaaggaattga

SEQ ID NO: 114714 - DNA, 2244 bp, Homo sapiens
atggacttaatttcagagctcagacaattaaatgcacctgcagagatctgcaaggtgtattcttataactgccacaatgaggtgctagagttgctgttcctgaatcagggcatggaggacatgagtctggaatgtgagaaattcactgggatatcccctagtgcttctttctctgtgatgagaatactgagtacagccactattttgaaatgccagcgacagagtggaatctttcatgcacgtccgtgtgaagagaccaccaaacaggctttgtgtgagcaacatggctgtttatttcacctgggtgcaggcaggctgagtccgaaaagagagtcagcaaagggaaataagggtggggccgttttacaggatttgggtaggtaaaggaaaattacagtcaaagggggttacctaaagctcggcatccgtgatggtctacggggcttccgaggcgatcaggcagcatcagtcttcagccgctaagccaagaaggagtcagtcagagagccttgggccagagttccagggggctttgggagtggctgccaggtgagttgaacagtccgatttccagtggggtcccgcacagatgggacacggcttgggaggaatcctgggctgcaggcattcctcggcctggtggtcagatttcgggcacttgtaacaagttcttgcccctgtcccaggaaagtgggacttgccgctaagggtgaaggagaaggggttgaggggtacttgcccctgccccaggaaagcgggacttgccactaagggtgaaggaccaaggcaggcgtccctgtgtggtctgacacccttgaaacatgagtgtataatcagagaggcatccctgcaatgattaaacaccaagggaaggctgccttcccagtccgtgaccggcgccggagttttgggttcatggataaaacatgtctcttttgtctcattgatactgctatgattactactattgttgctattatcattgtcttcatgttctgaggtaattctgagaaatctttctttttcatccaccatgaaatactgtagaagactcaagggctctttgcctttttcttgaactggagatttaggaaccacagccctctgcccaccagtccccctcctgcactccccactcccatggccacccatggaccaatcggcacacacttcctcccctctgaggcccataaaagccctgagatcagccagagcagagcagacatcaggacaaccagctgggaaccgtctgagccaggtctgtgacttcctcttcagagctctgtggttcctggtgtctccaagcttccaggcatacccatgttccctggtgccagctgtagaagctgcctgtggtgcacctggtccagccgcagccttgcagagggccagcacctggagctgccctccccgctggaagcttggagatgccaggaaccacagagcctgaaagagggtgtcacagccctggcttggggatctcctaggtctgtgctccccaaagggctgcagctcttctatcattttgtcttctctccttgtcgcaggcgctggatctcgctgctcgtcgctgcgcgctactaggtcctgctgtcgtccgagtcgcctccgggactctccggaattgtagcggctgtagccggctccttgcctgcggcgcggagggcaggtcccagtggtaggaggatgtgttccctttgcagaatcagaccccctcctgggactgtggggaccctctgtcgccggcctccattggaggatgcgttgtccctggagctgggtgcgctgttgcgtgacctggggcctgggtggtgggcgggcctgtccatggcaaagggcacggctgcgcgctacttcccgagaacccgccagcaggctcttgggaagcagcgatttctccttagtcacagtcagagagggtgatgcgacacactgggcttcactgtgctcgtgaagcggagccagggtgaaaggatcatatggcctaaccctaaccctaatgggagtaacttcacctgcgtcccacaggccccgcaagagtgacgctgccaggcaggcgccgccctgttcggttcctgctgctgtcgctcctcgctccccaccacctccagagctccggtgggtcaccatggaaagggaagccgctgcctggagctgagtcaggttagagagctgagcaaagtgcaggggtagaggaagcagcagaaaggccctgggagctctctgggtccccaggcagcccat

SEQ ID NO: 114715 - DNA, 666 bp, Homo sapiens
ttacccaaccaccagttcagcactctcctctagttctgggtgtctccttttggcagcccctctatgcacatcagaggagcccactatcacatggctgggtcctctgcagtcgggcagcagcactggaaggaggcttcctggaatctgcagcctctcttccagggcatgctgacagtggagttccagcaggcaggagctggttttgctggctgttcctgccaggccaagattcccagcaaaaccctgggaagcccagaggtagcccaagcagtgagcaaagacaaggtcagcctggcttgtttctgcccaagtgataacagtgtttctatttgacagtttgaaatgattagatctgcttcctatgcatggccctgctcctgcaagatggagaaggctggggggttcccctggttcccgggcattggtccttatcagcagagtcacctccagggtaactagagatggggctggttttcagttcctggcagtgatccttgggacttcctattgtgagaatgagccttttgatgcctttttaaagaaactttaattctgaatgaattctaaattaatggcttttaaacttttttgtttgtgacctatagtaagaaatataaattaccataagcttcatccaaacataaataaatataggtggaacagaaa

SEQ ID NO: 114716 - DNA, 294 bp, Homo sapiens
ttaacgtcttgtatatgccctcaaattctccctttttgactgctctgtgaaaatagatctgggacctttaaatatttttcctttgctgactggcactgaagttttttcagtagaggacactagagagccactgacggaggaaaagattttgcttcctggttcgggtgtgttcacttcacaggctcctattgcatagatatagatggcttctccagcaccaggctctagctgtgttggcagtttttccagtgcttctttagcttctgcctgagttattttagaaacttgggagtc

SEQ ID NO: 114717 - DNA, 732 bp, Homo sapiens
atgagtgtacactgtgtcatagaagtaaacaagaaaaccagtcccttgagcagggagaatatatggctcttagaaaaagcagaagcatgtgaaattgcctggttacatggaacaatccagacacatcaagaaaagccaagagtacagaatctagttatattggaggaaagcattgctctcctaggccttcaagacaaagatattcggtgtcaggtcacaacagcagagttaggactggagaaaaaagttacaagagctgacaaaaaggctgaaggcaagagtcatcaccccagccaaacaaaaagagtaccttctcaaggagaaaaagaggagaagcagaaggctatttccgtgcacgtaaaagcggaatattggaacggttgcacagaacttccaaataatttttaccgccacgcaagatttagccctgaggtcttaatctcaggatttgggacagtaaaagctgtcgtccctccccctcgtccagccggtggcaagcgggtgccgccaggccaaacggacatatccgtcacgtggccagaagctggccaatccggtttgaatctcatttttttcctcttacccccccttctggagcgcgttgtgcgatcagatcgatctaagatggcgactgtcgaaccgaaccccagctccggggctcgggtgcggggcgcgcgcacgtcttccttagaccggtggactggggagctggtgggcgagtgttgccggagg

SEQ ID NO: 114718 - DNA, 696 bp, Homo sapiens
tttttttttttttttaaggtaaagaaattttttttaaaaaggactggtcacgtggccgatgggtagggtgcgcggttctcaacgcggcggacactcgcttgctggagggtggtttcagtcctctgctcttccgcctggatagctgcggtcacacttactgccaggcaagcctactgtgccctttgtcgccctgtcctcccatcttccccggaaggttgggaactgcaggctcagcacacacaataaggcttcatttgcttagttgaggtcccaggacaagttgcctgtgtgtttatttagttttcttttgatctcccaccattttctcttagtttcaaaaagaggcggcgatgccagagtcgtttaggcaatcaaccctcccacgtcccctggctcagctaatgctggtggtcattcgttgccatttctgcgaaaggggacggacggaaccgcccgcagtacccgcttgccaccggctggacgagggggagggacgacagcttttactgtcccaaatcctgagattaagacctcagggctaaatcttgcgtggcggtaaaaattatttggaagttctgtgcaaccgttccaatattccgcttttacgtgcacggaaatagcctaagtccagatgccagccagggaagccactccgggccccgctgactaagccctggactgatggtctggagtctt

SEQ ID NO: 114719 - DNA, 983 bp, Homo sapiens
gaccagcaccatggcggttggcaagaacaagcgccttacgaaaggcgcgcaaaaagggagccaagaagaaagtggttgatccatttcctaggcaaagattggtattgacgtcgaaagcaccctcttatgttccattataagaattattggaaagacggctcgtcacccaggaccccaaggaacccaaaattgcaatctgatggtctccaagggttcgtgtgtttgaaagtgagtcctgctgaattgccagaatgattgaagttgcatctaggaaattcaaggctgattactgaagatgtttcaggggtaaaaacttgccctgactaacttcccatggggcatgggatctttacccgtgacaaaattgttgttccatggtccaaaaaatgggcagaccaatgattgaagcctcacgttgaatgttcaagacttaccgattggttacttgctttcgtctgttctgtgttgggttttacctaaaaaaccgcaacaatcagatacggaagaccctcttatgcttcagccacccaacaggtcccgcccaaatccgggaaggaagatggatgggaaatccatggacccgagaggtgcagaccaatggccttgaaggaagtggccaattaattggtttccggaccaccatttggaaaggacataggaaaaggcttgccaaatctatttatcctcttccatgatgtcttcggttaaaaaagtaaaaatgctgaaggaagcccaagttttgaattgggaaagctcattgggagcttccatggttaaggcagtaggtcctggaaaagccattggggatgaggacaggtgtcaaagttgaagcgagctgatgggtatgataccaccgttccaagaatctgtttatagttccgacttccaatagtgggcaatagaagtggccattgtgtgaaaaaagaaaaacaaagttcacgccgccgcgattttggtgttagtgtccacccgcggattccgcc

SEQ ID NO: 114720 - DNA, 1860 bp, Homo sapiens
atgaaaaaagttctgattgccgcgttaattgcaggttttagtctttccgccacagctgccgaaaccattcgttttgctaccgaagcctcctatcctccgtttgaatcgattgatgcaaacaaccagatcgttggttttgacgtcgacctggcacaagcgctgtgtaaagagattgatgcaacctgcactttctctaaccaggcgtttgacagcctgatcccaagcctgaaattccgtcgggtagaagccgtgatggcgggcatggatatcactccggagcgtgaaaagcaggtgctgtttaccaccccgtactatgacaactttgccctgtttgtgggtcagcaaggcaaatacaccagtgttgatcagctggaaggcaaaaaagtcggcgtacagaacgggccgacacaccagaaattcattatggataagcacccggaaataacttacgtttccgatgaaagttaccagaacgcaaaactgggatttgcaaaacggctgtgcggcacgtgcggcccccggttcacggcgttacggcggttggactatacaagcctctacggcgaggccaagcgacgtgctattgaccgccgattccgtgtctttcgcggtgcgctcccgcggcgcggcagcgacggcgtaccaccgctgctgtctcagtggggtcatggtcaacgcagcgactgcctgcgagcacagtacggcatcgcagggcagagcgtcgcgcacggttaccgactccgcagatccccatccgagaagtgtgagaaggcgggcatcatttcggcggtcagggcgcggattctgcggcaccgttcggtagcgcctctatcctgccaatcaagctggatgtacatccgcatgatgggcgcagaagggctgaaaaaagcaagccaggtggcaatcctcaacgccaactatattgccagccgcctgcaggatgccttcccggtgctgtataccggccgcgacggtcgcgtggcgcacgaatgtattctcgatattcgcccgctgaaagaagaaacccggatcagcgagctggatattgccaagcgcctgatcgactacggttttcacgcgccgacgattgtcgttcccggtggcggcatgttttccatggtactagccgacactgtgcaggtgatcgtgcagtccggccgccaccccacagtgctgcagaagctctgccagttgcccttccagtatttcagtgacccacggctgatcaaagtactgttcccttcacttatcgctgcttgttacaacaaccatcagaacaagatcattctggagcaagagatgagctgtgttttactggccactttcattcagacgcgggcccaacaacggaaatacaagcgccgcaacaaccgcggaataccgcgcgagtcaaccgcgcgcgaacaggcgcgccacaacgcgaacaaggcacaacaaccgcgaaaacacgccagaaacggcgcatcacccgcccaacagcggaaaaatcgggcagcagcgcgagacaaggacgaaaaacccgcgcaacagaaggacaaagcgcgacaaagcgcgccagagaagaaaaaccgcgccatacggggcacaaacagccgcgaacaagcggcaaaagccgaacgaaacaggcgccaaagggggggccaaaagggcgcccaaggcgggcagcaccgcgaggaggccggggagccgacgtatgttgacgagaaagcgcaggccgcgaccagccccccaccgcaaacgccacaccccgccccggaccacgacgacgcggaagaccaccgcacaagagacacgaaccgaaacgcacaccagccaaaggtgtacacgcacaaagacacacccacgaacgagagcaggtga

SEQ ID NO: 114721 - DNA, 2187 bp, Homo sapiens
ctttaagttgaagaagtggagcatctttccttgaagaagtacattattgacattgtggttgaaagtacagctccagcagaagctttgaaagatggagaagagcggcaaaaaaataaaaaaaaagccaaaaagataaaagcccggatgaacttcagggctaaggaatatgagagtttaatggaaaccaaaaattctggctctgattcaccttataaagcaaagcttcagcgattagccaaagatcttctaaaacaagtacaagttcaagacagtggctcatgggcaaacaataaagtgtctgctttggatcggaccctaggagagatcactagaatactggaaaaagagaatgtggcagatcagattgcatttcaagctgctggtggattaacagcccttgaacacatccttcaagcagtagtcccagccacaaatgtgaacacagttttaaggaattcctcctaagtctctctggcaatgcaattcaatgtttacaaccttcacctggcaattaactgtttcaggaaaacttgcagtgatgttctgtttagtaacaaggtttaccttcttaatggggcctcctgatacaccagttgacggtttatgttccagatgaaaataatactatttgggggagaaatacaaataaacaagttttgaaaggcttgacaactgggacttctcaaagtcagtgctgtgggttttggggctgcctggattgccaatcgaccaggtggggaaactgccagccaggctaccccaaaaataccaacacaggaaatgaaaaacaaaccctcacaaggtgatccttttaacaatcgagttcaggaccttatcagctacgtggtgaacatgggtctgattgacaaactgtgtgcctgcttcctctcggtgcaaggcccagtgggatgaggaatcccaagatgggccatatttctggcaggcatgccgcaggactcttacatgcaatgtgttacactgtgctttgctgtcactggaaggtcatacagcatatttgacaataatcgccaggatcccacagggctgacagctgctcttcaggcaaccgacctggctggagttcttcatatgctctactgtgtcctcttccatggcaccatcttggaccccagcactgccagtcccaaggagaattacactcaaaataccatccaagtggccattcagagtttacgtttcttcaacagctttgcagctcttcatctgcctgcttttcagtctattgtaggggcagagggcttgtcccttgcattccggcacatggccagctccctgctgggccactgcagccaagtctcctgtgaaagcctccttcatgaggtcatcgtctgtgtgggctacttcactgtcaaccacccagataaccagggtgatcgtgcagtccggccgccaccccacagtgctgcaaaaagctctgccagttgcccttccagtatttcagtgacccacggctgatcaaagtactgttcccctcactttatcgcagcttgttacaacaaccatcagaacaagatcattctggagcaagagatgagctgtgttttactggcccctttcattcaggatttggcacagactccaggtcaagcggaaaaccagccttaccaacccaaagggaaatgccttggtttcccaagactatcttgagctggctaacagattttcctcaggcagggcctggggaaagaagctcgacagtttttcttgaaaaaagagaaaaaataaatgttttggttgattctgtatttgagtacccttgttaatattttaaattgtccaaacaaacattctaattgttccttaagaactcattttcccatgtttatactcttcccacactggtagatatggcatgtactttacactatttataatgactgtagatacttgaatgttctacttgctaattttgcaagttgagtttatttcatttatgcagagtatcttggagtttggtaatttccatcttatgataatatatactttgcatttgtgatatgggtgaaaggagacataaaattagcaagtctgttttgttcttgtaataaagtaacttattctgttttcattgttgacttttcatgttaaggaaatacgaatctgaaagaaaaatgttaactccagctcttgaagtatcttaaataaagacttaattaaagtttaaaa

SEQ ID NO: 114722 - DNA, 559 bp, Homo sapiens
  misc_feature (1)...(559): n = a,t,c or g
agcaaatgaatgagcatcacaagagagcctacacctatgccccctcttacgaggacttcatcaagctcatgaacagcaactctgatgtggagttcttgaagcaactagggtatcaaattgtaggggaaataatccaggcgactacaattagcagctttccccaactgaagagggaccccggtattgaaactggggcaatgaaagctgatctcctgagggccaggaacatgaaaaggttcatcaaccaactgactgtggcgaaaaagcagtgtgaagaagagaatcccgaatcccctgggaggccctgccctatgacccagcaagaggatggggcccctggatgagggggaagggcctcaaagccagaagctctcggttcctacttcagctactcatctgtgatgttcccctgcctccctattccagtgatcagccttgactttcttagtttctggctagtctctgtttagagcctctgcaggaagggccagccccagcattacgnccagggtttnttacagcatttttacacaagttggttgcaaattgcagcttccaa

SEQ ID NO: 114723 - DNA, 693 bp, Homo sapiens
atggatttaagacttgatgagtttttattttatcctaatttgtattcatttgttcattcattttccaatgtgcttattccagttcaaggtcatgggtggctggagcctgtcccagcagctcagggtacaaggtgggaaccagccctggacaggacaccatcccatcgcagggtgcactcacacatccacactcagtcacactgggaccatatagacatgccagctcacctcatgtgcacagctttgggatgtgagaagaaaccagagaaaacccacgcagacatggagagaaaagacatattgatgtctttgactgttggaaaccttgcagagcaagaatttgtaaccattgcacgtcactaccgtgtgcctgagggcacatgttcagatatggatttcttaatcgcactggcccacgaaaagttcaagaaaaatatgtttgagaatttcgacactttcatttattcctgtgtgtatgaagatcgagaaaactgtgttctaggcattgtgatcattgttttggatatattatctcatttactttttgagaacagcttgaccattcccctaaatgatgaggtgacctttgcaatagaggagaagaaggctcctcttcagcaaaatacagctgccactgagccttttacctctatcaagggtggaaatagagcagttcaggattattccccgtag

SEQ ID NO: 114724 - DNA, 706 bp, Homo sapiens
atggactctggggtctgtgtgcagaaactgggctctaggatgaatgtcacaattagttccatgtgtgagaaagggataaaatccttaatatccatgacggtctggtccgggcatcctgttccacctcatctctttctctgccttgtttcctgcatggcagccgccctggttttcagcccatcaaatgtgaaaactactaactcagactgcactgaagctgactgtggtcacctggcagaaattgagtctcagtttatcttggaggttcttgaagaaagggctgttgacgaaagttctagaaaatacctctgcccatttgcttgcttacaaaagtgctctgtgtcctgtggccgaggcgtacagcagaggcatgtgggctgtcagatcgggacacaccaaaatagccagagagcctgagtgcaacccataccccagcccggagtcggaacgcgactgccaaggcccacggtgtcccctctacacttggagggcagaggaatggcaagaagtaagtagagccacaaaggggtacctgccaggcatttcacgtgtgcgccccttgctatcctcacatctgttccctataaagccagagaagtctccgagcacggttacaatgctggctctttcccaaaaggttcactgtcagactcgcgcattcgctccaacaagggtgggagatcttcttgtttttaagcaattccta

SEQ ID NO: 114725 - DNA, 990 bp, Homo sapiens
atgaggaaaacttacggaatttgtgagaaagtatcaaaggataaaatatttgagtccataggagttagagaagcagaagagaaaaataaagggacaaaaagtgtatttaaagaaatgatagccaaaaaactttccaaacctggagaaagctctgtccttgcgaccacctacggcgcccggctggtcagcagcacagccagagtctatgcaggcgccgggggctctggttcccggatctctgtgtcccgctccaccagcttccagggcggcttggagtccgggggcctggccgcggggatggccgggggtctggcaggaataggaggcatccagcacgagaaggagaccatgcaaagcctgaaagactgcctggcctcctacctggacagaaccatccagaacctgaggattcagatcttcgcaaatactgtggacaatgcctgcatagttctgcagattgacaatgcccgtcttgccgctgatgactttagagtcaagtatgagacagagctggccatgcgccagtctgtggagaacgacatccacgggctccgcaatgtcattgatgacactgtcactcggctgcagctggagacagagatcgaggctgtcaaggaggagctgctcttcatgaagaagaacctcaaagaggaagcaaaaagcttacaagcccagattgccagctctgggttgatggtggaggtagatgcccccaaatctcaggacctcgccaaggtcatggcagacatccgggcccaatatgacgagctggctcagaagaacggagaggagctggacaagcattggcctcagcagattgaagagagcaccacagtggtcaccactcagtccgccgaggttggagctgctgagacgacgctcacggagatgagacgtacagtgcagttcttggagatgacatggactccaggagttatcgaggtcctcagtgtttttaagtacagggtcatcactgaagttgctttgtag

SEQ ID NO: 114726 - DNA, 1192 bp, Homo sapiens
aagaagacctggaagccttaggcctcgatacgcatgtgacggggcgacccacgcgtgcggcgacgtacgcaaagcctgagtcctgtcctttctctctccccggacagcatgagcttcaccactcgctccaccttctccaccaactaccggaccctgggctctgtccaggcgcccagctacggcgcccggccggtcagcagcgcggccagcgtctatgcaggcgctgggggctctggttcccggatctccgtgtcccgctccaccagcttcaggggcggcatggggtccgggggcctggccaccgggatagccgggggtctggcaggaatgggaggcatccagaacgagaaggagaccatgcaaagcctgaacgaccgcctggcctcttacctggacagagtgaggagcctggagaccgagaaccggaggctggagagcaaaaatccggagcacttggagaagaagggaccccaggtcagagactgggagccattacttcaagatcatcgaggaccttgagggctcagatctttcgcaaatacttgtgggacaatgcccgcatcgttcttgcagatttgacagtgcccgtctttgctgcttgattgattttaggagttcaagtattgaggacagagctggccatgcgccagtcatgtggagaacgacatccatgggctccgcaacgtcatttgatgacaccaatatcacacgactgcagctggagacagagatcgaggctctcaaggaggagctgctcttcatgaagaagaaccacgaagaggaagtaaaaggcctacaagcccagattgccagctcctgggttgaccgtggaggtaagatgcccccaaaatctcaggacctcgccaagattcatggcaagacatccgggcccaatattgacgagctggctcgggaagaaccgagaggaagctagacaagtactggtctcagcagattgaggagagcaccacagtggtcaccacacagtctgctgaggttggagctgctgagacgacgctcacagagctgagacgtacagtccagtccttggagatcgacctggactccatgagaaatctgaaggccagcttggagaacagcctgagggaggtggaggcccgctacgccctacagatggagcagctcaacgggatcctgctgcaccttgagtcagagctggcacagacccggg

SEQ ID NO: 114727 - DNA, 396 bp, Homo sapiens
aaactatactaccagtacaaatatttcctgaccaaagaaatgtgtcacacttctttcatctttgttttgtttggttctttattttgtgagcaacatcatcatcacactcccccatgaagtgaaactaggcacgtggtcattctcatgaaaaaaattaaaccatttttttttcctcaactaaacttaaactaagcgagggccactgtgaaaaagcatttctttacacatcaaaattttcttaaggaaaacacacaaagagacaatgaattcccaaagtatgatttttaatgatcttccaataaacagctctttgtggcaaaagtgactgtgaactgggtggtccaaccagagggctcctggaagtcaggggagcggtgctcctgttaaatcacacat

SEQ ID NO: 114728 - DNA, 560 bp, Homo sapiens
ttacagttcacccatgtcatcaacattcagctgagaacatctacagtaaataataagcccattaggactgtccgaatcagctaccagatgagcacccaaaatccagaaatctgaagtgctccaataagcatttcctttcacagcatcatgaaggtgctcaaaaagctttagatttgggagcattttggatttcagatttgggatactcaaccagccaagcctcatggacacagagttgcggagctcagtctcccctgcacagatggctgctactaatccaattcttattttctttattgcatggggacacctcccagtggggtcaggccgtcttgccctcgggaggtcttcatcccagcagactccctgagtcggccccgggagctcctcagcttgcctggctgcctgtgtcttctgacacgtgtgttcttcccctgtgccgactatgtctactctgcgccttttgctgtcctcgttgacgaggcgctcctctgccactccacgcttactgctgcccgggcactctgtctggtcagcattccagaaaatggatcctactg

SEQ ID NO: 114729 - DNA, 396 bp, Homo sapiens
atggaggagctgcagccgctgctggtgcaggaggcagtggactccatcctgaacaatctggagagagagaacatccggaatatgcaggttctaaaaaataaaatgaaaagaagtcgtgctaaattggatcagaaatattacaggagagttttagaacttatatttcctgtggccagtgtttatcctggcagtaaggatctctcctgtaacaagccagagctctccaaggtaccagactcttcttactacacaggtaacaacgggctggcagctgaacggactaagacaactaactattatcgctattgttgtaacgccaaaggttcttgccttagccaagccaaagaattggtgtggcggctgcctgccgcgagtgatagagacacggaccaatag

SEQ ID NO: 114730 - DNA, 1046 bp, Homo sapiens
gccgccgcggggctcgatcgggcaacggcggcgacggcggcagcgacggatcctcctcctcccttattcccttgctcctctttcttccttttcttttcctttccggccgggcctcgtccactttgcctaacggcggcctcgatcctacgtaaaggcatgacttcctgggcaccacagggaaaatcgggtgcaagcccagaaactatttccccaccaccacttgttgaaaaactgatttgaaggcatctccggggttgaacaaacggaaagtgccaggatttgatgcgtctctggtttcgctctggagaccattccctgctaagtatcaagaccgaaaaaaactcggaaactaatccgaatttctgtggaatgtttaatcttctggatccatgactgtctgatacgttggcaatttaaagtccttttgaaagagagttcatgttacccagctattctctaaaccatatttatttagagtcagaatggagcgatttgtagtaacagcaccacctgctcgaaaccgttctaagactgctttgtatgtgactcccctggatcgagtcactgagtttggaggtgagctgcatgaagatggaggaaaactcttctgcacttcttgcaatgtggttctgaatcatgttcgcaagtctgccattagtgaccacctcaagtcaaagactcataccaagaggaaggcagaatttgaagagcagaatgtgagaaagaagcagaggcccctaactgcatctcttcagtgcaacagtactgcgcaaacagagaaagtcagtgttatccaggactttgtgaaaatgtgcctggaagccaacatcccacttgagaaggctgatcacccagcagtccgtgctttcctatctcgccatgtgaagaatggaggctccatacctaagtcagaccagctacggagggcatatcttcctgatggatatgagaatgagaatcaactcctcaactcacaagattgttgactaggaggttaccaccattgtgatcaagataaatgtggagtattaaagttatgtgttgat

SEQ ID NO: 114731 - DNA, 4522 bp, Homo sapiens
gttgcccttgggccccagaattcggcccggggttgcggggttccccaaggagctcacctcccattgggggcccccccccccccccccttaccggtgttccgtgttaacgttccccccgtggggaaaaaaaaaaaaaaaaaaacaaaaaaaaaaaaaaaaacacaaaaaaaacaaaaaaaccaaaaaaaaaaaaaaaaaaaaccagctgctcggcggttgctggggaccgcctacgggctctgccataggcggtgcaggcggacggggcgcggcgggggacacggcggccgccgcggggctcgatcgggcaacggcggcgacggcggcagcgatcggagtcctcctcctcccttattcccttgctcctctttcttccttttcttttcctttccgggcgggccctcgtccactttccctaacggcggcctcgatcctacgtaaaggcatgacttcctggcaccacagggaaaatcgggtcgcaagcccagaaactatttccccaccaccacttgttgaaaaactgatttgaaggcatctccggggttgaacgaacggagaagtgccaggatttggtgccgtggctggtttcgctctggaggaccattccctgctaaggatcaagacgaaaaaaactggggaactaatccgaaccatatttatttagagtcaggaatggggcgatttgtagtaacagcaccacctgctcgaaaccgttctaagactgccttgtatgtgactcccctggatcgagtcactgagtttggaggtgagctgcatgaagatggaggaaaactcttctgcacttcttgcaatgtggttctgaatcatgttcgcaagtctgccattagtgaccacctcaagtcaaagactcataccaagaggaaggcagaatttgaagagcagaatgtgagaaagaagcagaggcccctaactgcatctcttcagtgcaacagtactgcgcaaacagagaaagtcagtgttatccaggactttgtgaaaatgtgcctggaagccaacatcccacttgagaaggctgatcacccagcagtccgtgctttcctatctcgccatgtgaagaatggaggctccatacctaagtcagaccagctacggaggcatatcttcctgatggatatgagaatgagaatcaactcctcaactcacgagattgttgactaggaggttaccaccattgtgatcaagataaatgtggagtattaaagttatgtgttgattgtgtggttcatttttgtatttatttcatttaaaatcatgtgacgcagaatagttttgcaatgtgtatatagttgcaggcaaaaaaaaaaccacctcactgcaaaacttattgttaattttagtcaccaatggtataaagcaaaacctaggtttagagtgtgctaggatacctgaaacctgatggttatctttaaaattaatggtttttctcctgaaatgtttgtgcatggaagaactgccctgcttttttaccctgttgccatgtatgattattccttgtgagattacttaattacttggattgaagactagcctattgaagctgctgccaggcaacaccacttaacagtaacttaaaggaattattttctttagaggatcctcttcaaaaaggaagggatagtggaaaactgttcttatatcttcagatccctagcagaaatgactgtttatttcaaactatgttttacttgtatatgatgtagtcaccttaactatctttcaattccatacttcccccgcccccattttaaaggcttattgttgtattttgtagcagcttcaagtgaccaaaagactaaaatctttcaacgtcaatgccaaaagccaaggggaattttgcagtgataggattttagtctcttactatgaatactaatttcgaaccatagctttcattttaagcatcatcttgaatttctaaacttttttctatgtcttggtgttaaaagatttcaagattggcatttttacttaaacagacattttatggttgagttttctctttattatagagaattagtaatctttttttggctgacagatcagataaaattactttctattcattaatttttctctacaactttatgagtttatctaggtgaatagtctagactagaaacaagtttactttatctgctttgcctctggtggtacaaggtttttaacatggattgtaaacaattgtctagaaattctggcaggttttttgtattggagatctggcagtatcctgcataactttgggtgaggaaattgttctcttaaagatcagccatgttcaggaaatgatctctgtttgaacctcactatcctgtaaggttatccaagtagcttagcccagctaagttctatcagagacccaaattatattttttaaaaatttaacagctggaaacttggactagagctttaataaaaaatcttaaattctttgaaattcaagttaaaaatacttatatatttctattacaaagcagtgacaaatgatgccctgtgtgacttggagttatctttgacttttaccacaaatcttcatttataaaagaaaaagccaaagtgaaaaaaagttagattgtgtatttttcagtaacagctttccatgtcttaagatttttttacagacttaagtttctaattcaggttgtcaaactggccatttgacttcagagatttgttttcattaaaaaataagcctgccgccaaaataaatcacttatcaaaatgtgaactgttttcctcatgttcagttatgttaaagtagtatgataaatgcatgcctagagtagtgctctcgttgatgaagcacatgtatgaggagaccagcagcaaaacataaccatatgtgttttgcgtttacttcctctagaaaagaatttgcaggcaaccatgtttaatttgaactatctaagatggtagattttagaagctaggaataattgagttttatagcactattttcagaatacaaaaagatacacaatcattctgttttttgaaattccatgtgattcaaactgttccctattatttgggtattaatttgcactaatagcaaaatgtaatggcagatcagctttgagagtggacctaagcagtaaactggatgatgttgcattagaaaaacatcaataattcatatttaagttttagtagttactactgatttgataatcacttaaattttatatatcttaatgtattttttcagactcctaattaattcccacattcactgtaactaggggcatagtccattctgttaggattatatcctctccttagaaatgttttccatcctgttgtggggatttggtattaatgtttcttcattgattatggaacttttgttccctgaagctagttaactgtgtctaaagttaaataaatacagcagaatgattgttttagcctgctcgaactgatacaaatccctgaaaccatgattggcatatgttagataacaaatgaggatgtctaagaggcatatgctgctttggaggtgtagtgaacgtgtgtacagaagttttcaatcttaactatatagtgttagtgtgatgctatactattggaaaaatagcagcttttttctattttataagttgtatgcataaacataagatttgtaatgtttcatttataaactgccttcttcaacacatgttaatagtgttttctcaaagtattgatagtatgtcctccagaatttcacaatatgcttacagtaaatatttcctagcttgttgaaatgttcaattctttgttggctttcttcttgattctgtgggggtgtataacaagcctgaaggacattgtaatcatttcttacaaggtgaaaattaagaaagattgtgtatgagagcctatatagttgttttatccattatcatctttgattaagactttaaaaaaatgctatttccagttaatgcatttggccctattgaattttcagggaccagaaaacattaaaaagttctgcatcttataatggtaaccaattaagcttgagattgttctgaaagtatcaattgctttaaaactgttgtaagtacagttggcaagatctccaagctgaaacttacacgttaaaacttttgcctgtaagaatttgcacatgaatgttaatggaaaacacaaaactttagatggcccaaaacaaaagccacaaacagttcatcatttggtgcttagtctttgtaagggctctctgtggtttgacttactccagctaccgttaaatgagggcaaatcaccttaaaacatgttcatttgattcataacaaggaaaattgggtctatgattttttgccaatcttagcctaaaagaaattgctttagcttctggtcagcactgattaaaatgtgaatagtgaagtggctatcctaaactggtttatctccacccacactatcatagattccttaggtaaatacaattcttatctagtggtattctacttgtattcagaatactgtattaaaattttactatttcattttt

SEQ ID NO: 114732 - DNA, 672 bp, Homo sapiens
atgatggaaggcgaaggggaagcaagcagcttcttcacaaagtggcaggaaggaaaagagagagcgaagggctggtggcccattgccactgactgctcacagccattgcccgttttagcaagggagccatccagctcaaagttatgcctcatctctgggggcagcccacatctggtgattggccgatgtgggattataaagaattaccagttgacacagtacagtgggcagccatttaagcaaagagaaaattcaagcatgggccacagaccagcagcatcagcagcatcagcatcctctggcagctgtgagcagcgtgtgagaaatgctgattcttgggcctcacccaagtcctgtagtatcagaatctgcgttttcacaagacccctagccatggaacgaggactggagcccccagctcagacctggacactcaccacgatccacccacaggtttgcagagtacagcgaggcaacaaaggaacagaagacagcaagaaaacctcacttcgaccccctgttattccatctctcaccccaccaatcagcactccccacttcccaagaccctacccgccaaatatctttacaaactccgatcctggaatgctcggggagactgatttgagtaataataaaactctggtctcctgcacagccggctctgtatga

SEQ ID NO: 114733 - DNA, 371 bp, Homo sapiens
tggtcaaaaactgccccaacataaagccatctgtaaagatggggagaggttttcttttgtttgtttgttttttcttttggctccaggtgtttaacgaaactctgttaaaaccctagctgattactaagcaaatggaatagacttcagcggccccacatgaccaggaatatagagcttataaaagtagtttagtaaagtcactaaacaagcaaacaacaaccactcacaataagcagcagtaataagccctggggaggggatagaatctgatctgatgctgaaagcaaaagagccaacaaagaattctatatttagcaaaactgtccttcaaaaatgaaggagaacataagacattcccagacaaacaaaag

SEQ ID NO: 114734 - DNA, 459 bp, Homo sapiens
atgtttgtggtcatttattacagcagcaagaagaagctattgttaatagaagactcactagttagaattctgaagagagaagctgatcaagaggaagaaccatgtgggcccacagaccagcgccatgtggaaaggaagcggcccatcctccccaggggagattcaatcaccgacacattggcatcccctggaagcttgttagaaaatgcagggcccttgccagagctacagatccagaatctgcattttgacaagagtcccagggatccaaaactggccacactgagaattgacttgaattgtaagagacctgtgaatcagcaagattgccggtttatttccagtagaggctataaacttatcggccaccagctaggacatcttgtttttgactcaagctgtgtaaactgccatacaagccatcagaagaagatgacccttgctatgaagcggaaataa

SEQ ID NO: 114735 - DNA, 392 bp, Homo sapiens; identical to SEQ ID NO: 8505

SEQ ID NO: 114736 - DNA, 716 bp, Homo sapiens
tcggttgccgtatcaaagccctctatctgtgtgtgtctgaggctcggccgcctgagccgcggacggtttgctgagcccgttagtgcgcccttttctttacacgccgccgccatgtcccgctacctgcgtccccccaacacgtttctgttcgtcaggaacgtggccgacgacaccaggtctgaagacttgcggcgtgaatttggtcgttatggtcctatagttgatgtgtatgttccacttgatttctacactcgccgtccaagaggatttgcttatgttcaatttgaggatgttcgtgatgctgaagacgctttacataatttggacagaaagtggatttgtggacggcagattgaaatacagtttgcccagggggatcgaaagacaccaaatcagatgaaagccaaggaagggaggaatgtgtacagttcttcacgctatgatgattatgacagatacagacgttctagaagccgaagttatgaaaggaggagatcaagaagtcggtcttttgattacaactatagaagatcgtatagtcctagaaacagtagaccgactggaagaccacggcgtagcagaagccattccgacaatgatagattcaaacaccgaaatcgatctttttcaagatctaaatccaattcaagatcacggtccaagtcccagcccaagaaagaaatgaaggctaaatcacgttctaggtctgcatctca

SEQ ID NO: 114737 - DNA, 578 bp, Homo sapiens
tttttaaaacaaagttcactttattacattaattttacacactaaaataatatgaaatgcagacttgtttaaattctcttgctgattctcttgaagacaatgtcacccaatgtcatggtctgaaagccagaaaagaaattatgaagtgttcatctgatgttgtattgtaaaaaacaaaattaagcataaaaaacaaaattaagcttaaaaaacagcaccaaatatgttgggcatatgaaacaattcaaaaattcgtctggtttcctgtagggaccggaggaaagggttgggcaatgttttccaaaatcctatgccaggtctttggtcacttctcctcctcacctggaaagtcctccbgcctttgacttgaattcttttctacatcaatgactggttatagcaagaccatccaaaccagccccaatctaatttctcaaaatttcattgagtacctactatgcaccaaatacatgttgagcaccaaggatacatgtacatggacacaactaggcacacagcctggaaggcagtgggtagtgcataattgtcctcctatagctgtgaagcatataaaaaca

SEQ ID NO: 114738 - DNA, 688 bp, Homo sapiens
  misc_feature (1)...(688): n = a,t,c or g
gattaaattgggaccccccgggtttttcccttccccccctttttaaaacccggcccggccccaattaaaatttaccccccccaaaaggaaaaagcttgggggcccctnnnnnnnnnnccccnnnnnnnnnnnnnnnnnnnnnnnnnnnnnnnnnaaaacaaagttccactttattacattaattttacacactaaaataatatggaaatgcagacttgtttaaattctcttgctgattctcttgaagacaatgtcacccaatgtcatggtattggtgattatgtcgccgttgagttcggtcacagacttgatgtttttgaaagttcgtcaccagttttatggtcaccttccaactgaaccactggtcttgactttctcccctgtcattggtctccagctcacattcctcccccaccgtggaattcggtttggggatcacttggggacccagcgggtgatggggtggaacttggaaggtgctttccccattctggcacggatttccggacacccccttggatatcctttccccttctggggatgaggctctttccgggcaggaccggatttgcctttcatggagggggttcaaaggtttttccgggggttctgcaggttggggacttgccgggaggaaactcatggggggggcaatagagctccctcttcacgactgacctgcggctct

SEQ ID NO: 114739 - DNA, 501 bp, Homo sapiens
atgagcaaggatgctggtatctcagatttcaggagaactgtgacccatgcagggggtttgagtcccggtgaaagtggagaccctgtcatcctgagaatcatccccagggggaaaccatctttttctaaggcggaatttctcaacggtggaactactgacattttggaccaggaatggatcccagtatggggccagaggaaacctggtatggggcagagggaaacaggtgctggaggtgactaccatcaccctctatgggaaatgtcggccaagctgcaggtgacctccagaaagagtacaagggatgctgatacagcttctatgtttgtccctccaagctacatgttggaatttgatccccagtgttggaagtgggacctaatgggaggtcaacagatgtcctctctgttcctggtcaccgtgctaggtgtggaggacacagagagggagaagacctctctgccttcttggagctcacaagccggccttcctattccctga

SEQ ID NO: 114740 - DNA, 435 bp, Homo sapiens
ctaagtgagatcccaggttcccaggtgggagcaggacagctgactggcaagacagccaagggtcccaaaaggaacggagtagaaacaggcagggaaaggggaccgcaagggggcagacttttcttcctcagctcctcttagcttgaagggctgataccaccatccggttctggagcccagccgccattcagcaggccctgcccacttgccaaggaccttccccaagccaggcatctccggagatggtatggagcctggggtagctcggccaggcctttgatcaccagcgatgccattgctcttccccgtttcgcgtctgctgtggcttgctgctgaggctgctttcagacctctgggctttagggaatttcctagaaccgtggccaacagtaagatggtgctaccctgatctgtgcattcaggacactgattcat

SEQ ID NO: 114741 - DNA, 784 bp, Homo sapiens
atgacctcagagatctcttttccacctcttgatagtgatgactctgaattaaccgtggtgctccgagccccccaggacctggcaactctgtccctcccccacggggaacccgcgctcatcccctcaggccccaggcggcgaagcttaggggttgttaagctaatgggaataggctacgggctgtttcctggtgctgtaggaggcgctggaactggagccttgcatccgaatgacaaagtgcctgccttcccggagcttacattgagtgcggaggacagaccagggactagccagcagacagtcccatgtgtcagggtctggtgtttgcagagggtgtttgcaggggtagagcatgacaggaagtggctgttttggataagacgatcaggaaaggtacccgtctgcggaagtgatactgggtctggagtgaagcggttggaagaaaactgcacctctctggaggaagacagtgccaggcacagctgaaaatccggggctagagctactgggaggaacaggaggagcagctgggaaactgggtggccggagcagacggggagggtgagcagggagggtaaagataagcaagcaaggggctggggctgtcaccgaggtggggtgcctcggagggtgcaggagcagagtcaggatctgacttaggtttgataggctcctctggctgtcctgcgatttatcagggacccaggttgcgagcaggccgaccactcaagaggcgtctacatcaatgcagtcaaaggctatgctgacttggaccagatggatg

SEQ ID NO: 114742 - DNA, 651 bp, Homo sapiens
atgcatcagaattacctggagggcttgttaaaacacagattgctgggccccttccgcagagtttctgactcagtaggtctggggtggggcccacgtgatgctgatgccactagactggggacctttaagaaccactaccttagagtgatcaaagagggcaaccaaaaacaagaaaaatctgagaaacagtcacagccaggaggagcctatggagacatgatgactcagtgtaatgtgggaaccaggatgggagcctggaacagaaaaaaaatcagagaggtgcagttttcttccaaccgcttcactccagacccagtatcacttccgcagacgggtacctttcctgatcgtcttatccaaaacagccacttcctgtcatgctctacccctgcaaacaccctttgcaaacaccagaccctgacacatgggactgtctgctggctagtccctggtctgtcctccgcactcaatggaagctccgggaaggcaggcactttgtcattcggatgcaaggctccagttccagcgcctcctacagcacctgcattgaacaagttacttacatcagtggttctcagatggggttcctggatcagcagcagcagcagcagcagcagcacctgggaacttgttcacgtgaacatcttgtga

SEQ ID NO: 114743 - DNA, 404 bp, Homo sapiens
gaagctttggtggggccacccttgactctcccctgctggtcactctttggagctctcttggcagtgacacgttcacacgacttgttgccattcccaatgagctggacagaccaacacctgcaggaaaccccacgctcagacacctgaacatccctcaactctaccttctctgtctaacaggaggtggcggcggtggctactccagttatggcaactccgacaacacgcacggtggagatcaccattcaacgtatggcaatccagaaggcaatatggtagcaaaaatcgtgtctcccatcgtatccgtggtggtggtgacactgctgggagcagcagccagttatttcaaactaaacaataggagaaattgtttcaggacccatgaaccagaaaatgtctgaaga

SEQ ID NO: 114744 - DNA, 486 bp, Homo sapiens
  misc_feature (1)...(486): n = a,t,c or g
gcagcgggtgaatatntaccaaagccaaagccacgcccctcacccccagctgcaatccggcacaagtggaggtactttcaatattggaccgtgatgacggacgcttacccgcccaggcccaggccacggcccgcctgcaggaggtggcggcggtggctactccagttatggcaactccgacaacacgcacggaagagggggctatagacccaactctcgttatggaaatacttatggtggagatcaccattcaacgtatggcaatccagaaggcaatatggtagcaaaaatcgtgtctcccatcgtatccgtggtggtggtgacactgctgggagcagcagccagttatttcaaactaaacaataggagaaattgtttcaggacccatgaaccagaaaatgtttgaagatgttaagatcccctgattactttgagaaaaacaactaaaacaagaaccgtgtttnnnnnnnnnnnnnnnnnnnnnnn

SEQ ID NO: 114745 - DNA, 185 bp, Homo sapiens
atgggttccgaggagcagatcatgcaccagggcggcctgctcagctctggtgtctgcagccccgtggaaaataaaccccgtgaaagcaatggcgtcatgtgcaacccgaccttggagacagagaccccagagttagcgttgtctacctgggacatctcccagcccaggggtcttactccagaccc

SEQ ID NO: 114746 - DNA, 1539 bp, Homo sapiens
atgggttccgaggagcagatcatgcaccagggcggcctgctcagctctggtgtctgcagccccggtcaaagagacttagcagacgcccttgttgaccctgggcatttatggcctttgtttgtgcttccagtgacacttcaatgcatattgcatttattttctctctttgttcacagaacccaccaagaagccaaactcagcaacagcgcaaccacgtgggcatgggggaaagctcggaaagctggtggcaccattgttcataagaaaaagaaagaacatgaaatgctcaccagtgacatcatcgcgggacacttgggcgatggtgctgctgatatgaatgaaatggtatttccccgaaagatatcattattttctgaaatcatcctgttgtttcccaacagatatctacccaaagctgaagccatgccctcaaccccagcaattctggcaacagtggagagaaggtgggatgagaggcctgagattggggaaaagttggtcacgggtagactacaggctagtgcaggggatgaaggagaaggctccatggctgtatcagtgggtgacacgttcacacgacttgttgccattcccaacgagctggacagaccaacacctgcaggaaaccccacgctcggacacctgaacatccctcagctctaccttctctgtctaacaggaggtggtggcggtggctactccagttataacaagttcggcaacacgcacggtgcccccacatctaggcacgcggccctggtgtctggtgttcccttctttgtgtctatgttgtcaatcaagaaaaatgatgagacgagtgtaaaagatttatttgccaaagttaaggaagaatgtgggctcagagcatggccccaaataggtgatgttggtaaagcaggtttaatgggtggcaagccaggtgatgagagggagacaggaagaggcctgcttagcaagggggtccttgttatgcagatgaaggttcccaggcctccagaccctcagggatgcacatctaatgcaccttcagccaccagtgtaaacagtaaacaagggccagatggcacctgtgcaccttccctagccttgggagagccattggaatctctgcagcctttaagagcatcttgcttcaggtttgctgacctgcttgtttctgaagagggggctatagacccaactcttgttatggaaatacttacggaaaaagaattatgtcttacagaatatgtggagatcaccattcaacctatggcaatccagaagtcagctgtaggtgtggccagcgctttgaccatgtttcctgggtcttcttatgtatttggggccttaggtggaatggttcatctcagcttcatgtggactctcacatccctccaggaagccaggccaggcttcatcacacaccacagaccaggcaatatggtagcaaaaattgtgtcttccatcatatccatggtggtggtgacactgatgggagcagcagccagttattccaaactaaacaataggaggaatttgtttcaggacccatggtaa

SEQ ID NO: 114747 - DNA, 545 bp, Homo sapiens
atggcccgtgcagtgaactttaagggctgtcctgacaacccatgtcctcaacaggaatctgcggtctgttctggaatctggtctttggactcaaatgatcttacctgggtagctaacaaagtcttctgtcttgttcctgctgttaaaaaatccaaggtcacagaaatggaaccttctccgtcacacctcctgatggcagtcagctgtgacccgctgaatccaggacatcatgcattccagtttcatttgcgagaacatttccaggtccggctgaagcctagtggctccagcagaggtctcaacccctttgggatgctcagtgggagacagaatcaagggccaatgatccatgacctagtcctagtgcccatgtcagtttgtcaaaggccctcagagcagattgtgttttccctggcgggggcttgacttctttgctttaaaaaggattcttaagtatttattgcagtaaaattaaccaccttcaaatttctgccagatcccctggaggtatataccttattaacacaaaacaaatgtgacacttg

SEQ ID NO: 114748 - DNA, 1575 bp, Homo sapiens
atgagaagcccctgtgtcaacaagatccaggggctggagcccaatgccaagcctgtgttgtccccagcgaccctgcagctgctcgctctgatgtaccctgtgccattcaaggaaatgtggtccaggaaaggtaatgcttacaccgctgatagtggtgctgaaaactatcaatcacttattgctggatcgtgcgacaccagaggtctgggatacgttggcggcgtagcatttggcatgatgactacgggtaataatgaatggcccagggcacaaatatcagtaggcactcaagatagggatggatcaggcaatattggtctgcaaatgcatttcaggtttatggcttcagggcaaatatcttacgctggaccgcaaggggctggaagtttccaacaggttccggcatctgacagaaatataaagcacagcataaaggatgatgaatcaagcattgcatacaacaacataaaatcaatgagatttaggaactttatatttaacgatgatgagcaagaaaggcttggagctcggcggcacaaccagcaccatctggtcgcgatggtggacacggaaagcccactctgccccctctccccactcgaggccggcgatctagagagcccgttatctgaagagttcctgcaagaaatgggaaacatccaagagatttcgcaatccatcggcgaggatagttctggaagctttggctttacggaataccagtatttaggaagctgtcctggctcagatggctcggtcatcacggggagcattcaacaaacagcagcagtagaaaaagaagagtatggggcagcagcaacagaagggcatgtggccctcctgggcccttcctccacaattcacaacaaaatcacaaaccgcacccatgactggggtgccctggccctggatggcggccctgtccctcggtgctcaggctgccgggttcaagtggtgggctggctttgcatccctcctaggaaggccaagtgcttgacacagcgtgaacactatcccttttataaggttatcaacacaggatgccaggttcctcacctgaagaagaaccttgatcacctcctggggatgggctcttctcgagcatggcttccaagtacccagattcacaggtggagaggggctgctggaggcccccggacctcacgcttcctgagggccaccccggagcggctgcagccgctggcggcaccgggaaaagcatctcggccaatgtggccccgtcccagagcaccacccgagacatcaggagcccatcgtgggctagggaagatcctccgggacctaacggcccagggaaggactcactccagtcacaagcagctggagatggatggtttggcagagaaggggaaccccagcaccaacccagccccaggccccaccttgcagcaggtctgcccttgccagagtcctcgaggggctcagcctgaccctgacaggtggcctgggggcacccaaggcttcgggcagcccctgagctgggcccaggtctcatggcggtctcagggcaggcagggtcttccacccttggccacctacccaggtgatgcctga

SEQ ID NO: 114749 - DNA, 507 bp, Homo sapiens
atgagaagcccctgtgtcaacaagatccaggggctggagcccaatgccaagcctgtgttgtccccagcgaccctgcagctgctcgctctgatgtaccctgtgccattcaaggagatgtggtccaggaaacaccccctctcctcttcacctcttcctgctggccacgaggaagccacttcctcagagagaccctaccagatgcggatggaaacagatgcaccaaagcaagccctgatgaaaccgcgacttcctaaggaggtttgtctcaacacttcccatttttacggcattggcattgccaagcatggggaagtatctgctcttctcatgttaaaagtggcccagcttttcttaactcagtccaagctgacttgtttagctgcactggaatttcttaccaaccaaatatttgcatcgagcaaagggggctgtgtgcacctccctaatggcagcgatgatggctgctgtcattcaagcccatcttcagacgtcacagtctggaagtga

SEQ ID NO: 114750 - DNA, 498 bp, Homo sapiens
atgagaagcccctgtgtcaacaagatccaggggctggagcccaatgccaagcctgtgttgtccccagcgaccctgcagctgctcgctctgatgtaccctgtgccattcaaggagatgtggtccaggaaacaccccctctcctcttcacctcttcctgctggccacgaggaagccacttcctcagagagaccctaccagatgcggatggaaacagatgcaccaaagcaagccctgatgaaaccgcgacttcctaagagaaacccttttgtgaggggagaggagctatgggaactgttacctatgggttattaccaaagaacgctggcaattggaaatgtcctgatggaaattctttgcacgtgccggttctctggcatcctccaggtggcccaacccaaagcagaaagcagaaaccacagaccccaatggatcaaggacaatctggctccggaatacgacatcctttcgtctgaagtcacatacaacgggaacttttaa

SEQ ID NO: 114751 - DNA, 737 bp, Homo sapiens
  misc_feature (1)...(737): n = a,t,c or g
atgaagttggagagaggatgctggggcctgtgtggcagttcctactttggaactgcacctttttcgcacaaataagaagctgtaagccccaaaatactgagagtataaggcactcactagtagagcacatgtggagagtctgggcccagtccttgctctgggatctgcctcattctcgcgtgtgtttctgtcaaccctctctcttagggttttagcctaatggcattatgaatcccagagggtgtaaccaatatgcaccaagaagttttgccaagttattggaaacaaggtatggggagactcacggggtctgtggtttctgctttctgctttgggttgggccacctggaggatgccagagatccggcacgtgcaaagaatttccatcaggacatttccaattgccagcgttctttggtaataacccataggtatcagttccctaaagagcagacagctatttactatacaagaatagtgaagggtctttagcgaaacactgttgtatgaaatcggtggcctctaatacggagtctaaggcctcgctggtggaagtgactagagatagcctctcttgtgctctgtgcatatacagtgtggtaaagggaacagatttccacattgaaagtaaattctgcatggctcaggagaaatgaagacnnnnnnnnnnnnnnnnnnnnnnnngcgcgcacacacgtgtacgcagtgtacattagatgtttgatttcagcttccag

SEQ ID NO: 114752 - DNA, 588 bp, Homo sapiens
atgggggagcttcacctggatggagactggctctccccgcgtcccagtgccctgcccggcagcgcaacagaaccggagactgggctgcaggacgataccagcacttcaggaaccacggccagtgtggcgaaaccagacctagaacgtcgtatacggctgatagaccaagttcacccgctgcagcaggctgtgagagggaaggcacgttcctgggtcagcagcgtccaaaactcccgtaataggacccagtctggtggacccgagagtaaaaaggacaaaaggacccccactaggacccagatgatgcagtccagcttcaacccctacaaaattgccgagaagcacttctgccaaaggctaaaggatggtaaaagaaaaaggccccggggagcctatagtctctatggaagtaggggggcattaatggattttttggtcgatactggtgctgatttctctgtggtaactcaccaatttagtctccccacaaagaaactgtgctactatcgtaggggctactggcgccaagaaagaggcctttttgcatatccaggagatgtattattgggggacaaaagtgcagcatga

SEQ ID NO: 114753 - DNA, 393 bp, Homo sapiens
tatttccttttccctttgtcctttgccttttctgtgctgcctcctgttatcgccaaggcacgttttttacccagaggagttttggcataccagttcttaaagctctcttcttcctctttgtacactggattcatgctggttatcgccgtaataaactcaactgcagtgagaggtttatgaatttgccgccggattctctgatctgtgagcacgcctttaaccacttcgactatatgtccttgggtgaagccgtcagtgaccttcgccaggcagctgacattcaaggcactggtgaggactcctccattgcgttcaatgatttgcttccacagaacgtatctggaagcatagtctggtctgggcaccaaaataattttctggtaaactttgcag

SEQ ID NO: 114754 - DNA, 1422 bp, Homo sapiens
atgcttgggtcacttgctgggccctcgtctgtccagcctcctgcctatctgcagcagttcttttccaaggagagaagggtctactctttcggggccccgctctgtcaaggaagaagaaactcctgtcctcacaaaggttacacccacggccacagagtcctggctgaactgctgtacacaccaatgtgtacagtgtcacattcacgcctcactaaacaacattcatataaagagagcattgaccgagtccttgccatgagccagcaccgttcatgtgttaacgcacattcagaatttttgcgaatgctgactgctacactcagtcttcggcagccggctggcctcaggttctatgatgtttacactgcaccaagcaagatgccaacacattgcacaaaaatagaccacagcagtggtccaccctcagatcctttcagcaaccaaggcaggcagtctggaaggtaccaggagagtgagcccctcttcctcctgagcacatatttcccccaccccaatagtggctttgtcccactggtggaacagggcagggacttgggcgggctacatgaagaatcagtcacagccaaaggacacaacccacctccagcaatggccacctctcaaagaaggcacagccagggtggccacaacccttggaacacacatctgctcatcactggtcatggcaacagagaacatggatgggaaaaaaagctaaaagacactcttcaaaccgagaaagacaagcttcacttatttccagaagaagagagctttaagaactggtatgccaaaactcctctgggtaaaaaacgtgccttggcgataacaggaggcagcacagaaaaggcaaaggacaaagggaaaaggaaataaaagaaagagaaaaaggcaaaaaagaaaaagtaatgcctttctgaagaaccatgcttgagtctctctgggatggagaggaccccaactcgccaaagaaaagattcaccattgcccgcctgaagaagccctcaggggaaggaacttagcagtgtgcaggtgagctgatgccgcaaacccgctaaccactgcatgtgctgttatgcctttcccaggctggacacctagctgggtgttcatcataactttccacagctttaatccacgccaagtttgtatataactgaaattcactcttgacaccctccacagtctttccaagttggactcttcctctcatcagtactagttgtcaaatttaaaatgtgacagttaaagaatattctagtttgacaattagtaagcaatgagtatatcatcagtaccctagctttttattaatccatgtaccctgtatagtatcttgcatctattttaataaattaattctttgctctagtaatagattttatataatgaaataaaggtgttgtccttgaaaaaaaaaaa

SEQ ID NO: 114755 - DNA, 597 bp, Homo sapiens
atgggctctttccttgcactgtcagccagcaggctgctgaggaccttgtcaatctttgaagaccagtatttcttggtggatttttatgcacccaccgcagctgttgaaagcatggtggagcacttgtctcgagatatagatgtgattagagggaatattgtcaaacaccctctgacccaggaactaaaagaatgtgaagggattgtcccagtcccactcgcagaaaaattatattccacaaagaagaggaagaagatgggtgaggatgaggtcgtttcccaaaacagtcacctgcatctcttcctcggtctcctcggggctgattggaaagacttgactagcccttcccccttcccagggggtgccctgcacaaggtgtctgtcaccatcacagatgacggaacttctgcacataaaatgttgggggaagtgccggttctgggaatctctgaaaagcaggaaggagccgagagttctggcctctgctttgtttttaaccatggcaagaccggaggatggagagatgtgcaagagatgcccaaagcgccaggagggcctggtctcccagctctggcccagcgcctcctccctctgtag

SEQ ID NO: 114756 - DNA, 961 bp, Homo sapiens
tttcacattcctacaatcaagtttattactcaaagcaaaagttgtccatataatacattggtcgtcaatttttatttccacatggttacacaggctgaatgactagctcacaatcccaggaggtattataagttttgctcttcaaaaaatggtgttacatgttgtaaggggaaaaggtcctcaatgacaaagaaatgacactaatgaaaacaaaatcaagaatgatccactggtactgcaggttacagagaagctgtcagtgagcagttccccaccttttcacaaccaaaggggatcaagggctaaaaataccttagaaaaatcaaacagcacctgcaacacatgcttatataaaggccaaaacttgcaaattcttcccttctcgtccatgctgccccaaaatgtgaaaggaatttacatataagggttaaaattcggggaaatcttcccacttcttacctcttctttgtggaatataattttttctgcgaatgggaactgggacaatccctttcaacattcttttagttcctgggtcaagagggtgtttgacaatattccctctaatcacatctatatctcggagacaagtgcttccaccatgctttcaacagctgcggtgggtgcataaaaatccaccaagaaatacccgcctcttgttgtgcttgctgacttgtgggcagagatcctataaggaagcgctcgttcacccaggttttcccaagtccctcactattgcttctctgtccctcagggccctctatcgtacgtttcaaagtagcagcagtcctctggccgctgcatggctttttaggattaaagccagctcgtagcggggcatgcctggaggatcggcgagtgcggctcggaagccagccggttcccgggacgcgaaggggcgggacggcggggacagtggggacctagaagctgctgcgccggacggctcccaggcggccgc

SEQ ID NO: 114757 - DNA, 630 bp, Homo sapiens
caaccccgccgccggggacatgtccaacccctgtagccggaggaacgggccagtcagactgcgcccgacaggtatattgaaaagtctgattcagttacaatcagtgtatggaatcacaagaagatccataagaaacaaggtgctggatttctccgttgtgttcgtctttttccagtgccatcaaccacctcaaagacactggttatcagaggttggatttatgcaaacttgggccaaaggacagttagaagacagtagctgaagaagcatctgtagggaatccagaaggagcattcatgaagatgttacaagcccggaagcagcacatgagcactgagctgactattgagtcggaggcgccctcagacagcagtggcatcaacttgtcaggctttgggagtgagcagctagacaccaatgacgagagtgatgttagcagcgcactaagttacatcttgccttatctctcactgagaaatctaggtgcagaatcaatattgttaccgttcactgaacagctattttcaaatgtacaagatggagataggctcctgagtattttgaaaaacaatagaaagagcccctcacagtccagccttctaggtaacaaatttaaaaacaaaatatttg

SEQ ID NO: 114758 - DNA, 1536 bp, Homo sapiens
tttttttttttttttaccattaaaaatgatctaacaagctttatttttattattgttaaaaattctcattttgaggaacacaaccacaaagtaaagaaagttttcattgatttaagtaaaaaaccaatatttggtgaacaattttaaaaacataggctccagggccatccacatgctttaactcatgctcaggctcctgatattgatggggttgtctttgtatttttctgatgcccttttatgtgaattcacctctataaggacaaaaaattataatcaaaattattaggtattacagtcacaggatattgcgaggatgaggtttgttcttataggtcatctcctggggaacttctttcatggggcttcacttggacttctggctctttctggttcattctggttcccctgggttctcattaaatataattgggttttttgttggggccccgtatccccattcctaccattcaatggccctttggcttcctgctggctcggctggggaagctttcatcagggagggcctgtttcggcaacatggaggcttgggcacagctcccttgcacatgtgtttctgaacattccattttcaaggtccggataacatgagacatgaactttctcacatcctcgttggggatgagggaccgtagctgctcggttagctgaatttcaagctgatcacccccaaagcctgacaagttgatgccactgctgtctgagggcgcctccgactcaatagtcagctgagtgctcatgtgcctgcttccgggccttgtaacatcttcatgaacgctccttctggattccctacagatgccttccttccaggaacaaatgtatgcctgttaagtccagaccatgccagtgttgcaaatgccagccttgaaccttcttgcaagacagccctcaatgcctatttttaaattgggcagaggcagccaggccatatggcctaggtaagatccctatagatgaaaacacaaaacaataaattagtggtaaagcggttacttgagtaggtaaaggaggcaggccaaccgctaccacaagggctgggcagaaaaggtgttacctgaaggcctgtgggactgggacaagtttgggtaaggaaccagaaggccaatgggaaggaggacacaggtgcccaactgaagggtaagcatggcagtgagtatggtatgcctagaataaaggtggttgggattagaattgggtgacactgatcagtagtttaaattcagaggtatctcttcccgactcaaaagtctcactttgggctgaaagtacagaggaagaaggtagacttctaagaagagtctgaataagcccccaacttctggagtccctttctcaatttctgttggcagtgggaaatattagaaattactctgggcattaaaaatagctcagtttaacctggattgtggagttaaaaaataacaaagattgcattggtcaaatctggacaatttgagcattcaaaagaataacaacaataagctacaacataattaaaatataaaaaaaaaa

SEQ ID NO: 114759 - DNA, 361 bp, Homo sapiens
ggatgatcaagcttggtggggggaggggcgccaaccattaccaaagcttgaataggtggttttcccctcacagcgtaaacaaagccatggggaagttccagctgagcagagccctccacagctcagcaaagcctctgtagccagactgcctctctagattggtcctcactgggcatgacatctctgaaagaaaggcagcagtcccagtcaggggcttatagacaaaacccctgtctcctggggacagaacacctggggaaaggggtggctgtgggcacagcttcagcagacttaaacattcctgcctgccagctctgaagagagcagcagttctttcagcacagcgcttgagctctgctag

SEQ ID NO: 114760 - DNA, 1074 bp, Homo sapiens
atgtggaggattccatacagagaaggaaattccatggtacaaataggactggacttttcatttaccctgaaagcagcttttaagcaactcaactacattagggccccggggaaggactttacattgccaaaatctacagggctcacccttgacacgccagagtgccctctcagcactggggaagaagccagggagaaactcggagggctggaatggagaaactggattaatcatatttgcaaatcttgcagcaatatggcggatacagccaatgaaatgtcaaagaaagaaggcagttggctgctcagaacttggtggcactttgataatggctctccagcattagtgtaccaggccttagggcttaccctgaatctgagagtagctcagagaatagtgcccttggatgaggagggaaaattgccaaggatgcagaaggaaatgaagatgatcaaagacgaggatgtgcatttcgacttggctgtgaagaagaccccctcctttccccactgcctgcagccagtggcttctcggggaaaggctccccaaagacaccccttcccggaagctctccgagggccattttcccagtttcggtatgaacctcccccaggagacctagatgggttccccggggtcttcgaaggagcagggtctaggaaacggaagagcatgcccacaaagatgccctataaccaccctgcagaagaagtcaccctcgccctccactcagaggagaacaaaaaccacggccttcccaacctccctttgctgttcccgcagcccccgcgccccaagtatgactctcagatgatcgacctgtgcaacgtgggcttccaattctaccgcagcctggaacactttgggggcaagcccgtcaagcaggaacccattaagcccagcgccgtgtggccccagccaacgcccactccattcctgcccacgccctacccctactaccccaaagtccacccgggcctcatgttagctttactaaattacggaaatgaatactggagaatgattagcctaataataaacccacagttgacagtgcactcaaaaggctgttag

SEQ ID NO: 114761 - DNA, 1303 bp, Homo sapiens
atgaggatccaacaattatgtggacatctgtggcagcaaaagaaaatcagccttgaattaatgtcttcatttcacaaaattttgaaaaataaaatggggtgtggagttacacctgatagcaaggagctgctaaagtatctctcctattgtaattcctatccccttaccggaagcccacaagaggccccagtgtctgatgttccccttcctgtgtccaagtgttctcattgttcagttcagctcatcatgtgtctgagaccagaacacatccccaactccccaggaataaagggacaaggtataaaacagcatgaagaaaagcatccaactcttcttcatctggatgcctcacaccttatgacctgctttgtggtggaaatgacactgtatgttttaattgcaggcttcaagagcctatgtagcatccactcttaccctcctagaaccctgagacatttatgtgaaaaagtctgggatagccttcttgagaatgagagacgacatgagaagagaggcccagccaacttcttgcatcgattgccagctgaacaccagtggggaatagtgcaatccagcaacattatggccggtctttcagcccgtctgcagctcttcctggaacacaggccttttcctgtgtttgaactcaccgccaatggctgtcctaccaaaggtcttcaaggggaaatacaggcccaagagtctgagttcagcccagtttgcaaccatagccctggagtcattcaggctgaactaaaacaaggccctagtggtgttcctgaaatcttaccccagctaaactcctgccctacaaaaggtacctgtagatactatccagaggggagtcgcctgccaagtgcaggaaccatcaacaaaggacccagactgggattcagccgtaaaggggaccattcgctaacttcaggggctcctttatatgtgggaaaggaatcaaaagtgcattttagagcatatgaagatcctggtgtgaaggagcataagtgtgggatttgtgggcgggagttcaccctgctggccaacatgaagcgacacgtgctgatccacaccaacatccgcgcctaccagtgtcacctctgctacaagagcttcgtgcagaagcagaccctcaaggcacacatgatcgtccactctgacgtgaagcctttcaaatgcaagctttgtgggaaggaattcaaccggatgcacaacctgatgggccacatgcgcctggctctgaaacggaaaacccttaaagcgcctatattgcccaagcaaattcaccctgaaggggaacctgacacgc

SEQ ID NO: 114762 - DNA, 3907 bp, Homo sapiens
atggcagcctctgccaatcacgaagaacaggagtttgcttggcaggagaatcagtcaccatctccgagttcctatgcttatggctggactgagccagagggaacagcaagtgcaaacgccctgaagcaggaatgtgctggtgtcttcaaggaacagaaagaagaccagggtgcaggaataacgcacggaaggttgccaggaaagcactgtcacacatttgcatgcaggttaaatttctcaaaatctgagcccctacagcgagtgacagtgggaagtgtgaaagaaaggctcaagattcgctgctgtgctgttgttattgtcaatggtgttatatccacaggcaagcaactaaacgtctctgagcttcagtttctttatctgagaaatggcataatagtactttatggggtttcccagggatcaaatgagataaagtgctttgcacaggacctggcaaatgctgaaccggagactgaccaggttccttcaaggatcctcagccatgcaaaagggaagcgcctttctgagggagccaagcttgcatctagaccttcacagtggtgcaacataacttctcagagatcggcatggtaccattcagtgaatttgggaatttcaggagaagaccaagtgtcagcacactgtctgctgaagtgcgatacctggcttcttaggaaagtggtacaaataggactggacttttcatttaccctgaaagcagcttttaagcaactcaactacattagggccccggggaaggactttacattgccaaaatctacagggctcacccttgacacgccagagtgccctctcagcactggggaagaagccagggagaaactcggagggctggaatggagaaactggattaatcatatttgcatgaaacaggacattctatctttcatatcaaaggaacatgccactcattggccaaggagcctgagccaggatgaagcaggggccatccattctgaggagcactaccccagtccctgctatgccatggctaaagcaccttcctcatgggagatgttcttggcagttaatttacgcgagaatcttgcagcaatatggcggatacagccaatgaaatgtcaaagaaagaaggcagttggctgctcaggaaaattgccaaggatgcagaaggaaatgaagatgatcaaagacgaggatgtgcatttcgacttggctgtgaagaagaccccctcctttccccactgcctgcagccagtggcttctcggggaaaggctccccaaagacaccccttcccggaagctctccgagggccattttcccagtttcggtatgaacctcccccaggagacctagatgggttccccggggtcttcgaaggagcagggtctaggaaacggaagagcatgcccacaaagatgccctataaccaccctgcagaagaagtcaccctcgccctccactcagaaggagaacaaaaaccacggccttcccaacctccctttgctgttcccgcagcccccgcgccccaagtatgactctcagatgatcgacctgtgcaacgtgggcttccaattctaccgcagcctggaacactttgggggcaagcccgtcaagcaggaacccattaagcccagcgccgtgtggccccagccaacgcccactccattcctgcccacgccctacccctactaccccaaagtccacccgggcctcatgttccccttcttcgtgccctcgtcctcgcccttccccttcagccggcacaccttcctgcccaagcagcccccggaacctctgctgccccggaaagccgagccccaggagagcgaggagaccaagcagaaggtggagagggtggacgtgaacgtgcagatcgatgacagctactacgtggacgtgggcggctcgcagaagcgctggcagtgccccacctgcgagaagtcctacacctccaagtacaacctggtcacccacatcctgggccacagtgggatcaagccgcacgcgtgcacgcactgcgggaagctcttcaagcagctcagccacctgcatacccacatgctgacccaccagggcacgcggccccacaagtgccaggtgtgccacaaggccttcacccagaccagccacctgaagcgccacatgatgcagcacagcgaggtgaagccgcacaactgccgcgtgtgcggccgcggctttgcctaccccagcgagctcaaggcccacgaagccaagcacgccagtgggcgcgagaacatctgtgtggagtgcggcctcgacttccccaccttggcccagctgaagagacacctcaccacgcaccggggccccatccagtacaactgctccgagtgcgacaagaccttccagtacccgagccagctgcagaaccacatgatgaagcacaaggacatccggccctacatctgctcagagtgtggcatggagtttgtgcagccgcaccacctcaagcagcactccctcacccacaaggtactgcggggcctctggtggggcggacggggccttgggaagaggagcggggccctgagcagagcactggggagcaggacgcctgtgccgctctgcaccttaccccgaggaggtcttcaaggggaaatacaggcccaagagtctgagttcagcccagtttgcaaccatagccctggagtcattcaggctgaactaaaacaaggccctagtggtgttcctgaaatcttaccccagctaaactcctgccctacaaaaggtacctgtagatactatccagaggggagtcgcctgccaagtgcaggaaccatcaacaaaggacccagactgggattcagccgtaaaggggaccattcgctaacttcaggggctcctttatatgtgggaaaggaatcaaaagtgcattttagagcatatgaagatcctggtgtgaaggagcataagtgtgggatttgtgggcgggagttcaccctgctggccaacatgaagcgacacgtgctgatccacaccaacatccgcgcctaccagtgtcacctctgctacaagagcttcgtgcagaagcagaccctcaaggcacacatgatcgtccactctgacgtgaagcctttcaaatgcaagcatttacgaggtttcttctcagactccacatcattcaatattttgatggatatgttatttatcaaaggcaaatataaaagtgctttgcaagtattgatagagatgaaaaaccaagatgtgaagttcaccaaagatacctatgttcttgcttttgcaatttgctacaaactgaatagccctgagtctttcaaaatctgtactacattaagagaagaagctctactcaaaggagaaattctctccaggagagcatcctgtttcgctgtggcattagctctgaatcagaatgagatggcaaaagctgtgtccattttttctcaaatcatgaatccagaaagcatagcctgcattaatttaaataacacaagactggatgtcaaaaaccatgatcccactagtgcatgtaagccacctctggatttagatttctcatctccttccatcgtggcctatctctcacagttacaagaatctggtaatgggctggccacgggctgcctgactcagggagaaagagaacatgttggtggagccttggatctacccatctttccacttgtccggctgtctacaagtagagagggaaaagggagatgggagttatatctaaaagcccctgactggggctgctgccctttattcagaggtgccctgcctggagaggaggaatctagagtggcagtcgggctacagtggctttgtggagctgcgcctgtggaaactggggaggccatgagagcaggccccctgggggcaatacaccttaagcaaccaggtatccttgattgtgggagttccttggaacatgagcagaag

SEQ ID NO: 114763 - DNA, 424 bp, Homo sapiens
  misc_feature (1)...(424): n = a,t,c or g
nnnnnnnnnnnnnnnnnnnnnnnnnnnnnnnnnnnnnnnnnnnnnnnnnnnnnnnnnnnnnnnnnnnnnnnnnnnnnnnnnnnnnnnnnnnnnnnnaaacatggttaaaaatgtgatttaggctnnnnnnnnnnnnnnnnnnnnnnnnnnnnnnnnnnnnnnnnnnnnnnnnnnnnnnnnnnnnnnnnnnnnnnnngccgtgagggactgtgccatggggaacggtggactccggcccagatactacacttttcccacagtgtttgcaacccacagaccaggagattttcttgggtgcctacatcaccagggccctgggtttcaagcacaaaactggacagccgtttgggcagacactgagctagctgcaggagtttttttttcacatcccagtggtgcctggaatgccagcgagacagaaccg

SEQ ID NO: 114764 - DNA, 525 bp, Homo sapiens
atggcctgtgctcgcctccgaggtgcctgcctggcagctggaacagcttgggcctgccctctcactgaccccctggactctggatcctggcctctcaggctgtcctcccagcctcagctgactttcctggccctcagcaggtggctgcccggaactaagggtcctgcttcgcctccctctggcctgcccgtgtctgtgattgccagcatcctgatgagggagggattcaagaggagagacagaacagctgaggaaacagcagaacggtggaaaatttttgaaagtgttttgagcccacccaacctgaggagagcattcaaagaaaaacaggaagaagaccaggagattctctcgggtgcctacaccaccagggccctgggtttcaagcacaaaaccgggcagccatttgggcaggcactgagccagctgctgttttcaaatgctagcccaagaccagaagaaacttccatcagcccatggcaaaaacagaaaactgagggtgtgaaatgttacatatttttttaa

SEQ ID NO: 114765 - DNA, 369 bp, Homo sapiens
tcactgctccccggggtgggcagtggacctttctgctttgggaagctcaacaggcattgtaatgctgccatgagccatggcctgaaccgtgcaggcagaacctggctctctggccattgccactgctgttggggagtccccccaggaacgcagcaactgcaaatcaaacctcatcaaaatggcaccagctgaccctcctctccacccagggtttctcaacacccctggcaggatgcgaggggatgaggagtcctcgggcttggacccccgaactgtggtcatcatttcatcagatgccagctgtgtagcaacaagagttgctgaggtcaggggatggagaccagcatgggcaacacagccaaacgccat

SEQ ID NO: 114766 - DNA, 786 bp, Homo sapiens
atggagtcagaacctgatcaaaccacaggtgcatgtgagggaaccctggcttgttcaacctgtcacctcatctttgaagatcacatatatgagaagttagatgcaatcactgatgaggagaatgacatgctcgatctggcatatggactaacagacagttgctttcatactacagcagcaatgttgaagagttgtgacaatgaccacatggcctataaggcctggaatatttgctgtctggctctacgcagtttaagtttgctgacccctgtgcaaacttcgtcaaagcactcggtgctgcagatgacaatctggggtcatactgatctgagtccaattccggcttcagctgtacaaccacaggtgtgcatgggtggaccttgccaccctgctgccactggtgcatatgcacagacctcactgccatgccatcactggacaagtggacacatgtggtctccaccaccccactgccaccagtacccaagtgtgcatgctaactctgctgtgccactgcactgccacccccatatacatgcaggtttcggtccactcagcgctcttagtgaggaagaattaggcaaatacaaccctgaaagggaaaaaaggagccaaatgggggaacagcatggaaacctggaaaagagcagaggaaacagacacatagagactggacaatggtggggaccaggggaagttgtcttagtcctgatgcaactcaccgatgaagatgttgaacaggttaaagccaggcaggaggactgtcagcgaacaacagcaccttag

SEQ ID NO: 114767 - DNA, 777 bp, Homo sapiens
atggctgccgctgggggcgcccggctgctgcgcgccgcttctgctgtcctcggcggcccggccggccggtggctgcaccacgctgggtcccgcgctggatccagcggcctgctgaggaaccgggggccgggcgggagcgcggaggcgagccggtcgctgagcgtgtcggcgcgggcccggagcaggccctttgctagttgctcaagtgttgaaagcccctgcgttgaagtaatctgccgggacttgaaacttggctttggcactgattgtctgacgtgcctaacttgctcagaagataaaataacagtccactttataaaccgtgatggtgaaacattaacaaccaaaggaaaagttggtgattctctgctagatgttgtggttgaaaataatctagatattgatggctttgtgcagaagggaaatgtggggttggagcccccacacagagtccctattggggcaccgcctagtggagctgtgcgaagagggccactgccctccaaacctcagaatggtagatccactgacagcttgcatgatatgcctggaaaagccacagacactcaatgccagcccatgaaagcagccaggagggaggctgtatcctgcaaagccacaggggtggagctgcccaagaccatgggaacccagctcttgcatcagtgtgacctggatgtgagacatgtagtcaaaggagatcattttggagctttaagatttgactgccctgctggattttggacttgcatggggtctgtagcccctttgttttga

SEQ ID NO: 114768 - DNA, 1919 bp, Homo sapiens
acgcggaacctcggcgcggtgcttccagcagggtctctccgccactccagccccgcgcccctcgccgcggccctcgggcgtctgcgccgcagctgccgcccccgcctctttggagtctctcgcggcctcaaagcgcggcctgcgtcgcttccggcagttcccgaccgcgggcgatggctgccgctgggggcgcccggctgctgcgcgccgcttctgctgtcctcggcggcccggccggccggtggctgcaccacgctgggtcccgcgctggatccagcggcctgctgaggaaccgggggccgggcgggagcgcggaggcgagccggtcgctgagcgtgtcggcgcgggcccggagcagctcagaagataaaataacagtccactttataaaccgtgatggtgaaacattaacaaccaaaggaaaagttggtgattctctgctagatgttgtggttgaaaataatctagatattgatggctttggtgcatgtgagggaaccctggcttgttcaacctgtcacctcatctttgaagatcacatatatgagaagttagatgcaatcactgatgaggagaatgacatgctcgatctggcatatggactaacagacagatcacggttgggctgccaaatctgtttgacaaaatctatggacaatatgactgttcgagtgcctgaaacagtggctgatgccagacaatccattgatgtgggcaagacctcctgaactagaacaaatagggaatattttcatggaaaatttacctatttttataattattatttcttaaagtgattaaattgagaacatggatgagtggacttcatattatgactagctttactattttaattcaccttgcataactactgaattttgtcattcttgaaagtatgcaatttttattttggttatattacaaaaatgtcaatcaaatattaaaaaatagttaatgtgatagaaaaaccttacatatttttttcttatgtttgtttagcgactttagcaaaatgttttcatataatctcatctgtttacctagaagataggttaaggaaatatattattattcctgtttgatgtgggtgaaggcagagatctaacctggcttgtttagggccataccactaattagaaaatctgtgctagaacctgtgtcttattcctataagctatgtgttcagactgaaactggagaaattatgactattttatttatagtagtagttaaatctgaatgtgtatggattaaaaatatttaattgctgagtaaactgcttaacttcaaagatagttattgaccttataaataaatatttcaaaattttgattcggaagactaagtctggagctagacattataatgctatcaaagaagtttgatctctgttttgactaaactagaggaaaaatgattggatgtgtttattcttttctaagcagaatggtttaactttgtactctttgaaaaataatgctgatttataaatctctgcctataacagaatggaaaccttatgaattgtttgtgtttctctgtcctgagctcggtacccctggagaagggaatgagcaggctgacacgttgcacagccccaggtggcgccattctctcacgcaaggatggggctgcagggtgagcagcgtgggctgcagtgtgtcagtcccaggagtgagggagtggcaagcaccacagattaccacgtatgtgtggaagacattcgtactcttatctttactataaataaattcataaaagttaacaaaggggtacacagtatggtctttggaaatataataaaacatcaactaacttggactaattgtgaggaagagcagaacaaattagtagaaagaggttataagacaattgagttagcttcatgtgtattattgcagcttgatcatttatataaa

SEQ ID NO: 114769 - DNA, 378 bp, Homo sapiens
  misc_feature (1)...(378): n = a,t,c or g
tggccatggaggcatcatggatcgctttgtttgccagtatctgatggccacctttgtcgagggggacatcgccagttttatcagaggccctagcccaagcaaactgattcagcagatcctgactttacggccagatcagcagatccacatcttcaacacgctgcggtctcatctgatcgacaaagggatgctgacatccaccacagaggacgagtaggggccacccagggccaggagaacaggaacagaactgagcaggggcaggtctccaaggcaagcccagctggtgtgacttacacaatgacgaggcttcaactcactgtcnnnnnnnnnnnnnnnggagggacttttttgtcgggggcaaaaaaaaacagggaa

SEQ ID NO: 114770 - DNA, 3051 bp, Homo sapiens
ggctgactgtgcactttcagggaggcagtgaggctaatttacaaacaaaaacaccacaaaccagcactagaccaaggtgcagaagcaaatcattacaccctcgttggcaatgaaaacatccacggcacggaatagtttgatatatttgggtgccaagttctctctcccgcactccatcacttgttggcctgacaaagaactaatctgtcttcccaaagtcaatctcacccctgaaattagggaggggaaaaaaaatcacagtttaagcaaacaacaacaacaaaaggtcccccagtacaatacaaactacatttaaactggtcacattatataaaaagtgtgcatttaatcttcaaaatagtcaaggctctaatcaggttaggttttccatagttttaagcaggactttgtggttttagtgaagaagtcatggtgcaattgaaatcactgtaagaaataagtgacttttaaaacaaacacagacacacacactcctcttaagagtaatatatacacaacacagcagctacatgggtgttcaggcaaagggtgcatgaacgagaagccctctgctccctgcccgatgagaaaagtccctaaaaaggattcagcagcagctagtctacagcacaaacatggatgggcattgtccctgaaaacacacagttaggtggacctacaggagacattggagcctagacatgtgggaaagggctcagttacagtacattctactggcatacacttgaaatattacagtgtgtttttttctccagactattataaataatttttccgtgctttctgaaaaaaaataaaaactgaaactttcaagtctgcgatgaaggtgaaccccatcttataaagcagagcttacttacattctgcaggattttggtgtggatgcatagaaggcttacctggttagtaagcctccattcctccgacctacagaaggcaacccttctgcagctccaagcagggatttctagaaaagaccaggtgtacaaaacatctaagctgtgccctcccaccacaggtggggaagtcccctgatttggtcagacacagatgaatgtctgtgtctgactgagcccagaaacagttcaattgatgggggctggaaccaccaagaaaacactcctgacctgggcaacactgtcttccagattattaatacttttgttttaaaaaaatccaaatggttttacaacccgtgacttctttccaactcaaagctgtagtttacttacaacacaaattctaaacacatagactgtatatacagattttttgaacccacaaataaaaaataccctccaaaaaaaaaaaaaaaaagacagtgagttgaagcctcgtcattgtctaagtcacaccagctgggcttgccttggagacctgcccctgctcagttctgttcctgttctcctggccctgggtggcccctactcgtcctttgggggggaaggtcaccatccttttgtcgatcagatgaaaccgcagcgtgttgaaaatgtggagctgctgatctggccgtaaagtcaggaactgctgaatcagtttgcttgggttagggcctttgataaaactggcgatgtatacattgacaaaggtgggccatcagatactgggcagtcaaagcgatccatgatgcctccatggccaggaatgggtattggcaaagtctttgattttaaaggctcgtttgaatccacttgcgaagaatccttccaaagggcccaatgagcgacgcaaaggtggagaggagcgatgctgtgaatctggaagggggtacatccggaccgttttcccagccaatgactgactggatcaccccagggatttttgtactcctgcaggcgcaaacaggtccgagggctcacagtccacagtgaagctgttggtgtcattgttgtactccacagggcagacaaagcatctgtacccggacatcacataggacagcagaaggccaaacaccacagtagcaaagaagcccccaatgaagccttcccaggtcttcttcggggacagcttgatgagtggggtccgaccaaagaaaaagccaaacatataggccatgatgtcattacagatcacacaagatatggggacaatgaaccagatcattccttcaaataggttgtggataacaagatgtgactgtgttacaacaatcagcaatgtcacatgggtccagccaaacatgtagaactgcagtcgataatgcttcttgaccagactcagtacaaacatgcagaatcctattagatagagagtaaaggaaatgaaccggtggtatttactgagaatccgcaaaggctcttctctctggaccagggtgaagaagtaatccgtcactgtctcaccatagaagaaatagtttacacacaggagaaagtaccagctgagcgtcctgaaccagggcagatcatatgagtggtagacgttgtagccaatagtgattatctcatggaaacacttaatctgaacgcacatcacgattatcatcaaaaccattggtcccaggtaaatgatgatgaagaaaaatgcaatcatggccaaagtcaggatgcctctcacccaccagttcttccatcttgaagacaagttggaaagggccctattgaggacctccggggtatcatctgcagagactggcaggggtgcggattctgcgcggctctcactgtccgatgcagtctctccatctacctttgcttctgactctgactccttgtcctcgggtggcgcaaccggctcatgggccaccctctgcctcagctctgtcatcctgggaaaatcggcccgacgtcgccgcgagctagcagcgaagccgccggagcaggcagctcggcgcgggcacgcgcggactcccacggccggccccgccccgcccgggaggcgcgcggctctgagcggctcacagttcccttagcagcccagcagccagccctggagctcggccccacccagtgccgtcaccgccctttcacccgggccgagcggggttcagccttccctagccccgacccgagagctccctctccc

SEQ ID NO: 114771 - DNA, 546 bp, Homo sapiens
gaaggaccctgcggtgatcagaagcctgactctggagcctgaccccatcgtcgttcctggaaatgtgaccctcagtgtcgtgggcagcaccagtgtccccctgagttctcctctgaaggtggatttagttttggagaaggaggtggctggcctctggatcaagatcccatgcacagactacattggcagctgtacctttgaacacttctgtgatgtgcttgacatgttaattcctactggggagccctgcccagagcccctgcgtacctatgggcttccttgccactgtcccttcaaagaagtaagtacttagggaggagagagcgttacccctgtggctaaagagatggggtttggagagaagggtctttgcattctccttctgcagatctgcatgtctctggatttgtaagccagtgtgacctatcaggaatcacttatcttccgggagcctcagttatccatctacgaaatgggagacttgaacttagatgtgatcttcagggccctttatccataataatccatgctctacagtgctaaaaa

SEQ ID NO: 114772 - DNA, 825 bp, Homo sapiens
atgctggttatcattgcggtggtggcggcatcgggaccttgcaagcttcgggcggtcttgatgtcatgctgcaaattgccgagagctgctgcgccgcaacccgaaatatgtctcaattgtcgcgccgtttgtacctgtacactgaccattctttgcggtacgggtcatgtggtttacaccatctgccgatcatctacgacgtcgccattaagaacaacatccgtccggaagtccgatggcggcaagttctatcggtgcacagatggggattatcgccagccggtgtcggttgcggtcgtgtctctggttgcgatgctgggtaatgtcactttgatggtcgccatcttgagttcctcgatctgctggcaatcaccattcatcgacgttaatcggtatcctggcgatcggtatcttcagctggttccgggtaaagatctggataaagacgaagagttccagaaattcatctccgtacggaaaaccgttgtaccagtcagtcaagctgatgtacctatcggcatcttcttcacctatgccctccagttccacgtcccagctgaatcatcatcccgtttgccatctcccaagtgtcagagagctgggcactgttgtagacctgtctgtccgctcagccttgttaatgatggcaggttagtgttggttaatactgagtgtcaacttgatcggatcaaagtattgatcctgggtgtgtctgtgaggatgttggcaaaggagattcctttgagtcaggggctgcgcaacggcaccccttataacccgattgtaacacagaatcggacaaacgcacaaagcaggaaagattga

SEQ ID NO: 114773 - DNA, 468 bp, Homo sapiens
atgagggacaaagggtctcaggaaaggttgcaacttgacccaggtcaaaagctagttgttagcatggacaaggctggtggatttagtttggagaaggaggtggctggcctctggatcaagatcccatgcacagacacattggcagctgtacctttgaacacttctgtgatgtgcttgacatgttattcctactggggagccctgcccagagcccctgcgtacctatgggcttcttgccactgtcccttcaaagaaatttgcccaattaatactagggttagacagaccaaggctgagcggacagacaggtctacaaacagtgcccagctctctgacacttgggagatggcaaacgggatgatgatctcagctgggacgtggaactggagggcataggtgaagaagatgccgatagagtacatcagcttgactgactggtacaacctgcagcacatgaattggatgtga

SEQ ID NO: 114774 - DNA, 2471 bp, Homo sapiens
tttctttgcgtaaccaatactggaaggcatttaaaggcacctctgccgccacagaccttgcagttaactccgccctgacccacccttccgccatgcagtccctgatgcaggctcccctcctgatcgccctgggcttgcttctcgcggcccctgcgcaagcccacctgaaaaagccatcccagctcagtagcttttcctgggataactgtgatgaagggaaggaccctgcggtgatcagaagcctgactctggagcctgaccccatcgtcgttcctggaaatgtgaccctcagtgtcgtgggcagcaccagtgtccccctgagttctcctctgaaggtggatttagttttggagaaggaggtggctggcctctggatcaagatcccatgcacagactacattggcagctgtacctttgaacacttctgtgatgtgcttgacatgttaattcctactggggagccctgcccagagcccctgcgtacctatgggcttccttgccactgtcccttcaaagaaggaacctactcactgcccaagagcgaattcgttgtgcctgacctggagctgcccagttggctcaccaccgggaactaccgcatagagagcgtcctgagcagcagtgggaagcgtctgggctgcatcaagatcgctgcctctctaaagggcatataacatggcatctgccacagcagaatggagcggtgtgaggaaggtcccttttcctctgttttgtgtttgccaaggccaaactcccactctctgcccccctttaatcccctttctacagtgagtccactaccctcactgaaaatcattttgtaccacttacattttaggctggggcaagcagccctgacctaagggagaatgagttggacagttcttgatagcccagggcatctgctgggctgaccacgttactcatccccgttaacattctctctaaagagcctcgttcatttccaaagcagttaaggaatgggaaccagagtgttttaggacctgaagaatctttatgactctctctctttcactctttttttttttttgtcactaagttaaaagcgaagtgagagtattaacgtttttgttctcctccggccccctgttacaatgaaggggcaaaagtatttgctcttagtctattcctcccttaacttctgtgactaatttttatttcctttctagatttgcccaattaatactagggtgcagtgtatcctggagaggtagggtgtgtgggggaggaatcccttgggggagatattaggagtgctctgttgtttacaaactcacggtacccgcagggcctagcaagagacttaaatgactgataagaaccgtgagaaacatgttgcttccaggcttgatttcgatttttcgctttttttttttttgagacagaatctcactttgtcaccaggctggagtgcagtggtgcaatctcacctcactgcaacctccgcctcctgggttcaagcaattctcctgcctcagcctcccaagtagcttggactacaggccctgccaccacgcccggctaatttgtgtatttttagtagagatggggtttcaccatgttggccaggatggtctcgatctcttgacctcgtgatctgtccaccttggccttgcaaagcgctggattacaggcatgagccactacacccagccgatttttcctttttgattaaagatgctattacaatgtaaatatttcttacacagaaagtcacagcacatgtgcccattgatacaaggctgctgaggcctggtctccagttggaaatataattaagggtggcaaggactggagtcagttggagagtgcatagccagtctgtgaagacaactgccagatactggcaatactccagcctggtgacagagtgagactctgtctcaaaaaaaaagtttcaatgtttactcctagagaagccaaaaatccagatttgtatatgaaatcttaccattttaaaagattggcagctaattatttttttaaaaagctgtgcagtgtgatgtgtcccaaacggactggctcatgggtggccacgtcacaacctctgatctcagaccgtgcatgccttgtcctcttaagacaactcctgtggcaccgtttctccctccacagggccaaagccatagtgtccggtcccaaggacaaggctcttccagtgctaggagaggtatgagcagcctctcacctgtgagctgtggggatcacaaggctgcctgcctcagtcttggagtcctgttgggtgaatgaggcagatgggaaagagcctcaccagcagctgcttttggagcaggggtccaaggaagagagggtggcctcgacatcaaactgcctggatttttctaccaccctgttacatcataacaacttctgaaacacacaccagccctgagttctgggctcatttgaagcctggaatagcaataaatctttttaacttgcggacagtt

SEQ ID NO: 114775 - DNA, 687 bp, Homo sapiens
atggtgctggcatctgctcagcttctggggaggcctcaggaaacttacaatcatggtggaaggcaaagggagagctggcacttcacatggccagagcaggaggaagagagtggtgagaaggtgctacacacttttaaacaaccacatctcatgagaacgaactcacgtcatgagaacagcactgagtggaatggtgttaaaccattcacgagaaaccacctccatgatccaatcaccacccaccaggctccacctccaacactggggtttacaattcaacatgagatttggatagggacacagatccaaacaatatcaggctcacctgcccacccagtaaggttgtcgaggcgggaggctgccttccggagcccctactcctcaacagagcccctctgctctcccagtgagtctgacagtgaccgagggacgtcgggggcgggaactcagcatctccagaagctctcccaagagctggacgaagctattatggcggaagagagtgatgacatgaccgtctctctcattcaccacggaggaagtgccctgcagttctgttctgcaggaaacaagacctgtctgaccaccgaggcttcatacccaaggatgtctgtgcttccaatgagcttcctggaggaaccccccaggagtcatcagtacccctgggccatgctaacaaggacctga

SEQ ID NO: 114776 - DNA, 687 bp, Homo sapiens
acgcgtccgctcaccggctgctgcagcattatcagttgcacagtgcagcagtgaacgggctctctttccacccgtcgggaaactacctgatcacagcctccagtgactcaaccctgaagatcctggacctgatggagggccggctgctctacacactccacgggcatcagggaccagccaccactgttgccttttcaagaacgggggagtattttgcttctggaggctctgatgaacaagtgatggtttggaagagtaactttgatattgttgatcatggagaagtcacgaaagtgccgaggcccccagccacactggccagctccatggggaatctgccagaagtggacttccctgtccccccaggcagaggcaggagtgtggagtctgtgcagagccagccccaggagcccgtgagtgtgccccagacactgactagcacgctggagcacattgtgggccagctggatgtcctcactcagacagtctccattctggagcagcggttgacactgacagaagacaagctgaagcagtgtctggagaaccagcagctaatcatgcagagagcaacaccatgatcaggggagcaggaatcaggagctcggtggatttgcaggtggcaggccagggatttgtaccatgggacttgggtaaataaaggggactgaactctgtgggactccc

SEQ ID NO: 114777 - DNA, 868 bp, Homo sapiens
  misc_feature (1)...(868): n = a,t,c or g
cctctcattcgggtctgaagcatcatttgtgtgtgagcccggcccactggggacctctggctgccaggtggagagcctcctggtgcagatagcaaggtggagggcagaactgcaaaaatccagggctccagtatggatgtgattcccacagagttcagtcccctttatttacccaagtcccatggtacaaatccctggcctgccacctgcaaatccaccgagctcctgattcctgctcccctgatcatggtgttgctctctgcatgattagctgctggttctccagacactgcttcagcttgtcttctgtcagtgtcaaccgctgctccagaatggagactgtcagattccccatggagctggccagtgtggctgggggcctcggcactttcgtgacttctccatgatcaacaatatcaaagttactcttccaaaccatcacttgttcatcagagcctccagaagcaaaatactcccccgttcttgaaaaggcaacagtggtggctggtccactgatgcccgtggagtgtgtagagcagccggccctccatcaggtccaggatcttcanggttgagtcactggaggctgtgatcangtagtttcccgacgggtggaaagagagcccgttcactgctgcactgtgcaactgataatgctgcagcagccggtgagtccgcacgtcccacaccttcactgtgttgtccatgccggcagcggcaatgcacgtcccactgggggtgaagtccacataagtgacaaagccgccatgctcacaatacgagtggacacattcccggctgcttttgtccacagcttaacagttcttgtcatacttggcgaacacatgagcccgcccgcgggggaaaa

SEQ ID NO: 114778 - DNA, 3019 bp, Homo sapiens
atggcaaagcatgaggagaagagacgccaaataccatacgagtgggacacagttgacaccgtccatcactgccactctgccctcaaggtgaaaatcaccagctctccactgggcattaccaatgggccaaacccaaggctgaagaccccagcaaacaattgttacaagacgattcttgtggcctctgtgggctctcctgtggagaggaaggtgcctagccagatccctggcatcccccatgctgtgcccagccccagtacatcccatgtaaaccggagacgccccacagaactggaacaacagggtctgcagggggattacatgaatgagtacaagggagtcaggggtctcttattagcgttcctgcacttcaatcccagagacaaggacttggctggggcccaggctattcaccagcaggtcacctctgggctcaaagttcctcctctgtgtggcatagggggcaggaatgaatttcccccaggagccagagatgggccacctgacagtctccattctggagcagcggttgacactgacagaagacaagctgaagcagtgtctggagaaccagcagctaatcatgcagagagcaacaccatgatcaggggagcaggaatcaggagctcggtggatttgcagggtctgctctcaacaccatcctccccctgcactgtcgatgggaagaagctgcgggctcagggtgctctggcagctgctgggacctgccgcacttttcccacgtggccctgccggtgtgtggacgagcctggcaggcctgctggtccatgctggcaggctgctgaggaaaccacacgtgctaaggcagcggtggcaggccaggaggtcctggtgccctggggcatggctccacttcctgtgagcattgccgtcctggaacagggcctcttcccattgcctgccacgtcccggcgcctggtgagacatcttagccccagcagctgggccagggtggtttctgatcccaccggggcagctggacctgtgtgtgaaaagcagatcccagggccacttgagcaggcccaaggctttccatctgaaaaatgggaagggaagtccagggaagagaatatggtacgtagaacagccaccaggcaacagagttccacatcctccctggaggacacagtgaaggcccggttccatgggctgttagcggaggttatgcaaaacaaactggtgctattgtcaccaggatttgggaaatgccaggatgaacaaaggatgacctccgtgtcagcagatggggtgcccagcgcgggcgcacatgtcgacttcgggggcggcggcggctgggggcacccgggcggggtccgagcccggtgcggggtcggggtccggcgcaggcaccggggcgggcgcggcgacgggggcaggggccatgccctgcaagagcgccgagtggctgcaggaggagctggaggcgcgcggcggcgcgtccttgctgctgctcgactgccgggccggcacgagctcttcgagtcgtcgcacatcgagacggccatcaacctggccatcccgggcctcatgttgcgccgcctgcgcaagggcaacctgcccatccgctccatcatccccaaccacgccgacaaggagcgcttcgccacgcgctgcaaggcggccaccgtgctgctctacgacgaggccacggccgagtggcagcccgagcccggcgctcccgcctccgtgctcggcctgctcctacagaagctgcgcgacgacggctgccaggcctactacctccaaggtggtttcaacaagtttcaaacagagtactctgagcactgcgagaccaacgtggacagctcttcctcgccgagcagctcgccacccacctcagtgctgggcctggggggcctgcgcatcagctctgactgctccgacggcgagtcggaccgagagctgcccagcagtgccaccgagtcagacggcagccctgtgccatccagccaaccagccttccctgtccagatcctgccctacctctacctcggctgcgccaaggactccaccaacctggacgtgctcggcaagtatggcatcaagtatatcctcaatgtcacacccaacctacccaacgccttcgagcacggcggcgagttcacctacaagcagatccccatctctgaccactggagccagaacctctcccagttcttccctgaggccatcagcttcattgacgaagcccgctccaagaagtgtggtgtcctggtgcactgcctggcaggcatcagccgctcagtgacggtcactgtggcctatctgatgcagaagatgaacctgtcactcaacgacgcctacgactttgtcaagaggaaaaagtccaacatctcgcccaacttcaacttcatggggcagctgctggactttgagcggacgctggggctaagcagcccgtgcgacaaccacgcgtcgagtgagcagctctacttttccacgcccaccaaccacaacctgttcccactcaatacgctggagtccacgtgaggcctgggtgcacggggggcatggcaccagggccctgctcggctctccacagggctaggtgggagagcccaagcccgccacctctggcctgaggaacccccagatgttcacctgttgcccagaggcccagggttgatcggtgtcggagacgcccctcaccatccttgggggcagggcccagcaggcaaggtctcccactgcagggcttgctggagaggcctcggctcttggacacgtggctttgggcgtccaccagggcctcatcctgtccaggacgctcctttctgctgacagcccagccagtttggctgttttttaaagacacatccacggacctgagtttactttttacttttggcaggtaaatccaagctccctggagcacaaagagtgtttgagctcttcttgatttttctttttttttttttttttttaacaaaaagtgttattttcaggctacatgcaacagtggattgtataacccagtatttcatccctttcctgatcc

SEQ ID NO: 114779 - DNA, 410 bp, Homo sapiens
  misc_feature (1)...(410): n = a,t,c or g
gataattaattacacaaacccttcacagactgctctggtgcctggtggtgctagctcctcccacctcagcacctgctgcatctggagcagcccaagcctcaggatggacaagaggaaacccacagctcagcttcaggcttcttatgtttctgaaaacagcttggatattttaatgcacgttgcattaaacctcactgaaacctgnnnnnnnnnnnnnnnnnnnnnnnnnnnnnnnnnnnnnnnnnnnnnnnnnnnnnnnnnnnnnnnnnnnnnnnnnnnnnnnnnnnnnnnnnnnnnnnnnnnnnnnnnnnnnnnnnnnnnnccttnnnnnnnnnnnnntttcccccnnnnnnnnnnnnnaaggannnnnnnnnnnngagggggaaaaaaaaatgcgcccgggggcggcg

SEQ ID NO: 114780 - DNA, 935 bp, Homo sapiens
  misc_feature (1)...(935): n = a,t,c or g
gctgcaggcgcctgcgcagtgtagccggcgtcagctggaccagggtcatcctgaagggttggactccgcccgcgatggtgacccggttccctgggccccacgccttnccgggagcttggtcaaagaactggggtcccgacggccctacacaatggggcgctgtgggcggctcgcggggcctnggtgtgggcccacccgattggccggctgatccctggactgggtacccttacatcaatggcaaagttttaagaaggataattaaattacacaaaccctttcacagactgctctggtgcctgggtggtgctagctcctcccaacctcagcaccctgctgcatcttggagcaacccaaagcctcaaggaatggacaagaaggaaacccacaagctcagcttcaaggcttcttatgttttctggaaaacagcttgggatatttttaattgcacgtttgcatttaaaccctcactggaaacctgctccgtgccccggatgttgatcatgctggtggcttggttactgtgactgtagctggagtggcacaggtgacccaggcgtcctttcagcttccagaatgttgcaaagtttaggagagtgttccaatggcttgacaagaaactgcctatttgaaatggctcataagtagtatctgcagtgtgttcatccgttgctgccttaacaagtcacccacacgtagtggctttaaagcaacgaacattcactctcttcacagtctgtgttcagtcggggatttggggagtgatgtatctggggtggttgtgggcccagagtctctcattgaggtttgcagtttaaggacattcagccaagggccatttcgtnttgagggaaggttcaactggggggtgggagccactttccaagccagttgccttcaagttggcngttcggtgacaccncaagttttccctt

SEQ ID NO: 114781 - DNA, 263 bp, Homo sapiens
gtgccaatgctggcccagctctccgtgttccggtgtgggtcgacaagtgcccccaatgatttatggtacaacttcattgaactgccctacctcggttggcctcggatagccggtcccccgcctgtccccgccggcgggccgcccccccctccacgcgccccgcgcgcgcgggagggcgcgtgccccgccgcgcgccgggaccggggtccggtgcggagtgcccttcgtcctgggaaacggggcgcggccggaaaggcggccgc

SEQ ID NO: 114782 - DNA, 1725 bp, Homo sapiens
atggcctcgcaggccaggtcgtccttggtggaaggaaccatgaactggcatctccccctcttcctcttggcctctgtgacgctgccttccatctgctcccacttcaatcctctgtctctcgaggaactaggctccaacacggggatccaggttttcaatcagattgtgaagtcgaggcctcatgacaacatcgtgatctctccccatgggattgcgtcggtcctggggatgcttcagctggggggcggacggcaggaccaagaagcagctcgccatggtgatgagatacggcgtaaatggagttggtaaaatattaaagaagatcaacaaggccatcgtctccaagaaggataaagacattgtgacagtggctaacgccgtgtttgttaagaatgcctcctgaattcgaagtgccttttggtacaaggaaccaagatgtgttccagtgtgaggtccggaatgtgaactttgaggattccagcctctgcctgtgattccatcattgcatgggttaaaaatgaaaccagggatatgattgacaatctgctgtccccagatcttattgatggtgtgctcaccagactggtcctcgtcaacgcagtgtatttcaagggtctgtggaaatcacggttccaacccgagaacacaaagaaacgcactttcgtggcagccgacgggaaatcctatcaagtgccaatgctggcccagctctccgtgttccggtgtgactgtccgtcattttctgcctgtttcctcactctgacctgcaggagtggcccagctcgagctgctgtgtccaaactcacagggcccagggcttttacagataaagaaactaagacttggagtcaaggaacttgccaaagtctcagagctagtgtgctacaagtgcaggatttgaatacaggtcttataaccccagatctcgtggctttggcacgtgtcctctataaaaggatgcagtacttgagtgaccaggtagaaagacagaaaaggtgttattttatctcccagctcctcaaggcaccaaataaagggtcgacaagtgcccccaatgatttatggtacaacttcattgaactgccctaccacggggaaagcatcagcatgctgattgcactgccgactgagagctccactccgctgtctgccatcatcccacacatcagcaccaagaccatagacagctggatgagcatcatggtgcccaagagggtgcaggtgatcctgcccaagttcacagctgtagcacaaacagatttgaaggagccgctgaaagttcttggcattactgacatgtttgattcatcaaaggcaaattttgcaaaaataacaaggtcagaaaacctccatgtttctcatatcttgcaaaaagcaaaaattgaagtcagtgaagatggaaccaaagcttcagcagcaacaagcttattaaatggaaacaagcctggcagacgaggaatggccaagacccatgaggctaaagaagtttgctttccaagtcagatgcctacacctgctgcaattctcattgcaagatcatcgcctccctggtttatagtagacagaccttttctgtttttcatccgacataatcctacaggtcatgagatgggtacttccgattctgccttggtcactgtggaggaagagcgtaggtaccgacccaaatactctgaaagctctgacttagctggcctttcactctgtcctaaaaaggagaggtga

SEQ ID NO: 114783 - DNA, 1825 bp, Homo sapiens
  misc_feature (1)...(1825): n = a,t,c or g
ctgcccgggctgcgcggcgtctgcaggcgccaccgctgcctctttccggctgtgaccctcctcgccgccgccgcttggctgcgtcctccgactccccgcgccgccgagaccaggctcccgctccggttgcggccgcaccgccctccgcggccgccccctggggatccagcgagcgcggatcgtccttggtggcaaggaaccatgaactggacatctccccctcttcctcttggcctctgtgaacgctgccttccatctgctcccacttcaatccttctgtctctccgaggaactaggctccaacacggggatccaggttttcaatccagattgtgaagtccgaggcctcatgaccaacatcgtgatctctccccatgggatttgcgtcgggtcctgggggatgcttcagcttgggggccggacggcaggaccaagaaggcagctcgccaatggtgatgaagatacgggcgtaaatgggagttgggtaaaatatttaaagaaggatcaacaagggccattcgtcttccaagaaggaattaaaggacattgtgacagtgggctaacggccgtgttttgttaaagaatgcctctggaaatttgaagttgccttttggtaaccagggaccaaagatgtgttccaagtgtgaggtccgggaatgtgaactttgaggatcccagcctcttgccttgtgattcccatcaatgcatgggttcaaaaatgaaaacccagggatatgattgaacaaatctgctgtccccagatcttattgatgggtgttgctcaccagactggtcctcgtcaacgcagtgtactttcaagggtcctgttggaaatccacggtcccaccccaagaacacaaagaaacgcacctctcgtggcagcccgacgggaaaatcctatcaaggtgccaatgctggccccagctctccgtggtttcggtgtgggtcgacaagtgcccccaatgatttatggtacaacttcattgaactgcccttaccacggggaaagcatcagcatgctgattgcactgccgactgagagcttcgactccgctggtctgccatcatcccacacatcagcaccaagaccatagacagctggatgagcatcatggtgcccaagagggtgcaggtgatcctgcccaagttcacagctgtagcacaaacagatttgaaggagccgcttgaaagttcttggcattactgacatgtttgattcatcaaaggcaaatttttgcaaaaataacaacagggtcagaaaacctccatgtttctcatatcttggcaaaaagcaaaaattgaagtcagtgaagaatgaacccaaagcttcagcaggcaacaactggcaattctcattggcaagatcatcgccttccctgggtttatagtagacagaacctttttctggttttccatccgacattaatccctacagggtggctgtgttatttcatggggggcaggttaaacaaaccctggaagagtataccaaaagaaaccattgcaaagcaacgacttacttttgctacgaagaaagactcctttcctggcatctttcatagttctgttaaatattttttgtacatcgcttctttttccaaaactaagttcttagggaacagactcgatgcaagtgtttccggttctgggagggtattggaggggaaaaaacaagcaggatggctggaacactgtactgaggaatgaataggaaaggcttccagatgtcttaaaaggattctttaaaacttactggaactgtttacctagggtttaacaaccctgtttgagtatttgctgtttgttccngtttcagggatttttg

SEQ ID NO: 114784 - DNA, 510 bp, Homo sapiens
tcggacggagagcgcgaggactcggcggctgagcgcgcccgacagcagctagaggcgctgctcaacaagactatgcgcattcgcatgacagatggacggacactggtcggctgcttcctctgcactgaccgtgactgcaatgtcatcctgggctcggcgcaggagttcctcaagccgtcgggtcagtgcccggggaatgcacacccgcctggtaatgtggcggaaccttacgcaaggcatttccccttaagggcctggctgcaacccttgttttctggggctcgttttcgtggctcagaggggcgggactgattctggcctactttcctgatgctctgatccttctttccagattccttctctgccggggagccccgtgtgctgggcctggccatggtacccggacaccacatcgtttccattgaggtgcagagggagagtctgaccgggcctccgtatctctgaccacgatggcgcttacctttcagacttcattaaacttatgaccga

SEQ ID NO: 114785 - DNA, 644 bp, Homo sapiens
  misc_feature (1)...(644): n = a,t,c or g
cagtactttcacccactcatgttttgcaaggaagacttttctgaagctcccggaccgccgcggggccacgggccggagccccggattcgcactccgtattagccacggctgggccgcgcgtatatttgccttccctccatgatctccaacactatccgataaagtagaagcaactggaggtacccgtgaaaagagaaaggaactggaacttgagaaaaaagccagaggattcggacggaagagcgcgaggaacttcggcggctgagcgcgcccgacagcaagctagaggcgctgctcaacaagactaatgcgcattcgcattgacagatggacggacactggtcggctgcttcctctgcacttgacccgtgactgcaatgtcatcctggggctcggcnccaggagttcctcaaagccgtcgggtcagtgcccggggaatgcacacccgcctgattccttctctgccggggacgccccgtgtgcttgggcctggccatggtgaccccgcacaccaccattgttctccattgaaggtgcagaggaagaagtttgacccgggcctccggtatttcttgaccacgatggcggcttacctttatagactctcattaaaacttatgaccgaaaacaaaaaaaaaaaaaaa

SEQ ID NO: 114786 - DNA, 2533 bp, Homo sapiens
gggagccggaggaggagcggccgccgccgccaccgccgccgccatagagactgtagccgtggagactgttacttaccaacggggaccaacacgcagcagccgctgccgccgccgcgggagccgctgcccgaactcccggcccgaactccagacctgagcatgcagaattccgagggtggagcggattcgccagcgtccgtggctctgcgtccctcggcggcagccccgcctgtgccagcctccccgcagagggtgttggtccaggcagccagctccaatcccaaagggtcccagatgcagccgatctccctccccagagttcagcaggtaccccagcaggtgcagccggtgcagcacgtgtatcctgcccaggtgcagtacgtggaagggggagacgccgtctacaccaatggagccatacgaacagcctacacctacaaccccgagcctcagatgtacgcccccagcagcacggcttcttacttcgaggccccaggcggtgcccaggtgaccgtggcagcctcgtccccgccagcggtcccctcccacagcatggtgggcatcaccatggatgtcggggggagccccatcgtctccagcgcgggagcctatctcatccacggggggatggacagcaccagacactccctggcccacacctcccgctcatcgcccgccacgcttgaaatggcgattgaaaacctccaaaaaagcgaaggaatcacatcacacaaaagcggtttactcaacagccatctccagtggctgttggataattatgaaacagcggaaggtgtgagtctccccagaagttctctttacaaccactaccttcggcactgccaggagcacaagctagacccagtgaacgccgcctccttcgggaaactgatccgttctgtgtttatggggctgagaacgcggcggctgggcaccaggggcaactcgaagtaccattactatgggattcgtctgaagccggactcaccactgaaccggctgcaggaggacacgcagtacatggccatgcggcagcagcccatgcaccagaagcccaggtaccggccagcccagaagacggacagcctcggggacagcggctcccacagcggcctgcacagcactccggaacagaccatggccgtgcagagccagcaccaccagcagtacatagatgtctcccacgtcttccccgagttcccagcgcccgacctgggcagcttcctgctgcaggacggcgtcacactgcacgacgtcaaggccctgcagctggtgtacagacggcactgcgaggcaactgtagatgtggtgatgaacctccagttccactacatcgagaagctgtggctctccttctggaactctaaggcctcctccagcgacggccccacctctcttcctgccagtgacgaagaccccgagggcgccgtcctgcccaaggacaagcttatctccctgtgtcagtgcgaccccatcctcaggtggatgaggagctgcgaccacatcctctaccaggcgctggtggagattctcatccccgacgtgctgaggccggtccccagtaccttgacacaggccatccgtaactttgccaagagcttggaaggctggttgacaaatgccatgagtgacttcccacaacaggtcatccagaccaaggtgggcgtcgtcagtgccttcgcccagacgctgcggcgctacacgtccctcaaccacctggcgcaggcggcccgggcggtgctgcagaacacgtcccagatcaaccagatgctcagcgacctcaaccgcgtggactttgccaacgtgcaggagcaggcctcgtgggtgtgccagtgcgaggagagtgtggtgcagcggctggagcaggatttcaagctgaccctgcagcagcagagctccctggaccagtgggccagctggctggacagtgtggtcacccaggtcctgaagcagcatgccggcagccccagcttccccaaggccgcccggcagttcttgctgaaatggtccttttacagctccatggtgatccgggacctgaccctgcgcagcgctgccagcttcggctccttccacctcatccgcctgctctacgacgagtacatgttctacctggtggagcaccgcgtcgcggaggccaccggagagacgccgatcgctgtgatgggagagttcaacgatctcgcctctctgtcgctgacgctgctcgacaaagatgacatgggcgatgagcagcgtggcagcgaggcgggcccagacgcccgcagcctgggtgagcccctggtaaagcgggagcgcagtgaccccaaccactccctgcagggcatctagcagccccggccggcgcctcctcgaggttccaaaagatgccgcctggtcactctgggaacctggatttcaccggctccaccaaattagtgcctcttagatgatgtgatgtttactttgactcaagcgggggctcccggggtcagtgttcaagaaggaaagcagttgttgaagctacagaagcccaggccagggctcccactgg

SEQ ID NO: 114787 - DNA, 939 bp, Homo sapiens
atgaagtctggcctggggcccgggttccatgctcccctgagggtccccagcctctgtccgcttgtccccagctccatggtgatccgggacctgaccctgcgcagcgctgccagcttcggctccttccacctcatccgcctgctctacgacgagtacatgttctacctggtggagcaccgcgtcgcggaggccaccggagagacgccgatcgctgtgatgggagagttcaacgatctcgcctctctgtcgctgacgctgctcgacaaagatgacatgggcgatgagcagcgtggcagcgaggcgggcccagacgcccgcagcctggctcgaaaaagaacaagccacagaaacgggctcgctcgtgccaggacacagcagtgtctttcaaaaaatcaaaaccagaagttttatcagcagcaggaaggatgtgggactctgtccaagttcaccgtcaccatcaagccactggctgtggaaggagtttgtccaacagggtcagtgtcacagccacaacttcagaaagcagccatcccgcgtgtcgtccaaacagcagtgcctgcgtcccgctccacggagtcttccagaacacctccctctgaactaatcccggagcaccccacccccagcgagtcccacctggacctcttcaaagtcaaaactcttctctcgggacaaacaaatattcgggactttcgaagccctgaacttgagacaccaagtttgtctccatggaaacacgtagccgctgcagttggacagctgcgtgctggagttctgtccccaaaccaactgcagagaagaaagacgagcctcggccccaggacgcgatttctaacgaaatgcaatagttttctctttttggaaaaatgtttataccaatagttttgtgcgctaattgttattagaacgtttcttatgaatgtgtacattgcagtaaaa

SEQ ID NO: 114788 - DNA, 1179 bp, Homo sapiens
atggccctggactcctgcagcctgttagggtaccttgacacaggcatccgtaactttgccaagagcttggaaggctggttgacaaatgccatgatgacttcccacaacaggtcatccagaccaaggtgggcgtcgtcagtgccttcgcccagacgctgcggcgtacacgtccctcaaccacctggcgcaggcggcccgggcggtgctgcagacacgtcccagatcaaccagatgctcagcgacctcaaccgcgtggactttccaacgtgcaggagcaggcctcgtgggtgtgccagtgcgaggagagtgtggtcagcggctggagcaggatttcaagctgaccctgcagcagcagagctcccggaccagtgggccagctggctggacagtgtggtcacccaggtggtctctgaactgagcgcgcaggccggccccacctgtccgtcacgtgggcccagggttcggcagcccgtcagcccccgcctccatggtgatccgggacctgaccctgcgcgcgctgccagcttcggctccttccacctcatccgcctgctctacgacgatacatgttctacctggtggagcaccgcgtcgcggaggccaccggagagagccgatcgctgtgatgggagagttcaacgatctgcctctctgtcgctgacgctgctcgacaaagatgacatgggcgatgagcgcgtggcagcgaggcgggcccagacgcccgcagcctggctcgaaaaagaacaagccacagaaacgggctcgctcgtgccaggcacagcagtgtctttcaaaaaatcaaaaccagaagttttatcagcagcagaaggatgtgggactctgtccaagttcaccgtcaccatcaagccactggtgtggaaggagtttgtccaacaggactctgaaccctgcgttgaaggaactgctttcggggggttgcaatcagtctccaaacaggtaaccctcagcacccaggaattttctagccagtctcagaaggggattctcaacctcgtgaagccctcccgaggtgacagccccagttttcaaggtggggctccatacggcttggcaacagcagcagcaggctgggagcgaggtgcaactagactccctacctccacttccacgacctggctcatggaagacaccagaacccagcagatgcggagcttaccg

SEQ ID NO: 114789 - DNA, 840 bp, Homo sapiens
atggctgtgacacgacgctctggtctggaaaagagcttcctttcctgcaaaagtttgtttttgagcacctatgacgtgtcacccctgtctaggctcaagaaccgagaaggtgcaggcaatgggccagatattgaagaatgtcgcaatataatcgtgcagtttggtgttcgggaggtcacagctgcccaggttgcaagggttttgggaatgatggctcgaactcattcaggattaacagatggcattccattacagagtatttctgctccgggcagtgggatctggagtgatgggaaagataaaagtgatggagcacaggcacacacatggaatgtagaagtcttgattgacgttcttaaagaactgaatccaagtttgaatttcaaggaagtaacttatgaactggaccatcctggatttcaaattcgtgacagtaaaggacttcataatgtggtttatggcattcagaggggtttgggtatggaagtgttcccagtagacctcatatatagaccttggaaacatgctgaaggccagggacagtctccctcaattcgccaacttatcatgcatgcaatggcagaatggtacatgagaggggagcagtatgatcaggccaaattgtctcgaatacttgatgtggcccaggacttgaagattgtaatcttagaaattttaaggagtgtttctcaggagctatcagaaactatcctcaccatggtagccaattgcagtaatgttatgaataaggccagacaaccaccacctggagttatgccaaaaggacgtcctcctagtgctagcagcttagatgccatttctcctgttcaggtcaaatag

SEQ ID NO: 114790 - DNA, 665 bp, Homo sapiens
  misc_feature (1)...(665): n = a,t,c or g
ggcacgagcagttacctcctgattaattccctgcttcttgtggtgctttccacagatcactgcctgcatagcaaacagaatgatttcctnnnnnnnnnnnnttgagactgtattggtcccttgcttaaagccctccaacagcttcccattgcaataaaaataaatgtcaccttcttatttggcctataaggcctgacgtggtttggctcctgcctctgtaaactcatcatctaccccttgtccccaggttttcatgctccagccacaggggctaccttcctgtcccgcgaatgtacccaggatatactacctcagacttttgctctggaacattcgttctcatttttgcatggctaaccctttctgannnnnnnnnnnnnnnnnnnnnnnnnnnnnnnnnntggttttttatatttttaaggagattttattatggagaattagcatatgcaaatatggagannnnnnnnnnnnnnnnnnnnnnnnnnnnnnnnnnnnnnnnnnnnnnnnnnnnnnnnnnnnnnnnnnnnnnnnnnngccagaggaactgatggtgtgaatcccagtctgaaggcaagggaagatgaaatgagatttcccagctcaagtggtgagacaagaaacagagaaggggggacaaattcctctttcttccatgttttgct

SEQ ID NO: 114791 - DNA, 1308 bp, Homo sapiens
atgagaacgaatgttccagagcaaaagtctgaggtagtatatactgggtacattcgcgggacaggaagaaagcatgtccttgggtttattagagagcctccaagtccctttgtagagggtgtaaaggggaaagcacaggtgtccttgtcagatagtagtaagaatctcagctctaaggaagagcgtcactcctatctactcacatcaattccacatccaaggagaagcagttctattcgagctcaaaggaaaatgtgcatattcaagaaatataattataccaaggcagctggacttggaggttctagtataatgccagcagctggaacaatgtatctaacaacttcaactggatatccttatacttaccataatggtgttgcttattttcatactccagaggtaacttcggtcccaccgccttggccttcacgttctgtatgtagctcccctgtgatggtagctcagcccatttatcagcaacctgcatatcactaccaggccagcaagttgcggcactgggggaaatggccgcggcgacaacttcctcgagttctctcgggtcatcgtgaacttgggcaccgaaacgaggatccaccccctccccaccaaagtgcgggagggaaaagaaggctagccagcgagaaattttgccccacaaatccgccagcagcagtggcgggaagcctcaacggcagcgaccccgccgctggcctcgtctctcagaccttccggtcctcgctgaccagtcggggagtggaggcgtcgaccgccctggcaactcctcgccttgggcggctgggtcgagttcggccgcaggagcgtcaaagacgctgcctagcccaatttcggcgggaaagcggtttacctgctcggacttcgctggatagcgagcgtttggggccttcacctcgcccctccaagccctcagggacaggctccacgctgctccttctccccgctatcccgcgccctggggccctgatcgccgtactcaccggcccggactcggtttccatcttcctctctgctcttcagagacgcggggtagggaaaagaagcctaaagtttgaaaccaccttcacgccaaggcagcagcgctgcttgtcctgcctgggactctcgccccctggcggcgagggtggctgtggcagctgcagggaagcaggctcggaccccggccctgaacctgccacctggcggaaagtttacgaatttgtgttgggccgcattcaaatgcggcccatgggccaccagttggacaagcttgaagaacaaggtcaaacctctgttctcaaagcattttaa

SEQ ID NO: 114792 - DNA, 291 bp, Homo sapiens
atgggcactgctatgttacacaagagaaagcgccgccacattctatatgccaatttgatgacctttcgtagcaccggcccctctgagtatgaaatcctgagcatgtgtgaccggcagggttccctggggcagacgccagcttcagcacagcagtggggacgtggatcacgatccccagatttcctgcagattcgaatgaaccaagatcaccaaaataaaaggaaaccaggcaccacctgtgaggatttggaggaaataacaaatgcagacttttggcaatatgacggttaa

SEQ ID NO: 114793 - DNA, 702 bp, Homo sapiens
atgggtcacacggagtataaaaattatacttatctcttctatattaaactccggttaaaacagaaaaaggttcaagtgcccatgggaaatatggtcactctattcagggcagtggtaaaattctgtccttggtctcctgaaaaaggaaccttagatgtagacctgttgaaacagggaagggtccgagtaaccatggaaaatatggtcactctattcagggcagtggaaaaatactgtccttggtttcctgaaaaaggaaccgtatatgtaaaagtatgggatcatgttggttcaacattctgggagctggtcccggcaaggaattatgttatcgtcactgtttggggtggttgggccttggtgcgtgccgtcttggtggtgtgccgatcccgtgaccccctgcagttgtcacagttttctgccttttcctcagtttctctgccttttcctcagccttcctctcccatacagcctttgttatctgctcagcctctcccttcgcctactcctcccccacctaacaatactaaaaattcaatgtctaactctgcctggtgggcagaggaggcccgtctgcaggctcagctaaatcggactaatggcattctaactactcaggctcagctcacaggctccgatagtttctctgatacttatgcccaattaggctttgatgctcttaccacaaaacaagtaacaaag

SEQ ID NO: 114794 - DNA, 705 bp, Homo sapiens; identical to SEQ ID NO: 114165

SEQ ID NO: 114795 - DNA, 2747 bp, Homo sapiens; identical to SEQ ID NO: 114166

SEQ ID NO: 114796 - DNA, 1992 bp, Homo sapiens
  misc_feature (1)...(1992): n = a,t,c or g
atgggcaaagacttcatgtctaaaacaccaaaagcaatggcaacaaaaggcaaaattgacaaatgggatctaattaaacggaagagcttctgcacagcaaaagaaactatcatcagagtgaacaggcaacctacagaatgggagaaaatttttgcaatctactcatctgacaaagggctaatatccagaatctacaaagaacttaaacaaatttacaagaaaaaagcaaacaaccccatcaaaaagtgggcaaaggatatgaacagacacttctcaaaagaggacatttatgtggccaaaagacatatgaaaaaatgctcatcatcactggtcattagagaaatgcaaatcaaaaccacactgagccattatctggatattgtggaagtaaacattgctcaccagatctctctacgttcagaagcattttttcatgcaatgacctctcaacacgagttgcaggactacctcaggaaaacttcccaggctgtaaaaatgcttcgagataaaattgcacagattgataaagtaataaaaagttgtgaagaccataaagcccgaaacaataaattcctgttagagaaaactgtgtgcagatgctgtgagacaatcaaggaaatcatgaaagagattgtggatgtgacaagggtgaggaatgaaggatttcaagataagaatcttggagaaattcaacagctaataggtaccacaacagaggaattaacagaagatgacttgacggagatgagtgttctcaaaccaatgccagacaatgaggaaaaagagatagaagcagcagtgccagaaaacaagatgacattagacaatctggcagcagagcatttgggatcacagctttgtgaattagaaaaactgatagataaaatgatgattgcagaattttctacttattctcacagtgacttaaatagaccactggaagatgactgtcaagttttagaagagtgtgtgattaataaagtttcacaaacagaagaaatagacacagatgttgttgtgaagcttgcagatcagatgagaatgttgaattttccccagtggtttgatctgctcaaggatattttctctaagtttacaattttcctacagagagtgaagatgggaccatctagttcccggaaaataagctcagggctcccactgactctccattatgatgaattgtataattatttcattatattttacaatgtaataacagtagaaataaagtgcataataaaggttcatcccaaaactatctccccgcaaaccccttggtctatggaaaaattgttttccatgaaaccagtccctggtgccaaaaagattgaggactgctgtgctatcttttcaagttttgtgcacgtgggaacccgattccctttggtaggtgcggagaaatgtcatcggttcggtccacagaaatgcttgttcgactccctgacaactggggtcactggccctttacctcaaggtttggtgagcctggtgttaggtagggcatccacctctgctaaaggaatcaccattcatactggtctcattaattctgattcagttgacgagattaaactaatcgtgtctgccaagcttcctgtttccattccggccgtttcctttcacactgatttaccggctacacaaaattattcttattgggcttatgtgccttttcctccacttattcgaccactcacctggatggacgctcctgcagaaatctacactaatgatagacctagggctctaccatcggcaggtggcaaagccagcccagcttctgtccttctcttcaagacagcaagtgcccccaagtcctcatnggcaggtccagaaatgctgtccaagagccaaggcctggaatcagggaccccaagagcccactcggtgtttgaacccactatggccaagggggttcttcctgagcaacggctggtgttgtcgcatacccagttgatgtataaggtggttcttgagaaaatcctttag

SEQ ID NO: 114797 - DNA, 1389 bp, Homo sapiens
atgtcatcggttcggtccacagaaatgcttgttcgactccctgacaactgggaaccatatgtaaaagtatgggatcgtgttggtgcaacattccaggagctgttcccggcagggaaatgtgttcctgtcactttttggggtgattgggccttggtacatgtcgtcctaatgacataccaatcccgtgaccccctacagttaacacaattttctgaatgtgaggaccctccacctcttctccaactttcctctcccgcatggacttcgttatctgatcagcctctcccttcagctactcctcccccacctaacgatgctgaaaattcaatgtctaactctggtgactttggcttaacgttaccccctgctgaccttgtttcttttcacgaagagccagtacttataagctcccgcggccacgactcagacagcccgggaccatatacgctaattcttctctcttcaaacctccggagtcacctaatggctccaggaccaaactacaatttacctataattcttcaggccctaccccatccacttcagcccctcactctcctgtcatttccattcctcaaccggtcactttgccatccactcagcctgcctctctgtacccttcttcacacatgcacaccacatttacaatttcgtatctggtggtcacaagaggcccatctgcaggctcagctaaatcggactaatagtattctaattactcaggctcagctcacaggctccgatagtttctctgatacttatgcccaattaaactttgatgctcttaccacagaacaagtaacaaagccaaattacaagatgccattgaaaaatctgtctgatgagcatgctcaagtttcctttcacactgatttaccggctacacaaaattattcttattgggcttatgtgccttttcctccacttattcgaccactcacctggatggacgctcctgcagaaatctacactaatgatatgtgctggaccagtcaaagaatcctgcgtcaaaatcgagagaacaagccttcatcaccatggcacatttatataaaaagaaagggagagatgttgcaggaagtcagggaccctgaacggagggaccggctgaagccatggcagaagaacataaattgtgaagatttcatggacaatttgcagaggagcctcaccctgtggccaccaccaccaaaggcccatagggagtactgccaggctactgtcaatgttcacaagatacaagggctcttcagtcagcttgtggtgaaggctgccaggcctgggactcacccttcagtaagctcccctctggtccagggcaggtccagaaatgctgtccaagagccaaggcctggaatcagggaccccaagagcccactcggtgtttga

SEQ ID NO: 114798 - DNA, 1017 bp, Homo sapiens
gctcgacgtgggtgctaacatgaccggatgatttttcttgtatttttagtagagacagggttacaccgtgttagccaggatggtctccatctcgcaacctggtgatccgcccgtctcagcctcccaaagtgctgggattataggcatgagccgccatgcctggcccggactaatggcattctaattactcaggctcagctcacaggctctgatagtttgtctgatacttatgcccaattaggctttgatgctcttaccatgtaacaagtaaccaaggtgtgtatgagagcttgggataaattatgtgccccaggccaagctcctgtttcttttactactgttaaacaaggtcacactgaattataaccggattttttagcctaattacaagatgctgttgaaaaatttgtctctgatgagagtgctcaaggtttggtgggcctggtgttaggtggggcatccacctctgctaaaggaatcaccattcatactggtctcattaattctgattccactgatgagattaaattaatcgtgtctgccaaggttcctgtttccgttccggccatttcctctcacactgatttacctgctccacaaaattattcttattgggcttatgtgccttttcctccacttattcgacctctcacctggctggatgctcctgcagaaatctacactaatgacagtgtgtggattcctggagctacagatgactgttgccctgctaaaccaggagaagaaggccctgcatttaatgttactatgggttacagatacccccctctgtgcctcagacatgcacctggttgtatccatctagaaacccaaatctgggctgcttatcttccggagagatcagctacagaggaaccgggacatttggtctccagcatctccctttctcctttaagaaaaatgaaagggggagtaatgggagataccccacactttcaatataaacctggggaaaaccatgccctaaaaattttgaggccccatctaaaactttaa

SEQ ID NO: 114799 - DNA, 326 bp, Homo sapiens
  misc_feature (1)...(326): n = a,t,c or g
ttcgcatgactgggctgctaaaggcactggatcctaggctaggaggagaaagggtgctgtgaactggagttgccagagatccagaagagggacagctgcctggagatgagaccattctgagctccgcttcttcttctatggaatgtggataatcacttctacttcatgatcacaaggtnnnnnnnnnnnnnnnnnnnnnnnnnnnnnnnnnnnnnnnnnnnnnnnnnnnnnnnnnnnnccctcaaaagtagggaagctgacagtgcagccttcagtctgtggccgaaggcctgagagcccctggaaaatgactggtgtaagtgcaa

SEQ ID NO: 114800 - DNA, 1483 bp, Homo sapiens
ctacatgtctccagcatccaggttatgctgatgcaagaggtgggttcccatggccttgggcagctccacccctgtggctttgcagggtacaggtcccctcctagctgctttcatgggctgttgtttggtgcctgtggcttttccaggcacatagtgcaagctgttggtggatctaccattctgtgttctggaggatggtggccctcttctcatatctctactaggcagtgccctagtggggactctgtgtgggggttcgaacttcacattttccttccacactgccctagcagaggttctccatgagggctctgcccctgcagcaaacttctgcctagacatccaggcatttttatacatcctctgaaatctaggtagaggttcccaaacctcagtttgtgacttctgtatacccataggctcaacaccacatgggagatgccaaggcttatggcttgcaccctctgaagccatggcctgaaatgtatcttggccccttttaaccatggctggtgtgaagcagctaggatgcagggcaccatgtcctgagactgcatagagcaggaagcccctaggcccggcccaggaaacaacttttccctctatagcctctgggccctcaatgtgagtgtgcaccatccaactggctgccagctcagctacaacaaagtaggcagaagaaagtgagatgagctggcttgctgagtcttctggctttcttctttgtcccgtgctggatgcttcctgcccttggtcatcagactccaggttcttcagcttctggactcttggacttacaccagtggttttccaggggctctcaggtcttcggccacacactgaaggctgcactgtcagcttccctccttttgaggctttgggactccgactgagccactactggcttccttgctcctcaccttgcagatggcctatcatgggacttcaccttgtgaccgtcccaagaagctttaaacctaggcagcaaaaacagcaaggcagcaaagatgacaataatgaggagataaaaggtaatggagaccaccctcaggattatttcctgccctctactggagctcaggaggattccttatcaaccagagaagcttttcccaagtcgcattcagagaaacatcacgtctgcctcttgtgtgggatggtgacagcaggggctgctgaaacatctaccaaccaatatccatatccaaacatccaatatccaaacaaccaatatccaatatcccaggaagacttggcagatcagttcgtgagggccaagggttcactgatggtgctgccaaaaacctccttgttgctcctcaaacataccaagcatgcgcaggccttaggctttgctaggctctctgactggaatgctcagaacccttcctccagagagcagaacaccccacttccttccttcagttggattctagccaaagccactacatcagagacaccagccctgactacactggtgtag

SEQ ID NO: 114801 - DNA, 411 bp, Homo sapiens
tacagctcaaccccaggttctgagaggttcaaatagtatgttctggcaaaagggattcaggtaggtgaaattgctaaataaaagcatgctgatggtttgagtagttctccctgaccttgtgtgtgctttataagatcctttagtagtctctactctcgatgtacactggtggggacctcctcccagccagagagtggctccttgccagaccctcacactcatctgtgtcctatgttctggactcaggattgtgtgccagcttcagaggatgctctccatagccgtagaggtggacaggacccccacctgcagctccaataaaattgccgagatgatgtttgggtttgtgctggacattcctgagaggagccagaggtgagtcttgattttgttggggagagcagttattta

SEQ ID NO: 114802 - DNA, 582 bp, Homo sapiens
aggagacaggcctgactttacccagaatgatgtacagaaccgtgacatgcctatggatatctcagctctgtcctctccaaactgctctcccagcccacagtctgaaactcccttagagaaagttccttggctctctgtcatggaaaccccagccagaaaagaaatatcactgtcagagcctgccaaacctgggtctgcccacgtacaatcacgaacaccacaaggtgggttggacaacagaccatgcctgcatagactgaagtacttcttacgtcctccggctcatcacctcttctttcagacgctaataccggatcaagacacaagagagaacaagggtcaaaaattacaacccatccctcatcgaagactaagaatggtaaccaataccattgaagagaattttcctctggggactgtgcacttcttgatggactttgtgtcaccccagcattacccaccaagagaaatcgtggctcacatcatccagaaaatcttgctcagtggctctgagactgtggatgtcctaaaggaggcctacatgcttctcatgaaaattcaacggctacatccagccaatgc

SEQ ID NO: 114803 - DNA, 810 bp, Homo sapiens
acaaactctgcctgggcgagtccttttcctgcgttatgtcgttcagaccctagaagatgactttcagcagaccctgaggaggcaacggcagcacctgcagcaatccattgcaaacatggtgctttcctgtgacaagcagccccacaatgtcagggatgttatcaagtggctggtcaaagcagtaactgaagatggattgactcagcccccaaatgggaaatcaaacgtcttcaggaacaggaatcttgaaagccagcagtagccacccttcttccccagcccaacctggacaaagaacaccaatcagcttgattgttgttgccagcttcagaggatgctctccatagccgtagaggtggacaggacccccacctgcagctccaataaaattgccgagatgatgtttgggtttgtgctgggacattcctgaggaggagccagagctattacttgttaaaattctgccaaactacaatgcctaacagaataatgctggcccagcactttgaggtgataggaaacacctatggaactgataaaattaaacttaataatgaactccagaacaagggtcaaaaattagaacccatccctcatcgaagactaagaatggtaacaaataccattgaagagaattttcctctggggactgtgcagtttttgatggactttgtgtcaccccagcattacccaccaagagaaatcgtggctcacatcatccagaaaatcttgctcagtggctctgagactgtggatgtcctaaaggaggcctacatgcttctcatgaaaattcaacagtatgaaccgtaa

SEQ ID NO: 114804 - DNA, 458 bp, Homo sapiens
gtgaaaggagtttttggcagcagagctcctgcagtgccacgctctgtgctagggtggctggggacaaaggcaagtcaaccaggactccttgggaagcgttgatccacagggcaaaggccacacgggccatcagccgccgccacctgatgcgaagaaaggcagctgagaaaaggctgcctgctggcaaagcagccccagaaccagccagccggtggcgcccagggctgcgagaactttctccaaggcctgactggaacactgagggtacagaggtgaaggtcccacagcctggtgtgcagatggtgacaattcatgatcaaagggtgcgggcgaggactgtgaagcggttgatacgacttctagctcggtacctgattatccatttgcaaatttcaaaagacaatgagataccacttcacatccacgagtatggctataatcaaaaagacaaacaataa

SEQ ID NO: 114805 - DNA, 676 bp, Homo sapiens
cattcacccgttggttccttttctgataaggatgtggcattcaaacaaggcacctcccaagtaccagagagaaggctcaggcatttgtttccccctaagctcctggagttcagaactcaagctttcggcacctctccgagctggacaccagagggcggtatacccacacttactgcttccatccagtagagggccagaagaaaggggaatccaagttctggataaatggtgtcaaattggcatgtcaggaccggcgcctaactgccccctgatgtgaggagctgcagactgcaggacaaagggttcagtaaagacttcattcaaaatttgtaacatggaaatcaaatgtgaacaacagaccccaaaacccatctgttcttgccagagccaagacggactccatggccagctgccagaattgtcctgggttgttctatacacactaggggagggagccacgtttccttctaacaaaaggccattatgcaaagggctgcctaatgaaatcgtccttttgatgtattctctttaactagagtaatgtaataaaatgataatgataatcttctggtttatgattattctgaattaacaccaaaaaatagaaataaaaaaaaaaaaagccaactcctggcatcaaagtaggctgacattacaagttgcttatatgctgctc

SEQ ID NO: 114806 - DNA, 1641 bp, Homo sapiens
atggggaaccgaaaaatcccccacaagtattcactggaaagactagtgggtctatttgagaaagcagatgaaaccgtgaaggaatttgcccgatccaagggagcctgccgaggggggtcccgtatataccatatattccgcaaggggaaccccgcggggttcgggaaaataccccggtcgattaagattccagaagaaaaaagcccattaaaggggggcgcccccatgagagaaaagggccatagaaggaaccatatccagcttcttctttcactaccgccaatactcgctcaggcaccatcgttgactcttacttcagtgctggtgatagagtgctcccttcaggaagtagcagaaactgaaggcatgagaaagtacaccaacccagacccagtcagcccagaaagaaccactgttttaaaccttcgattcatctcccaatccacccctgatatttggtgcaagcttcagaagcttgatgacggccctcaaaccccacaacgagaccttcttaatttagccttcaaagtctttaacaattgtgatgaggaagtaaaaggcaaaaacaggcagagtttcaaatgtttgcctccaccgttagaggccctgcaggtccctgaggccgcaactccacaaagaagcctcctagcaatccacctccacctggtgcctgtttcaagtgcagcaatgaaggccactggtccaaacaatgcccaaacccagaaagttgccatcatttattgcagcggccaccaaaccccggacaatcctatatcagctggaaatgctttagcagatcaggtagccaaacaagtagccctacaacccgtgcaaggccagtttctgtccctgtcgttattctctcctctttactcctcagaagaaaaggaggacttccaggcccagaaccttcaaaggcaaggaccatggcccagtcccaagacacaaggccacttggcgccagcagggtgcatcagcaagagagcagaagcaggaagagagctggccggaagacacgcacccctgaagatcgagaaagaggccatccagcccattcttctggggaaaaaaaataaagtcttgtatggagcaccagttgggtctcaagaactggttttattcttgagtaagagcagccgttctggcctgagaatgtacctggcagattcactacagggattgtatttggtgcaggacctcagctgctgtgctttgcaatctgtagctgcccttacattcaggccacaccttttgcagctgctccttaccaataattcctgcagcatgaatgctaaggaaaacctactgctgggagacttggagaccctttgtcagatgactttgactcaaggacctggtggccctgctgaacctttagactacatggaaattgagggcttcctctcaaccctctttcttctttttaacttgctgtcagccttgcatcatggtctgatgtctgatgaatctctcagccttcctcatctcagaaatactaacaaccatcagagacgactaggaacacctcctgatgatgcacacaaacaagacaacctagaagagatggataagtttcttgacacatacaccttcctgagactgaaccaggaagaaattgattccctgactaatgaccaataa

SEQ ID NO: 114807 - DNA, 483 bp, Homo sapiens
atgtacccgtttgagtggtccacttctcagtccaactctgatcttggtgtgcagggcagcagtaaagagatctggagtctgggaagttcaagagcatggcaccaacatctggcaagggctttcattctgcatcatctcatggaggaaaataaaaaggcaatacaaaacaggaagaggaggctcagccgaaggctgagtgccatgagtccagcagcagctgggaattctggtggtcaaacaaggggactttctggccccacaagcatggacagttttggtcttcccagcttcaagccccaactctttggggactttaccaacgaaccacagctgacatatgttttgctctgtttctctagtacaaatcaatgctggagtagtgtaggcttcccaaaagagccactggaggagaatggaaagaatggagacacagaagccagcactggctttgaatccttgctctgtctcttacaagatatgtga

SEQ ID NO: 114808 - DNA, 1518 bp, Homo sapiens
atgcggatcctgagagcgatcccaggtaagcaattgccccggtggaacgccttgccagagcagcatgtggcaggcccccatggaggatcaacgcagtggctgaacaccaggaaggaactggcacttggagtccagacatctgaaacttgggccttagaactgatgacccagtacgttaacaactggaactgggtctacgacaacataatagatcaggatgaaagcgaattgactgggttgttaggaaatactcaagaactcagcccagctctagaactcacctctgagcatgaaggcaatgttgggcacgctggtaaaggaccactagaatccagcagctcggacccctttctttgtgctcgggaaaaggggtgcaggactgctacatcgcccatctcagtggtcgcggaaggtgacgtggacacggaagtggtcgtcgtcgcggcaccggtgggagctaggcgcgaggctcggagtgcggccagcgggcggaggcggtctcgcatcggcggcgacggagggctcaggcgtcgtcgtttggctcctttcacccgccggaaccccggagccggggcccgctcagccggcgttaccatgaccaaggccggtagcaagggcgggaacctccgcgacaagctggacggcaacgaactggacctgagcctcagcgacctgaatgaggtcccggtgaaggagctggctgcccttccaaaggccaccatcctggatctgtcttgtaataaactgactactctaccgtcggatttctgtggcctcacacacctggtgaagctagacctgagtaagaacaagctgcagcagctgccagcagactttggccgtctggtcaacctccagcacctggatctcctcaacaacaagctggtcaccttgcctgtcagctttgctcagctcaagaacctgaagtggttggacctgaaggataaccccctggatcctgtcctggccaaggtggcaggtgactgcttggatgagaagcagtgtaagcagtgtgcaaacaaggtgttacagcacatgaaggccgtgcaggcagatcaggagcgggagaggcagcggcggctggaagtagaacgtgaggcagagaagaagcgtgaggctaagcagcgagctaaggaagctcaggagcgggaactgcggaagcgggagaaggcggaagagaaggagcgccggagaaaggagtatgatgccctcaaagcagccaagcgggagcaggagaagaaacctaagaaggaagcaaatcaggccccgaaatctaagtctggctcccgtccccgcaagccaccaccccggaagcacactcgttcctgggctgtgctgaagctgctgctgctgctgctgctatttggtgtggcgggagggctggttgcttgtcgggtgacagagctgcagcagcagcccctctgcaccagcgtgaacaccatctatgacaatgcggtccagggtctacgccgccatgagatcctccagtgggtcctccagaccgactctcagcagtga

SEQ ID NO: 114809 - DNA, 369 bp, Homo sapiens
atgcatctagctcctgtacgtggacgaccttctgctggaacactccacggcagtcgggtgcgcaaaagggatggatgccctgctctgggacctggtgcacaagaagaaagcggagatctgcagacagcagggactgatatcactgttgatagtgcagagaaaccctccataattaagttttctgtaaaagccttcatgttttctgagcagaatgtacgaggtgtgccatcccaaaaccagctgctaccctgtccttttaatagttgtgagcccttaaaagaaacaggaattgctcactcggggagctcagttgttggagacgtgagtcttgccgaagctcctggtcgaataaagcccttccttctttaa

SEQ ID NO: 114810 - DNA, 779 bp, Homo sapiens
ttgacaatggtgacttgctctgtcacccaggctggggtgcagtggcccgatcatggctcactgcagcctcaagcagtcctcccccttcagcctccaaactgtttggattataggcaagagctacttactacacctggccatggatcttcttgtgtccaactttgagacccaaatttactgcagtgccttaaaatgttttaaagaaagttaatacacatgtgcctggatgtggttactcacgccctgtaaccctgtagcaggacaagccgcagacaaatcccctcagacaccgagttaaagaaggaagggctttatttggctgggagctttggccaagactcacgtctccaaaaactgagctccccgagtgagcaattcctgacctttttaagggctcacaactctaagggggtccgcatgagagggtcgtgatcgatggagcaaacaggggggtacgtgactcggggctgcctgcaccggttattagaatggaacaggacaggacagggattttcacagtgcttttcttgtacaatgtctgtaaatctatagataacataaccgattaggtcatgggtcaatctttaactaccaggcccagggatgtggggccaggctgtctgcttggggatttcatttctgccttttagattttacttctttctttggaggcagaaattgggcataagacagtatgaagggttgtctcctcccttaaaatcacgaactggtggtatagtgaggagctattccttccaaaatcttttaaaaacattact

SEQ ID NO: 114811 - DNA, 967 bp, Homo sapiens
ttttttccagacaaaataccacgctcacaccacacgcacaccacaaaacaaagaacaggtaaaaagggcacacacacacttttgcagtttacaccaaaccaaaatcacgaaattcaaaatccgagtaccaaaaaattcaagccaagtcaaaaccaaaaccaaagtatccagcaattcaagtcaagtcaaaaccagaacaagagtgcccgtgcaggcatgctgtggggtgatcaggccacgtttccactcagatggagtggggcaagttcccaagaccagtcctgtcaagcaattcaaaccaagtcaaaaccaaaaccaaagtgcctgtacaggcacgccgtgggtgatcaggccacgcttccactcaaacggagtggggcaagttccaaagactagtcttaccaagtcaagccaagtcaaaaccagaacaaagatgtcaatacaggcacaccgtgggtgatcaggccatgcttccactcacatggagtggggcaagttccaaagactagtcttaccaagtttcagatgtccagactccaagtgccagttccttcccggtgttcagccactgcattgatcctccacgggggcctgccacacactgctctggcgaggcgttctactggggcaattgcctacccaggagcgctctcaggatccgcatcgctcaagctggccggagtcccccgcagggatgctccacagggcaggcctaagccgcctaacaggctgcctcaactgtccgttaatcacctcgcttcccagtcagggaaccaagaaatgtagcaggacgagccgtagacaaaacccctcagacaccgagttaaagaaggaagggctttattcagccgggagcttcggcaagactcacgtctccaaaaaccgagctccccgacatctggacgtcaatccagtcctacttctgttgaatgccgcagagtacactttaaaccgttgggacctttaa

SEQ ID NO: 114812 - DNA, 768 bp, Homo sapiens
atgagcttccacaagtccctgtgccaccagcagcttcctggtcccaatgtcaagaagcacaagacacggcatgttctcgtgggaggtggcaccctcactgaagttagccagagctgccacacgtcccgcagtgctcaggaacagtcctctcactctctccacgcggcccatgtgagccgccagcagggacccatgtcagaggtcactggagagccccatggatgcctgcgggctggcaagccaggaatccagttcgaactgccaatggtgagccggtggataaccaggttggcagcccctttcagctgtctgcactggggcaggactgcttatgtcacagagaaggcagagacaagtgaatatgacacaggggatcttcctgtttgcttggaagttaatttccacttcaggcacatgcacacgaagacggatcaagccgctaccccaaaccggcagcaaatgactattcttttgttactgaccatcaggagttcaactttgctccactttgggaagtggaacaaatgctctggtgaagacagggagcacaggacatatttacctggaggggatatcaaagagcagcctcaagacttgcaaaacaaagtcgtcccaatgaattatctgtgcctacagccgcacttggcaccttcggctaagccagcgtctgacaagcagttgttcccacggcagccacccctgccttccatcttagggactcacccagaaaattctccaacctgctccacgactacaaaactcttctaa

SEQ ID NO: 114813 - DNA, 531 bp, Homo sapiens
aaaatcataatcataaaagtcacagcacctagaatcactcccacaaagcatgctcaccccaaaccagatgccgatgaccaactgggtccacgctttatagagatagcctatggtaaaaaggaatttgagaggaggagatggaagattgagagcagagtgcaagaatgggaagagggcttcgtgccctgtgcacgtttgccacctagtgaccaaactgaggacacgcagatgagagacggagaagtaacaggaagttttgacaaacttcgacacttggaatcagggcttaaggatgatagccgcaagcttatcagcttctgcagtgttgctactgactgtgtagacctgggaatatcagaaattgctgaaattgtttcttaccaaccaagagaggccacacctgtcagcgaagctggcagtgggctaggatggctgtgcccaactatcttcactaagagttgccttatttttgaagacgtggaattagctatggaaagcaaaattcctctggctgtgcctttggtgccttga

SEQ ID NO: 114814 - DNA, 1014 bp, Homo sapiens
atgataaagcggattctcactaccaatcccacagaaatacaaactaccatcaacgaatactataagcacctctacacaaatgaactagaaaatctagaaatggataaattcctagacacatacaccctcccaagactaaaccaggaagaagttgaatccctgaatagaacaattacaggctctgaaattgaggcaataatagcctaccaaccaaccaaattccaggaccagatggattcacagccgaattctaccacagtaagcaaagccattcataaggccagccaaaactcaagagaaacagactccacttgtggacgggaagagcagcatgtaggcacagggatggaaagactgactggccatcatactgggaaactatctatcacacaatttgatttgctaaacacaaagggtgcaactgctggcatcgccctgcggcttgacggtagaacatcccctttcttcttccttcctttacaggctttgctgtgtagtgtgctgactacagatctctatggcctaggagctgatgctcctggaataaaccctacaagatcctttgagatgagcttcattaatactttacctctcttcttcttaatcctaatcaaatgggtggggctttccataccccccgatgaaaccatactagacattgttgaagtaaaagatttaagacaaaccctgccatttgaaaaaggataccgagatgccaaaaaatctgctgggaatgggagaaaatattttgttggcaccctaaacaaaaacaactgttacacttttttcaccagaaacttgctcagtctcaggtatatctctatcaacagcatgaaaacggaccaatacactaaattggtaccagtagagtggggtgttgctgaaaacatacctgaaaatatggaagcaattttggacctgagaacagacagatgttggtacagtctggggggctcagaagacaagaaaatgggaaagtttggaacttcctggagacctattgaatggcattga

SEQ ID NO: 114815 - DNA, 752 bp, Homo sapiens
agttttcctaactatttactaccagaaatggtcaataacttactttgtggttagcaaatcaaattgtgtgatagatagtttcccagtatgatggccagtcagtctttccatccctgtgcctacatgctgctcttcccgtccacaagtggagtctgtttctcttgagttttggctggccttatgaatgggctttgcttactgaaagtgcagcagaagaaatttagtatatgtccaaggcctagggcttttaagagactggcagctttcccttttatcccttttttggaagcctagcccaccatggctggcaaagaagcctcagcctggattacctgaaagatagagaggccatgttggagagagactccttgagggatgagagattatccttgggatgttcccagccttaagctccccagctgaatgtgggtgtatccctcagctacacccacagaaaacagaggaactactcagtcgatcccaatcaaccccacagactcactagaaataacaaattattgttttaagcccacgaggttttgggggagggttgttaaacagtaatagataagtgagacagattgcttgttatttatggtcaaatggtgattatctctggtgagattacgaggtgatgttttttttaagttatgcctatctgtagtttcctttttttcctaaaattgatttgaattattagtgtattaacagaataaagaatgaactttaaaacccaaaaaaaaaaaaaaaaa

SEQ ID NO: 114816 - DNA, 333 bp, Homo sapiens
atgttgacccgactcagagaaaccccgcccttgccgccaccgcccacccataacgtcctcctcgaccctccctcgaccatccctcgccccgcggccctcaccgaaaaggggagggcggtggaagagagaggagtcaagggagcgcacgcgaagccccgcccctgccgtgacgtctggagacgcgacgcgtcgcctcgcaatgcaaatcgggaaaaggggcacctgttctctgggaagtcgtccgctgtgaacgatgaacgcctttccttccaccagctgctggttaccccggagacaagctctgtccgcggagaggagtgggacaactcctaa

SEQ ID NO: 114817 - DNA, 177 bp, Homo sapiens
ctcggattgggaaaatgaaacggaggaagcaagatgaagggcagagggaaggctcctgcatggctgaggatgatgctgtggacatcgagcatgagaacaacaaccgctttgaggagtatgagtggtgtggacagaagcggatacgggccaccactctcctggaaggtggcttccgag

SEQ ID NO: 114818 - DNA, 555 bp, Homo sapiens
atggagactgctatacgggaagaactggagcttgggggtatcaaggaggcaccaaacccagcacagagcaaagaaggcttcctcagaaggttcgagcctgatgtacgtattttgcttaccaaatacagcaatagtaatggctctcagtccccgtggatggaggagcaaattcgggatgcgctggggaacatggttctaaaaatgttgtacgtgaaacggatgaagttggtaaaggaaattcgttctggtggccaactggaaaaaaacaaaggtgctttttccaatgggtacgatattgccaacaaggttatgaacgggcacagtttccaacccttccaaaaattccgggaaattttggctgctagggggaaatttcgggaaatattccgtttcaacccccatgtaaaaagggaaggctcctgcatggctgaggatgatgctgtggacatcgagcatgagaacaacaaccgctttgaggagtatgagtggtgtggacagaagcggatacgggccaccactctcctggaaggtggcttccgaggtacaagcagctga

SEQ ID NO: 114819 - DNA, 808 bp, Homo sapiens
caccttccttccccgctcccttcccccgacactagctgctgactgcccctgaatctgtgggctcttggggtctccatgtggtctcagcagcttcttcccttctgaccactgctctctccttttgctttcactctcactcattccctccttgggctccagcggaaaactattgggaagaggcccaggtctttgacctctaaattggtttgcttcaaaggagccctagagctgagggcccacttggcacaccacagctggggctagagctgtgccttcgttgcagactgtggggagcaggtggggatggcctgggcccagcatgatcctgctctgctcttcacagagggaaggctcctgcatggctgaggatgatgctgtggacatcgagcatgagaacaacaaccgctttgaggagtatgagtggtgtggacagaagcggatacgggccaccactctcctggaaggtggcttccgaggtacaagcagctgacacgtagacattggcactctggtgccaggcctctgctgggtatccatctgctggaagccaagaggccgaggctggtggctggtcatccatccgttccaccacgtggggactgctgctggtggggctcctttgtgaccgtgctgcctgcctgtgatgtgcatattaaaatggatgtatttgggtggggaaatggaattgtgaggctgcaagctaggagtgacgaaggggggctctcagcttcgggtgatgcattgaaggtgacagccaagccgcgttagcacctgcataaaatattaaagggacggttatgcatttatc

SEQ ID NO: 114820 - DNA, 1093 bp, Homo sapiens
atggggcggaaggagccccgcaccgggaggggtcgtggagtggggtggaaggacttggcagccgctaaagattggacctttctgcgagtacgagccaaccggcagacccgactgaatgatctgttttactactcagggaaaaggaatggtaggatgccatggctcctccaggaatctccccaccccatgccctggagggactcaggaatagctcacagccagcctggaccagaggttggaggcttgggtatttcgccagagccaagattggagggcagaatcaccgaagattcagctgtgaccacgtttgaggctctgaaggctcgggtcagagaacttgaacggcagctatctcgtggggaccgttacaaatgcctcatctgcatggtgagtagaaaagaacctaggggtgcccttggtcaggcttccacgccctctgggggagttggagagggactcgtactcgatgcccctaacgtccatccagtgttggcacgtgcactgcgaggagtgctggctgcggaccctgaaatgatggaacaggttcgggtgggcacaataagggctgccttctcagggttccctgagccttctgacctggctgccaaagctcggatttgggaaaatgaaacggaggaagcaagatgaagggcaggtatgtcccctgtgcaaccgccccctggcaagattcggagcaggagatgagtaggcatgtggagcattgcctttctaagagggaaggctcctgcatggctgaggatgatgctgtggacatcgagcatgagaacaacaaccgcttttgagggagtatgagtggtgttggacagaaagcggatacgggccaccactctcctgggaaggtggcttccgagaccggttagagggagtgataacgccagctgaagaagctgcccagcagacttcagagagaaggaggcagaggcaggatgagcaggcgagtggcgaggcccatttaaactgcgctgtgcgtgctgacagaacagagattgctgtcgttgttagatatgaaagaagtgaagaattgcagataagttcctgtatccgatcacccccatccctcctcccagagtag

SEQ ID NO: 114821 - DNA, 984 bp, Homo sapiens
atgcttcgtattgaccaggaccccaggtgttcctttgagaagggggcctttgcttcacttttcccaaaaggtgctgtggccttttgcagaagtgctgcttggcgtccgcagcaccagggccagtccatagcaagcaccgactgtgctgacaatgaaccagaagtgctgcttggcgtcctcggcaccaaggccagtctacagcgagcactgactgtgctgacaatgaaccaggtgcctgctctgtctgctaccacggccctgcaagagagccgtgatcagatgaaaaacatggaggctataaggggacccatgtctccggccagcagcaaggccaccccctcactgtacacacacagcaggcaagggaggggagtgatgtattcttttattgaagcaagtatgtccagtcacaccaaaactgacgtcctgcattatggtacagcttcatactcagagttcatctcaaataccaaaacatcaaatcagggagctttgggaattgggacctggcccatcctcacccaggcttccccattgatcaaggctcctgcggaaactgggaatgcagagagggacaaggatgcggagttcctgcgagggagacggtccacgtggattgaccgtgtgctttctgaaggacagctgtcctgcgccatggaaaatgaaaatgtaaactttggacagcccgtactcaaaggctcacttccagaagtgtgcggacgcgacctcccagccaccagccctcctatggagcctcgcagcccaggctcctgagggcaggcgcccaggtggagtgggactcaccgcagcccaaaccacagagcaggaagaccagaccccagtaccctttaaggcactaaccccgacgtcagagacactggctggaaaggcgtccgagcaggcagggctcacgttggttttggctgggttttttaaaatatttttttcataagatgttaataatcaaaagtagaaaataaaaat

SEQ ID NO: 114822 - DNA, 552 bp, Homo sapiens
ttttttttttttttgggagtgatgtattcttttattgaagcaagtatgtccagtcacaccaaaactgacgtcctgcattatggtacagcttcatactcagagttcatctcaaataccaaaacatcaaatcagggtatgtatcaaattgggaaaataaagtagcagacagacactgtttcaagtaggtactagaactgatcacccgtgaagtgcacgtggatgtgtacagaaaccgttctaaggctgtattccaaatatatattctcaagttttaagcctttctcatctcaaagacataaacaaagcaatatgtactatcaatatacaatctgtactagctagaacctcagaaagtgcaaacacactgtgacaatacagtggaactattcctgctccacccaggaccagaggcatgggcagcgggcccagggctgcctcctccccaggcccagcctttcccaatgtcttcaggctcttccaggagctttgggaattgggacctggcccatcctcacccaggcttccccattgatcaaggctcctgcggaaact

SEQ ID NO: 114823 - DNA, 759 bp, Homo sapiens
atgcgccccacggcccgccctggttccgcctccctggaagaggggtggcgttgtctcggtaaccggagtaaacggaggcctccggcagacgctgtgaagagaggagccgcggcggtcagtaccttcgagcgtccagttgtaaatgccaatgtctcagtgccattgatgttcagagaggaagtggctgaattcccacaggaagagttgcccgttaaactgtctcaggtgccagaccctccagataacatgaatctggccaagaattttccagcacatatttttgagccagctgtgttgttaacaccacccaggcagaagagcaacttaaaattctctcctcttcaggacgcgtctgccggaggcctccgtttactccggttaccgagacaacgccacccctcttccagggaggcggaaccagggcgggccgtggggcgcatgcgcggccggcgtccagctctccgggaacccggtttcagagaaaatccattgatggaagctttgggtccaatgatgagtagtctagcctgcagttggaaagcaaagctagtgaaaaccaattctatagttcaagaggtcccaagccctaggccgtggactggtactgatccgtggcctgttaggagctgggctgcacagcaggagatgagtggcagatcagtggcagcattagattctcataggaccgcaaaccctattgtgaactgtgcatgcgagggatctgggttgcgtgctccttatgagaatctaatgccataa

SEQ ID NO: 114824 - DNA, 1671 bp, Homo sapiens
atgaaaaactatgctgctgatgctgtcagcttcccagaatcctctcccaagttaattcaattgcttctagttcaaactccccaggagaaaacatgtggttggtgtggccagtatccactcctactgggcagagcccttgtaccaggttttccacaggcctttgacctttggatcaagcatccagctttggcccaatcagttgaggcctgggtgatgggatcacatggcagcatgtacctgatgcaaggacaccagtcatatcggattaagggccaaccctgctccagtattacagtggggtcacctttgtgggagagttcagccaccaacagctgggcagccacagaaaccatgacttatcaggacaggagcagaataatgaattacccacttgcaaattccaagggaagtttgaaagcctggattttttccaggtctcttgaggttgagaagtccaagatcaaggcactgaatctggtgagggccttcttgctgagtcatcccacggcagaaggtggaagggcaggagcacacacgagagagagagaaagagacgacaaacttggaaactacatttccctgatcttgccaacagtattcagcccggactccaccaatgagaggcacttgcatgagatttggttgggaagaaaaggagaagccattgttttcttgaggcagcagcagatggctgacatggaattttgcctaaaacttttgggtgttctcctgaaaatactccaactggctctacaggcagctgagagcaatggcagtggcttccttgtgattcctgcactaccagatttcctgaaagagaggatgcagcaacaaggcaccagcttggaagcagagatcaaacccttatcagatgccaaacctgcttatgccttgatctgggacttcccagcctccagaaccatgagaaataaatttctattgtttgtgaattacccggtctatggtctgcaggaaaagggggaagagtctttacaggtggcactgtgtggagagagccacccaacaggaatggtggccttcatcaaggaatgcagccagcccggggaaccctcacctcaaggaagcaaggcgaatcgatacttcaccctttccttcctccttccctctcacgtcctgccagtattctccattggccaagcccagcccagaatccagaaaaccagggaatctgctgacactgcccatccagtgtgtcctcaaacaaaagatggccatgtcagaataccacaaaggcttgtggactgtgccgctgctgatgttggaagaagacgtttctttggcaagcaaggaggatttgagcagacgaacgacttagccagaaccgggatagtgtgtgcatggcagaaacaacggagagattctcgggatgtgactatgggcctacagcatttgtcatcagtcactagtacacttcgtagaagacctgccttagcacaaatgctgctggaaccgtctgaggcttgcaatttgggcagttttcttgtgatatctcatatggttgtggacaatggctgctggggtttggggctggaggcatctgaagtaacagtcgatgctggctgtcaaccaggagcacagctgggctgtcaactagaacgcctacatatggactctccgtgtagcttggactgtgcacaggctggtggctag

SEQ ID NO: 114825 - DNA, 504 bp, Homo sapiens
atgcttcctagcaacacagtttcccaccccctcatgaataatcagggctggctacatactctgttgggaagaaggctcaaaaatgaatcctctcaagcagacccgctttggtttccacccctctattctgagaacccaagctcaacccatgtgttctgccttcaggtagaaaatgtcagaatcatagggaagactaagctgaaaaaagaatttggagttccaaaggaattctgtgccacctgccgtccggcaattccctttgccagggaaggcacagaagcctttgcaggcgaggctgcagagagaagaaaacgcacgggagacagtcctgattccaaggggttacaattggttggggaggcaaggcagccacaaagaaagcacagcatgtttgggccagtgttaccagatggtgctgtgcagctccaggctcttagtgtcctgaccgaagaattggacgagatacacacagatagcaaagcagcaaaagtgtatgacgcatag

SEQ ID NO: 114826 - DNA, 1727 bp, Homo sapiens
gaacccgcctgtcagccagcctttcgagctaattagctcagcatacaacaaagataagtgagcctgggaagagggccccctgaggggtctttagattctgggaaatgtctgattggcagatgttaaaagggattccttggtaatccagtgcatcaatgagctgcagaaattcagcccaggactgcaagaattcaggcatgaggacactctgtacaggaggctcacacagggcagacccaagatgggacagaaccttgggaatctcttgaggacacatcatttgcccaagtctttgccttcacagagattcccggctcttagtctttcaaagacttgaacgttgtgtcaatgttacaggaattttgggaaagcaagcagcagcagaaggctgcattcccaagtgaaggtgtggtggtctatgagtcactgccagctcctgggcctccctttgtgagttacgtgaccctcccagggggaaagctgttttggcaactttcagtggtcagccctggctttggccactgggtgggaaacacaggaggaagtggagcggacacggatgagaggcagcgaaggggaaagaaaggcagccattgaggaagaggctctccaacccacttgtgcctgcaggtccattattgagcatcctaagtgctgcttaagtagagccgaggccaggcgggatgcagctaaagtggccctgatcaactccctcttcaatgagctgccctctcgcaggatcaccaaggaattcattatggaaagtgttcaggaagcagtagcctccaccagcggcaccttagatgatgcagatgaccccagcaccagtgttggggcctatcactacatgctggagtcaaacatgggggaagactatgctggagtttcaggagctgatgaccattttccaactattgcactggaatggaagcctaaaagcccttcgtgaaacaaagtgttcccgacaggaagtcatctcctactattctcagtattctctagatgaaaagatgcgcagccacatggccctggactggatcatgaaggagcgggactcaccaggaattgtctctcaagagctacgaatggccctgaggcagttggaggaagccaggaaagcaggacaagaactacggttttacaaagaaaagaaagaaatattgagcttagccctgactcagatctgcagtgaccctgacacttcctcacccagtgatgatcagctgagccttacggccctgtgtggctatcactagcaaggccaagccccgggtaccctcagtgatggcagaggccagattaacattgggaacctcagtgccagaggtccctcagaggctcccagcatctcctagtacctacctgaaggctctccctaaccctctcccacacattcccatttacagagtatgagagtcgtaggacccttacaagacccaacaagcccactcgatgcatttttctatcacattctcaatagttccagctcaggatgaaaggatagacacaaaattgtttgaaaaacattttcccaggcctggctccaacctaaagcctgactgtcacgtgccttgcttgattttatatatattgtttcaagaatagtccaatatagcattccccaaatgaacagcagccagaattaggtgaagtagcatgatagcagtgtttaaaaatacttaggattaaataaataatatggattgttttaaaaaataaaaaaaaaa

SEQ ID NO: 114827 - DNA, 414 bp, Homo sapiens
tcctctcttccttcccctgctggccaaacttcatactgtccaccaggggagactgccccccgactcggctgtccctcactaacgcggtggtccccgacctagggtcgcagatgcacttcccgaggcacatgcgggcgcaacaaggtaactgcgctccaggcgtggaaccccagtcctgagcgatgtgaaaccaaccccaagcgggctgtgctcacagtttgggaaaaggtaatgtctctgatccccccatatccacccctcccccaacccttgaggacagattcgggtaccgcaaaaccgccaggcacagaagggaggagagctgggacggacaggctactcccggtgaggggatcacctccacgttcccgctccaagcggcttggagctggtatgaaatacaactcctggccc

SEQ ID NO: 114828 - DNA, 510 bp, Homo sapiens
tattccgagtatagccaccactgacttctgaccctggacaccgccaagtggggcaacgtttcgctcttacagcagcttcccgctccaagcggctggtagctgctagtaattcagacttctggcctcggaggaagagtgccagggaagaaagagactaagaaatcctcaaacgcccctagaacaagacccgggaagaagtgcccaagtgggcgcggccgtcggcgaggtcagtttagcctgtactggaccgtggaaccctgagcgctgaggctgtggggtcgcgggattctactgggcctcgccagcttccacagtctgctgcggtctgtggaatggggaaggataaaatacagactttggtttattttaaaaaatggtattctgcctgaactaccaggtccatggtttgcttttggcgcttgcagaagcaccaggacgatctttccaaaaatttctgcagtagtttaactaaccaatgaaataaatgaaggttaaaaaaccaaaacagaa

SEQ ID NO: 114829 - DNA, 1128 bp, Homo sapiens
atggaggatgaagaggaggtggagaatcagaaggtagtgcgggcgttgttagagaaggaggaggaagaggaggaggaggaggagggatgggaggggctccctcagcccgaaccctgcgtctctgttcacattggaacaccccctcacctcatctcagcttgcttttaccgaggaacagacggctgcgtgtgggggctggtccctacccagatcagtacaggatcttcagctggcagacgagatccagcaaatggaattcacgaagaaactcatgtgcgtttggaaaaaaagttcaagctgacacctgtgcctgccctggagctagatcaggttctggcgactgctccaacctggaacgccggctcagtagcgcccaagccgaaggcgaaggggaagaggaacgaagtgtgggatggggggcggcccctcattcggggttcagactggggcgggcttccagggatgccccctccgaccccgtcaccagcggaggactcatctgccgcggggctgccggaagctctcactcccgccagccccctgggtgctattgatgcggaccttggagtgcggcttggagaagtcttgggaatcaaacggcatgaacttagattcctgttacacaacttttcaatgagggaggaggatatcgaatacctcactcagtcttcgggaatggagccttcaaaaacacttttcccatccttggagttgctctgtaagaaggactttcggagtgaaactccacagtgcggttcaaagacacgcttaggatgccccgggatggagagaggactgagcttggactggaattcctggaacagacgagggcttgtgagcttgtcccaggcactgaggacagcatactcttcccgacaagggcatctgggtcgagagaaggtggagcgggtcttcggcaaaggcgaaaccctggagaacgctgccccaccccaccctgattgcagcttctcaccagcaatggaacaaagctggatggagaatgactttgatgagctgacagaagtaggcttcagaacatgggtaataacaaacttctccgagctaaaggaagatgttcgaacccatcacaaggaagcaaaaaaccttgaaaagagattagatgaatga

SEQ ID NO: 114830 - DNA, 1284 bp, Homo sapiens
cctgaacaggaaccattagagaagaaggcgacccctctaataacccctataataacagggcccggctgctgggcattgtcaacagggaaataactcggtcgctgcttttctggcgaagacgtgccatagcctgggatagtagcctggggtcacagggccacaccgaaagccctcatctctctctaccttctctctgcagaaaaagcgtgaggctgctcctcattgacacccacttagaagttggttgatgaagactgcagtgagcactctcagcaagggtaaaactggcacatttgggcctgaaatggggtcctcggggcctgggtaggctcaagtatggcccttggtaaatttccagcttacagagaaaaagaaggagcgttcactttgttttctgctgggcagggtgaaaaagggggcagctacgtggccaaggggagacgccccccgactcggctgtccctcactaacgcggtggtccccgacctaggtcgcagatgcacttcccgaggcacatgcgggcgcaacaaggtaactgcgtccaggcgtggaaccccagtcctgagcgatgtgaaaccaaccccaagcggctgtgctcacagtttgggaaaaggacagattcgggtaccgcaaaaccgccagcacagaagggaggagagctgggacggacaggctactcccggggaggggtcacctccacgttcccgctccaagcggctggtagctgctagtaattcagcttctggcctcggaggaagagtgccagggaagaaagagactaagaaatctcaaacgcccgtagaacaagacccgggagaagtgcccaagtgggcgcggcgtcggcgaggcgaaagcagcaccggggcgggttatgggccgcgtccacgtgttaggccacgccgcaggcactccaaggtccgcatcaatagcacccagggggctggcgggagtgagagctccggcagccccgcggcagatgagtcctccgctggtgacggggtcggaggggcatccctggaagcccgccccagtctggaggagaaaggggcgtccaagcttcctgataaagctctgggacttcgaaactgcggctatttttttttttcgcagtcccaaattattagggagcaacccttggagcattccctgcagatccaatccctacctgaacccccaatgaggggccgccccccatcccacactcgttcctcttccccttcgccttcggcttgggcgctactgagccggcgtccaggttggagcagtcgccagaacctgatctag

SEQ ID NO: 114831 - DNA, 282 bp, Homo sapiens
gtgcccacaccaccactgctccatatgggaaagcaggacagccagagggctgtgcgacatcaggcaagtcactgcccctatctctattcccaagctatcatcagaaatgattgtagaagcgaccccacctaccgtccatgctgctgtgaggatgaaacgagaggaattaagaaaaagttgatgactgatcttctgaaggaatgcatgcagagaagtaagaacaacaaggactgtgcaaagattgggctgatgtgcacagtcaaacagcaggcaacgggatag

SEQ ID NO: 114832 - DNA, 65 bp, Homo sapiens
gtaatgacagtagtgggaaacacatcaaacatgctgatatctatgagaggtaatgatgcttaaga

SEQ ID NO: 114833 - DNA, 1041 bp, Homo sapiens
  misc_feature (1)...(1041): n = a,t,c or g
atcctcaaggnacctctgggaaaaaaacaaactgcattttgcaaagttttccccattttcccccggaaaatgttatgcctcctaatcaaacctggtgcctcaagctgccagggaaagtgtttgtggtgtcccaagcaagtggctgctgccccagagagagaaactacttgcacctcccattcactcaatccccatcccacatcttttccccagggtaccccaggctcataaactccagcagatctccacccaggcatgctggggtctatgttataaaaggcagcatgtggtagaaaggggctaaaatgagagttagcaggcttcagttgagtccatctctgccacttccaagtcgggtaactgggtaagctagttgacgctaaaaccctggcaacataatgcagggtgcaggtgaagaacaaatgcaatggagctcaacaaagggctttgtgagctcgagagcatcaattcgatgtcaccccctccctgactagcatgtgggctccccaggttggagcccctttccctctcccctgcatgtccatcgcaggcttcaatgtgtctggcaggcagaaaacaactgctgcacacggagggccttatcagacacaggacagggaccacagtattagcactcaagtgctcatagcctttcccccaccaagcccatccattctgtgcactgttggccccaggggagacaaggtaattttctcccttcctggtcatcttggggcccagaccaccagctggagaaatgatgcagagagagcagatgctcctgcctatcaagatgtcactgagctcacactgccagagcctgagcttcctgagagcagctggagaaacacctacccctgtggccagaccctgagccctcacgctcaaagctccctgaggatagctggggagctgggggagcactgctctctcctgagtttagacccttccagtatggacttctgtggacctgcattcctccctgacgctcctgactgcttacacagtaccttcctgtttgtgactttcttcaaagcctga

SEQ ID NO: 114834 - DNA, 477 bp, Homo sapiens
ctggagtgttctttctacttgcttcagactatctgcttgctcacctctccactatgtacacgtaacttactgtgagcgcccaggcagtctggctactacagataagcaccccagcccgggagcactagacgctgaacgcagccgcctgaccagaatgcagacaccagggcagataccattctgaagctgtggactcttccctttctggggaaatcagtgagttgatattttctatgttgccacagggagctctttctggcaaaggaaacggaaagaaaacgcaggatctcctcaccaaagcacagaatggggaaaaacaccaaagcctgggcagttgggcagttaggtacaaatctaccaagtgagcagacttaactaaaagggattgtgatgatctactccaacaatttcatttttaaaattaggaaacgaggccgggcatgatgacttacatctgtactcccgacactttgggag

SEQ ID NO: 114835 - DNA, 669 bp, Homo sapiens
atggagcccttccaccctctgcccagcttccaagcccaggccctgagacccacactgctgtttgtttcggcacctgcaagcagcttgttcacaagcatccagactacagagcaagaggagtttcagaagggccctccacaaggagctctttctggcaaaggaaacggaaagaaaacgcaggatctcctcaccaaagcacagaatggggaaaaacaccaaagcctgggcagttgggcagttaggtacaaatctaccaactgttggcaaatagggtaccaaagcttgaaactcttccagattagttcaagtgggcttacaaagaagttcaagtggacctgcagagtagtgggtcttatctccaagcccgagctgacctttccttccccatttaccaaagatctcacagctgcttctaaccaggcaatagctctctccacaccgtgctttgaaaaaggaacaaaacagttcctttttcaggtcaacccagttttaactccagtcccctcaggtttcttcccggagcggctgttcccgggcgcgcggtggtgttggtggggcagagctgaagtcgctttagaggctcagtcggcgctggggtctgtcaccgaacacgttggttttcgctccctcttccgcttttcctgcctctccaacccggtatcagtttga

SEQ ID NO: 114836 - DNA, 463 bp, Homo sapiens
gggctgggtctatgtaatgtatactgataagcagcacagagtggagcacataggatagcatagatgccatttttctcacagatagtttgccgacctcttcctagagttacgtttttcttgttcctgagacaataatgtggctgtaagtactaatagagacagtggcatttgtgggttgcttatgatctgccagcccctgcgttaagtgttctctgtgtctgtttcagatgggtccgctgtgtgcagaggctccatgggatgtgttgtcttcatagtagcaggtcgctggaccatgggtccgcaaggtgggattttgggactgttgtctgggaatatgtttctttgcatcctgcagagtcatgtgctgttcctgggggcttggatggatgtagggggaagcaaggtgaaaagtggtattcccgtggttccacatttctgtcccgctgtgggggctgtccctcac

SEQ ID NO: 114837 - DNA, 824 bp, Homo sapiens
gtactgagtacagtggtgaatcaaagacagatgcctttggacccttgcagaaagaagtccaaactaagcacagtcccctcatcgtagtaacagctcctatcatggaaaattggccattcctacagattaataatgaatcagtgaccaaggaacatcttcagaacaaacagaaaagcaaagcaatccttcgccgtccctcgccgtccttcgccatcgcacgccaccgcaccccatctctcgaaatctgcagacatcttgatttttcccacgctgtctgtcaggtctccgccgccactcgacgccagggcgccgggccttgtgggctgtgctgcacctcggacggcttcgcaccagccagcgccctctctctcctgcagcactctgatctgcaccccctgaggggcttccactgtccgcggggtgagaatgcccctgggattgtcattgtgatgtcagcgaccaaagccagagatgggtccgctgtgtgcagaggctccatgggatgtgttgtcttcatagtagcaggtcgctggaccatgggtccgcaaggcaccatcagtaatgtcgaacaaatggagaaagttgcagagggaggaatctacacatgtcccaggggccatggtgaaaaggtgcagttaatctccccacttgaagttaaaaccaccttggctggagttggggcaaaaatcacgctgaaatacgtgctgtcatggccggagatggccatcaagatgtctcctagctcatccaggcaggtctgctctcaggttccactgggagaatgtaacagtgttctggagcttgatcatctcccatcctggtga

SEQ ID NO: 114838 - DNA, 465 bp, Homo sapiens
atgccttctcctgaagatgaggatctattacctgggcctggagaggaggagaatcctcttttcaccagggccacactctccccagtgatattagaaatgaaactctgggactatctttactaccatcacccccagcctacaaaggacaataccctgacacttcttagtgatgcaggtccctctcaccatcaagttcctgaggctctggtggaagcccagttcatcttgatcctctcctcactagcccaggtctccccaaggtcagggctcatagagcagcaggagttgggttccgggacgcgggatccggcttctctgggaatcttggattccaggaaggatcctggagatctcccactttatgaagcccaatctccactcactgtgatggcgtctttagaccccactggaaaccagatacgacgccctcatcggccctggggaaaaaacaagagcaaagtatga

SEQ ID NO: 114839 - DNA, 801 bp, Homo sapiens
cctcagcgtcctgctatccggctgcccgccgcgctccttggtagtgtccgtgggcgcgcaggctttgaagaacctcctcgtggcgggaccccgagcgcaggagaggtgtcaaagagctggcgcgtctccagagccccgggaggaaggctgtaacggcagccccatcgtagacagggacattcgcatcccgagccctggatctctgaaaaccagcccagaatttggaagctggaaggaactttagatcgtccattctgagtgtctctcttcgctggcgttttcccactgaggttatgtaaacatgaagaggagcctgacaagtgtcaagggaaaaaacgacagctaaccacagggtcaggccatgggcaagatatctcagtgttctccgctctcataggtcaggtcacgacccccaggagacctggaggactgaatgctgctgcccccaaggaggaggctgccgtctttatcccaggagggagagcaggtgaagtccccaggggaggaagcacctagccccattcctgctgagcaggaggtggcaggtaccccagactgggaggtaaggacagcccggggcttcgactgaacgtctccagcgtgggtccaactgagcagccatgggtgctgcagggggctgcttccaccctgcttctcagtgactgcccccaagggggccctggccacccttctgactgactcggtgccaggggacagaccaacgtccctctcgtgctgacagccgggccgcaccctggcatgagggcatttacagaaatgctggcggaactgctgccaggg

SEQ ID NO: 114840 - DNA, 402 bp, Homo sapiens
ccaaaaagtagcagaaaatatgtgagcatggatctcagccattttgcgggttggctgcaactgggacttaacctgccataaccttagatcagcctgccacacccaaggagggcctgcccccagacccagactcaagtttagacacagcctaaacgtgtacctctaaatctgcacaaactcagctgcccagatactggatttccttatctcttccgggaaatgcaagatgaaattgccctcctgttgggtattttcctgatcctttattctgaaaaagtggtcatccttttccccacaggccctgtgacctccctcctgtcttgcagctcctcctggcaccagtccccagggctctcctgttggtagttcctgcttttcttcttggaaattcctcgtggaccg

SEQ ID NO: 114841 - DNA, 664 bp, Homo sapiens
  misc_feature (1)...(664): n = a,t,c or g
gtgagttgtccattgtctggcatctgtgaagataagcnnnnnnnnnnnnnnnnnnnnnnnnnnnnnnnnnnnnnnnnnnnnnnnnnnnnnnnnnnnnnnnnnnnnnnnnnnnnnaagaagaaaagcaggaactaccaacaggagagccctggggactggtgccaggaggagctgcaagacaggagggaggtcacagggcctggggagtcactgctcatggagcggggcttctctggcttcatgactcacacatccaagcagctctgcctgtggggagcttccgtctgcaggcgcagcaactcagccgtgagaagcgcgccacctttccaccatggcagtttccaccgagacgtctatccacggcatcgcctgtccaccctacccctccctgctctcgacggcagaggactcgctgttccgagtggcagctttagaatcacgcagtaaccgcaggaagtagagagcacagcacagtcatcattttcctggagtggggtccgaaatacagagtccggccgctggctcgctgctgtctgccatgaagccgctcaaccaaggtggtaagtttcctcaagagaaatggacacaaagccatcgagtcagcatcacctgtgtgcctagtaacaattactaggctggccccagacctagaaactagtgtatc

SEQ ID NO: 114842 - DNA, 489 bp, Homo sapiens
  misc_feature (1)...(489): n = a,t,c or g
aggagtgcccagggtgtcncncaaacgaccgctttcggaattgcgtcgaggnttcgcggcgctcgccgcactggttgttcagcaccttcggtccggttgaggttgtcaagtcggaccaaacaggttgtttctctgcagtttccaacatggcagggaggtttaatagacatggataagaagtccactcacagaaatcctgaagatgccagggctggcaaatatgaaggtaaacacaaacgaaagaaaagaagaaagcaaaaccaaaaccagcaccgatcccgacatagatcagtgacgtctttttcttcagatgatcctatgtttccttcttcctcatcatcgtcttcaggaagccagacagattcaagtattgaagatgctgccaagggaaaaattaagaagaagagaagagagaaaacaaataaatgggaaaaaagaaagagggactgaaactgggctgacccttttgatttccaagctcagcgtntt

SEQ ID NO: 114843 - DNA, 1173 bp, Homo sapiens
atggataagaagtccactcacagaaatcctgaagatgccagggctggcaaatatgaaggtaaacacaaacgaaagaaaagaagaaagcaaaaccaaaaccagcaccgatcccgacatagatcagtgacgtctttttcttcagatgatcctatgtttccttcttcctcatcatcgtcttcaggaagccagacagattcaagtattgaagtgcatgagggaacccgattccctttggtaggtgcggtgaaacatcaatcggcttggtccacagataagcgtgttcaactccccgacgagtggttgtttggcaagcagaaagaagttaagatgccttcaatttatcttccaggaaaagagctaaggacactggtgaaaggaaccctggagaacctgccgctgccttctggcaatttccagcagccagcatggggtcttacacagggagagtctggaatttggccagggcccagggatcggaacaccacctcgatggcctccagagccttcaagacctctttccagaacttaatcggacccactgaagagccttctgggggagcagctggcactggggacagaaatagcaccagcagaaatcttgtttctgccaaagcctccagtcctggccagagttgcgggaagagccctgctgagatggtgctggagacgcttatgatggagctgacggggcagatgcgagaggctgagaggcagcagcgggagcgcagcaatgcggtcagaaaggtctgcaccggtgtggactacagctggctggccagcacaccccggtccacctatgacctcagccccattgagcggttgcagctggaagatgtctgcgttaagatccacccatcctattgtgggcctgctatcctcaggttccggcagctgctggcggagcaggagcccgaggtgcaggaggtgtcccagctcttccgctcggtgctgcaggaggtcctggagaggatgaagcaggaagaggaggcccacaagctgacgcgccagtggagcctgcggccccgcggcagcctggccaccttcaagacccgcgcgcgcatctcgcccttcgccagcgacatcaggaccatctccgaggacgtggagcgggacacaccgccgccactgcggtcctggagcatgcccgaattccgggcgcccaaagccgactga

SEQ ID NO: 114844 - DNA, 714 bp, Homo sapiens
  misc_feature (1)...(714): n = a,t,c or g
tttttttttttttttttaatttccaaactctttattatgtggtttacagagcatctgaagattggtttcatgagtctgaacttagtgtgaaagatgttcaaattcaaatccccaagccagcgcatcaatgtttttgtaggcttcacagtgctgggctccgcatccttctttggccgccttacaccaaaacgctgagtttggaaatcaaaagggtcagcccagtttcagtccctcttggaaaggtgacatatgngggggttgtttcctcctttttttccttctcttttctttggggggtttcatattttggcctttcttttttcccatttatttgttttctctcttctcttcttcttaatttttccctttggcagcatcttcaatacttgaatctgtctggcttcctgaagacgatgatgaggaagaaggaaacataggatcatctgaagaaaaagacgtcactgatctatgtcgggatcggtgctggttttggttttgctttcttcttttctttcgtttgtgtttaccttcatatttgccagccctggcatcttcaggatttctgtgagtggacttcttatccatgtctattaaacctccctgccatgttggaaactgcagagaaacaacctgtttggtccgacttgacaacctcaaccggaccgaaggtgctgaacaaccagtgcggcgagcgccgcgaaacgnacgcgtagg

SEQ ID NO: 114845 - DNA, 516 bp, Homo sapiens
tttttttttttttttttaatttccaaactctttattatgtggtttacagagcatctgaagattggtttcatgagtctgaacttagtgtgaaagatgttcaaattcaaatccccaagccagcgcatcaatgtttttgtaggcttcacagtgctgggctccgcatccttctttggccgccttacaccaaaacgctgagtttggaaatcaaaagggtcagcccagtttcagtccctcttggaaaggtgacatatgtggttgtttcctcctttttttccttctctttttcttggtgtttcatattttgtccactcgtcggggagttgaacacgcttatctgtggaccaagccgattgatgtttcaccgcacctaccaaagggaatcgggttccctcatgcacttaggaaaaaagaaagaccacgtgggcgccagatatcgggggacctgccccgataatcatgtaggttcttttctattttcctaagcgtcggctggcttgagaaataaagggacagagt

SEQ ID NO: 114846 - DNA, 738 bp, Homo sapiens
atacacaagagtatgttcccttaatgaacactttggaaatgtcttgacaccctgtactgttttgcctgtgaaattgtattctgatgccaggaatgttctatcaggcataattgattcttatgaaaacttaaaagaatttaaaggtgacctcattaaagtacttgtgtggatacttgttcaatactgctccaaaaggcctggcatgaaagagaatgttcacaacactgaaaataaagggaaagcacctctaatgttgcctgcttttgaacactttgccacctcccaaatccccagaagacatagacagtttaaattcagaaacttttaatgactggtctgatgataatatttttgatgatgagccaactattcaaaaaagtaattagaaggaaaaacattcagttggaaagatttgccagggtacaaattttgtttattccaggatcagtaggattcacagaggggttggtgattcattctacaggcactgttcctgaaaacgatctttacaaagcagttctattaggataccctgctgttgacaaaggaaaacaagaggacatgccatatattcctctcatggagttcagttgttcacattctcacttagtatgcttacccgcagagtggaggactagctgtatgcccagttccaaaatgaaggagatgagctcgtttttccagaagactggtaccaatttgttctaaggcaggtgaatgtttcattcaaaagagaaa

SEQ ID NO: 114847 - DNA, 837 bp, Homo sapiens
  misc_feature (1)...(837): n = a,t,c or g
atgaaagagaatgttcacaacactgaaaataaagggaaagcacctctaatgttgcctgctttgaacactttgccacctcccaaatccccagaagacatagacagtttaaattcagaaacttttaatgactggtctgatgataatatttttgatgatgagccaactatcaaaaaagtaatagaagaaaaacatcagttgaaagatttgccanggtatactctgaaactaatgattgataaagcaagtttaggtccaatagaagactttagagaactgattaagtaccttgaagaatatgaacgtgactggtacattggtttgctgcctctcaaaaaagaagccatcattgtttctaacagtctaagtataagtgagtgtcccagaattgaatttttacagcaaaagcacaaagatgagaagaaaatctctcttaagcatgagctcttcagacatggcatcctcctcattacaaaagttttccttggccagagtgttcaggcccatgaaaaagaatccatcagtcaatccaactatccaatggttaattcagtgttcattcctcggaaatatttactaaattctgtcatgggacaaagaaactgtgattgcagtgttcggcagtgcaagtggtttgtctttgatcatgaccttgttttgccggaatatgttgttgaatttgagtatattacaatgagtctgaatctacatggaaacagcttgagtaaattgagagatctctccaagttaacaggacttcgaaaactaaacattagctttaatgaatttacctgtttagatgatgtataccacttggcccaagcccttttaagtaagtag

SEQ ID NO: 114848 - DNA, 710 bp, Homo sapiens
gtgtttaaagaacatggttggtgcgggagaggtggatgaagacttggaagttgaaaccaaggaagaatgtgaaaaatatggcaaagttggaaaatgtgtgatatttgaaattcctggtgcccctgatgatgaagcagtacggatatttttagaatttgagagagttgaatcagcaattaaaggttagtggtacagctaaatattaaagaataaaaaagttgaatttacagccttaatctttacaagtaaagcgtactgtttaattaaagttaaacctttatcttataggatacctgcattattctgtcttttgtttgcctttcagcggttgttgactttgaatgggaggtattttggtggacggggtggtaaaagcatgtttctacaatttggacaaattcagggtcttggatttggcagaacaagtttgattttaagaactagagcacgagtcatctccggtgatccttaaatgaactgcaggctgagaaaagaaggaaaaaggtcacagcctccatggctgttggcatacccagactcttggaaggacttctaagatatatgttgattgatcccttttttattttgtggttttttaatatagtataaaaatccttttaaaaaaacaacaatctgtgtgcctctctggttgtttctcttttttattattactcctgagttgatgacattttttgttagatttcatggta

SEQ ID NO: 114849 - DNA, 2081 bp, Homo sapiens
aagactatgcttgaatctctgaaaacaaatgctagattcatgatttctatacccacatactccataaatccatcacaaaccctacagtctgatttagcctacggcaaatgattcatccaataggccatggtatggttccaccaattcttccaatcttattcaggttgtaaagacgtttttctacgactggagtcactaagaatttctctgttagagaaagcatcattttcacctttggcacactgccaagatgatactttactacagaatttatgaaactacaatttagtaacttgcaggctttattaaaaaaaaaaaaaaaacaaagaataatttaatataaccccatgtcccaaaactttctagttttttttttttttttttttagtgcaagaaatgctgcatcattgaagcacttgagaattaccatgaaatctaacaaaaaatgtcatcaactcaggagtaataataaaaaaagagaaacaaccagagaggcacacagattgtctgttttttctaaaaggattcttatactatattaaaaaaccacaaaataaaaaaagggatcaatcaacatatatcttagaagtccttccaagagtcttgggtatgcaaacagccatggaggctgtggacctttttccttcttttctacagcctgcagttcatttaagggatcaccggagatgactcggtgctcctagttcttaaaatcaaacttggttcctggccaaatccaagaccctgaatttggcccaaatttgtagaaacattgctttttaccacccggtgcaccaaaaatacctcccatttcaaggcaacaaccgctttaattgctgagttcaactcttctcaaatttctaaaaaatatcccgtactggcttccatcatcagggggcacccaggaatttcaaataatcacacattttccaactttggccatattttttcacattcttccctgggtttcaacttccacagtcttcatccacctctcccgcaccaaccatgttccttagtaagaccactttagtaggacacttaagtatttcagtcaggcggatttgaatctgacttcttggatgcatctttctctgtggcgtcgcccacgatgatcttgccgccacgcttgtatcgtcttctccactgacaaggcagtgctcaggccctgctcatgcttccccaagaccctgggccctcccggaagcccgtactttctgcatgatcttgtgcgccaccgtgccccccatgttagcgaggaaggagttgcttaggtccgggttggagatctcgggtctgtcttgttcctcggtacactgggggaggaatggctgcttttggaagactgtgatcgaggtcttgagtcctcttcataaggaaaatctcggggtaactctttgtctttctctaccagagaagtgggtggggcaatggcagctccgcccatacttcttttcctcctctcttcgctcataatcttcatcttcatcagaatctggatctggtctccttgcaaacccacttgcttcatgtctgtctttacgcctttttttccctttcttctatttccttttgtctttccagctcccgctgtctctgtcgttcctctctttggcgcttcacttcctttctaataatcattaggaaacataaggtcatattcgtcagataagggaatcagaacttcccctgcagaaaacccactgggaacaggatccttcagcccagctgctaccatgcggtggaagtgtccacaatttgccggtcatctgaggagccacctcgcttcaggtcaatgactggggcgaggactgtactttgtttcgtcctttggctctttgccctgagtgagagctgccttcttcacctgaagctgagactgcagaagtttgaagtttttggaccagccttctgtttttgagtcactggtctccactcttaggtcatcgtacagggacatcttttcttcagtttaatgccggcccgcccggccgactctgcccatgagccgcgccggcggcagagcggagccgggcggctctccgcgtaaacccgccagcggcaagaggcctcgaaggcgc

SEQ ID NO: 114850 - DNA, 379 bp, Homo sapiens
agatgatgtgcctttgtggcagaaccaagcctcagtataaacaaagaagagggtcctcagccacgctccctcgttgcctgttgtctctctctgttagtgtgtacttctacggatggactttctttactgaggataaactgggtgctcccgttgcttctgcacagctccagggcctgttggtacccatggatcttgcaggtggaaaaccaagccgcagttacagggtgggcaatacatctgttttaattgcttttctagtttttctttctccatctgacaagcttttatctgggaattcagcctgttcaactgggattgggaagtttcattaatttgctgtagctcctctttctcttgattaagtctctctcgatccgat

SEQ ID NO: 114851 - DNA, 1138 bp, Homo sapiens
gagttatatgaaagaaaggtagcagagctgaagacgaaactggacgccgcggaaagattcctcagcacgcgggagaaggatccgcatcagaggcagagaaaggacgacaggcagagagaggacgacaggcagcgcgacctgacccgggaccggctgcagcgggaggagaaggaaaaggaacgcctaaatgaagaattacatgaattgaaagaagagaataaacttttaaagggaaaaaatactcttgcgaacaaggaaaaggaacattacgaatgtgaaataaaacgcctcaataaggctcttcaggatgccttgaatatcaagtgttcattttccgaggactgtttgaggaagtctcgagtggaattctgccatgaggagatgagaacagaaatggaagttctgaagcagcaggtgcaaatatacgaagaagacttcaaaaaggaacgatcggatcgagagagacttaatcaagagaaagaggagctacagcaaattaatgaaacttcccaatcccagttgaacaggctgaattcccagataaaagcttgtcagatggagaaagaaaaactagaaaagcaattaaaacagatgtattgcccaccctgtaactgcggcttggttttccacctgcaagatccatgggtaccaacaggccctggagctgtgcagaagcaacgggagcacccaccagactatcagtggtatgctcttgaccagcttccgccagatgtacaacacaaggcaaatgatggtgtcttgctccacctccagtctgttgccaggctggtctcgaactcctggcctcaagtgatcctcctgcctctggctcccaaagtgctgaaatttcaggtttatcctcagtaaagaaagtccatccgtagaagtacacactaacagagagagacaacaggcaacgagggagcgtggctgaggaccctcttctttgtttatactgaggcttgtttctgccacaaaggcacatcatctaccctgttatttgtgcctggtcatgttttcctttggtatgaatacaggaaaaggcttctgacagctaagatcctgatcaaattggaggagccagttattatacaaccaaatacaacttccagtttccttgaaaaaaaaaaaaaaaaaa

SEQ ID NO: 114852 - DNA, 2406 bp, Homo sapiens
atgaagatgcaagtaactcggttcctggtcattaaagatagtgtggcttcctgcttgcactctcctttgccctctgttacatcgctcactctggggaaagctggctgccacctcgtgagcagcagtccatgtagtgagaaactgagtgctcctgctcacatcccttgttgcgattataggtatgaaccaccatgcctgacatgtgttggttacttctatggtcaactgatgctccatccagcaggaccttctgaggagccttatgtaatgaatgtcagaattgtccctctagaagatccaagggggaagcatttccagcagccccatccttcatttgtcaagtatgctctatcagtgttaactcttcagtacttccaggttacacgtggatgtgccaaggtggcagccatagagacaactacctttgaagaaagagttttattactcacagttcccaagtggaggggcatgccatgccatacaaggccacacacagggaagcaccagcttcgatcagaaggcagaaacaatgagcagaaagtatgggcaaagggcttttattgtggttttggggggaaaggaaaagtcgaggcaagacacacgcagaaaactatgagagtgtcagacatagaagccaccatcacccttagcccaggacctggaggaggtgcactgagggaattatcagagggcgctctcctctttaggggtgtgaaaaacagtaactctgtttgtttggctctagtagccccttctaacttggttttcatggggtttatgtggtccagaatagaggcagctcctcttccaaacaccaggtggtgtctgccacatggctactcaggtcctgcgaactctggtggctgctactacatcactacagggatgtcctgctggctctcagatctctatccaagacatgatggtgtccatgttggactccaaggcaaggacctggagcatgacattccagtggacctagggtccaggcccacctctgtggacccagtttccaggtctgccccagggccccagggccccaaggctccagtggactcagggtccaggaccactccagcaaaccctggtgctggaccatcccctgtagacccaagctcccggccagcccctgtggcttcaggctttagactcatcatgatagaccaaaacaccaagctaattccagtgccaggttggcccctgcgactcaggctcaagatctacctcagcagtaggtcagcctctttggactcaggctccaggtttgcccctgtggacacaaattttatacctgtccccacagaccgaggccatagccatgcccctgaagacccagttgacaggctaacctcagtggacccaacaaaggaaaaaaactggatggagaatgagtttgacaagttgacagaagtaggcttcagaaggtcggtaataacaaacttctctgagctaaaggagcatgttctaacccatcgcaaggaagctaaaaaccttgaaaaaagaggtgtggaatgtgatgtggagacattagcaccaaaagctagaacctggagatccaaggccaaggccaagaaaggcgtgatgaaatacgaaaagatgtttccagtggcccttcaagggcaggacaatgaaggagatccaattcaagaaaatgtggactccgagagctggaaaaaatgtaagtttgccatagcttctgaagtcagacccaacaaacaagaacctggggaaggcttcagagtttatgctgaaaacatctctgagttgataattcaatatacagaccctccatggcagtacattccatttctgtggcttaaatttgaagcagtttcaaagccagttaatataatagaagggtgtagtgtgagtgtggagaggagtgtctggatgttaggtgagagggtggatgtggtcgtaggtggaagagtgtattgtggtggtgatgacattgtggtgttgtatgggtgtgagtttgggtcgatgtgtgtggtgtatggtggtgggagagaaaccagttacaacacagatatgaagggaaagttgggcaggggttggggagagtctcagaaaggaaaagagaacacaaacgggagatgtgagacatggggagcttatgcctcagagcttgaggctgctttagagtacaaagggcttgtctgctcatgcctcattttattctggcagcaactccgtgaagtggagggggcatcacctccagtttacacaggaaaacatgaaggcttaaaaaggcgacgttacttgccagtcatacaacaaggcagcaagttcataaccaattttactgtacagaataagcatcaccataagaggcaggaggaagaggatgacaaggatgaaggtggtgtagatcttctggtgcacagggctggtccactcttctaa

SEQ ID NO: 114853 - DNA, 759 bp, Homo sapiens
atgaggaagatgcaaaagcggaaacccctgataaaaccatcagatttcaggagacgtatttactaccacaagagcagtatgggggaaaccacccccatcattcatattatctcccactgggtagctcccataacacatgggaattatgggagtacaattcaagataagatttggataaaagcttgtcagatggagaaagaaaaactagaaaagcaattaaaacagatgtattgcccaccctgtaactgcggcttggttttccacctgcaagatccatgggtaccaacaggccctggagctgtgcagaagcaacgggagcacccatgttgcgattataggtatgaaccaccatgcctgacatgtgttggttacttctatggtcaactgatgctccatccagcaggaccttctgaggagccttatgtaatgaatgtcagaattgtccctctagaagatccaagggggaagcatttccagcagccccatccttcatttgtcaagtatgctctatcagtgttaactcttcagtacttccaggttacacgtggatgtgaaagcatggagctggacaaaaaaatccaggatctgattgagagaaatgcgtctcctcatccaaaacggttcaccccagaggccatgccaactcacagaaatctatgttctctgaagccacttcctgttactaaagaaattcttcagcagaagaatttgctggcactttccactttaaagtgtccaggcagctgtgactacaagaag

SEQ ID NO: 114854 - DNA, 351 bp, Homo sapiens
atgagcacccatgacatggtctctgctgaacaaagcaaaaggattgatttagagaaagatggcctattgaatgtggattcttccatgttgctggcctggaaactgataaacagaagcccacaaatgaaagcctctcagaataccatcatccgctgtcacaatgcaattaccgaacagaatgatagcaagatagaggctcccgcaaatggaatgataaaagttgctatttctgcagatgtcaaagaagttctgttaactgatgggaatgaaaaggccatcagaagtatccttattcagatagaaaacgggtttgttgtgctcattcctttttcctggctgagtaacaattga

SEQ ID NO: 114855 - DNA, 508 bp, Homo sapiens
cgttacgccccacaattcccgggtcgacgatttcgttggggacaaccagaaagtttcaagcgacaggctcgcgcccggctggagaggaggacgcgggcggcccggagcggcccggggacgtggtgaacgtggtgttcgtagaccgctcaggccagcggatcccagtgagtggcagagtcggggacaatgttcttcacctggcccagcgccacggtgtggacctggaaggggcctgtgaagcctccctggcctgctccacctgccatgtgtatgtgagtgaagaccacctggatctcctgcctcctcccgaggagagggaagacgacatgctagacatggcccccctcctccaggagaaactcgcggctgggctgccagattgtgctgacaccggagcttggaaggaagcggaattcacccttgcccaagatcaccaggaactttctacgtggatggccatgtccccaagccccactgacatgaacacctggaccattccacattgcca

SEQ ID NO: 114856 - DNA, 2966 bp, Homo sapiens
ggaattcctcagagttgcaacctcagcctcgctatggctcccagcagcccccggcccgcgctgcccgcactcctggtcctgctcggggctctgttgccaggacctggcaatgcccagacatctgtgtccccctcaaaagtcatcctgccccggggaggctccgtgctggtgacatgcagcacctcctgtgaccagcccaagttgttgggcatagagaccccgttgcctaaaaaggagttgctcctgcctgggaacaaccggaaggtgtatgaactgagcaatgtgcaagaagatagccaaccaatgtgctattcaaactgccctgatgggcagtcaacagctaaaaccttcctcaccgtgtactggactccagaacgggtggaactggcacccctcccctcttggcagccagtgggcaagaaccttaccctacgctgccaggtggtagggtggggcaccccgggccaacctcaccgtggtgctgctccgtggggagaaggagctgaaacgggagccagctgtgggggagcccgctgaggtcacgaccacggtgctggtgaggagagatcaccatggagccaatttctcgtgccgcactgaactggacctgcggccccaagggctggagctgtttgagaacacctcggccccctaccagctccagacctttgtcctgccagcgactcccccacaacttgtcagcccccgggtcctagaggtggacacgcaggggaccgtggtctgttccctggacgggctgttcccagtctcggaggcccaggtccacctggcactgggggaccagaggttgaaccccacagtcacctatggcaacgactccttctcggccaaggcctcagtcagtgtgaccgcagaggacgagggcacccagcggctgacgtgtgcagtaatactggggaaccagagccaggagacactgcagacagtgaccatctacagctttccggcgcccaacgtgattctgacgaagccagaggtctcagaagggaccgaggtgacagtgaagtgtgaggcccaccctagagccaaggtgacgctgaatggggttccagcccagccactgggcccgagggcccagctcctgctgaaggccaccccagaggacaacgggcgcagcttctcctgctctgcaaccctggaggtggccggccagcttatacacaagaaccagacccgggagcttcgtgtcctgtatggcccccgactggacgagagggattgtccgggaaactggacgtggccagaaaattcccagcagactccaatgtgccaggcttgggggaacccattgcccgagctcaagtgtctaaaggatggcactttcccactgcccatcggggaatcagtgactgtcactcgagatcttgagggcacctacctctgtcgggccaggagcactcaaggggaggtcacccgcgaggtgaccgtgaatgtgctctccccccggtatgagattgtcatcatcactgtggtagcagccgcagtcataatgggcactgcaggcctcagcacgtacctctataaccgccagcggaagatcaagaaatacagactacaacaggcccaaaaagggacccccatgaaaccgaacacacaagccacgcctccctgaacctatcccgggacagggcctcttcctcggccttcccatattggtggcagtggtgccacactgaacagagtggaagacatatgccatgcagctacacctaccggccctgggacgccggaggacagggcattgtcctcagtcagatacaacagcatttggggccatggtacctgcacacctaaaacactaggccacgcatctgatctgtagtcacatgactaagccaagaggaaggagcaagactcaagacatgattgatggatgttaaagtctagcctgatgagaggggaagtggtgggggagacatagccccaccatgaggacatacaactgggaaatactgaaacttgctgcctattgggtatgctgaggccccacagacttacagaagaagtggccctccatagacatgtgtagcatcaaaacacaaaggcccacacttcctgacggatgccagcttgggcactgctgtctactgaccccaacccttgatgatatgtatttattcatttgttattttaccagctatttattgagtgtcttttatgtaggctaaatgaacataggtctctggcctcacggagctcccagtccatgtcacattcaaggtcaccaggtacagttgtacaggttgtacactgcaggagagtgcctggcaaaaagatcaaatggggctgggacttctcattggccaacctgcctttccccagaaggagtgatttttctatcggcacaaaagcactatatggactggtaatggttcacaggttcagagattacccagtgaggccttattcctcccttccccccaaaactgacacctttgttagccacctccccacccacatacatttctgccagtgttcacaatgacactcagcggtcatgtctggacatgagtgcccagggaatatgcccaagctatgccttgtcctcttgtcctgtttgcatttcactgggagcttgcactattgcagctccagtttcctgcagtgatcagggtcctgcaagcagtggggaagggggccaaggtattggaggactccctcccagctttggaagcctcatccgcgtgtgtgtgtgtgtgtgtatgtgtagacaagctctcgctctgtcacccaggctggagtgcagtggtgcaatcatggttcactgcagtcttgaccttttgggctcaagtgatcctcccacctcagcctcctgagtagctgggaccataggctcacaacaccacacctggcaaatttgattttttttttttttttcagagacggggtctcgcaacattgcccagacttcctttgtgttagttaataaagctttctcaactgcc

SEQ ID NO: 114857 - DNA, 994 bp, Homo sapiens
atgcaagcatttgagtctactgtgctccaagctgcagatacagtgaatacggcagacacgctctggtcaaaagcagtcctccaaaactccaatgcctacagtgaagcaatctggtgtaaagaaatgtggaacccaggagttgcaacctcagcctcgctatggccccagcagcccccggcccgcgctgcccgcactcctggtcctgctcggggtctgttcccaggaggaactgcctgggaagtgtcgagatggatcccaactttctcatcatcgccccagcgctgggggaaggggcccaggctacagagaagcttcccagatgctgatcttggcaggcatcaggaactgcggcagcctcatctcctccatgggctcagggcccactttcagctcagtgacgggaaaggccccggaaacagctgaacccctgccggggcaccgagagagtggacctgggttcgagggggtgactctgaagtttcagataaagccggactccagctgcagatcatccccacgtacaggtccaccccgggcgctgggccaggtgaagaacattgtccccgactctgccactcactggatccgctggcctgagcggtctacgaacaccacgttcaccctggggacagtggaagtgcgaatgccgaactggatgatgggctcagggcccggccggggcgagcctggaaaacacggttcggtgagcggctgcgccgagccccgcccgccggcatctgacggattaacgctgcccgccccgggcgccccaggaaggcccttcctctgtcagaatggccaccatggtaccatccgtgttgtggcccaggcctgctggactctgctggtctgctgtctgctgaccccagaccccactgggcggccagaaacgcactttgcccacctgctgccctcgcccgagcccagcccagaaggcagctattgggccagcactcccagggcctcggcggccactacgcggactcctacctaa

SEQ ID NO: 114858 - DNA, 1761 bp, Homo sapiens
cttcgggcacctcaggaaggcaccttcctctgtcagaatgactaccatggtaccatccgtgttgtgggcccagggcctgctggactctgctggtctgctgtctgctgaccccaggtgtccaggggcaggagttccttttgcgggtggagccccagaaccctgtgctctctgctggagggtccctgtttgtgaactgcagtactgattgtcccagctttgagaaaatcgccttggagacgtccctatcaaaggagctggtggccagtggcatgggctgggcagccttcaatctcagcaacgtgactggcaacagtcggatcctctgctcagtgtactgcaatggctcccagataacaggctcctctaacatcaccgtgtacgggctcccggagcgtgtggagctggcacccctgcctccttggcagccggtgggccagaacttcaccctgcgctgccaagtggagggtgggtcgccccggaccagcctcacggtggtgctgcttcgctgggaggaggagctgagccggcagcccgcagtggaggagccagcggaggtcactgccactgtgctggccagcagagacgaccacggagcccctttctcatgccgcacagaactggacatgcagccccaggggctgggactgttcgtgaacacctcagccccccgccagctccgaacctttgtcctgcccgtgacccccccgcgcctcgtggccccccggttcttggaggtggaaacgtcgtggccggtggactgcaccctagacgggctttttccagcctcagaggcccaggtctacctggcgctgggggaccagatgctgaatgcgacagtcatgaaccacggggacacgctaacggccacagccacagccacggcgcgcgcggatcaggagggtgcccgggagatcgtctgcaacgtgaccctagggggcgagagacgggaggcccgggagaacttgacggtctttagcttcctaggacccattgtgaacctcagcgagcccaccgcccatgaggggtccacagtgaccgtgagttgcatggctggggctcgagtccaggtcacgctggacggagttccggccgcggccccggggcagccagctcaacttcagctaaatgctaccgagagtgacgacggacgcagcttcttctgcagtgccactctcgaggtggacggcgagttcttgcacaggaacagtagcgtccagctgcgagtcctgtatggtcccaaaattgaccgagccacatgcccccagcacttgaaatggaaagataaaacgagacacgtgctgcagtgccaagccaggggcaacccgtaccccgagctgcggtgtttgaaggaaggctccagccgggaggtgccggtggggatcccgttcttcgtcaacgtaacacataatggtacttatcagtgccaagcgtccagctcacgaggcaaatacaccctggtcgtggtgatggacattgaggctgggagctcccactttgtccccgtcttcgtggcggtgttactgaccctgggcgtggtgactatcgtactggccttaatgtacgtcttcagggagcaccaacggagcggcagttaccatgttagggaggagagcacctatctgcccctcacgtctatgcagccgacagaagcaatgggggaagaaccgtccagagctgagtgacgctgggatccgggatcaaagttggcgggggcttggctgtgccctcagattccgcaccaataaagccttcaaactccct

SEQ ID NO: 114859 - DNA, 587 bp, Homo sapiens
agtggctcacgcctgtaatcccagtactttgggaagccgaggcaggtggatcacctgaggtgaggagtttgagaccagcctggccaacatggtgaaaccccgtctttactaaagctacaaaaattagctgggcgtggtgccaggcgcttgtggtcccggctgctcaggaggctgaggcgggagaattgcttgggcctgggaggtggaggttgcagtgagccaagatcgctccattgcactccagcctgggtgacagtgaaactcccatctcaaaaataaaagaataaaagtatgtctgtcatccagctcctatgtctgttatccagctccaagtacagcttgtgtatatcaacattttcaaaaacctttaaactaccaaatgaaatccagatgtttttccatggttgagaagtgtcttgtgttcatgttgcctgtgaccgttgaaatgaagtagtatgtgtaatagcaggggctagagctttaggcccagctgttactccaaaatcacacagggcagtttctccctgaacaacccaaagtggaaaagggatccaaggcttttgctatttttctcttaaactcgtgcc

SEQ ID NO: 114860 - DNA, 1007 bp, Homo sapiens
atgttagcctcagccataagcaacttatactttcgtcaaaagtatctttacgcgttcagtattgttcccatgaagctaatggatgcagcagaactggtaaaacagcctccggatgtcactgaaaacccttacagaaaatctgggcaggaagcatccataggaaagcaaattcttgcccctgtgtgctaccttgccctggccaaaggaggcttatctgatgaccatgtcctcatcctgcctattggacactaccagtcagtggtggagctttcagcagaggtggtagaagaggtggagaagtataaggccactctgagacggttctttaagagtcgagggaaatgctgctctactactgatgacattaaagatgccttcattacccaggcacaggagcagcagatagagctgttggaaatcccagagcactctgacatcaagcagattgcacagccaggagcagcatatttttatgttgaacttgacacaggagaaaagctttttcacaggatttaaaagaaatgttcctttgcagtttggaagggaggtcctggccagtaaagccatcccttaatgttcctgataagtcctgactggaggcagtgtcagatcagcaaggaagacgaggagacgcctgggcttcgccgctttccggaaagactttgagccctatgactttactctggatgactaaaacaaagggaagaactttttatgaactccacaggaagtagtaaagcttttttttttttttttaattaaaagaattttttttgagacggagtctcgctctgtcacccaagcaggattgcagtgagccaagatcgctccattgcaacccaacctgggttgaacagtgaaactccatctcaaaaataaaagaataaaagtatgtctgtcatccagctcctatgtctgttatccagctccaagtacagcttgtgtatatcaacattttcaaaaacctttaaactaccaaatgaaatccagatgtttttccatggtta

SEQ ID NO: 114861 - DNA, 358 bp, Homo sapiens
  misc_feature (1)...(358): n = a,t,c or g
ttttgggggcaggaggtggatctcataaagtacattgtcaaaggtgaggagaattacaaagaaccttcttaagggtgggggagatgataaagaaccttcttaagagtggggcagattacaaagtacattgatcagttagggtggggcagaaacaaatgacaannnnnnnnnnnnnnnnnnnnnnnctgnnnnnnnnnnnnnnnnnnnnnnnnnnnnnnnnnnnnnnnnnnnnnnnnnnnnnnnnnnnnnnnnnnnnnnnnnnnnnnnnnnnnnnnnnnnnnnnnnnnttcctgtcttcttatgttaataagaaaaataaaacaaaatagtggtaaagtgttggggtggcgaaaatttt

SEQ ID NO: 114862 - DNA, 405 bp, Homo sapiens
tgtgtgagcaacgtggctgtttatttcacctgggtgcaggtgggctgagtccgaaaagagagtcagccgagttttatgagttctatataattttgaataatagtcttttgtcagatacatgttttacaagtattttctccaagtctgtggcttgtcttctccttctcttgatctctggggtatctacatttttctcatcacaacaactttattcatgtcagtaaattcatctttacaagtttctctggctgcatatctagagccttttgagccgtgtcagattcccacagtcagctcttttctcgataactctttatattcagtttgaatttcattccaggattatcagtttttgttcctttgctgcactttcatctttgttggggagttccctcttttgattca

SEQ ID NO: 114863 - DNA, 492 bp, Homo sapiens
atgctcatgaagattaggatggtacaagtgatgatctcaagcacgtctgcagagggcttcatggttggtgcaaacataattgccattacctttaatggcaaaaactgcaattatgtttgcagcaacctaataactgatgttgaagtccacaccaattgtgtgtgcaaggcagtgctgattcaaagttctagagctcttcctaccccatcctccttccgagccactctcacagtatcagaaagacgttgctgcctacacctgcgccctcctcctttatccttcagaggcaaggcccgtaataaatctcttgcacatctagtcccatttggagggctgcttctcagaccgcctgaactgacacgctcccctgaccctcctcctcaccctcatccttctactccccctgcttttccaaggttacttcaggccatctgggcgtatacgtgcaagtcacaggggatgcgatggcttggcttgggctcagaggcctga

SEQ ID NO: 114864 - DNA, 516 bp, Homo sapiens
atggtatggagagataatgggcgatgtttctcagggctgcttcaagcgggattcggggtggcatgggaacctagagtggaagagattaaactgaaggaagattctgtgaacgaacactcaggcaatcgaagaaatgttcagattatgagtggctatttccaaagccctgtacatggatttcaaagagctatgccagtgctttcggtaggaagtgaactgaccatcggagaatggggtgatatcaccttcatcacagaaggacgtccagctgctcacgttggcctagagcctcctgcggccagcactgttctgggttctctgcgtgaaccatggtgtggtggtggggacacagaccctgaggacaagcagctgggtctcaacgccagctctgctactcttagtgacgtagccttgggcaagctccttaaacgtttgtgcctttatttcctcatctatgaaatgggaatgaaaatagcacttaccctggaaggttgtgttgaggagcaagtgacttaa

SEQ ID NO: 114865 - DNA, 624 bp, Homo sapiens
atgagttggaagccatttcttgaagtgctcagggaagtgtcacaaggacagccccgagcttatgcagatgaggaaaatgaagttagaatacgtgtccaaatccacaggctgaagactgacactgctcgatcacctcggaagcctacgagaccatcacagatgctatgggtaactctcacagtggagggttcccacgccacccctaatcccactcgaagcagccctgagaaacatcgcccattatttctccataccacccccgaaaatttttaccgtcccaacgctttaccactatttcattttatttttcttattaatataagaagacaggaacgtcaggcctctgagcccaagctaagccatcatatcccctgtgacctgcacaaatggtattgtccagaccccaagacagacatgcctgctcaagggatgccaagcctgactttgaacagcattgacagccaatccctgccacaggcaggaaattctgtggaggagcagcttgtcagcagtttgaaaacccatggagacaccagaaatggaagattgcagtgtcctctggagagtgaaaagggaagcaccccattcctgatgtcagcaggaagccctgcagggccatcctga

SEQ ID NO: 114866 - DNA, 1973 bp, Homo sapiens
gtgtgagcaacgtggctgtttatttcacctgggtgcaggcaggctgagtccgaaaaagagagtcagcaaagggagatggggtggggccgttttataggattagggaaggtaatggaaaattacagtcaaagggggtttgttctctggtgtctggaatgagactggggcctaataaaaaggagcgtctatacaggagcttaaatgggatgtaccttgtagcattctgaggacaggcctgatttctgagaagggaaagtggtaaaagtattgtccagtcctttttaagctggtggctgagcttggtgaggtgtgtttttaaaagaccctttagtccgttctacttttctggatttgaaattggtgagatgtttcttgggctggttggtctgaggacctgaggtcgtaggtggatctttctcatggagcaaagagcaggaggacaggggattgatctcccaagggaggtccccccaatccgagtcatggtaccaaatttcatacgcgtccgtgtgaagagaccaccaaacaggctttgtgtgaggaacacggctgtttatttcacctgggtgcaggcgggctgagtccgaaaagagagtcagcgaagggaagataagggtggggccgttttataggatttgggtaggtaaaggaaaattacagtcaaagggggtttgttctctggcaggcaggagtggggggtcgcaaggtgctcagtgggggtgctttttgagccaggatgagccaggtaaaggactttcacaaggtaacctcatcacttaaagcaaggacccggccatttacacttcttttgtggtggaatgtcatcagttaaggtggggcagggcatattcacttcttttgtgaattcttcagttacttcaggccatctgggcatatacgtgcaagtcacaggggatgcgatggcttggcttggggctcagaggcctgacatttcctgccttcttatattaataagaaaaataaaacaaaatagtgttgaagtgttggggccgcgaaaatttttgggcggtggtatggagagagaatgggtgatgtttctcagggctgcttcaagcgggattaggggcagcgtgggaaccaatttcaaatccgagtcacggcaccaaatttcatgtgcgtctgtgtgaagagaccaccaaacaggctttgtgtgagcaataaagctgtttatttcacctgggtgcaggtgggctgagtccgaaaagagagtcagtgaagggagataggggtggggctgttttataggatttgggtaggtaatggaaaattacagtcaaagggggttgttctctggtgggcaggggtggggggtcacaaggtgctcagtgggggagcttctgagccaggagaaggaaattcgcagggttaatcactcagttaaggtggggcaggaacaaatcacaatagtggaatgtcatcagttaaggcggggcagggctttttcacttcttttgtggatcttcagttacttcaggccatctggatgtatacatgcaagtcacaggggatgcgatggcttggcttgggctcagaggcccttcttctctgaagcaggtcgtaaaacctaagaaagattttctgaccttcccctgaagcaggtcatagacacttatgtgagaggtaccctccttatatctggaggacagtagcatccttatctcatgcgccagccgaagcagggcgaggcattgcctcacttgggaagcgcaaggggtcagggagttccctttccgagtcaaagaaaggggtgacggacagcaccgggaaaatcgggtcactcccacccgaatattgcgcttttcggaccggcttaaaaaacggcgcaccacaagattatatcccgcacctggctcagagggtcctacgcccacgaagtctcgctgattgctagcacagcagtctgagatcaaactgcaaggcggcagcgaggctgggggaggggcgcccgccat

SEQ ID NO: 114867 - DNA, 404 bp, Homo sapiens
  misc_feature (1)...(404): n = a,t,c or g
tctagggggcttccgaggcaatcgggcagcatcggtcttcagccgctaagccgagtaaatctgggaaggagtcagtcagagagccttgggccagagttccaggggctctgggagtggctgccaggtgagttgaacagtggggtcccgatttaaaattggtgagatgttccttgggctggttggtctgaggaccagaggtcgtaagtagatctttctcacggagcaaagagcaggaggacaggggattgatctcccaagggaggtccccacccccccacgcccctgatccgagtcacggcaccaaatttcgggaccaaatttcactcacannnnnnnnnnnnnnnnnnnnnnnnnnnnnnnnnnnnnnnnnnnnnnnnnnnnnnnnnnnnnnnnnnnnnnnnnnn

SEQ ID NO: 114868 - DNA, 410 bp, Homo sapiens
  misc_feature (1)...(410): n = a,t,c or g
tagttngaaaattacagtcaaagggggttgttctctggctggctggggtgggggtcacaaggtgctcagtgggggagcttttgagtcaggatgagccaggagaaggaatttcacaaggtaatgtcaccagttaaggcaggaactggccattttcacttcttttgtgattctttacttgcttcaggccatctggatgtatatatgcaggcttgggctcagagatctgacattcctgtcttcttatattgataagaaaaataaaataaaatagtgttgaagtgttggggcagcaataacttttggggggtggtatggagatataatgggcgatgtttctcagggctgcttcaagcgggattaggggaggcgtgggaacctagagtgggagagattaagctgaaggaagattt

SEQ ID NO: 114869 - DNA, 1059 bp, Homo sapiens
atgtggaaaggccccaaaggattagacatgtatggaaagagctcagtgagccctaagacatcagatatactggggagagacactctcctgctggccttgaaggtgcaaacagtggtgttgcaaactgcctgtggagagggccatgtggcaggaaactgtgggaggcctctagaaactgaaggcagtctccagctgacagctactaagaagctaagggactcagtcctgcaaccaaaaagtcctgaattctgccaacaatttacaagagcttggaataggacccaagttccagatgagactgaagccccagctggcacctatgcagcccaatcgggggacctcccttgggagatcaatcccctgtcctcctgttctttgctccatgagaaagatccacctacggcctcaggtcctcagaccgaccagcccaaggaacatctcaccaattttaaatcgggtttcagaggtgtcagaccacgcagggacgcctgccttggtccttcacccttagcggcaagtcccgcttttctggggaaggggcaagtaccccaaccccttctctctgtgtctctaccccttctccgcctttctggggggcaagaaacacccaaccccttctccttcaccctgagtggcaagtccgcttttctagaggagcaagtaccccaacctcgtatctctgtgccccagtcccttatttccacgccccgacctcttatctctgtggcccaatcccttatttctgcaccccaacctcttatatctctgtgccccaatcccttatttccatgccccgacctcttatctctgcaccccaaccccttatttccacgacccaacccctttcccgcttttctggaaggagcttgctacaagtgccagaaatctggccaccaggccaaggaatgcctgcagcccgggattcctcctaagctgcgtcccatctgtgcgggaccccactggaaatcggactgtccaactcacctggcagccactcccagagcccctggaactctggcccaaggctctctgactgcttcccagatcttcttggcttag

SEQ ID NO: 114870 - DNA, 453 bp, Homo sapiens; identical to SEQ ID NO: 114501
  misc_feature (1)...(453): n = a,t,c or g

SEQ ID NO: 114871 - DNA, 408 bp, Homo sapiens
tggggggtgatatggagagagaatgggcgatgtttctcagggctgcttcgagcgggattaggggcggcgtgggaacctagagtgggagagattaaaattttagtttcctgacttgggacatgttgaataaagctaatttgccagtcctgggtgggggcaaatcctcgagcttgatgtgtaaggaagggagggggcctgaataatccctgaggaatagtagaacagcagatggaacactgagaaattatttccttgaggatagatttccacgatggaaaggaaatgagaggttctgagaggcaggctagtggcttgtactatagcatagcctgcctttgctggtgtgtggcgattaggcctggtggaaccaccatcaataaatcaagcgtgatcggggtgaggaacagg

SEQ ID NO: 114872 - DNA, 357 bp, Homo sapiens; identical to SEQ ID NO: 114504

SEQ ID NO: 114873 - DNA, 909 bp, Homo sapiens
atggcatcatctgctcagcttctggggagctctcaggaaacttacaatcatagcaaaaggcaaagagggggtgagatgtctcacatggctggagctaggaggaagagagagagaggagagatgctacacacttttaaacaaccagatctcatgaggtggtcttcagtatgtcggaagaacaaagagaaggttggaaattccaggaaaagaagaaatgttagatattgtttctccagaaagttcaatggcactagtaaagttttcgagagctggcaagtggtggtggtgggtgaaataaacagccatgttgctcacacaaagcctgttcggtggtctcttcacacagacgcgcatgaaatttggtgccgtgactcagatcggcggacctcccttgggagatcaatcccctgtcctcctgttctttgctccatgagaaagatccacctacaagctcaggtcctcagaccgaccagcccaaggaacatctcaccaattttaaatcggagaaaaaggagacacgttttatccgtggacccaaaactccggcaccggtcatggactagggaaggcagccttcccttggtgtttaacctttgcagggatgcctctctgattattcacccaggtttcagaggtgtcagaccacgcagggacacctgccttggtccttcacccttagcagcaagtcccacttttctgggggaaggggcaagagcttgctacaagtgccagaaatctggccaccaggccaaggaatgcctgcagcccaggattcctcctaagctgtgtcccatctgtgcgggaccccgctggaaatcggactgtccaactcacctggcagccactcccaaagcccctggaactctggcccaaggttctctgactccttcccagatcttcttggcttag

SEQ ID NO: 114874 - DNA, 516 bp, Homo sapiens
tcagtaggggagcttttgagccaagatgagccaggtagaaggaagttcacgagacgatgtcatcagtgaaggtaagaacaggcccttttcacgagaccttgtgctcggaaactcatcactaaacgcaggaaccggccatctaaatttgtacgtcgcacagtcacacaggcgactatcagtgcgcatagggttgggctcagaggcctcacaatcctggcttctgatattagtcggaagactcagatcccaccctggcagagtgttgggacggtgaaaatgtttgggggtggtatggagagataatgggcgatgtttctcagggctgctttgagcaggattaggggtggcatgggaacctgtggtttcttgggctttgggtgttgattggctggagaatggggaagctacatcaggaataagaggcttttgttctctttccgtggctgtactaggtatcaggaacttgtaaccatctggcggtcccgtaggattgcttatcttgcagaaaagttgcat

SEQ ID NO: 114875 - DNA, 714 bp, Homo sapiens
atggggaaatggggtgaatgtcagctggatcagagagatacagtcatgaggatgaggtgtggtatccagaataatgtgggaggccggattgaagtccaggccaagaacaatggtaattgtgggactcaacaaagagcttccgaggcaattgggcggtgtcagtcttcagctgctaagccgagaagatctgggaaggagtcagagagctttgggccagagttccaggggctctgggagtggttgccagacctgttggttactgggatgacctgcacagtgttctctatggtcctcgattctgaatctgctgtggttgtgcagttcctagctcacctggtgcctgctgtgctcatttcctcctcggtccatgacttggctcttctggctgcatttggcttgcagccagcccgaagctccatctcagcctgcagctggactgagcatgccacaagtggcttccatgtcagacactggcgtctagacaaagggaacatggtggtgcccaaaaactcagagatgccagcaatcatggagacacaaagggtgttacagctcttgcttggggaatcccaagggcagcagggaaggatgcaggcaatacagagggtcaagaatgctaagtcgttagggggaacatgcagaaaggaggagccaatgatagccttaggccaaatcagtgaagcaccaccaatggggactgtgtgccgtatgtga

SEQ ID NO: 114876 - DNA, 678 bp, Homo sapiens
atgggggctgtctgtgaagctttgcggcagtacagcccagaaggggacggacttaccctccactgtgagagttacccgaagctcggcatccgtgatggtctgggggcttccgaggcgatccggcagcgtcagtcttcagccgctaagctgagaagatctgggaaggagtcagagagccttgggccagagttccaggggctctgggagtggctgccagtcagagttactcttgctgctgctgctgctgctgctgctgctgctgctgctgctacggtggtggcggcggcggtggtggcggtggctgccgaggcctcatggttgtcagctccatgcctcctgaacttcactccactgaaatctggttggtggccttcaccatggttacatgggtctagagccaagcacatgcacgatcagagaacaaaccatgcatgggctcgctacaggaatagcattcattcattcattcacttactcactctccccatcacgtatcattccatgagcatcgactctgtgccagttgaaaaacaaattgggggctccattgcctatggaataaaccaaacaaagaagaaggaatgggcttatgtgcgaggtattgagtttcctgtaactaatttggaaactttaccagacacggtgaagaaacccttcaagggtcaggccacttgttga

SEQ ID NO: 114877 - DNA, 675 bp, Homo sapiens
atgggggctgtctgtgaagccttgcggcagtacagcccgggtaatgtgctgagcctaatgggtgtcaggggggcttccgaggcgatcgggcagcgtcagtcttcagccgctaagccaagaagatctgggaaggagtcagagagccttgggccagagttccagggactctgggagtggctgccagactcaggagcccagctggcttcacccactggatcctgcatgggggctgcaggtggagctgcctgccagtcccacgccgtgtgcacgcactcctcagcccttggctggtcgatgggactgggcgccgtggagcagggggcggcgctcatgggggaggctcgggccgcacaggagcccatggagtgggtgggaggctcaggcatgacaggctgcaggtcccgagccgtgccccacgggaaggcagctaaggccgggcgagaaatcgagcacagcgccagtgggctggcactgctgggggacccagtacaccctctgcagccactggcccgggtgctaagccactcactgcccaggccggcagggccagccggttgctccgagtgtggggcccgccaagcccacgcctacccggaactccagctggcccgcaagcgcggcgcacagccctggttcctgctggcacctctccctccacacctccctgcaagctga

SEQ ID NO: 114878 - DNA, 1046 bp, Homo sapiens
tcctgtttctgttggagaaagccatgctctatgggttgaatgtgacatacctggctcttttctgcattccctcatacaaagatgcatacttcacccaggttaatcaaatcaatgtaccttattctccgaaattaggaactttaaatagattgttcttatttatagttgccaaaaaagactatttttcagtgaactggcagtataatgtggacttgggaccttcagcagccatctttcccattatgtgcaaggtatttgagaagaaagcaaaaaaaataaaacgaaatagtggtaaagtgtcgggacagcgaaaattttgggggatggtatggagagataatgggcgatgcttctcagggctgcttcgagtgggattaggggcgtcgtgggaacctagagtgggagagattaagctgaaggaagattttgtggccggtctgctatcggactatatagaggtgggaaggccaaaccgaagaattatgtctgacagaagggaagaaatgaccgcggtgaccttctcagaccctgtgggaaagacctctacctatccagtgaaagtgtctacccagactaagagggggcttccgaggcgattgggcaggatcagtcttcagccactaagccgagaagatctgggaaggagtcagagagccttgggccacagttccaggggctctgagagtggctgccagataaaacgcgtctccgttctctaccagaaaaggaaaggaactgaaattaagagaagggagagattgaagggtgacgccaagattgaaaggagaaagtggttgagggatagtgagagaggccaacagtctttcagtgaatatcacaaaaggaatgcacaggtgattaaacaccaagtttcacacacatatgatcctgagctcttctggctccaggtccccttggccctgagtgactgtcttcccactctgaggccccaggaatctcagcacatattacacattcctccagcaaaatcagtccactggcagaaatgcattgctgataatcttgagtctaagattgttagttaa

SEQ ID NO: 114879 - DNA, 970 bp, Homo sapiens
atggaggagaaggaggagaggaaaaggagaaggaagaggaagaggaggagggaagagggaagagatggggaaagaaaaagaatggagaagcaaaaggagaaccaggatcctaaagatccacctacgacctcaggtcctcagaccgaccagcccaagaaacatctcaccaatttcaaatccgagacaaaggagacacgttttatccgtggacccaaaactccggcgccagtcacggactgggaaggcagccttcccttggtgtttaatcattccagggacacctctctgattattcacccaggcttcagaggtgtcagaccacgcagggacgcctgccttggtccttcacccttagcggcaagtcccacttttctggggaaggggccagctgctcctcgccagaccgagctaggtcccaattcttcctcagcctccgctcctccaccctataatccttttatcgcctcccctcctcacacctggtccggcttacagtttccttccatgactagccctccccctcctgcccagcaatttactcttaaaaaggtggctggagctaaaggcatagtcaaggatttaattaacctcaccttcaaggtgtacaataatagaaaaaagttgcagttccttgcctccactgtgagacaaaccccagccacatctccagcacacaagaacttccaaacgcctgaactgcagcagccaggtgttcctccagaacctcctccccgaggagcttgctacaagttccagaaatctggccaccgggccaaggaatgcctgcagcccaggattcctcctaagccacatcccatctgtgtgggaccccactggaaatcggactgtccaactcacctggcagccactcccagagcccctggaactctggcccaaggctctctgactccttcccagatcttcttggcttagcagctgaagagtgacactgcccgatcgcctcggaagc

SEQ ID NO: 114880 - DNA, 363 bp, Homo sapiens
atgggggctgtctgtgaagcttgcagcagtacagcccaggcttctgaggcaatccggcagtatcagtcttcagctgctaagctgagaagatctgggaaggagtcagagagccttgggccagagttccaggggctctggaagtggctgccagggtccagtgaagaaaaagatatccagttatcgggtggtaaagagcagaggagagttctggactttcctgaggatgagaacagctgcatggctgaaatgcagcagcccagagcaaagagggtgctccctggggggtcacagctggtgaagactgaaaatccagatcctaaaattcaaccagacctatcataccagcaggccaccacgaaatga

SEQ ID NO: 114881 - DNA, 1655 bp, Homo sapiens
cttctgaaggtgaagcaaaaggcagcattaccttgaccgtctgtactgcgctttatctcaaacttactttattccacaaaactggtgtctttggtcccctgcgatttccagtagttaataccctcaatccatcaccctttcatgatgggaccagagagctgggggcttccgaggcgattgggcagtgtcagtcttcagccgctaagctgagaagatctgggaaggagtcagagagccttgggccagagttccaggggctctggaagtggctaccaggatctagccagtgctttgcacgtgagagcttggaggagaagctgagcctgtgcttccgcccctcggatccgggcgccgagcccccgaggacggccgtgcggcccatcacggagcgcagcctcctgcagggggacgaatattgctgtgctttaggtcaaggggtccccaacccctggtccacagaccggtactggaactgggccacactacaggagataggaccatctagttgcaggaaaacaagctcagggctcccattgattctacgttatggccatgtcagagaccttcatggcagctcctcccatcacaggcctggaggcccaaaaaggaacaagtggtttcgtgagctgggcctagggtctgcctgctgtatgcggcctagggacttggtgccctgtgtaccagctgctccagctgtggctgaaaggggcgagagtacagctcaggctgtggcttcagagggtgcaagccccaagccttggcagcttccaggaggtgttgggcccgtgggtgctcagaaatcaagaattgaggtttgggaacctttgcctatatttcgcaggatgtatggaaaagcctgtatgtccaggcagaagtttgctgcaggggcagggttttcctggtatgttcctgtggcagttgttggagcaaaagttcacgatgtgaacctccatatgctgtcctttccatccaagtggaagctgcacacatgcatgaaatttggtgccgtgactcagatcgtgacctcccttgggaggtcctcctgttctttgctccttgagaaagatccacctatggtcctcagaccgaccagcccaagaaacatctcaccaatttcaaatctgacaaaggagacacgttttatccgtggacccaaaactccggcgccggtcacggactgggaaggcagccttcccttggtgtttaatcattgcagggacgcctctctgattattcacccaggttttagaggtgtcagaccacgcagggacgcctgccttagtccttcacccttagcgaatttaattaacctcaccttcaaggtgtacaataatagaaaaaagttgcaattccttgccttcactgtgagacaaacctcagccatgtctccagcacacaagaacttccaaacgcctgaacctcagcggccaggcattcctccagaacctcctcccccaggagcttgctacaagtgccagaaatccggccaccaggccaaggaatgcctgcagcccaggattcctcctaagccacgtcccatctgtgcgggaccccactggaaattggactgtccaactcacctggcatccactcccagagcccctggaactctggcccaaggctctctgactgcttcccagatcttcttggcttag

SEQ ID NO: 114882 - DNA, 537 bp, Homo sapiens
atggacacatatagaggaacaacagacactggggcctacctgaagacacgcatgaaatttggtgccgtgactcagatcgggggacctcccttgggagatcaacccctgtcctcctgttctttgctccgtgaaaaagatccacctacaacctcaggtcctcagacccaccagcccaaggaacatctcaccaattttaaatccggagcttgctacaagtgccagaaatctggccaccaggccaaggaatgcctgcagcccaggattcctcctaagccgcgtcccatctgtgcgggaccccactggaaatcggacttttcaactcacctggcagccacttccacagcccctggaactctggcacaaggctctctgattgactccttcccagatcttcttggcttagcggctgaagactgatgctgccggatcgcctcggaagcctgggctgtactgcctcaaggcttcacagacagccgccattacttcagtcaagcccaaatttcttcctcatctgttacctatcttggcgtaattctc

SEQ ID NO: 114883 - DNA, 1711 bp, Homo sapiens
tgctctgagtatgaggactcctccccagctccagtaccagccacagatctcagctcaacactctcgagctctgtaccacaaccccaggatacagggaccagccagcagcttcatcccctggacccttggcatgagctgcttcgtgcccaggagctccaaggtgccaccaaccacaagggctacagccatgcagagcatgagcatgcaggcctaggtgtccagggtgggaatggggctctggctttttcgaacagtgggcacaggcatgctgttcccaccatcagctcaggcactggcaggaggaggactccaagttcttcggcttttggactcttgaacttacaccagtggtttgtcagtggctttcaagccttcagcgacagactgaaggctgcattgtcagcttccctacttttgaggtttggggactcagactggcttcctagctcttcagcttgcaaatgtcttatgctgggacttcactttgtgattgtaggtaacatctgtgctacactcaaggagaaatactcctcaatgctccatttagatgtgaccatgaagaaaaatggggagaaaagaacaaggctccaaaaaagaaagaagggaatgcctccacatccggcttatgaggacctaaacatagctgccatcactctccctgccaatgttgtccttcatcagccaagtggcttcagaacttcagggcagctggaccccgtttggtggtctcttgacacggacgcgcatgaaatttggtgccaagacccgggacttggatcaggggacttcccttgggagatcactcccctgtcctcctactctttgctccatgagaaagatccacctacgacctcaggtcctcagaccgaccagcccaagaaacatctcaccaatttcaaatccaagacaaaggagacaggttttatccatggacccaaaactccggcaccggtcacggactgggaaggcagccttcccttggtgtttaatcattgcagggacacctctctgattattcacccatgtttcaagggtgtcagaccacgcagggatgcctgccttggtccttcacccttagcggcaagtcccgcttttctggagaaggggcaagatttaattaacctcgccttcaaggtgtacaataatagaaaaaagttgcaattccttgcctccactgtgagacaaaccgcagccacatctccagcacacaagaacttccaaatgcctgaaccgcagcggccaggcgttcctccagaacctcctcccacaggagcttgctacatgtgccggaaatctggccactgggccaaggaatgcccgcagcccgggattcctcctaagccgcgtcccatctgtgtaggaccccaccgaaaatcggactgttcaacttacctggcagccactcccagagcccctggaactctggcccaaggctctctgactgactccttcacagatcttctcggcttagcggctgaagactgatgctgcccgatcgcctcggaagccctatagaccatcacggatgctgagctttaggtaactctcacagtggaaggtaagcccgtccccttcttaatcaatatggaggctacccactccacattaccttcttttcaagggcctgtttcccttgcctctgtaactgttgtgggtattgatagccaggcttctaaacctcttaaaactccccaacgaattccaccacact

SEQ ID NO: 114884 - DNA, 411 bp, Homo sapiens; identical to SEQ ID NO: 114508

SEQ ID NO: 114885 - DNA, 879 bp, Homo sapiens
gggcccaggacaaggccatctttgtttccgtgttgttcctccctgaggcctctgcaaggaaagccaagtccgaagtcaaaagacgccacttttcttccactctctctctgcagaagccttcatcctctcattcactcaacaggtatttatggagctccagggtaccaggctgtgggccaggggcttccactgtgagagttacctaaagctcggcatccgtgatggtcttgtagggggcttccgaggcgatcgggcagcatcagccttcagccgctaagccgagaagatctgggaaggagtcagtcagagagccttgggccagagttccaggggctctgggagtggctgccaggtgagttggacagtccgatttccagtggggtcccgcacagatgggacgcagcttaggaggaatcccgggctgcaggcattccttggcctggtggccagatttctggcacttgtagcaagctccttccagaaaagcgggaaaggggttgggtcgtggaaataaggggttggggtgcagagataagaggtcggggcatggaaataagggattggggcacagagatataagaggttggggtgcagaaataagggattgggccacagagataagaggtcggggcgtggaaataagggactggggcacagagatacgaggttggggtacttgctcctctagaaaagcggacttgccactcagggtgaaggagaaggggttgggtgtttcttgccccccagaaaggcggagaaggggtagagacacagagagaaggggttggggtacttgccccttccccagaaaagcgggacttgccgctaagggtgaaggaccaaggcaggcgtccctgcgtggtctgacacctctgaaac

SEQ ID NO: 114886 - DNA, 1039 bp, Homo sapiens
tacattgaatcagttagggtggggccaggaaaacaaatccacaatggtggaatgtccatcaagttaaaggctgtttttaccttccttttgtggatcttcaagttacttccaggcccatctggatgtacacgtgcaaagtcacaggggatgcgatggccctggccctgggctcagaggcctgacattcctgtcatcttatattaataagaaaaataaaacaaaatagtgttgaagtgttggggcagcaaaaattttgggggggcgggtggtatggagacataatggacgatgtttctcagggctgctttgaacgggattaggggcggcgtgggaacctagagtgggagaggttaagttgaaggaagattttgtggtaaggggtgatattgtggggttgttagaagaaacatttgtcatatagaatgattggtgatggcctggatacagttttgtatgaattgagaaactaaacagaagttagaaggtctgaataaaagaaggagaaaaccaggtattaaaggactaacaattgggaggacccaggacatccaattagagagtgcccaaggaggttcagcatagccctgccagtaaagattatttatttactttaagagggagttaagagtggtgggcggtttggggatagcaccaggagatatcagctgtgatggcttggagaaacagtgtaaaccggcaggggaaacaagagcaggggcttccgaggcgatcgggcagtgtcagtcttcagctgctaagccgagaagatctgggaaggagtcagtcagagagccttgggccagagttccaggggctctggaagtggctgccagatgaatcctctgtctggccggccccaggttgtctgcttctttactgcacacatgttgacaaagaaaagggaagaaggagcctccatgttgaacatgccttgcttccagtgaaaggaagagatgatccaagcaaatttaggaccaatagcagactcttcacactgcctggggatagagggaccaccctgggctcctcttactcctgg

SEQ ID NO: 114887 - DNA, 394 bp, Homo sapiens
atggcaggaaagctacaaggccgtgagagctcaggccacccatttccctttgtgcgcctcagtctcgtcatctattcccagagattcatggggatagttaccaccttttttgctgaagagggaatgagacacagtgagaaagacacccatcatggtggaattctccagtatgaaccagccagggttgtaggcgttggggcagcagggtactttaacgccaaaaggaaaaagaaagtggcagagatacaccaggctctgaacagtgatcccactgatgtggctgcccttagacgcatggctatcagtgaaggagggctcctgactgatgagatcagacgaaaagtgtggcccaagctcctcaatgtcaatgccaatgacccacctcctatatcag

SEQ ID NO: 114888 - DNA, 6092 bp, Homo sapiens
gggtgatgtgttttaggattgagaacacagactttgggaatcactgctaatttgttacttaaagcatgttacagctgttttgttctcagttttaaccaagcccagtggacatacggtagtaataagtaagtcttgttgtgtttcagcatttaataatagactttggaggtagacccctggtttaaatctaagtctagtttgaggaagtcacttaacctttattgaaaagactctggatttaataagctgtgtaactggcactcgatagttacccaaagttcagtctagatggcacaaaccacctctcagggaataaaccctaagacatcactcaaggaggacttcaattatttaattttgaactgttttgtcctctctggccataaaacttgacagtcatgaaaggtaaggcaaattttaagtgggttaagtttttaaatacgtatctactcattttctttaaaaaaaaaaaaaaatacctgggggaaaaggatattaaaacctgggtattttaaactcagccttaaccagataaacctgctccagcatttgtccagtgttgaaataaataggaagaaaaatacaatttccttaaacatgccagcttagtagtaggaatgacctatcaatcaatcaatcaaatcaatcattcagcaagaagttagttggtggttccccatggccccaaggtctgcagggctggattgtccacttttcctcctcaccaccagcacttgcctgctgctactgaggaagggcacagtgggactcatgtgtgtgtcatgactttaatggttagctacagtatgcatacacatacaagaagtaggggagctgaagcccaggaaaaggctacaaaatacaacacagggaccaatacatttgcaaaacattcaaaatccttataaaaggggctgtattggtcctttcaactttgtcattattcagcttagcctgtatggccattcattcagtggggtaatgggggagaacaattaattaatgagatttggttccctttcctatattcccactgtttttaaagtttaaggagaggattgggggggtgagggtagggggtggggcttttaggcctggtctggttttcccctttatataaaggagctgacccccatctcaggcggctgaggtgtataatccccaaaagaaataagatggtacaaatgcagtcagctttggaatacgtttgggtagagacaaaatggaaactcatgggattcccaatagtggagcccttcccatgttcctgggacatatccaattctagcacatccacatttttaataacttaggtgattttcaaggtcccctgtccacattaaaaaaataagttaccataatattcaaactgggctttttggctattcttttggggacaccaggggattgtcagaaggacatgggagctatgccctcagacaagtgcatgggaatcagctgcctcttcattacaaggtaccagtttatgtacttgccttggacacagcttgcacaaagccaagaagttccagacaaaggttttctctttcatgtatttacacaagttcaaaatgatattcacagcatcttctaaattttggccaagagtcaaaaaaatggcatttaaaccttgggaacgtgcccacattaggccaggagggctgatccccaccagttagttgggccagattacccacaaaaccaaagggcctggggaaagttcaggaaggagctgaaaggattctccagtcagttttatgaactcggtgcaagtgagacctccaagactgaacacgtacaacagagatgcaagtttccgtcctaactgggcacctgtccccttcccattacttgctggggcctgcctcctgtcccccatgccagcaactgtgccgacccgactggaaataacttttccgatttctgggggggcacagtgtaacaaatttcatgggttccagaaacttaaaacggctgggtttttaatcagctccaatgaagggtaaataaagaagacccccaagggatgtgggcctatttaacaatcaaccggttcccaagagaaactcctgtgatctgttccttggaatggccttcccgaattggccctcctgccaaaaaggtaacagcatgggtgcaactggaagtagtgagtgtggctatttggggtacccggagctgatttgcaaattgccattcaaaaaaggagatagcgacccctcagtgtccaagtccacagcccaaattctggaagatatccatgtgtgcctgaagtgagtgaatggtgcctcattgaaaggtgtgcctgccccttgttgtggatgtgccgcaatggccttgagtccccgacattagaccacccagtgcattgatgagcttggaggttgtaaccgaatcccccggttccatggaatacctgtaagggttcgccgcagatcagacaggaaagtgaactggtgaaccgagttttaagataggaatccaaatcctttttgaactgaaggtggcattactcccagtgaaattggtgagaatccggggagcaatgttaatttcactcaacatgtccacctttagattaggagtgaatgggtcggggagcctcatgtttcttggaaaggacactcaggatcaaatttcttaactggatacaattaggtgggatcacatcacagaacccataatggtaatcacaaaaggaactctgggaaatcatgcaaaagaaccagcaggcacttcttaaagtgccccttgtagaggatttgcataggttttggtgagttccacatttctaaggaaaggcgcttaaataatttggaattaaatcaatcaggtagctgtgcataccataggccacccaccttctgcttgtggcggtatgtgcccagcattcttgcaataaatatccggatgggaaatcagttcaagccaggcatatacaaagccagggagctttggtagggcctcaagatgtggaagtgtattgcagaaagctgtaagtgtctggaaattaatggtttccaacacatgctcaggtgcattcacttccaagagaagcataataaaaattcgatggtagggaagttgctgaaattcactctgacgaacatcatgatcctgaaggagaactcccactactataccaaggaccttgttcagcagattaatctttgtgacagtgttggtggcctcccctgagtgtttcacgagcagtgcaatgagtcgaacaaaggcatccaggttgtgatagcacttggctcggatcatggtgggattggcagcaggattgtgctgctgctcagcctgagcacggtaactgatttcaacacacatttcagtacacagacgaaagaaccttgttatgagatcatcggtcttcagtattccttgctggtgcatctgtccaacaaatgcagagaaagctttggtactgtcgcggccagctgctgctgaatggtagagattcacccattccctcagaagatactctgccttctccctcaggcctggagggtcatcatactctgaggcttgagagatcccagaatgcatcataaagtttgggcctccatgagcacgatcaaatcattgcttcatagttggatccgcactacttccaatcaagctggggcaatccttctggagcattgcctctggaatgagcattaatcctcatgagggtttcaatggtgtggaacagatctgcctcagtaacatgagcaacactcctttcatccaccagcaggatttttactaactgcatagcaaatgccacagccatgtagtttaagccattctccattgactgcgctaggtgaagatcatactgctgcatattaaccaaatgattgcgaattagcagctccacagcctccacattatatttatattcatctcgacattcaattaggcaccttgtgatctgtttgttgcaccatggagacccatatgcccggccatcctgcagagcttttaggaccaagaggtggcattccctgtagcgcagcagaaggtcagcatcagcaccacttgtggcatctagtaagccctctacagccttttggagcaatccaagagcagctatggcatcccgagagtttcgagataaaactacaacctccaagagacttcgaagagcctgagcttgagggttcatggccaaagttggtgggatggcatgtagatgttgctccagttctgtaatacacttatcataaatctgagctacatcatctgttgcccaagcttgcttcatgggctgggctaaaaatcccgtgggctgacttaagtcatttgtaggtaagaagccaggaacattgcgtgcaaactcttcgtaaacagccaactgctttgggtccacaccaccaactttcagcctgatttgctctggcatccgttcagcttgatatgttaaaacaacaggatcacagtatctgcgtccttcttgcctagcatgttttctcagctcaaattcagttgctaatctcttgtccatctcagggcctgctttttctactgcagtcttctgaataaaacagcaagccaactcacaattgtcctgagctaattgagcagctgcctgatccatcatttctctttgttgtggggaagcagtacgaagggctgagggcaaaactgtttttttaaagttggtagatatgctcatgagcaaaggttccctggcatgtaatcatagccattccaagctgtcaagttacgcatcatgtgataagcttgctattcgcattcgagattcctccgaatccagggcaaaatccttcctgactatttgctcacaagtagtcatggcaatcttaattgatcgatccaccacaggatggaccagctcctggacagcccgttcaattgcctgacgcacacactgcttcaactgtggatgggcctgaaacaagggaattgttggatttagagtaatgtgtggtgccaagcccgcaagggaatagacattgatgtcgtggtagctgtactgtggctgtggtggaaccgtggctgtacaagtggtgttggtagctggtgtagtagaagttgttgtggttgtgatgggagggagttcttctggctgcttgacatctttctttggagcagagagttgctcatctaaattcttcaggcgatctttatcctttaggaggtttccaggttttagctcattgatgtctaatgcaaggttcttgcagagaacctcgatttcaaacttcaagtttaactttaagtcatgctcctgatgtagctcagctaatacattcataattgccattgtccaagggtttggtggcctaaaaaccacactacgaatgctagattctaagactttggcaacaaagggcactacatagagcaattcttgttgtcctttaacataagcctctagcagcaatgatttcacatccaagtcagtgtgtaagatgggtttgtttttagctaatgtgatcattcctagccaatgtcccaagttcttcagcaaagaacgatctgagaaattggctgcagctttatcagaggtcaggagcactttaatgtttctgtaggtctcattcagaaccatcttgttaaattcaggattcttcagcgtgtcaaggaagtttgaatacaggctatgaaagtttggctcaatactgactctcttcataaccagatactgtgaaacccaaggcataaattcttctttcaccgtttcctttagctcttcaaccttttgtgtcatatttgactgtgagagattattgaaaataaaagcaattttctcctggatattttctgggggctccacaattctctcagtttgatctgtggccacaagcaacgtatctatatttgtagtattaatagaaggtggcacatctttcttaaagctgactccagttggcctggtgaccgtaaccgttttagcaacagtggtagttgttgaggtggttaccatagtgctaacttgaccagcaagaggagcttttgctggaacctgggcctgagcctgggcctgagccagtgcaatacttccaggggttgtgatagagccttgcattttcacaggaggatctctagactgcttgtccatactcaatatactcctg

SEQ ID NO: 114889 - DNA, 333 bp, Homo sapiens
atggctttgagcatccctcttcttggcatgtttctgagttgcctctccctcctggcacaggcttgggctcagcaggacccatttgatgtcaatgaaggaagaggcattccagaagccttcctggcatttttagatcccctgcagctgcctggggatccaggttactacttcttctcccttatacaggccagggagctggagagcagagaggcagagctaagacgccgtgacaccttctacaaggagcagctggagcgtattgagaggaagtttagaactgacagtaaaaacctgtttcggggaaagttggataagctgctgcatcatccttga

SEQ ID NO: 114890 - DNA, 831 bp, Homo sapiens
atggagagtcaaggagatgacttctaccttgccaaaggccttgggaagaaagacagcatcaaggtctcacacaacactccagggaggcagctgctgcccagtgctgtggacagcaaagcttcagtgcaggaaattaagattccccctgcctccccctcccccatcctcatcagcttggccatggcagggctgggggatcagagggggttgccagttgctgcgagacaaatatccctagcacattacctagttggcaaaggaatgcaactgggaggttctggaatagcacagtgtggaactgcactggacttttcctgttctgaagaggactttgctttcctccgggatgtaaagcatttggcaggcaaaggacaaaacttacctcagactccgaaatcacaggcttctggtctaaagattcaagctgagaaacaagaaagcaatttgtttgattcaggcccttgcaaattaccccccaataatttacttggtctcagctttggctggcttggatgttatgaggattccaagaatttttttacttttccattagagggctctgcactctcctttcaaggaaaaaggctctatgtgccagcccacttctttccagaaatggggaaagggaggaggagaacctgtggaaaagaggacaacggatttccggaagaaattccaagccaggggctaaccgtggacctgagcacagcagagccacacggacgtctcagaaaacggttctgtggaagcacaagacacgtggcagtgagagtcctgagaagtccaggaaaagatgcagcttccaacccattcctaaatatcaccaattaa

SEQ ID NO: 114891 - DNA, 2514 bp, Homo sapiens
atggagccagaactgctggttcggaaggtgtctgcattgcaggccctggggcggggctttttggtccgacgccagttccagagcgtgcgagctgagtatgaggcgattgtacgaaaggtcgagggcgacctgggcacgcttcagtggaccgagggccgcattcccaggccgcgattcctcccagagaaggcaaaatcccatcagacctggaaagcaggagacagggtagcaaatccagagcaggggctgtggaaccacttcccatgtgaagagtctgagggagaggccacctgggaggagatggtgctgaagaagtcaggagagagctcagcaaatcaaggaagcctctgcagagatcacagctcctggcttcagatgaagcagaacaggaaacccagccaagagaagaccagagacacgacaaggatggagaatccagacagaggcttcgttccagggaaggaatgctcctttgagcagctggagcacgttcgggagatgcaggagaagctagcccggctgcacttcagcctggatgtgtgtggggaggaggaggacgatgaagaggaagaggatggggtcactgaggggctgccagaggagcagaagaagacaatggctgaccgtaacctggaccagctgcttagcaatgtgggttcatgtctgggtgctttggttcctgggggcatgaggggtggagaaggtgagggaactaaacctgtgcaagatgggagaccggggtgggaggaaggactggtccaaagcgccacgatccttgacgggcacagccagaagctgcacctggccgagaacgccgagcctgaggagcagtccgctgcgtggcctcaaacactaagcagaacagttccaagccaggacccacctgtcgatgccaagaagccgatcctactgcagggccatgagcggtccattacgcagattaagtataaccgcgaaggagacctcctctttactgtggccaaggacccttctgggcccctggttattgaaaaagttcggaattactctttacccttgtggagtgttctgagtgttggaagtacccaggaagaagccctgagcaggtgccctcaggagcagtgcccatggctccccacatcagccaagaggcccaaccccaggaagccactcctgcccggggatggggaaggcctgatgcccagccagcgcccaatggatgacaaaaagaagaaacggagtcccaagccctgcctggcccagccagcccaggccccaggcacactacggagggtccctgtgcctaccagccacagcggctccttggccctaggacttcctcatctgccatcccccaagcagcgggccaagttcaagagggcgtcccctgcaggagagcttcatgcgcctggtggaggcctgtggggactcggagcaaagcatggacaactggctgagtcggctggacggctgccgctgactgtaacatgtaaagcaggcactgagcaccacttgcctggcagtccagggcatggagagctttttgactccacaactcttgaacatcagaagactttccggacagaacgtcctgtcaactcagctgccctctcccccaactatgaccatgtggtcctgggcggtggtcaggaagccatggatgtaaccacaacctccaccaggattggcaagtttgaggccaggcgcaaggcattacaggatgcagtcaatgccctctgtgccacctcaccaccaggaagtcagaggtgtccaccaccaataacaaggaatggaaagcagctggcccttctcaagaccaattcggctgtccggacctgcggttttgactttgggggcaacatcatcatgttctccacggacaagcagatgggctaccagtgctttgtgagcttttttgacctgcgggatccgagccagattgacaacaatgagccctacatgaagatcccttgcaatgactctaaaatcaccagtgctgtttggggacccctgggggagtgcatcatcgctggccatgagagtggagagctcaaccagtatagtgccaaggcagtgggtgaagaggacgaggaggatgaggagggggagagcctggactctgtgaaggcactgacagccaagctgcagctgcagactcggcggccctcatatctggagtggacagcccaggtccagagccaggcctggcgcagggcccaagccaaacctggaccagggggacctggggacatctgtggtttcgactcaatggactccgcccttgagtggctccgacgggagctgcgggagatgcaggcgcaggacaggcagctggcagggcagctgctgcggctgcgggcccagctgcaccgactgaagatggaccaagcctgtcacctgcaccaggagctgctggatgaggccgagctggagctggagctggagcccggggccggcctagccctggccccgctgctgcggcacctgggcctcacgcgcatgaacatcagcgcccggcgcttcaccctctgctga

SEQ ID NO: 114892 - DNA, 463 bp, Homo sapiens
ggtggaattcggagagcactgagcacaggggctgccacagtggccggctcagacatggcagagatcagcagagaatgggcaatcaggctcccctgagatgagcagcagcgcagaggaggtgcccctctcttactacaccaacttcagagggcgtcccctgcaggagagcttcatgcgcctggtggaggcctgtggggactcggagcaaagcatggacaactggctgagtcggctggacggctgccgctgactgtaacatgtaaagcaggcactgagcaccacctgcctggcagtccagggcatggagaggcacagacagcaccctgcttgtgacttcactggcccaactcatcctggaccccttgagcaagaccatggctggattccaggaactggtggagtggaagtggatccaggaaaatgccgtgtgaagggaggactcaaatgcactcccttgggtctg

SEQ ID NO: 114893 - DNA, 5284 bp, Homo sapiens
atgcgcatgcgcgggcgtgcctcgcggcttgagggcgcgcggggcgtgggtggctgcgcgcgcggggggcgcacgtggggcctgaggggcgggggcggtgccgggagtcccgccacgtcagtctccggccctgagccaatcccgcgcccggcctgccgcgagggggccggttgtgccgggaagtggctccagggagaagaggcctcttccctcacccgctgtgggagctgcgccccgaaagcctgccccggcacgtcgggctctcctgacccgccaagaccagagagccgttggcgccctccgcccgggcctgccggtccgtttattttaagaagctttgtgcgcctgctgtggggatttctgatccaggctgcgaagaatttcgaagtctggaaaatagcaactgtgtttgtttctaaaggatcttctcctgacccagcatcgctcatcacaatgaagaaccaagacaaaaagaacggggctgccaaacaatccaatccaaaaagcagcccaggacaaccggaagcaggacccgagggagcccaggagcggcccagccaggcggctcctgcagtagaagcagaaggtcccggcagcagccaggctcctcggaagccggagggggctcaagccagaacggctcagtctggggcccttcgtgatgtctctgaggagctgagccgccaactggaagacatactgagcacatactgtgtggacaataaccaggggggccccggcgaggatggggcacagggtgagccggctgaacccgaagatgcagagaagtcccggacctatgtggcaaggaatggggagcctgaaccaactccagtagtcaatggagagaaggaaccctccaagggggatccaaacacagaagagatccggcagagtgacgaggtcggagaccgagaccatcgaaggccacaggagaagaaaaaagccaagggtttgggtgagcagagggcggctctttgtgaagctgggaaggagatcacgttgctgatgcagacattgaatactctgagtaccccagaggagaagctggctgctctgtgcaagaagtatgctgaactgctggaggagcaccggaattcacagaagcagatgaagctcctacagaaaaagcagagccagctggtgcaagagaaggaccacctgcgcggtgagcacagcaaggccgtcctggcccgcagcaagcttgagagcctatgccgtgagctgcagcggcacaaccgctccctcaagctgggggacccttgtgaggtagcagtggatgatggctctcgggctgacttctttgcccaggaagaaggtgtgcagcgggcccgggaggaggaggagaagcgcaaggaggtgacctcgcacttccaggtgacactgaatgacattcagctgcagatggaacagcacaatgagcgcaactccaagctgcgccaagagaacatggagctggctgagaggctcaagaagctgattgagcagtatgagctgcgcgaggagcatatcgacaaagtcttcaaacacaaggacctacaacagcagctggtggatgccaagctccagcaggcccaggagatgctaaaggaggcagaagagcggcaccagcgggagaaggattttctcctgaaagaggcagtagagtcccagaggatgtgtgagctgatgaagcagcaagagacccacctgaagcaacagcttgccctatacacagagaagtttgaggagttccagaacacactttccaaaagcagcgaggtattcaccacattcaagcaggagatggaaaagatgactaagaagatcaagaagctggagaaagaaaccaccatgtaccggtcccggtgggagagcagcaacaaggccctgcttgagatggctgaggagaaaacagtccgggataaagaactggagggcctgcaggtaaaaatccaacggctggagaagctgtgccgggcactgcagacagagcgcaatgacctgaacaagaggtctgggcccctggttattgaaaaagttcggaattactctttacccttgtggagtgttctgagtgttggaagtacccaggaagaagccctgagcaggtgccctcaggagcagtgcccatggctccccacatcagccaagaggcccaaccccaggaagccactcctgcccggggatggggaaggcctgaggcccagccagcgcccaatggatgacaaaaagaagaaacggagtcccaagccctgcctggcccagccagcccaggccccaggcacactacggagggtccctgtgcctaccagccacagcggctccttggccctaggacttcctcatctgccatcccccaagcagcgggccaagttcaagagagtaggcaaagagaagtgccgcccagtcctggctggaggtggaagcggctctgcaggcacgcccctgcagcactccttcctgaccgaggtgactgatgtctatgagatggaggggggactcctgaacctgctcaatgatttccactctggccggctgcaggccttcgggaaggaatgctcctttgagcagctggagcacgttcgggagatgcaggagaagctagcccggctgcacttcagcctggatgtgtgtggggaggaggaggacgatgaagaggaagaggatggggtcactgaggggctgccagaggagcagaagaagacaatggctgaccgtaacctggaccagctgcttagcaatgcgcgcgggcgggcctggcagttggcgcccatggagccagagctgctggttcggaaggtgtctgcattgcaggcctgcgtccggggcttcttggtccgacgccagttccagagcctgcgagctgagtatgaggcgattgtacgagaggtcgagggcgacctgggcacgcttcagtggaccgagggccgcattcccaggccgcgattcctcccagagaaggcaaaatcccatcagacctggaaagcaggagacagggtagcaaatccagagcaggggctgtggaaccacttcccatgtgaagagtctgagggagaggccacctgggaggagatggtgctgaagaagtcaggagagagctcagcaaatcaaggaagcctctgcagagatcacagctcctggcttcagatgaagcagaacaggaaacccagccaagagaagaccagagacacgacaaggatggagaatccagaagccacagatcaaagactgccccacagccaacctcagcttcaagagcttcagtaccaccgcagccacttggccatggaattgctgtggctgcaacaggccatcaatagccgtaaggagtacctacttcttaaacaaacactgagatccccagaggcgggcccgatcagagaggaaccccgcgtgttcctagaacatggggaacaggcctgtgagagggaccagtcacaaccaagcgcaccactggaggaccagtcctacagagacaggaccactggagagctagaacaggaggatgactcctgtcacagggtcaaatcaccccacagatccccaggaagtttggccactacacaaaaaaacattgctggggctaagtgcagagaaccatgctacagcaagtctggaccaccgtcgtctataccatcaaacagccaggccttgggggacaggctcaccaaagggccagacgatggaagacagacctttggagggacctgcctgctgcagatgaaaatcctggaggaccagacccccagaggtttaaaacctaggaaccattgtcccaggaagtccaggacacagctgtctgcactctatgaggactcaaatattaaggagatgtctcccagaaaactagaccacaaagagcctgactgccgaacagtcaggacacaagagttgggcctctcagaggaccacatcatctgggatggtggcagtccagcagccaagagggtagtggtgtaccggaatggggacccattcttcccaggctcccagctggtggtgactcaacgccgcttccccaccatggaggccttcctctgcgaggtgacatcagctgtgcaggccccactggctgtgcgtgccctctacacaccttgtcatggccaccctgtcaccaacctggcagacttgaagaacagagggcagtatgtggccgctggatttgaacgattccacaagctccatgtgttcaggaatggggacctggtaagtcccccatttagtctgaagctgtcccaggctgccagccaggactgggaaactgtgttgaagctcctgactgagaaggtcaagttgcagagtggggctgtgtgcaaactctgcaccctagaggggctcccactgtcagcagggaaggagctggtaactggccattactatgtggctgtcggagaggatgagttcaaggaccttccctatctggagctgctggtgcccagcccctccctgcccaggggctgctggtatgcccaaggccacagggcccaggtaacccagccctctccaaaggaaccagaccgaattaagccatctgctttctatgccagaccccagcagaccattcagccaagaagcaagctccccacactctcattcccatcaggagttataggagtatatggagctccccaccgaaggaaggagacagcgggggccctggaagtagcagatgatgaagacactcagacagaggagcccttggatcagactgtccaggggaagggaactctgatggccacaaggaagcaaaacagctgcagaggaaagggcaggatgggaaaaggccgtgtcctcacccactctggggagatgggttctgggaaggaactaacacaggtggcctcaaacactaagcagaacagttccaagccaggacccacctgtcgatgccaaggtgaggtaatagagaagggatccacactggttgaggagaaagggcatcagaagccgatcctactgcagggccatgagcggtccattacgcagattaagtataaccgcgaaggagacctcctctttactgtggccaaggaccctaggacaagggctcgggtgaacttcgtcatatttcttaacaactcttcaggggacaccaagcatgtcctcactggctcagctgacaacagctgtcgtctctgggactgtgaaacaggaaagcagctggcccttctcaagaccaattcggctgtccggacctgcggttttgactttgggggcaacatcatcatgttctccacggacaagcagatgggctaccagtgctttgtgagcttttttgacctgcgggatccgagccagattg

SEQ ID NO: 114894 - DNA, 531 bp, Homo sapiens
atgagcagcagcgcagaggaggtgcccctctcttactacaccaacttcaggctgtgcaccctagaggggctcccactgtcagcagggaaggagctggtaactggccattactatgtggctgtcggagaggatgagttcaaggaccttccctatctggagctgctggtgcccagcccctccctgcccaggggctgctgcgactttgactattttcgtcgctggacgtggacttggaataaggagatgcaaagactgaggcccaaaccagggcatacggctcgcgtctgcgggcgcgccttcgggatccgccgttcgcacttagcgtgctcgctggcttgtcgatccgcatgccggataacgtggatggctgtcgctatggctgccgcacggagtgctgtttcaggctatgctttctcgctgatgctaacggatagggttgcgcaggagagcttcatgcgcctggtggaggcctgtggggactcggagcaaagcatggacaactggctgagtcggctggacggctgccgctga

SEQ ID NO: 114895 - DNA, 543 bp, Homo sapiens
  misc_feature (1)...(543): n = a,t,c or g
cttnttttatgtnnnnannnnnnnagggagnaggcgngtcnntnnnttatggtgtactgtattccgtgtcgnnggaaccattccgatctgcgccggagctgcgatgctagagcactcttgccacccccaccccacggacgtgttgcagtgatatcagaattttgcgatggacagattcctggtgaaaggggctcaagggggccttttgaggaagcaggaggagcaagagccaactggagaagagccagctgtgttgggaggagacaaagaaagcacaaggaagaggcccaggagagaggccccaaggaatggaggccactcagcaggccctagctggcggcacattcgggctgagggcctggactgcagttacacagtcctgtttggcaaagctgaggcagatgagattttccaagagttggagaaagaagtagaatattttacaggagcactggccagagtccaggtattcgggaagtggcacagtgtgcccaggaagcaggcaacgtatggcgacgctgggctgacctacacattntcagg

SEQ ID NO: 114896 - DNA, 481 bp, Homo sapiens
cagagtccaggtattcgggaagtggcacagtgtgcccaggaagcaggcaacgtatggcgacgctgggctgacctacacattttcaggcctcacgctgtctccaaagccctggatcccagttctagagcgcatccgggatcacgtctctggggtataaagatggctgtgaccacatcggggagcaccgagatgatgaaagagaactggcccctgggaaccccaattgcctctgtctccttcggtgcctgcagagactttgtcttccggcataaggattcccgtgggaaaagcccctccaggagggtggcggtggtcaggctgccgctggcccacgggagcttactaatgatgaaccacccgaccaacacgcactggtaccacagtcttcccgtgagaaagaaggttctggctccacgggtgaatctgacttttcgtaaaattttgcttactaaaaaataaaaacatttttaacaaaaaaaaa

SEQ ID NO: 114897 - DNA, 441 bp, Homo sapiens
ggcacgagggtttacccgtgtttaacctctttgcgtctcgcttctgaatcgtatccacttgagcatcactagactgatctattttaacactggtggggggcagcgaggatggacagattcctggtgaaaggggctcaagggggccttttgaggaagcaggaggagcaagagccaactggagaagagccagctctgtctccttcggtgcctgcagagactttgtcttccggcataaggattcccgtgggaaaagcccctccaggagggtggcggtggtcaggctgccgctggcccacgggagcttactaatgatgaaccacccgaccaacacgcactggtaccacagtcttcccgtgagaaagaaggttctggctccacgggtgaatctgacttttcgtaaaattttgcttactaaaaaataaaaacatttttaacagttaa

SEQ ID NO: 114898 - DNA, 1262 bp, Homo sapiens
tctcgtgcggcggaattccgtctttcccaccacgaggccaccagggtgactgcgggattccgatctgcgccggagctgcgatgctagagcactcttgccacccccaccccacggacgtgttgcagtgatatcagaattttgcgtgcggtttacccgtgtttaacctctttgcgtctcgcttctgaatcgtatccacttgagcatcactagactgatctattttaacactggtggggggcagcgaggtcagttatgggtccttcctccttaaaggggtggacagttgactttgggcaaacctcttcgcctctgtgggcaacagtttccccttctgcaaaatgagggtttggattgtagtttctaagtttagctgtggcgtgcgaattcccaggaggtagttctttaaaaattcaagtgctcaggcgtggagtgcagacctctgggtttttgcaagctagccagctgattctgatgcacaggtggacgtgggagaccctggatcagattgtccctagggtcccttccggctttaacatcttctgtttcctttctaggacatggttttaaactttaaaatgaaaatgtgaaactaggaatgttgctgtgagaccccttggacaaacagatttttgcactggggatagaacttgagcaatttctgtcttgggcctcgccactgacgtcccttctttcctgtggggacaggatggacagatttcctgggtggaaaggggcttcaagggggccttttgaggaagcaggaggagcaagagccaactggagaagagccagctgtgttgggaggagacaaagaaagcacaaggaagaggcccaggagagaggccccagggaatggaggccactcagcaggccctagctggcggcacattcgggctgagggcctggactgcagttacacagtcctgtttggcaaagctgaggcagatgagattttccaagagttggagaaagaagtagaatattttacagcctcgctccttatgagagttggcttgatgggcacgaaccgtgaggacagcgttgagaaggagaacacctatacacatgagagaaacaggttaaatgtaggctcaggcaaatcagcccaatacccagcaacaggagctaaatccatgatgaaaccaatgcttgatgggatccagtgtagcaagctgtgcttccctgctgcagccggcataatggcagcagccactaccatcaacaatggagtcggggctgggcgtggtggcttatgcctgtaa

SEQ ID NO: 114899 - DNA, 1069 bp, Homo sapiens
tttttttttttttttttttaactgttaaaaaggtttttattttttagtaagcaaaattttaccgaaaagtcagattcacccgtggaagccaaaaaccttctttcctcaagggaaaaaatgtggtaaccaatgcgtgttggtcggggtggttccatcaattaattaagctccccgtggggccaacggcaaccctgacccaccgccaccctcctggaggggcttttccccacgggaaatcccttatgcccggaaagacaaagtctctgcaggcacctgaaagagacagaggcaatggggcttcccaggggccagttcctctttcatcatcctcggtgctccccgatgtgggtcacagccatctttatacctgttgatgagcacaaagttgaaggtctgtccagtcaccccagagaccgtgatcccggatgcgctctagactggggatccagggctttggaaccagcgtgaggcctgaaaatgtgtaggtcagcccagcgtcgccatacgttgcctgcttcctgggcacactgtgccacttcccgaatacctggactctggccagtgctcctgtaaaatattctacttctttctccaactcttggaaaatctcatctgcctcagctttgccaaacaggactgtgtaactgcagtccaggccctcagcccgaatgtgccgccagctagggcctgctgagtggcctccattccctggggcctctctcctgggcctcttccttgtgctttctttgtctcctcccaacacagctggctcttctccagttggctcttgctcctcctgcttcctcaaaaggcccccttgagcccctttcaccaggaatctgtccatcctcgctgccccccaccagtgttaaaatagatcagtctagtgatgctcaagtggatacgattcagaagcgagacgcaaagaggttaaacacgggtaaaccgcacgcaaaattctgatatcactgcaacacgtccgtggggtgggggcggcaagagtgctctagcatcgcagctccggcgcagatcggaatcccgcagtcaccctggtggcctcgctcgtgcc

SEQ ID NO: 114900 - DNA, 846 bp, Homo sapiens
tttttttttcatgcttagaaaaaatttattacaatgtaagaaagtctgaatagcatgaatttattataatgatttaacacttctagcactcgagttaaaaatgcccttccataaataacrtvcccctggaaaacatagcaaatttacacagtttaccatttcccaatgttatataaatccaacaagcttaaatcacctgcagctgagagaagaacagaggaaaccagagctgtgaagttcatsccatcccaatgggcagcaatggaggagtgagagccagtctccccctcctccagctccctcatctcagcatgggactggccaatctcagcactcaaagaatggggagaagaacagggtggggcagtacctggaagaatcaaggagggcaaacaccacagtcttacagctgcagaacaggtgaagggcacgggcctagggcatcctggaagacgvbcaggccatgggccattgtttgtgtgctggtgccaaggaggtgtcagttaaggctgctcagctgtggcctgcaaggaagaagggagggagaggccagctctgatgtcctggtcagatcttgaacagggcctgtcctctggccaaccacgtcttctactttcttacaaatgccaacgctgctttctactcctgggccttctggatcctccgtgttccaaggacctccctcttggaactccgtctggctccactggacaccctcctcaccctactttcatggacactgtggcctcatcattcttgctttcatctgggctagtttccagatctaggtcagcattccaggcaccaaacctcaggtgatccacccgcctcagactcacaaagtgt

SEQ ID NO: 114901 - DNA, 387 bp, Homo sapiens
tgcagtgcaggcggcccatggcgcgcgccccagccccgcaggttccaccgccgccgccgccctgctcagcttcctcctccgctgccgctgccaccgctgccggcctctccgcgcatccacaaccgcactttcgccacggccgtcgcagcgcactcctcccccggccgccctgggctgtccggagccggggagccctcgcagggccgcggacacgcgcggccgccgggctccggggagggagatcccacagtgtcatcaccaggatattgacattgatacagtcaagacgcagaacatttccatggcagcaacgatctcccatgttgcccaatggcattttaacagaagggacaagtgctagatcctctaacaaaaactagaagaaaa

SEQ ID NO: 114902 - DNA, 409 bp, Homo sapiens
caatgtgacttctatggcaagagcttcttgctcgtcaaccttcttcttcaatcccagccattccgttcccaccctttccctttttcaaaacggctcttcaactgtgggggctccaacctgccagtggctttctaacactccttgtgccatctttcaggagaggaaaggcagtggaacagctactccacagctggcaatgactgtttttatagaagacatgatttgtggtgagcgtcaccagcccctgattgcagagaacacaaaaaaggtgaagaggctcaagtgggaattcagactcacctatatacacattttcggtttgatttcctttcttaaccaccaactttagttgtaaaaatatacttcccactttctccaattcgctgctcccagatgtcactccaaattt

SEQ ID NO: 114903 - DNA, 1176 bp, Homo sapiens
atgggagatcgttgctgccatggaaatgttctgcgtcttgactgtatcaatgtcaatatcctggtgatgacactgtgggatctgtgcatcgagggaaaccggtcaaagccctcgcactattttgaggaaactttggtcactcagcgggagagctggcaggaaacctcgcgtctgccggtgccggcgccgcccctgcccctccccggagcccggcggccgcgcgtgtccgcggccctgcgagggctccccggctccggacagcccagggcggccgggggaggagcgcgctgcgacggccgtggcgaaagtgcggttgtggatgcgcggagaggccggcagcggtggcagcggcagcggaggaggaagctgagcagggcggcggcggcggtggaacctgcggggctggggcgcgcgccatgggcccgcctgcactgcactgaggacccggtgccggaggccgtgggcggcgacatgcagcatctgaaccagctgggcgcgcaggtggaaagatttctggctcagctctctgaatttgccaccaccaatcagatcagtcttggctccctcagaagcatcgtgaaaagcctccttctggttccaaatggctccctgggtgactctgatgtgcacccttgtcagtattccctgaagctcttctgtggctgtcatcaacgcagctctaggccaccttcagcccacctgggcatctcactgggcagccaatctcacctgctccgaagccctccaggcagcagccagagtcagcttcaaagacaagtgccagactgcagctgccacatgaagagagcccagaaagctcctctgagaatgctggacctcaggacaggggcccatgctctgcacccggccctcagcagccagatcctagaggcccagtccaagctgtgggccaagggagcggggcgggctgaggcctgctttgtgtcggcagggtctggggaattgggagcactggcgggagcccatggtccggggccgaaccagcccccttctgtttccctgaagaaggggctgagagtgccccacagggccatgatgctttcatggtgggccagtgcatggcagccagcccatgtggaggcctggagacaggtggtccacggcttctgtggccatttttcaggagagaagaggaagcaaggacagctttgctga

SEQ ID NO: 114904 - DNA, 1654 bp, Homo sapiens
acacaaagcatttcacatgttatgctttttcctgtggcttttaacctgagtttccccggaattgctcttacaaattccaactttggaacagacccaatttcactggagacccaggatcgtcacaaaaccaggaagataatttttaaagacaagagcaagcactagctctctgcaaggtacacgactctttaatccatgcagaaagacaactggatccagaccttttcttcagaacctttttattcatcatctaaccaacagaggtggttggctcgaactcaaactaaaatggcctcaaaaggcccacctcgttacgacatgacagggcaaaaccagaagtagggacagagtttagcctcagttctctgcagagaagaccaaagcaggtatttacacacaaggtgcctcatttaaaaactgaattggcattgttccacccagccacagcacccagagtgtgcaaaaatccgtgggggctctgtatatgtgtcatttcagacaatcccgccgatccctcagccataaaccaagctcttgctttttggggagggaggggtgatcagcatggttatcttgaaatggatggcacccatttgtttacttctgggaacttttgaagggggagggtgacaactttattttctccccctgaaatctgaagatgcagtggccttgtcaagagtatctaaaaatgtggtccctggaagaacaggtgggtgggtggttgcccctaacagagagttttaccaggggtaatttgtgttgggcttcttttcagtactttaatcctgctgttttttcagaaaccctttgcacctggggccccatggagccagcagggccccatggagcattcccacaggcctgtgagtgaagtgcctctcagagcagtcaacccagggaagggaggagggcagggaacggggccaggggagatgcagggacaagaaatcagcagaaacacctccatgctggttctgactcgctccatctcgtgcaggaagctgtagaactgaggcaaggttaattctatatacacattttcggtttgatttcctttcttaaccaccaactttagttgtaaaaaatcataacttccccaactttctaccaaattcgctgctccccagatgtccactcccaaatttcccactcccatatcctatgagctggttaatcatccagagtcgtggccctatggcccagcgagcaaggggtgggagcattctgcttccacttttcagaaaagtaagtggctttctcctcactaagacccagagttatgaaatccgcctggacctgcttggctgtgagactcttcttcaaagcaccatttggaaccagaaggaggcttttcacgatgcttctgagggagccaagactgatctgattggtggtggcaaattcagagagctgagccagaaatctttccacctcttttggctcagttaggaagtggaaaagcacctctgtcagggctgagaactgctgcgcgcccagcataattaagctgctgcatgtcgccgcccacggcctccggcaccgggtcctcagtgcagtgcaggcgcgcccatggcgcgcgccccagccccgcaggttccaccgccgccgccgccctgctcagcttcctcctccgctgccgctgccaccgccc

SEQ ID NO: 114905 - DNA, 253 bp, Homo sapiens
gttacctggtgtatttcacaaggcccatgacgatgcatcgggcggtgcctcccacagagcctactccgagctttttgtgggaaaaacaagaaagagcgtatcctctatttatactgcacaagcaaccagaagcttgggccagttaatgctgaaagaactttcaatccggaagcacccagggggagagaaaatgctctcccgaatggcaattcaggcctatgacagcaaagagctgagttcaatttctacttga

SEQ ID NO: 114906 - DNA, 1866 bp, Homo sapiens
ggagacgtacgaggaggaccgggagtacgagagccaggccaagcgtctcaagaccgaggagggggagatcgactactcggccgaggaaggcgagaaccgccgggaagcgacgccccggggcggggcgatggcggcggcggcggcgcgagcttctctcagccggtaacaaagcgcggcccccctgtccgctgtgcctggctgctccccgggaagcagggcctcggactctgtgaatctgtggtggaagcagacctcgtggaagcgctggaaaaatttgggacaatatgctatgtgatgatgatgccatttaaacgacaggctctagtggaatttgaaaacatagatagtgccaaagaatgtgtgacatttgctgcagatgaacccgtgtacattgctggtcaacaggcttttttcaactattctacaagcaaaaggatcactcggccaggaaatactgatgatccatcaggaggcaacaaagttcttctgctctcaattcagaatccgctttatccaattacagtgccaactcgtctaaatgttattaggaatgacaatgacagttgggactacactaaaccatatttgggaagacgagatagaggaaagggtcgccagagacaagccattttgggagaacacccttcttcgtttagacatgatggctatggatcccatggtccattattgcctttaccaagtcgttacagaatgggctctcgagatacacctgaacttgttgcttatccattaccacaggcttcttcctcttacatgcatggaggaaatccctctggttcagttgtaatggttagtggattacatcaactaaaaatgaattgttcaagagtcttcaacctgttctgcttatatggaaatattgagaaggtaaaatttatgaagaccattcctggtacagcactggtagaaatgggtgatgagtatgctgtagaaagagctgtcacacaccttaataatgtcaaattatttgggaaaagacttaatgtttgcgtgtctaaacaacattcagttgttccaagtcaaatatttgagctggaggatggtaccagcagctacaaagattttgcaatgagcaaaaataatcgctttacaagtgctggccaagcatctaagaatataatccagccaccctcctgtgttttgcattattataatgttccattgtgtgtcacagaagagaccttcacaaagttgtgtaatgaccatgaagttcttacattcatcaaatataaagtgtttgatgcaaaaccttcagccaaaacactttctgggctattagaatgggagtgcaaaactgatgcagtagaagcccttacggcactgaatcactatcagataagagtgccgagaaggcatgctttctgtgtaggtcattgcacaaggagactgggtcacttatttctgggaggatgtggtgcaggtccatggaggggaagatcaacagctcaagctcagagagaaatatgtaccctgaaattcgagatgcctcgtgctaattcccatggagactggtgtcaggagattaccttttcaaagcgctggaagattaacgagaatttcagatgccgtagcaatttgaagggaaaaaattgtggcctccacagtgccagcttgcctgccatgagggagacatatttgagagtccttcagctccctgtgggctgtacatccaagcaagaaagtccagatcttgcatctgagttggcaactgaaggaagagaccttgaatcagcacagcagtcagaattctgcttgagggcagctttgctgaaactaaaaggaacaactttatctagaacagtctctctgcacattcgctttcccctgtggcagttgcgatgttag

SEQ ID NO: 114907 - DNA, 1711 bp, Homo sapiens
  misc_feature (1)...(1711): n = a,t,c or g
aaaatgaantgtcaaagagtcttcacctgtttctgcttatatgaaatattgagaaggtanatttatgaagaccattcctggtacagcactggtagaaatgggtgatgagtatgctgtagaaagagctgtcacacaccttaataatggccaaataattgggaaaagaactaatggttggggggctaaaccaccattagttggtcccagtccaaaaattgaaccggagggaagggacccagcaggtacaaaaaatttggcaatggaagcaaaaaaaaatccgctttacaagtgctggccaagcatctaagaatataatccagccaccctcctgtgtttggccatttattataatgttcccattgtgtgtcacagaagagaccttccacaaagttgtgtaatgacccatgaagttccttacattcatcaaatataaagtgtttgatgcaaaaccttcagccaaaacactttctgggctattagaatgggagtgcaaaactgatgcagtagaagcccttacggcactgaatcactatcagataagagtgccgaatggttccaactccctatacatgtgaagctttgcttttctacatcatcccatttataagaagagaagagcatgttagaatttatgttcacctttattacaatttcaaagctacacttcattaaaaaaaaatctaaaatggttgatctcatgttgccttgcttactttaagatcctgttctgtaataaacatattttgccttgagtaaatttgttgtaagcttaaatattgaattgttttcattttaagatagaatatcataatgtagactatctacagcttcattgtagattatacagatatatgatttctaaccttattactggaatttttcttccacagtaaaaatatatttgcattcttaatgctaattatctgcaagtattttttccattgtgtaagagattgaatgccaggtgaaagtattgcattttaatatagaattccctattatatgtttagatgtttaagtatgttgcagttactcatattaaacataacttgtatatttattattttaatgaagtttgagaataacgttacatatgttgaattttaagtactacagatttaactgattttatatttctgaaaggctaacagacatggatacacgtgtacagtatgcattcaaacttatttaaattggtgtatttttttttaagtcacgtggccatttgtattgacatgcctctgtttctagtccagtttggagattttataaagttataacaatgagttaatgtgttcattttcatttgttgcatgtgacttaaatacagctagtatttggcattgagattttaatagaggttataattaacagttcctcttatagataataatctgggatccatgggtgggcttcagagaatctgtgtaccccctaaaattgtatgtagaattttggatatttacatttttattttttaactcttggatccatcagtaatatgtatttttctatatggtacaagatttaaggatctaattttatttttattccaaacagatagctatttgtctcaataccatttattaaacattctttctcccactggatctgttttttttttttttttaagataatagattttatacataggcaagtaagatttaaggaccaaacatggtattaagagactatagcacgattgttacca

SEQ ID NO: 114908 - DNA, 2112 bp, Homo sapiens
atgaaagaagccccctccaccaaaaaccatgattctgaggcctcaccagccatgtggaactccgccagtctcctggccgcgcagtccccgcggacggccgggcgcgatgtaccctcgcagaagaggcgctgcggcggcgaggactggccggcgcgatccgagtgcgcgcgccccaccgccacccccacccgcctgccagccggtccctccggccgccgccatgtcctcctcctcttcctcccccagggagacgtacgaggaggaccgggagtacgagagccaggccaagcgtctcaagaccgaggagggggagatcgactactcggccgaggaaggcgagaaccgccgggaagcgacgccccggggcggggcgatggcggcggcggcggcgcgagcttctctcagccggtaacaaagcgcggcccccctgtccgctgtgcctggctgctccccgggaagcagggcctcggactctgtgaatctgtggtggaagcagacctcgtggaagcgctggaaaaatttgggacaatatgctatgtgatgatgatgccatttaaacgacaggctctagtggaatttgaaaacatagatagtgccaaagaatgtgtgacatttgctgcagatgaacccgtgtacattgctggtcaacaggcttttttcaactattctacaagcaaaaggatcactcggccaggaaatactgatgatccatcaggaggcaacaaagttcttctgctctcaattcagaatccgctttatccaattacagtgccaactcgtctaaatgttattaggaatgacaatgacagttgggactacactaaaccatatttgggaagacgagatagaggaaagggtcgccagagacaagccattttgggagaacacccttcttcgtttagacatgatggctatggatcccatggtccattattgcctttaccaagtcgttacagaatgggctctcgagatacacctgaacttgttgcttatccattaccacaggcttcttcctcttacatgcatggaggaaatccctctggttcagttgtaatggttagtggattacatcaactaaaaatgaattgttcaagagtcttcaacctgttctgcttatatggaaatattgagaaggtaaaatttatgaagaccattcctggtacagcactggtagaaatgggtgatgagtatgctgtagaaagagctgtcacacaccttaataatgtcaaattatttgggaaaagacttaatgtttgcgtgtctaaacaacattcagttgttccaagtcaaatatttgagctggaggatggtaccagcagctacaaagattttgcaatgagcaaaaataatcgctttacaagtgctggccaagcatctaagaatataatccagccaccctcctgtgttttgcattattataatgttccattgtgtgtcacagaagagaccttcacaaagttgtgtaatgaccatgaagttcttacattcatcaaatataaagtgtttgatgcaaaaccttcagccaaaacactttctgggctattagaatgggagtgcaaaactgatgcagtagaagcccttacggcactgaatcactatcagataagagtgccgagaaggcatgctttctgtgtaggtcattgcacaaggagactgggtcacttatttctgggaggatgtggtgcaggtccatggaggggaagatcaacagctcaagctcagagagaaatatgtaccctgaaattcgagatgcctcgtgctaattcccatggagactggtgtcaggagattaccttttcaaagcgctggaagattaacgagaatttcagatgccgtagcaatttgaagggaaaaaattgtggcctccacagtgccagcttgcctgccatgagggagacatatttgagagtccttcagctccctgtgggctgtacatccaagcaagaaagtccagatcttgcatctgagttggcaactgaaggaagagaccttgaatcagcacagcagtcagaattctgcttgagggcagctttgctgaaactaaaaggaacaactttatctagaacagtctctctgcacattcgctttcccctgtggcagttgcgatgttag

SEQ ID NO: 114909 - DNA, 1711 bp, Homo sapiens; identical to SEQ ID NO: 114907
  misc_feature (1)...(1711): n = a,t,c or g

SEQ ID NO: 114910 - DNA, 907 bp, Homo sapiens
cactgtccctgggtcaacaactgtgtaggcgagaacaaccagaagtacttcgtcctgtttacaatgtacatagctctcatttccttgcacgccctcatcatggtgggattccacttcctgcattgctttgaagaagattggacaaagtgcagctccttctctccacccacccacagtgattctccttatcctgctgtgctttgagggcctgctcttcctcattttcacatccattgatgtttgggacccccagttgcactcccatctgcacagatgagacgggaatagaacaattgaaaaagggaatgagagaagatgggctaaaaaaacaaaatggattgaacattgaaagccgtttttggccaccccttctctctaggctgggccagcccctttgccacgccagaccaagggaaggcagacccgtaccagtatgtggtctgaaggaccccggaccggcatggccactcagacacaagtccacaccacaggcactaccgtcccatccgttctcatgaatgttttaaatcgaaaaagcaaaacaactactcttaaaacttttttttatgtctcaagtaaaatggctgagcattgcagagaaaaaaaaaagtccccacattttattttttaaaaaccatcctttcgatttcttttggtgaccgaagctgctctcttttccttttaaaatcacttctctggcctctggtttctctctgctgtctgtctggcatgactaatgtagagggcgctgtctcgcgctgtgcccattctactaactgagtgagacatgacgctgtgcgtggatggaatagtctggacacctggtgggggatgcatgggaaagccaggagggccctgacctcccactgcccaggaggcagtggcgggctccccgatgggacataaa

SEQ ID NO: 114911 - DNA, 1836 bp, Homo sapiens
  misc_feature (1)...(1836): n = a,t,c or g
atggtaacgtggctttacagatttttacccacttcaaatatggccgccaagctccgttctcttttaccgcctgatctacggctacaattctggcttcatgcccgcctccaaaagtgcttcctctcgaggggttgtggttcttactgcgcaggcgcaaaagcaagtcctcttccgggcaaaatggcgatgggactaagggtgcggacgccgggagcttctgcgcattgctacagtccgggcagcgggtccacagcgggggcggggacctcgcaatggcttgggaaaccgctgaccacacggctcctattcccagtagccccgtgctgctgtcgcccacactacctcttccttgcggcttccggcccccggaagcctcagtacctctgctatctcttttgcagaagtccaggttcaggcccctcctgttgttgctgcaactccctcacccacaagcaagtacctgaaggtggcttcttggagagactgcagaatgtagtccaaactgctgcagagcaaagctttcgctgaaactggggctgggggtcatacaccccagtgggaacttgatccaagaatttacttgggaatttaatgcatgttgatcttggggcctaccttgggtgggggggccattgctggcatgtaacagtctttggccgcttgcctgatttttcctctcatcgtgaaggggccagcgagaggcagccaggatccacaatcacttgccagagatccagaagttttccagtcgaatcagagaggccaagttagcaggagaccatattgagtattacaaggcttcctcgggagatggcactttaccaagaaaaaacatggtattaaactcctataaaccctcctcattctcccctgtgactcaaggccccaatcttcatctccttccttcaatgcctttgagagagatggccaaccttcctgtgcccaagcctgcaagacaggtgggcctctggtggttccagggatctnacgggtatccgatcccatctaccatattacccactgggcagtcactgcttacaatgtggggctgttcttgagctagggtgctgaggacaggtgttgcaaagttctggacctttcagtggatgagaaatgtcatcaagaatgatgccccctgataaccttgcccccaaaaccatggcatttccccaagggcagtgttttatgtactgggctctccctccaaatttgtttttcccctggtcccaagttatccttttctcggaattccagccagtacgcaacttgtactttaaatccccccagcgttgttgtacatgaccctggaccaaattaccctcccacggggaaggcttccctagagagctttcaaaaaaaggctggaaaaatgctgaaaatgacgcgtccagctgcggagagccgtgaaccaacgcatgcgggaatccagttggagcttagccagcccaggggtcctttacggacagaccttttaccccacaaccctctccttacaacctggaaaggataaccctcccaaatatccctagcagccagcagcagcaaaccaaagttcaaagtatccctggggcacgacacacttggctgacttatggttctgtgcgcatttctggcaaggaattctggtctctttcagagactcatcctcaaaacaacgacttgacgactgtgtccttgccccacgtcctaggaactgtgggcacacagaagatgttcattttaaaaacggatttcatgaaacactcttgtacttatgtttataagagagcactggggtagccaagtgatcttcccattcacagagttagtaaacctctgtactacaaaaaaaaaaaa

SEQ ID NO: 114912 - DNA, 373 bp, Homo sapiens
  misc_feature (1)...(373): n = a,t,c or g
cccacgcgtccggtctgtggactttgaagctgtggcaatcacagtgaaagagctagttcgatatacactcagtataaatccaaataaccattcttggttaattatccaggcagatatttactttgcaacgaatcagtattcagcagctcttcactattacctccaggcaggagctgtgtgttctgacttctttaacaaggctgtgccccctgatgtttatacagaccaggtggccattttatgtcagttcctcagagaaattgactacaaaacagcgtttaaatctctgcaagaacaaaacagtcatgatgctatggactcctactacgactacatatgggatgttaccattttggaatacttgacttatctn

SEQ ID NO: 114913 - DNA, 777 bp, Homo sapiens
gcacgagagtgtgtccagtcagcacaaacgaggaaatgatggcagagttagtttaataaaacagagggaatctacgttaggtatcatgtatcggagtgaactgctttcttttatcaaaaaattacgagaaccactcgttttgactattattttatcactctttgtgaaacttcacaatgttcgggaggacattgtgaatgatattacagctgaacacatttctatttggccatcttccattcccaacctccagtctgtggactttgaagctgtggcaatcacagtgaaagagctagttcgatatacactcagtataaatccaaataaccattcttggttaattatccaggcagatatttactttgcaacgaatcagtattcagcagctcttcactattacctccaggcaggagctgtgttgttctgacttctttaacaaggctgtgccccctgatgtttatacagaccaggtaataaaacgaatgataaaaatgttgttctttgctgaattgccacacacaggtggctaattttatgtcagttcctcagaggaaattgacctacaaaacagcggtttaaaatctctggcaaggaccaaaacagtccatgatggctatgggactcctactacgactacatatgggatgttaccattttggaatacttgacttatcttcatcataaaagaggagaaacagataaaagacaaattgcaatcaaagccatcggccagacagagttgaatgcaagcaatccagaagaagtgttacagctggc

SEQ ID NO: 114914 - DNA, 1153 bp, Homo sapiens
atggtgtgctatgatttgggcgcagcatacttccagcaaggctccacaaattcagctgtctatgaaaatgccagggaaaaattttttagaaccaaagaactaattgcagagataggttcattatctcttcattgtaccatagatgagaagcggttagctggctattgtcaagcatgtgatgttcttgtaccttcttctgatagtacatctcaacagttgactccatatagtcaagtccatatttgtttgagatctggcaactatcaggaggtaatacagattttcattgaagacaacttaaccttgagtttacctgtccagttccgacagtcagtcctaagagaactctttaagaaagctcaacagggcctccagtctgtggactttgaagctgtggcaatcacagtgaaagagctagttcgatatacactcagtataaatccaaataaccattcttggttaattatccaggcagatatttactttgcaacgaatcagtattcagcagctcttcactattacctccaggcaggagctgtgtgttctgacttctttaacaaggctgtgccccctgatgtttatacagaccagaggaaatcagtcagagtggatggctcagcaaaacccatcacaactgcggaaaaaggaagtgactggctagagcaccaacactgtgaagaacagctgtggcagagaaagtgccacggccccaccccatcaccagattcagtagaaaggcccttggaatttcctacaaggttcagttctgaacagctccaccttcaaatcagtatagaatcctcccagtgactctgtgagggaggtaaatgtccctgctccccgttggtgggggaaacagaggccagagtggttaaagattttgcctgaagttaaaacaaaaaatgaaaagtcacttggactgcagggaagaatacttacaatacaaggcaattaaaaaaaaaaaaagaaaaaagttgagccaacctgtcactcttcactcagatgccatgaaagacatcatcaccagacagtccccacactcttgccacttggcaggacaggctccatgacagaggatttttcactctgtggaaatataaagcctatctcttttcccatgggcagagagaaatatgaagtcacttgagtgcct

SEQ ID NO: 114915 - DNA, 562 bp, Homo sapiens
gcccctggctctcctcagctgtagtcagcattgctagctgcccacaactcacgccagagggtgaagatgctggtctcagagaaccagagcttggcaggccccctcatacacctcttggagaggtagatgctggtcaactatgcaccattacctgtgagcagagcttactcctctgccattctctctccaggccctcagcatcctcatgctccctcacaacatcccgtccagcctgagcctgctcaccagcatggtggatgacatgtggcattacgctggggaccagtccactgattttaactggtacacccgccgagccatgctggctgccatctacaacacaacagagctggtgatgatgcaggactcctctccagactttgaggacacttggcgcttcctggaaaaccgggttaatgatgcaatgaacctgagacaagtgcctgctggacagaggtgtgattccagggcccgtgtcacatgacaccagcatgcattgcaggattattagtgtattttgagtctgtaaaaataataaatatgtttgaagtaaaaaaaaaaa

SEQ ID NO: 114916 - DNA, 483 bp, Homo sapiens
tttagggaaaggctggcctgaggaagaaccagccaggcccttgggaaggccctcaggactgtcagctgaggccaaaagggagcaagaccagctgtgaacctgaaggaaaaataggtatgccttcctaaagagggttccccaatggctagtccccacctaacctgcttggcagtgtggcccatgttccattgcatcattaacccggttttcccaggaagccccaagtgtcctcaaagtctggagaggactcctacatcatcaccagcttctgttgtgttgtagatggcatccagcatggctcggcgggtgtaccagttaatctgtaaagaaacccacactcccgctgtggtctggtgcaattctgaggcagttcctaccacaaggccatgggaactccctgggttccctcttgactacttcttgactgtcacagatacatctggccctctggacaacaccctcgtgccaagcatggcgtaaaga

SEQ ID NO: 114917 - DNA, 904 bp, Homo sapiens
ctgcttggcagtgtggcccatgttattgcatcattaacccggttttccaggaagcgccaagtgtcctcaaagttggagaggagtcctgcatcatcaccagctctgttgtgttgtagatggcaccagcatggctcggcgggtgtaccagttaaaatcatggactggtccccagcgtaatgccacatgtcatccaccatgctggtgagaggctcaggctggacgggatgttgtgagggagcatgaggatgctgagggcgggcaggcatcgcagctgcaggagcctccagcccgcccggccaagcgcaccagataccgccgccgacgccattttggaagcggcacgtcgcccacggcgacgcgaccggtagctacgggaccacggccccgttcctcgatgggaacgcagccacggccgccccgctgaaagccccggctggtttattcctgagaagtcggtgtgaggggccagggccggccctaacctccctggggtcctgactgggaatttctgccgttccccggctgcctcgtcccttgcgcagccggccctactctgaggccccggggacaccacgctgaggagaaacggctccgagcttgggatcggggagacctggttctgagacccggtcctaccagtagccaatcgttgtgaccttgggcctcagtccccgtgacgttttggtccctgggggttcctggcagcaaagcacgaaagccttggagtcggggggtacctgagctcacgattgtaatttcgaacctgcaacttgtccgaaccccagcgtgttgagttgatataattaagtatccagatcggaaggatgcttgtactagaacagacagctaggcctttgtccagaaggattgattgagtgggttgggtgtggtccaggaatctcat

SEQ ID NO: 114918 - DNA, 1625 bp, Homo sapiens
tccaaaatggcggcggcggcggtatctggtgcgcttggccgggcgggctggaggctcctgcagctgcgatgcctgcccgtggcccgttgccgacaagccctggtgccgcgcgccttccatgcttcagctgtggggctaaggtcttcagatgagcagaagcagcaccctcccaactcattttctcaccagcattctgagacacagggggcagaaaaacctgatccagagtcttctcattcaccccccaagtatacagaccagggcggcgaggaggaggaggactatgaaagtgaggagcagttgcagcaccgcatcctgacggcagcccttgagtttgtgcccgcccacgggtggacagcaaaggcgattgcagaacgagcccagtctctgggtctctccagtgcaggagtgatgattgctcgggaaggatggcagtgagctaatactgcattttgtgacccagtgcaatacccggctcacacgtgtgctagaagaggagcagaagctggtacagttgggccaggcggagaagaggaagacagaccagttcctgagggatgcagtggaaaccagactgagaatgctgatcccatacattgagcactggccccgggccctcagcatcctcatgctccctcacaacatcccgtccagcctgagcctgctcaccagcatggtggatgacatgtggcattacgctggggaccagtccactgattttaactggtacacccgccgagccatgctggctgccatctacaacacaacagagctggtgatgatgcaggactcctctccagactttgaggacacttggcgcttcctggaaaaccgggttaatgatgcaatgaacatgggccacactgccaagcaggtaaagtccacaggagaggcactggtgcaaggactcatgggtgcagcagtgacgctcaagaacttgacaggtctaaaccagcgtcggtgagaggaaggggtataagctacaatgcctagaagagaatgagccggacagattgaaagagctttgaaaagtattagggtgcccttccacataacctggtgttcaccagaaacaccacttaaggactcctgagtcactaccacagccaccctgggaaccacaagggcatttgatgctaccgttctggtcagggattgggctgcttcttcagttcctaataccagaaccaagcctcctgatgcctttcttgactgcaactgtgtgattgaaaaatgagatgttcatccaagcagtcaagccacagaaacccagcatgtccctgtcacaatctcatgggcaccttgatcatgtcttaaccttcccttaaccttggggctcccaagccagagtcaaggtctgacgccacctcaaggtgacagctcatctccagcacagcacaggcgtgtgcacacagaggtgttccttgaagccccctccctctcaggtgtcctgagatgctgctcctgggagccccctcagaaaactgcctcacctgagacaagtgcctgctggacagaggtgtgattccaggcctggtgtcacatgacaccagcatgcattgcaggattattagtgtattttgagtctgtaaaaataataaatatgtttgaagtagtttcccatt

SEQ ID NO: 114919 - DNA, 375 bp, Homo sapiens
ggcggtattcgggccaccttgtaccatgcggagaccatcaagaatgtgcgcacagccacggaaagctttgcttctgaccccatcctctaccggcccgttgctgtggctctagacactaaaggacctgagatccgaactgggctcatcaagggcgtatttattcgcgataagctcatggagcggcgtaaccgtcgcacaggaaggacagagaaagcgcggatctgggaagtgacggacagaacggtcaggacctggattggggaggcggttgccgccgctgctgctgacggtgtgacgttctctgttccggtcacaccacatacgttccgccattcctatgcgaatgcacattgctgtatgccggtataccgctga

SEQ ID NO: 114920 - DNA, 447 bp, Homo sapiens
attacgccaagcttggcacgaggggcttatttctctccaggtgaagcagaaaggtgccgacttcctggtgacggaggtggaaaatggtggctccttgggcagcaagaagggtgtgaaccttcctggggctgctgtggacttgcctgctgtgtcggagaaggacatccaggatctgaagtttggggtcgagcaggatgttgatatggtgtttgcgtcattcatccgcaaggcatctgatgtccatgaagttaggaaggtcctgggagagaagggaaagaacatcaagattatcagcaaaatcgagaatcatgagggggttcggaggtttgatgaaatcctggaggccagtgatgggatcatggtggctcgaggtgatctaggcattgagattcctgcagagaaagtcttccttgctcacaagatgatgattggacggtgcaaccgagg

SEQ ID NO: 114921 - DNA, 653 bp, Homo sapiens
ggaccgagctgggaagcctgtcatctgtgctactcagatgctggagagcatgatcaagaagccccgccccactcgggctgaaggcagtgatgtggccaatgcagtcctggatggagccgactgcatcatgctgtctggagaaacagccaaaggggactatcctctggaggctgtgcgcatgcagcacctgattgcccgtgaggcagaggctgccatctaccacttgcaattatttgaggaactccgccgcctggcgcccattaccagcgaccccacagaagccaccgccgtgggtgccgtggaggcctccttcaagtgctgcagtggggccataatcgtcctcaccaagtctggcaggtctgctcaccaggtggccagataccgcccacgtgcccccatcattgctgtgacccggaatccccagacagctcgtcaggcccacctgtaccgtggcatcttccctgtgttgtgcaaggacccagtccaggaggcctgggctgaggacgtggacctccgggtgaactttgccatgaatgttggcaaggcccgaggcttcttcaagaagggagatgtggtcattgtgctgaccggatggcgccctggctccggcttcaccaacaccatgcgtgttgttcctgtgccgtgatggaccc

SEQ ID NO: 114922 - DNA, 2292 bp, Homo sapiens
atgaggaaaaatcagatggcccatgaggctccttccccggtgccctactcgccccctaaaacaggtgtcgctgtgtcccttgaagcggcctttggcccgctggggcatcgcagctgcagcgtttgcacgggcaccgcagacccggctggtgggcaaatcgagagtgatagggaacttcagaccacatattttaacatgcttaccattgaagaggatgaattcagccaaatttacgaagctagagttcaaagaggtgaagagcttgccttgaagttcaaggccatacagcccaaagtggcagaatcagacctgcacccatgtccatctgcacaaagctggtgcttctaccctgtacaacacagtgtgtttccagtgggctgtgactctccggtggtggaacaagccttgtcaattgctgtctgccacatccagtctgacctggttgcctgggcattctcccaccccatgggcagcagctgctcttgctgccagggctccaggatttttagtcagcgacagctaatgagcaaaggagcaatgattagagaatcagttcttcttaagatcccaagatttgttctaactattgtgggggtaattccaggctgcatttcaaacagtgttggcacagaaattcttaaagtcgtagcccaagtcggtcagcactggaggacctcagaagccatgttgaagccccatagtgaagccagggctgccttcattcagacccagcagctgcacgcagccatggctgacacattcttggagcacatgtgctgcctggacactgactcgccacccatcacagcctggagcactggcatcatctgtactatgggcccagcttctccattgctagagatgctgaagaaaacgattaagtctggaattaatgtggctcatctgaactctcatggagcccatgagtaccatacagagaccatcaagaacgtgcgcacagccacggaaagctttgcttctgactccatcctctaccagcccattgctgtggctccagacactaaaggacctgagatcccaactgggcccgtcaagggcagcggcactgcagaggtggagctgaagaagggagccactctcaagttcacgctggataatacctacatggaaaaggtgaagcagaaggatgctcactttctggtgacagaggtggaaaatggtggctccttgggcagcaagaagagtgtgaaccttcctggggctgccgtggacctgtctgccatgttggagaaggacatccaggacctgaagtttgggggcgagcaagatgtcgatatgatgttttcatcattcatctgcaagacatctgatgtccatgaagttaggaaggtcttgggagagaaaggaaagaacagcaagataaccagcaaaattgagaatcatgatgggggttggaggtttgatgaaatcctggaggccagcgatgggattatggtagctcgtggtgatccaccacaagccgtcgagatgagattcctgcagggaagctgggaagcctgtcatcttgccactcagatgctagaggatgtgatcaagaagctccaccccacttgggctgagggcagtggtgtggccaatgcagttctggtggaagctgactgcatcatgctgtctggagaaacagccaaagggaactatcctctggaggctgtgcacatgcagcacctgattgcctgtgaggcagaggccaccatctaccacttgcaattatttgaggagttctgccacctggcacccattaccagtgaccccgcagaagctactgccatgggcactgtggaggcctccttcaagtgctgcagtggggccataatcgtcctcaccaagtctgcaggtgtgcccaccaggccagcaatgcttatagagctcactctgggctgtagtgtggcactggtgggctggaacaccagggaagaagatttatgcctcgctgaaacgtggctgtttttagagcctgctgtggcgggagagcccggagcctggctgcccatcatgtggccccacccaagcaagagaagaaggaggaatgcagaacagaggcccccagagtgtatggcaagagggtggcagcttcctttcttctgtgtactctgtttagttgctttagaaaatggaagcccagaggactcccaaccctgtcctggggtcaggaaacagccactgtcctgcagcaaacacttcaccctccaccttccattttcccccactactgcagccgcctctgagcctgtggctatagagcctatctctatgtcaataaacaacagctga

SEQ ID NO: 114923 - DNA, 2385 bp, Homo sapiens
atgggcacttattaccagaaacaccagacagccagagatctgctggccctggggggcaatcctttcctttctttgcttggtaaagggtgggtccagttgatgaagacggtctggtcctctcttccaggcaaagagaggacggagattgggctggggccaggtatctgggagctgggtctgctctcctgggtggagctttcccaggccagtggtgcagaccaatggggactgaagttggagatcctggtaagacagctccagggatacccaaaggaaaaaaccaagctaatggaggcagccagaaaacaggacacaccgcagaacaaaagatggatcaccaagtggaaaaatgaagcagaggagatcggaggagggctccacagttttacaagtaaagaagataattatactctagttgttgacatgaactgcttggatgttcagggttgtggtgatgacgtgaacaacagacttcttcactctgcaagttacccaacagcaagctgggtggatgaagccatgccaacagcatctggcaggagccagcaccaagcacaccttacacagcttcgacagagctgcacggagaacacatatgcttgctccctctgtctctcatacaaagtaccttatagtgtgagctccagacacacagacactgccatcctgcctacaaagaaaggaatgcagacacagccaacgtcagcattcggggtgggaccacagtggaacgcatacatcctttcacagctgccaaggccttctgggaagtccaatgcctgcccccacatctctcagagccaaacatcttcttctgcactttccacaagttacaattatgtatttacctgtgtgcttactgccctaacctcctacttatggactgatgtttatgtccctccaaagttcacatgcactgctgttaggatcaaagtgaccatccatgatgcacagagcacgtaccagggtaaagttccagctgggacgcaggcatcagcaattgtagaatttgggttctcccttcctcagatccctgactgtccttggtcattcaagaaagattcactgtccctaggccaagagtcaggagcaaaacaggaacaccaagggtatggtctgaggatgttgtcagcagggagcaacgaccaagcaggacactgggagctgctgtcccgtctgcaggcgggactccatgaaggcccctgtctgcccttccagcctttgccacaaaccctcgaacgctggctgcacactggaatcacttggggagcttttaaaagatacggaggcctgggtctgactcccgcccaggacctcagaaagggcctgccccgcgcgaatccccagtcgctgggacttacttggccaccaggtttacagacttcgcagccgctgagagctagagaagagcccggagagcgccatggtccggggacgccggggccgggaagcgccgtggcccgggaggacgctgctcccgcagtagcgcgagggaggggcaggaccggggcggctgcctcgcgggcccggaacgggaactggctgcgactacagccgcagccgcgcccctctgttggcgcgcccaagagcctgccggctgctgggagaggccgccgaagggcgggggcggtcaaggcagggtcccacggtgctgccattcgcccgggtgaaataaacagctttattgctcacgcaaagccttttggtggtctcttcacacggacacgtgtgacatttggtgccgaagacccgggacaggaggactccttcaggagaccagtcccctgtcctcaccctcactctgtgaggagatccacctatgacctcgggtcctcagaccaaacagcccaaggaacatctcaccaatttcaaatcggatcttctcggactgacgctgcccgatcgcctcagaagcctcctggaccatcacagatgctttgggtaactcttacagtggaggcatggccttttaaatcctataaactctccttacaattcccccattttacctgtccaaaaaccggacaagccttacaggaagctggagtcattcactgcaagggccatcaaaaggcatcagatcccatcactcagggcaatgcttatgctgataagggaactaaaaagtggaagaaggaggcagaagagggagaaccagagagatggcagcctgagaaggacttgcctgagaaggactcggccgacattgctggctttgaagatggagaaatgagactgagccaaggaatgcaggtggcctctggtgctgcaaaagacaaggaaatggattctcccacagaccctccagaaggaatgcagacctgccaacactatgattttagtccagtgagacccattttggaatgctggcctccagaaccctaa

SEQ ID NO: 114924 - DNA, 852 bp, Homo sapiens
ctgtttggtggtctcttcacacggacgcacgtgacatttggtgccgaagactcgggacaggaggactccttcaggagaccggtcctctgtcctcaccctcactctgtgaggagatccccctacgaccttgggtcctcagaccaaccagcccaaggaacatctcatgaatttcaaattggactcatgctcaaggaccatcaaagaatcaggtcagcccctatagacccaggcttcaggctggctcctaaggacacaggctccaggcccaccctcaaagacccaagctctgagcccaaccacacacacccaatcaacagactaggcactggggagacctgcaatccagaactgccaacaggcataaacaacaacaacaaaaacaaaaacaaatttaaccttgccttctctggcctatgttctagtaaaaagcccaacagagacctagtggagagccccaactcctgttctacagccaagagatgccctgccagcgaggaggaatctagagaggcactgtggtcacagccgcttgctgcgctgtgcaagggtgcaaactggacagagaatgagtttgacaaattgacagaagtaggcttcagaaagtgggtaataacaaactcctctgagcaaaaggaggatgttctaacccaatgcaaggaagctaagaaccttcacaaaaggttacagaaactgttaactagaataaccagtttagagaagaacataaatgaactgatgatggagctgaaaaacacagtacgagaacttcgtgaaggatacagaagtatcaatagccgaattgatgaagtggaagaaaggatatcagagattgaagtcagcttaatgaaataa

SEQ ID NO: 114925 - DNA, 408 bp, Homo sapiens
atgctgccaactaaaaggctgtgggtcagaaaagtttggattgaacaaggtcctaagcaggctaaaggaaggcttgccaaacacagtttacctgggaaaaacgtgtgtgaggactggctcactgtcagacactcatgtaactgctgcgttttgagttcaggtaaaagttatgaacaagaaaaatatacccttcaaagagaagttgaactcaagagtcgaatgttagaaagtttgagctgcgaatgtgaagctattaaacaacaacaaaaaatgcacctggagaaattggaagaacaactaagcagaagccatggacaggaagtgaatgaactaaaaactaagagttccagagttaaccacagtaaacagctcaatgtgctgccttgcaaagatgcatttcatacatag

SEQ ID NO: 114926 - DNA, 664 bp, Homo sapiens
ccgcgcggcttgggcggacgtctcgtgagacgtgggacttctcgcgggaactgcattcaaatatcccaggcgcttactcgagagctagctgagcgaagtgggccggcgactgtggagttagcgtcctcaatgtggacgccctgagctcccattaggagccagctggctgcggcagcaggggactagcgtgagagttggctaaaaaaaagaaaagaacatggaggcagatataatcacaaatcttcgatgcaggctcaaagaggctgaagaagagcgactaaaagctgcggagcatggtttacaactagtagagagtcaaaatgaattacagaatcgattggataaatgtcgtaatgaaatgatgaccatgactgagagttatgaacaagagaaatatacccttcatagagaagttgaactcatgagtcgtatgttagaaagtttgagctgccgaatgtgaggctgttatacgtacaacaaaaaatgcacctggagaaattggaagaacaactaagcagaagccatggacaggaagtgaatgaactaaaaactaagatagaaaaacttgaaagtggaatttagatgaagccaggctttagttgaaaagcagctgaagcaccaagtagatcatcagaaggaactcctctcttgtaaatcagaggaa

SEQ ID NO: 114927 - DNA, 588 bp, Homo sapiens
atgttttgctccaagacagctgggcctaagcccttcagttcgaatcctcatccaagactgaaagctcctacatcttcctgtcactttagccacaagctgcaccgtctggaaatgcccactgctactagggacacaggcgaggccggacagtgccggaggacccggggtgcctctctccacgtgcgcggcctcacaggacaagcggcacctccagtccaccctcgctccagccctcccgtactatacccccggcatcctctgccccgaagcagggagatgccgggagccctccctaccaggctgtaccggagaaaaacaaacctggagccacaccgcgcacatgcgcagaaagcccaaagcggctcccgcgaccggggccaaaaagtttcttatgaattacatctccctgatgatttggctgtcctcaacatttcctcgtttggcagaattcaggtgtggaatttctccagacacggtcggttcctgtggcccgctgccgcggcggcaccacctccacttgcgctgtggctccacttgcttggttctggtccactggacgctcaccctgagaaaacacgctggacatga

SEQ ID NO: 114928 - DNA, 723 bp, Homo sapiens
atggagggtgctgtcctccacttggctgctaagctcttccctccgcatgatgccttcacaactccccaagaagcggtgctgtctgctccttcggccttgccctcttctgcccccacatctgaatgggcacaaagctcccagcctgtgggggtctggaaaggacacaaatcgagcctctgctcctcccacccgtgctctagatctctactgctttgctccaagacagctgggcctaagccctttggttcgaatcctcattcaagacagaaagctcctacatcttcctgtcacttgagccatgagctggaccctctgaaaatgcccactggtgctaatggggacacaggcgaggctggacagtgccggagggcctggggtgcctccctccgcgtgcgcggcctcacaggtcagtggaaacaagaaattccccaatccacagccacgatgacttcaaaatacttcccgaagacatcaggcaatgaagctgcgacctgcgaggacacagcaagccgagtgacgctggccagaggctggctttctcatgaattacatccccctgatgatttggccgtcctcaacacttcctcatttggcagaattcacgagtggaatttctccagacgaggtcggttcctgtggccccgcgacgctgccgcagcaccacctacacttgcgccagtgtggagagcttcacttgctcctttctggtccattggacgctaa

SEQ ID NO: 114929 - DNA, 842 bp, Homo sapiens
tcgtctcgcaattaccgggtcgacgatttcgtgcctggtagggagggctcccggcatctccctgcttcggggcagaggatgccgggggtagagtacgggagggctggagcgagggtggactggaggtgctttcttttcctggaggtgggagagagggagcggctttgccgcctggcctgcgtcctaatcctgtcctggttcttctgctcccgaagggaacgtaggtcccgcgcctgtgataagtaaggttggattttctctttcctgaggtgaaggatgcccggaggcctcggcaggaccgcgcggaaacgggccttctgcccaaaagaggctgcttctctccttattctttcccctcagaatctcgctgtctccttccaaccacctgtggtcggcatccccgcgttgtcactgcgacgcataggcgaacgaggtggtgggaagcacccgcggggcggggagggaccctgcgggcgcggactccacaccaagcctctgctcagcgtcaccccgcttgctgtgtcctcgcaggtcgcagcttcatggcctgatgccttcaggaagtattttgaaagtcatcgtggctgtggattgggggatttcttgtttccactgacctgtgaggccgcgcacgtggagggaggcaccccgggtcctccggcactgtccggcctcgcctgtgtccctagtagcagtgggcatttccagacggtgcagcttgtggctaaagtgacaggaagatgtaggagctttcagtcttggatgaggattcgaactgaagggcttaggcccagctgtcttggagcaaaacatctgttgtgggatgtggcggcagaggaggg

SEQ ID NO: 114930 - DNA, 803 bp, Homo sapiens
atggcttattgctgtttattggtgtttggggactgcagagaagactcattggccggagttgaatccacagcaaagggttggcatcatctggaggtgacttcactcacatgtctgcagaggacatggggcttggcttcaggacctataggagacctcccagttaccctgggattccaggtagcagagcactctcaggacattcagagctttgacttggtgatcaagggcaccatagaatctcgctgtctccttccaaccacctgtggtcggcatccccgcgttgtcactgcgacgcagaggcgagcgaggtcgcagcttcatggcctgatgccttcaggaagtattttgaagtcatcgtggctgtggattgggggatttcttgtttccactgaccttagcagtgggcatttccagacggtgcagcttgtggctaaagtgacaggaagatgtaggagctttcagtcttggatgaggattcgaactgaagggcttaggcccagctgtcttggagcaaaacatctgttgtggggtgagaagggaaaggagggatgtggcggcagaggagggcaaggccgaaggagcagacagcaccgcttcttggggagttgtgaaggcatcatgcggagggccgagcttagcagccaagtggaggacagcaccctccatgcctggattcgttactcgctcgttctcgatgttgagctgctggcatattgcagcacaactagagatgtacggatgcccccatcttgatcttacagaatcagaggtgcatccgcaagaaagagtcaagaacagacact

SEQ ID NO: 114931 - DNA, 507 bp, Homo sapiens
atggtgaccaacaaccttccagatagcaatgggtcaatcaactcaagttctcagactgctccaaactccttgaccgtgctttaccaacctttgcatgccccacattttgcaggtggagcatatggtattgatgctcttttggaattgaaaccattcatagaagaactcctccagggaaaacatttgactttgccctttcaagggattggtacttttggaaatcaggttggatttgtgaagctggcagaaggagatcatgtaaactcacttttggagatagcaggcctattcttggtcactctctccctgtcctggaagatgttttatgaagcaaagaacataccagcacaggctcgtaccaccacccttaatgaggagcttggccaggtcaaacatgagttctctgacaaaacagggaccctgactcagaacattatggttttcaacagtgactgggtacatgaggccagcatgctcatcttgcaggaggttagaatagacaagtga

SEQ ID NO: 114932 - DNA, 494 bp, Homo sapiens
atgcatcattcctctccctgtttcagaggagcaggtgctgagagaggaagggagatggtggaccagattataaaaggaattaagatcctgcagaatgcaataatacaacaagatgagcgactggccaaagcaatggtcagtgatggttcctttcatattacccgtgctggtgatgcaattattaaatgaagatgaagtaaacattggtattgatgctcttttggaattgaaaccattcatagaagaactcctccagggaaaacatttgactttgccctttcaagggattggtacttttggaaatcaggttggatttgtgaagctggcagaaggagatcatgtaaactcacttttgggagatagcaggtactggactcaacagagtcttttctgccatagatcttctgaaaatgcctgagtgttccttctgcttagaccttttcattcttaggatctcaaatgtcaccacttcagagagtccctgcccactgtga

SEQ ID NO: 114933 - DNA, 563 bp, Homo sapiens
agtggtggaacattttggctcgttttcacaattcagtcattatcctttctgctttcctcctggaagcattaaggttgaagttttcttctaaagatcaaagttttgatttgttatattagttcggatttgtttgatttttgtttgtgttcggtttcaagagctgatttgtaacttttctccccccccacacacacgccttttgacccctgaattatttaaaagtccattgttggagtggcaaacatcctccgagactcaaagggcaaggccatgggcgctttattccggctgctgctccaggaacgtgggaaagcagcggagttttattctaggggaaggaaacaaaggcggccgagtgccagctgcacgtttggtgggatttggtcatcaggggtggacatgctgcccaatggagctgtcggcagtttgacccagcttggtccgtcgcgtcctgttctaggaatccgattattcaaagaaggaatttagagggactgcagaaaatgttacaggtcttaacaccattttgcatttccgcaaacgaacaagaagttaatccctgg

SEQ ID NO: 114934 - DNA, 3331 bp, Homo sapiens
ttaacttcttgttcgtttgcggaaatgcaaaatggtgttaagacctgtaacattttctgcagtccctctaaattccttctttgaataatcgattcctagaacaggacgcgacggaccaagctgggtcaaactgccgacagctccattgggcagcatgtccacccctgatgaccaaatcccaccaaacgtgcagctggcactcggccgcctttgtttccttcccctagaataaaactccgctgctttcccacgttcctggagcagcagccggaataaagcgcccatggccttgccctttgagtctcggaggatgtttgccactccaacaatggaagaggttaaactctcgctgctggcgacttccgcttcctggcctaaatctgacacgcacgactccccccgcggcaactgcacaggttcggtgacagccgagacgccgagtgtttcccgcagccggccggggtccaggtcggaaatgtagccagtggggccgccaggtgggcggcgcggtgtaagggcacccaccaggtgtaattgtgggcgagcggccgcttcggagctgacactaagcatgtgcagatcaagtccagaagcgccggggttcctcgaagcagttttcaggacttaaggctctgggacatccagcacagtgagcggcccctgggcaccaccagaaaacatttgtgggtgaacgtggagtgatgaccatgtggacactgtctttccagggtttcttggagcctctgcagagtctgggggccaggcttcttagtggaaactgcaggatcttccttctgacccctgcttgcctcgccccagcagctccggttgagtccacagatgccagctcagcttccagcttggggaagagtggggttgtcagcaggagagcctgagggctgaggcccagcgtgaacatggcagctaatggggactctcccccatggtccccggccctggctgcagagggacgtggcagctcatgtgaggcttcagtgtcatttgaggacgtgactgtggacttcagcaaggaggagtggcagcacttggaccctgcccagagacgcctgtactgggatgtgacactagagaactacagccacctgctctcagtggggtaccaaattcccaagtcagaggctgccttcaagttggagcaaggagaggggccatggatgctggagggggaagccccacatcagagctgttcaggtgaggctattgggaaaatgcagcaacagggaattcctggaggaattttcttccactgtgagagatttgatcaacccataggagaagattcattatgttctattttagaagaactgtggcaagataatgaccagctagagcaacgtcaggaaaaccagaataaccttttaagtcatgtgaaagtattgattaaggagaggggctatgaacataaaaacattgaaaaaataattcatgtgactaccaagcttgttccttcaattaaaagactccataactgtgacacaattttgaagcatactttaaactcacataatcataatagaaacagtgcaacaaagaaccttggcaagatttttggaaatggtaacaatttcccccatagcccttcctctactaagaatgagaatgctaaaacaggagcaaattcctgtgaacatgaccactatgaaaaacatctcagccacaaacaagctcccacccaccatcagaaaattcatcctgaggagaagctttatgtgtgtactgaatgtgtaatgggcttcactcagaagtcacatctgtttgagcatcagagaattcatgctggagaaaagtcccgtgaatgtgacaaaagcaacaaagtcttcccccagaaaccccaggttgatgtacatccaagtgtttatacaggagaaaaaccctatctgtgtactcaatgtgggaaagtctttaccctcaaatcaaacctcattacacatcaaaaaattcataccgggcagaaaccctacaaatgcagtgaatgtggaaaagcctttttccagagatcagacctctttagacatctgagaattcatacaggagaaaaaccttatgaatgcagtgaatgtggaaaaggcttctcccagaactcagacctcagtatacatcagaaaactcataccggagagaaacactatgaatgcaatgaatgtgggaaggctttcacaagaaaatcagcactcaggatgcatcagagaatccacacgggagagaaaccttatgtatgcgctgactgtgggaaggccttcatccagaaatcacatttcaacacacatcagagaattcatactggagaaaagccgtatgaatgcagtgactgtgggaaatccttcactaagaagtcacaactccatgtgcatcaaagaattcacaccggagagaaaccctatatatgtacagaatgtggaaaggtcttcactcacaggacaaacctcaccacacatcagaaaactcatactggggaaaaaccctatatgtgtgctgaatgtggaaaggcttttactgaccagtcaaatctcattaaacaccagaaaactcacactggagagaaaccctataagtgcaatggctgtggaaaagccttcatatggaagtcgcgcctcaaaatacatcagaaatctcatattggagagagacactatgaatgcaaggactgcgggaaagccttcatccagaaatcaacactaagcgtgcatcagagaatccatacaggagagaaaccgtacgtttgtcctgaatgcgggaaggcctttatccagaaatcgcacttcattgcgcatcatagaatccatactggagagaagccttatgaatgcagcgactgtgggaaatgcttcactaagaagtcacaactccgtgtgcatcagaaaatccacacaggtgagaagcccaatatatgtgctgaatgtggaaaggccttcactgaccgatcaaatctcataacacatcagaaaatccacactagggagaaaccctatgaatgtggtgactgcgggaaaaccttcacctggaagtcacgcctcaatatacatcagaagtctcatactggagaaagacactatgaatgtagtaaatgtgggaaagctttcatccagaaagccacactaagtatgcatcagataattcatacaggaaagaaaccttatgcttgtacagaatgtcagaaggcctttactgacagatcgaatctcattaaacaccagaaaatgcatagtggagaaaaacgctataaagccagtgactgagaaagtcttcacctggaaatcacaactgggtatgcatcaggtatctaatagcagggaggaggaaggcctgttgc

SEQ ID NO: 114935 - DNA, 631 bp, Homo sapiens
ttgggttgcgccctttcgggtgtgtgcatctctctttgcgctcctgtcgggtcccggtggccgtttcccgttgctgtcttctcgtttgctcgccgcgccctcgcctcgtcctggtcgtgtccgccttcttccgtctgtggtggcgtcggagctataccaccagtcctatgactgcatctgcgtcatgtttgcctccattccggatttcaaagaattttatacagaatccgacgtgaacaacgagggcttggaatgccttcggctcctgaacgagatatcgctgactttgatgattcaggcaccgtgtatgaaatctaacaatgcgctcatcgtcatcctcggcaccgtcaccctggatgctgtaggcataggcttggttatgccggtactgccgggcctcttgcgggatatcgtccattccgacagcatcgccagtcactatggcgtgctgctagcgctatatgcgttgatgcaatttctatgcgcacccgttctcggagcactgtccgaccgctttggccgccgcccagtcctgctcgcttcgctacttggagccactatcgactacgcgatcatggcgaccacacccgtcctgtggatctacccactagtcaattcaccatcttgttga

SEQ ID NO: 114936 - DNA, 503 bp, Homo sapiens
aaatgtgtagcagctctgacttcacaaggtctgtcctcgaggatgcaggtgatgccaccgggagtgcgccacttatctcctcttgtcctctgcttgacctaaaatgctttctgagggctggccagagtccagcaatccacggctcaaccacaagttctaaacctacacagtcatctgcatgtccagtgtcatagaaatgccgggctccaagctcttgaagtcgtttatcaattatcttccccccattgcaaaagtaggtgtattttgaatcaccgagaccttatcggattcactaatacagtgaagatctgcagaaaatccatgtaccacagcttgctcacatatttcttctgcgatggcctttgcctgtccctgctgtgtagcatatagtaacagaaacctcctcatcacttcaaggcatgtaacagtgaaaccacgccgcgccagccgggcacgaacctgcacaacgcgacttccaccaaccttgcgccagcgcgacgaaa

SEQ ID NO: 114937 - DNA, 3259 bp, Homo sapiens
caaggttggtggaagtcgcgttgtgcaggttcgtgcccggctggcgcggcgtggtttcactgttacatgccttgaagtgatgaggaggtttctgttactatatgctacacagcagggacaggcaaaggccatcgcagaagaaatgtgtgagcaagctgtggtacatggattttctgcagatcttcactgtattagtgaatccgataagtatgacctaaaaaccgaaacagctcctcttgttgttgtggtttctaccacgggcaccggagacccacccgacacagcccgcaagtttgttaaggaaatacagaaccaaacactgccggttgatttctttgctcacctgcggtatgggttactgggtctcggtgattcagaatacacctacttttgcaatggggggaagataattgataaacgacttcaagagcttggagcccggcatttctatgacactggacatgcagatgactgtgtaggtttagaacttgtggttgagccgtggattgctggactctggccagccctcagaaagcattttaggtcaagcagaggacaagaggagataagtggcgcactcccggtggcatcacctgcatccttgaggacagaccttgtgaagtcagagctgctacacattgaatctcaagtcgagcttctgagattcgatgattcaggaagaaaggattctgaggttttgaagcaaaatgcagtgaacagcaaccaatccaatgttgtaattgaagactttgagtcctcacttacccgttcggtacccccactctcacaagcctctctgaatattcctggtttacccccagaatatttacaggtacatctgcaggagtctcttggccaggaggaaagccaagtatctgtgacttcagcagatccagtttttcaagtgccaatttcaaaggcagttcaacttactacgaatgatgccataaaaaccactctgctggtagaattggacatttcaaatacagacttttcctatcagcctggagatgccttcagcgtgatctgccctaacagtgattctgaggtacaaagcctactccaaagactgcagcttgaagataaaagagagcactgcgtccttttgaaaataaaggcagacacaaagaagaaaggagctaccttaccccagcatatacctgcgggatgttctctccagttcatttttacctggtgtcttgaaatccgagcaattcctaaaaaggcatttttgcgagcccttgtggactataccagtgacagtgctgaaaagcgcaggctacaggagctgtgcagtaaacaaggggcagccgattatagccgctttgtacgagatgcctgtgcctgcttgttggatctcctcctcgctttcccttcttgccagccaccactcagtctcctgctcgaacatcttcctaaacttcaacccagaccatattcgtgtgcaagctcaagtttatttcacccaggaaagctccattttgtcttcaacattgtggaatttctgtctactgccacaacagaggttctgcggaagggagtatgtacaggctggctggccttgttggttgcttcagttcttcagccaaacatacatgcatcccatgaagacagcgggaaagccctggctcctaagatatccatctctcctcgaacaacaaattctttccacttaccagatgacccctcaatccccatcataatggtgggtccaggaaccggcatagccccgtttattgggttcctacaacatagagagaaactccaagaacaacacccagatggaaattttggagcaatgtggttgttttttggctgcaggcataaggatagggattatctattcagaaaagagctcagacatttccttaagcatgggatcttaactcatctaaaggtttccttctcaagagatgctcctgttggggaggaggaagccccagcaaagtatgtacaagacaacatccagcttcatggccagcaggtggcgagaatcctcctccaggagaacggccatatttatgtgtgtggagatgcaaagaatatggccaaggatgtacatgatgcccttgtgcaaataataagcaaagaggttggagttgaaaaactagaagcaatgaaaaccctggccactttaaaagaagaaaaacgctaccttcaggatatttggtcataaaaccagaaattaaagaaagaggattaagcttttttgactgaaagtactaaaagtcagctttactagtgccaaacctttaaattttcaaaagaaaattttctttcaacatttcttgaaggacatggagtggagattggatcatttaacaatataacaaaacttcctgatttgattttacgtatcttctatctacgcccttcctgtgcctgtgactctccccaaattgccctgttgccttgagctcttctgagctaaaggcagccttcagtccctatcagcgcctcctttacttcccagagaacttcacagagactctgtccttccatgcaaaggcttcctgaaataggggagactgactgagtagctcattcttgtgacttacagtgccaacatttaaaaaagtatgaaaatgatttatttttatatgatgtatacccataaagaatgctcatattaatgtacttaaattacacatgtagagcatatctgttatatgtttatgtaactatcaaatggttatttgttactaaagctatatttctgataaaaaatattttaggataattgcctacagagggatttatttttatgatgctgggaaatatgaaatgtattttaaaatttcactctgggcatatggatttatctatcaccattacttttttttaagtcacaatttcagaattttgggacatttgcattcaatttacaggtaccagtacgtacatattttaatagaaagatacaacctttttattttcactccttttatttctgctgcttggcacatttttgagttttcccacattatttgtctccatgataccactcaagcagtgtgctggacctaaaatactgactttagttagtatccttggatttttagattccccagtgtctaattccctgttataatttgcacaaacaaaacaaaatgttatgataatctttctccactgttctaatatatattgtatttttatttgatagcttgggatttaaaacatctctgttgaaggcttttgatccttttgagaaataaagatctgaaagaaatggcataatcttaaaaaaaaaaaaaaa

SEQ ID NO: 114938 - DNA, 1835 bp, Homo sapiens
atgggggctgcttccctgcagaacactgccctgaggatgaacgacttcctgggaccaaaactgacaggtagtctcctagtgatcagctcttgcttttctcccaagcaggagctataccaccagtcctatgactgcgtctgcgtcatgtttgcctccattccggatttcagagaattttatactgaatccgacgtgaacaaggagggcttggaatgcctcggctcctgaacgagatcatcgctgactttgatgatgtagtctctacaccagccctcaaacatgcatgtgcttttgtgcagaccacctgggtcctatccacatcctctccagctaccaccttagtagcagcttttctctaccttgctgtcaccttgaatggtgcttatgtctacagtctccatctatcttctcacccgtcccttctgatcactgagagttgggctttctcttcactttccgtaaaggaaagtgacccaggagcccgagcggagtacatgcacattggcaccatggtggagtttgcttttgccctggtaggaagctggatgccatcaacaagcactccttcaacgacttcaaattgcgagggcgaatgttctcttggagatgccgttagccaccagaagtcacagtggtgccactgcaagtgtgactgtgcggaggacttcagctggcctgtgtggctggggaaggctctggagaactcgttttcagacgacaggctgtcacggaagctgaagggcgcatttgggttaccgagagacgagcctcgtcctgcagaccctcggatacacgtgcacctgtcgaggataatcaacgtgaaaggaaagggggacctgaagacgtactttgtaaacaagaaatgtcaaggtccctttcccagagcaacgtggcatcctgaagagtcccttcattttggcaagaagactgtattttcaggaagagcaacttccagtcctgcaagcttcatcatggttctcaaggttgggcagtccaagatcaaggcgctggcagatttggttctggctgtccagccccgcccctcggaacccaccctggtagtgaagccctgcccccagggtccctgcccgaaggaagcttacagtctggagaagacacagaaagacgcgaagaagccaaatgacttgccgaggctccagggcagcgcttccaatagaaacatgatgagagccacgtgtgtcgtttcttatttgactccaaacgcggggcgggagcacgactcagggcggcgcaatgtgttggcccaggtccccttcggagctttctattggtcctgggtaccgagcagggcgctgcgtcagtgcgcgctggcgcaaggttggtggaagtcgcgttggcaggttcgtgcccggctggcgcggcgtgggcgctttccaggcctagggaaaccgcactcgggacgcggggaactggggaacatgccgggttggggcggcgcgctccggggacccgggacgttccgagcgcccacccggcgggacgcggccgtgagttctgccgcggccgtgagctctgcccaccgcctccgcgccgcttccggggctgcggggcccgggcctccgctgagagtcgtgggaaggtggtgccggattgtgggcagtagcagggatgaggggttgattgatcctgggaagccctcaggattgtgtttcatgggaagtgatagaaattttagctgtacagggacggcaaaggccatcgcagaagaaatatgtgagcaagctgtggtacatggatttctgcagatcttcactgtattagtgaatccgataaggttagagccgtacagtggattttaccgttttgtgctttga

SEQ ID NO: 114939 - DNA, 277 bp, Homo sapiens
atgtccctctttgtctttttaactgttgttgctttaaagtctttttgtctgatataagaatagctactcctgtgtccatttgcatggaatatctattcccacccctttaccttaagtttatgtgagtccttatgtgttgggtgagtctcttgaagacagcagatacttggttggtgaatttttattcattctgctattctgtatcttttaagtggcacatttaggccatttacattcaatgtgggtattgagatgtgaggtactatgctattcatca

SEQ ID NO: 114940 - DNA, 741 bp, Homo sapiens
atggcagaatggataacaattcatcaaccaagtatccactgtcttcaagagactcaccaaacacataaggactcacataaacttaaggaagtagtagctaaatcagtacaaccctttgatcttggaggcctccgaagagacttggtgcagatttcagccactctagctccagccatggctaaaagggtcccagacatatgtcaggccactgctccagaggatgcaagctgtaagcctcagtggcttccacgtggtgttatgcctgcaggtgcacagagggcaatagctgaggactggggacctccacccagacttcagaggatgtatgaaaatgcctggatgtccaagcagaagtctgctgcaggggaacacaaaagaagcccagaaaaaggtttcaagatcccataccctgccactgtgaatgagagacagtttcttgatgctgattttcctccaggcccccatcacagcctggtttcaattttggtttttactaaagcccttactccctctagtgggaagacggagctgtgcagcatccgtagcaagctttttgatggaggaactgtgttctttaatcagttagattctgaatttatcctcaggaatgagtatcgcagtgggggtctaccagctgagactctaggggccagggcagaggaaggagatgccagagcccacactcaccagtccatggcaggcactgagggctgccgtcccaactctggtgccctgctgtag

SEQ ID NO: 114941 - DNA, 277 bp, Homo sapiens; identical to SEQ ID NO: 114939

SEQ ID NO: 114942 - DNA, 1281 bp, Homo sapiens
atggcagcttttgctaaccactgcccctcaaggtgcaccgtgctcctcactgagccaccggactttgggtaccctacaggtggtgttgagtctggtccccagcagaatctcctgggagccagccataaatcttcccaaaatgagggtgtgcaatctcattgctctggaggcacgctgcttgcccttggagccgacctgtcattctgcatcctccaggctctgcctggagccagaaccaagcccagggagaggtggacaggagttggcagtcactgtgaaggaacacatttttatcatttaattaagagcctctcagaaaagcgagctctgtttcttcttgagctgagtctgagggaactgacccgcaaactcactgagctccacagagttgcacctgggggcccaaaaggggctgtcctggcctggtacaaagacccccggcagaagagctcaaatgtcctcaattctcccccagtacggggcacccaaaacatgcagctccattttaatgagcagctgctgtccttttttggctgctatgggtcagctttgcccaggatgcaacctctggggagcctgaatccagctggcagattagctcaaaagtgccaaattgcatcatccaaggctctggaagttatccatcctcaggcacaattcttcttcatctgtgaacctgggaaattcaagaaacaagttatctactcccaaaatacaaaggtgagatcggcatgggataacagtgaacctgggaaattcgagaaacaagttatctactcccaaaatacaaagacatgcttacgaattcgtgctcggtaccctccagtaattaaaaagaccatggtggggatagggcggaaagttatgttcaataaataccttttaaatgatttaaatgggcgcttccttctccagcgcacacacgtactcctgaactggacacctggcaaggccaaggaaaaaggaaaaactcttttaattgcagaatggataagaattcaccagtcaagtatctgctgtcttcaagagactcacctgacacataaggactcacataaacttaagcactgtgtttgctgtatcccagagggtttgatagattgtgtcactattattgttcagttcaatgaatttgttaatttccatcttgatttcattgctgactcaacggtcattcaaaagcaggccacttctgccccaccttctgagcagatgctgctaaaaagacaggatggacacttcgttctgaaggtgtttctcagcatacggcaagccctttga

SEQ ID NO: 114943 - DNA, 1910 bp, Homo sapiens
tcaaaaagctaaacggaggcccacagacaagctaagccttaaactctcgacaaagcgaaacgtgaattcgcggaaaaaaacaaagttagcaatccacaagccggttatgctcaaaaccccccagggctgaaaaagcccgccgtgagcaggaagctgcagagctcaagcgtaaagctgaagaagaagcgcgtcgtaaactcgaagaagaagcacgtcgcgttgctgaagaagcacgtcgtatggcggaagaaaacaaatggactgataacgcggaaccgactgaagattccagcgattatcacgtcactacttctcaacatgctcgccaggcagaagacgaaagcgatcgtgaagtcgaaggcggccgtggccgtggtcgtaacgcgaaagcagcgcgtccgaagaaaggcaacaaacacgctgaatcaaaagctgatcgtgaagaagcacgcgcagcagtacgtggcggtaaaggcggaaaacgtaaaggttcttcgctgcagcaaggcttccagaagcctgctcaggccgttaaccgtgacgttgtgatcggcgaaactatcaccgttggcgaactggcgaacaagatggcggttaaaggctctcaggtcatcaaagcgatgatgaaactgggcgcaatggcaaccatcaaccaggttatcgatcaggaaaccgcacagctggttgctgaagagatgggccataagttatcctgcgtcgtgaaaacgagctggaagaggcgcatgaatccgcaagaagccaactacgcctatttacgcggtgaagtggaactggttcgtctgccggatgcagaaggccgtatcgctgccgaaggtgcgcttccttatcctccgggtgtgctgtgtgttgttccgggtgaaatctggggtggtgctgttctgcgttacttcagcgctctggaagaagggatcaacctgctgccaggttttgcaccggagctgcagggtgtctatatcgaagaacatgatggtcttaaccatactgacgatggtcaacatgatgggctccggtatcatcatgctgccgacaaagcttgccgaagtcgggacaatctcaattatctcctggctggtgacagccgtaggctcaatggcactggcatgggcattcgcaaatgcggtatgttcagccgtaaatcaggcggtatgggcggttatgccgagtatgctttcggtaaatccggtaactttatggcgaactatacctacggcgtctcactgctgattgctaacgtcgcgattgctatttcggcggttggttacggcaccgaactgctcggcgcgagtttgtcgccagtgcagattggtcttgcgaccatcggggtgctgtggatttgtaccgtggctaactttggtggtgcgcgcattaccgggcaaatcagtagcattaccgtgtggggggtcattattccggtcgtcggtctgtgcattattggctggttctggtttagcccgacgctgtacgttgattcctggaatccgcatcatgcaccgttcttcagtgcggtaggttcttccatcgctatgacgctgtgggcttttcttggtctggagtctgcgtgtgcgaatactgatgtagtggaaaacccggaacgtaatgtgccaatcgcggtactcggcggtacgttaggtgcggcggtgatttatatcgtctccaccaacgtgattgccgggattgtgccaaatatggagctggcaaattcaacggcaccatttggtctggccttcgcgcagatgttcacgccggaagtgggtaaagtcattatggcgctgatggtgatgtcctgctgcggttcgctacttggctggcagttcaccattgcccaggtgtttaaatcttcatctgatgaaggctacttccctaaaattttctcccgtgtaaccaagtga

SEQ ID NO: 114944 - DNA, 1449 bp, Homo sapiens
atgcccctgtacttcctcacctactcccggtaccctggacttatgtcccacctatataatggggacaaaaatggtcatttggggcaaggaaggaccttgcctgctgccactgaaggcagtgaggagagctgtggcgatgcaaaaacaaagtgtgcggcagtagaagagcaagctctgaacccccacactcttgctgtcagaatgacttaccgcaaactgcacacgactccccagcttgcaagaactcgttctggcttctgctcctggctcagcctcctgaagcccggaatcaaggcttctcctcccttgctcctcacccaagagatgtgtattgtcactgttagtctgatgtcccgacaattaaactgcaaagagaaaaggccagtcatgcagaaatccaacagcctggcctctgggatccgcccacctagcaatgggtccagtgagaaacccagttcccattatcctcaatactggattcacttgctcatcctagaagtcacagaagcacagcactggcatgcaagaggcccacaggaaatatctgtggcatcgacccgtgagccagaggagaagcacctggcctggaggggacagttgtccggctgctggcagccatgttatgaagggggccaaatcgggaaaggtgcagtgaccagcgaggccctcaaggaccccgacgtatgcacagatcggttgattgattgcagggaagaatctcggacctcgcctcggagctatcgcaggcaccaccatcccacatcccaccaccaccccggcatgctcagcggagccccgaggccagccagaccgacttcccgttgcacttgcaagctgcccgcaatacgtcatggcgaccaaacgccttttggggctacccggacgtgggccggctggggggcctgggagctcctaaacccgccacttccggaagactcctggcccgggattatgccaagaaaccagatggctactgggagagttcgttcttaacgcgatcggatcagcttctggtttatcgatcttgttcactgcaactatactccggttgctgcgcagctttcgcgtgctggattgcttcgatggtctgcggcatcacaccgtcgtcggcagcaacaaccaggactacgatgtccgttgcctgcgcaccacgagcacgcattgaattcgccaacggtgatagtttcgccggatcacaacgtccagttaacggcctcgagcagcttctggaagcttgctgacctgcaggcaacgttgggcatgaatacgattctatctcgttacaagcgcatctctagagctcctctgcagccgggccgcatgccctttccatcgatcaatcaagtccggggtgcaaacggtctggttggtgagatcgaggccatcatcactaatggaacgccggaggtgaacactacgcgtgcggcttccgatcggcaaagatgttga

SEQ ID NO: 114945 - DNA, 717 bp, Homo sapiens
tctagatcgggggcggccgttcgcgatctaaaactagtcggacgcgtgggcggacgcgtgggtgcacttgcaagctgcccgcaatacgttatggcgaccaaacgccttttcggggctacccggacagtgggccgcatcggggggcctgggagctcctaaaccccgccacttccggaagactcctggcccgggattatgccaagaaaccagttatgaagggggccaaatcgggaaaaggtgcagtgaccagcgaggccctcaaggacccccgacgtatgcacagatcctgtccatgctcaccacatatgccatgggcgttcaacatttacaaggaagggcaggattgtaccccttgaaaaccgggatgctgagtaccctgaatggctgttcgagatgaacttgggtcccccaaagacccttggaaggaagcttggaccccgagaagcccgggagtacctggccggcggcttgcgggaaaacaagaacatcttggcgccacaacctggcttgagcaaagaacaaagaggttgtagcatgggaggggcccggcattcgctgacccccacgccgaagggcttgccgtttttcccggaggaccgtggacttttgtgagacaagaggcggctccccagcctgggtttccaatgtgacccccacaagtggggcttgaccaaggggccctggaaggccaattaaagagctttctgggtaaaaaaa

SEQ ID NO: 114946 - DNA, 499 bp, Homo sapiens
atgaacaaattggacaaaggtgtctgtcctcttgaaattaattgtccagcagggaaacctcactctttgtcttcctctcctactgcccttgatgcgaccctgccacactttactggctgttccttcttgctgatccaggagatcatgaatcagacagataaaaatcaacaagaaatcccatcataccttaatgatgaaccaccagaaggttcaatgaaagatcacccacagcagcagccaggcatgttgtcccgtgtgactgggggtatcttcagtgttacaaagggagctgttggtgccaccattggtggtgtggcttggattggtggaaagagtctggaagtgaccaaaacagctgttacaactgtgccttccatgggaatagggctggtgaaaagggggtgtctctgctgtggctggaggtgtttacagctgttgggtctgctgttgttaaacaaagtgcccttaacaggaaagaagaaagaccaaatctgactga

SEQ ID NO: 114947 - DNA, 1308 bp, Homo sapiens
atgttcttcgacatcgccgtcgatggtgagcccttgaggtgtgtctcctttgagccttttgcagacaagtttccaaagacagcagaaaactttcatgctctgagcattggagagaaaggatttggttataagggttcctgctttcagataattattccagggtttatgtgtcagggtggtgacttcacacgccataatggcactggtagcaagtccatctacagggagaaatttgatgatgagaacttcatcctaataaaacaggtcctggcatcttgtccatggcaaaggctggatccaacacaaacagttcccagtttttcatctgcactgccaagactgagtggttggatggcaagcatatggtctttggcaaggaagatcccacttacaatactatgcttatttgacctgactcagacctcacctagcatgaactgcctttttcctggggagtttctcaaaaatactcagaggcatctgtttaacattgtagctgtcttgggggtaaaaacagttgggggaaccaacaagctaactgaaagcttaaaaggaaaaggctcaagctatcctcctgatagaggtggcaacaaatctgaagcagctgctgtaaggaagccagcagtggaggaggtgcaggcagggctgcgtgctccgtggagctgtcaggggctaggaacaggctcaagtgctggcagtggttgtggcaggtcaggcaggcaggtcctcagggccctgggtagcacttgtggtattggctgtggcagtaatgtcaacaggctggccctcaggcccctgggtggtatgcatgagtgccagcggaggtgccaatgggctagtcagcccagtctccaggctcctaggtggcatgcatgggtgggtgttggcaatggcagtgatgggtgggttgggcctgtccttaggtccccagaggtgcatgcaggcgctggcagcatgagtggacttggcagtcaggcaccgtgtatgaaatctaacaatgcgctcatcgtcatcctcggcaccgtcaccctggatgctgtaggcataggcttggttatgccggtactgccgggcctcttgcgggatatcgtccattccgacagcatcgccagtcactatggcgtgctgctagcgctatatgcgttgatgcaatttctatgcgcacccgttctcggagcactgtccgaccgctttggccgccgcccagtcctgctcgcttcgctacttggagccactatcgactacgcgatcatggcgaccacacccgtcctgtggatctacccactagtcaattcaccatcttgttga

SEQ ID NO: 114948 - DNA, 594 bp, Homo sapiens
atgtttccggtagcccctaaaccccaggattccagtcaaccatcagacagactcatgactgaaaaacagctagagcaaagccgagcagccaatcaagaacaacgagctaatgacttggaacaaattatggaaagtgtgaaatccaaaattggtgaattggaggatgaatcactaaatagggcttgccaccaacagaataaaataaaagatcttcaaaaggagcagaaaactttgcagactcatcaaaaccgggactcaacagcccctgcatctccacattcctggagccccactgacatcctcccaccaccacctagagggctgcagcattgcaatgccagctggacccagtgctatggccagttcctcagcactctagcccacaaggacaggcccaacccacccatcactgccattgccaacacccacccatgcatgccacctaggagcctggagactgggctgactagcccattggcacctccgctggcactcatgcataccacccaggggcctgagggccagcctgttgacattactgccacagccaataccacaagtgctacccagggccctgaggacctgcctgcctga

SEQ ID NO: 114949 - DNA, 678 bp, Homo sapiens
atgccactgcagctggcctgggcaacagagcaagactctgttgaaagaaagaaagataaaagaaagaaagaaagagagagagagcacacgcacgagagagagaaagcagcgcaagcaacgagcacaagcagcagagagcaagagacaaagaacgccagcacgcaaccacagggcagcaaagcccagccaagcaagcaccgcagaagcaaggaaagacgcacgcaccgcccgggcccagcccccaaaggagaggaaagaagggaaaggaaaggaaaggaaaggaaaggaaaagaaaggaaaggagaagaaatgaggaaactattgggaaccagagcaaagctgttatggaagctatattactgtgtgagttgtgcaactcacaacaaagtagtcaggatcgatctcatgaaggagaaggatcgaacacctccaccccaatttagactgcgggtgctgccccatgacccccaccaaagcccatccgggaacaaatatgacatccaaacgaattatcacaaattcaaaacggtttcccatctggcaacaggccgcactatatggcccaccatcgtcaagctcttgccgagcgctcaaccctacgggcggccagtggctgaacgtgtccgcctcaaaatacaaacaattaatgaaatgaaaggtgtttcttcaaaaagataa

SEQ ID NO: 114950 - DNA, 297 bp, Homo sapiens
ggtcgacgtgcctccaagatgacaaagaaaagaaggaacaatggtcgtgccaaaaagggccgcggccacgtgcagcctattcgctgcactaactgtgcccgatgcgtgcccaaggacaaggccattaagaaattcgtcattcgaaacatagtggaggccgcagcagtcagggacatttctgaagcgagcgtcttcgatgcctatgtgcttcccaagctgtatgtgaagctacattactgtgtgagttgtgcaattcacagcaaagtagtcaggaatcgatctcgtgaagcccgcaag

SEQ ID NO: 114951 - DNA, 685 bp, Homo sapiens
gcgtcgactttttttttttttttttttgttagttcatgtcttttattaactcatacaggtaacttggtctttctggtttgttgaaaacagtaaagtcaggacaaccatttgccacaataaatgtctgtcaaaagtgacttggccataaaaacccccagcacccacattccatcagaaagggcactctcggacggaaggcggacttaattttgcccattcttcaatccaccttaataatatttccagggcaagcccagctttaaccttcttttctctttgtgctttattcttccttgggagggggtgtaaagacttcttcttcctttttcttagcaccacccacgaagtctcaacacgaagatggaagagtaggactcctttttgaataattgtaggtcagaccaaagtacgtcccatctttccaggctggcttggccagcaaaaggatcagtctctggctgattcagggagggaattcccttccttaatcctgggatcttggggccttttacattttctatcggtatccgagggggttccacctcgaggggtgatgggggctttccccgtaaggtgtttttcacgaaaaatcggcattttggggggcggctccacctgaggttgaggaaaaggaagagacaggttaggtcagggatcacaagagaagcgaccatagggtgctaac

SEQ ID NO: 114952 - DNA, 414 bp, Homo sapiens
atgggctgcggaatggatgtcgtgttagcaggcacaaaaaccacattcatctccttgtatatctccgtcagagctcccagaaaatctcctgaaaaagaggaaggcttattaagccttcagagctacccaggcaaagcaggtacttttggcaaagaggaacaaaggaaaggaaaagggctcaggtttaagggactggaatcctacatgattcctggcggcagaaacatgacaagtctgcagtctggccctcggtggtcctgcagatctggtgttgattttgcagggtgtttggaaaggaaattgtctgtcttcaacaacctagtcttgtctcctccagagaaaagttttgaatcctctgaggagcggtctgtcgccattgtggcctgtggtcagtgggtcagaccagagccctga

SEQ ID NO: 114953 - DNA, 659 bp, Homo sapiens
  misc_feature (1)...(659): n = a,t,c or g
gcacgagagcaaagaaaaatccctttggttccagaaaatctcctgaaaaagaggaaggcttatcaagccctcaaagccacccaggcaaagcaggcacttttggcaaagaaggagaagaaaggaaaagggctcaggtttaagcgactggaatcattcctacatgattcctggcggcagaaacgtgacaaggtgcgtctcaaacgactagaagtgaaacctcatgccttggaattgccagataaacattccttggcctttgttgtacgcatcgaaaggattgacggcgtgagtttactggtgcagagaaccattgcaagacttcgcctaaagaaaatttttagtggtgtctttgtaaaagtcaccccccagaatctaaaaatgctgcgtatagtggaaccttatgtgacctggggatttccaaatctgaagtctgtccgagaactcattttgaaacgtggacaagccaaggtcaagaataagaccatccctctgacagacaatacagtgattgaggagcacctggggaaagtttggcgtcatttgcttggaagacctcattcatgaaattgccttccagggnagcatttccaggagatctcatgggtcttgtgcccttntcaactcttaatggcccgtcttgctaccaaaaatagaggggg

SEQ ID NO: 114954 - DNA, 1051 bp, Homo sapiens
tccatttgttgcttgtactttggagtcttttttttttttttaagtgaagattgttttgatatcatcagcatctgctgcaaacttaaaccacttttgggactttcttttctcttttgtctctaccaaacttttagcatcattccctgattctaaatacattttccaccttctttttacatgtcttttacaaatttgagctttttttttaagttttaaaacttttataagttcagtgttgtcactgtatgtttacatattcattgatacaatttacatccgagatttttacttatccatttttgcaaagatatgtacacaaagataccatattcaataactggggaaacaagtgaaacttctgatctatacctttcagggttgggttcgatcatgacacttctgataaagggatccatcaacgtaccagtttcacctcttccagaaggacgtcgtcatgttaatcctaaagagtttactctggggttttattgccagaatacaaattcccctcaatcgcttcttccttgcaggtgttcttttttccataattttttttcttataggccagccttttctccttcaccccaaagggccacaaatgaaggtcggaggaaacctatagatggaccagctttcacaatccctcctccttgcccttttccctggtactgaccgtatgttagagatcctggctggccagccttcaagacaacttggaagcaagagggcccactcctattaaggatcactgaggtatgccccacatgtcaggtttctctcagatgtggtaagtctgggagtggaggaaacaactggtgtctggaatatgactaaaacgtccagtggacaatgcagaaataagagaggcatttttgacacagttttggtaggctgaagatgccaaaatattcagaggccataagattcctgaagctgctctcactgcaccggcaaaggcagaggcagctatctcgttatcctccaaatttgagctcttattaaagagttttctgcgtgctctgctatattttttcaaaaggtccctccacat

SEQ ID NO: 114955 - DNA, 1338 bp, Homo sapiens
atgtatgggaaactttccttgaggggtttcgtgcctcttggtgcaggtgcggcagtaaacctggagaaaggccagtgggaaggtgagagtggagactgtggggagcagtttgaacttctgcctatccatgagacttggaaacaaaagaccctaagccccagagggttgatggaaaatggggtggaagaaagggagagcagggcagctcacatgagagcagttaagggacaaggccctgaaggcatcacagaggcatcagtgatgcttttttttcctcctccactccagtctgctccgcagaaccccatgtcctcagataaaatgccaccaaaaagtctgaaggcacctaccagccatcctgctgaagataacctggatttgcatcttctggatgggatagaagctgtgactaatactgagccatctagggcagcagcccccaacctttttgacaccaggaactggtttcgtggaagacaatttttccacggacttgggactaatcttatgctcaatatggaagataatcataactcatcactctggattataactgcttacatatgtctttcttatgagataatgcaccttgaaggtgccagtccaaataccagacacatgagaatgtggatagatcctcgagttctctccgaaccttccttccatgaagttatatactctatagaatcagtggtattcatcaaactcggtgctgcaggatcgtgtggggagggaggagagtgtaccgccagtgttcagaaagcagaaaatcctagaacctcctttcacgttgaccgaggttgtcttgcctccagaaataagagattctgctccatgctggcgggggcatttgagacatggagcacacacagagttctcaacaaagataagggcccttggctgacaggaacctccaaacgcgaagtggaagatggagtttacattcatacagcaagcactagaagatgcggtatactcacagtgccaggagtgccattccagaagatgtcccagaaacagagactaggcctgggtaaggccttgacaatggaaatgcaacagatgaaactaagcagggtccatgagcgaggagcacaggccaaggctcaagcaatcctcccatctcagcctctggagcaactgggaccacagatgagtgtaaggccattatcatggactttttccccagctgcagagtacagccagcagctggaagagattgacgggagatggcagaggaaagaggaaaagagaagtcagagcttaaagaatgcccgtatcaaaaaaagaaaagccttagggagacagaggaaaagacagcgtgaagggagaagttga

SEQ ID NO: 114956 - DNA, 364 bp, Homo sapiens
agtttcttcaagaaaaacttaactgatagtgtggccagtaccttataattaattttcttccccaatccttgcaagcatgaaaacaaacagtaaatttttcatttgttcatcagtttcgaacaactgtttagcagagatatgcttgattaatggatttaatttgttcctttcttctgtagtcggttttcatattacattggttatcagaggataggacaataacgtgggcattctcatcgcagtccactccatcagtgtcagtgctggcttctagctccgggtctacatctttaacctttgtcgtcctgcagaatctttcatcaatctgtgttacagtcacctgtgctttcttccagctcgtgcc

SEQ ID NO: 114957 - DNA, 601 bp, Homo sapiens
atgcacgtggccttctgtgcatgtgaaggttcctccccacacagcagcacctctgatgaagcacctgtgtgtcttttcatgtgtggcaatgtggatcccaagtggcttaactgcaaggacccacagctggaggtgaatttctacactgggatggatgagggactcagatattgctttccaattcccgactgcactttggtcatcctgcaatcatgaacagttgtgtgtttgggcatatgggagatatgaggagaaatgcttacttattttaccctttggaaggatgggcaaaccattttgaggctgtgcatcctatgtggcgttcacaagggaatacaagggtaatgggtaaatgggccaacggcattttacaacttttgccccatcggatttcccgcccagcatctgtgaagatgctgcaagtcttgagagatatctccctgaccagagtgcttatcagcgattgagggagatgatcagactcctcattgttgaggaatccctctttctacctgaccatgggattcccagagcctactaacagaataatccctcctcaccccttcccctacacttgatcattaaaacagcaccaaacctc

SEQ ID NO: 114958 - DNA, 666 bp, Homo sapiens
  misc_feature (1)...(666): n = a,t,c or g
gactgcaggctgnggctccgctccccggcgggagcccgcgcgtggttcccagcgaagtccccgcgcggctgggcccagcgtgagtattctccgcccgctgtcctccccctggaggcggcagcgcccgtttatttgagccgtgtgaagatgtgcctgcttcgccttccatcatgactgaagtttcctgaggcctccccagctatgctccctatacagcctgcagaacggtcggctgcctccaatcctgaggtcatcactcatcaagaggggataatcccagggacagcaggatctgcttcgttacttggatttaggagccagaaacccatcaggcaactaaacagtaacaatgacccgccattaaacacactgagagaagagcatgatgaagagtttgtacaagaagaagccaggagcacttgctgacaatgcttacagagacgcaggcttctatgagctctgcctgttgaactgcagtaaaaatagatctccttccccagagaggcttggatgtgggcacaatatcagttcagacgatggtcaatgcatgtacttaatagagtgaaaagactttggactgtgaagtcagattacctgggtctgaattgttattcttctacttctttgtagtatgctttcaccacattaaaaattgtctgagcctca

SEQ ID NO: 114959 - DNA, 567 bp, Homo sapiens
ttcgggaaagaagccgcgccaggacctccggcgtggggccgagagctggctgggggccgcttcccagtggtgcccgcttcgtcctctggccgccggggcctggagaccttggcccgtttcggggtccgccgctttccccgtgggacaaaggaggaaggagaccgggagattacgagtagccgtgagagtccccctgtgagagccaagaagcctcgaaaagcaaggacagctttttccgaccaccagctcaatcaactggagcgtagctttgagcggcagaagtacctgagcgtgcaggatcgcatggacctggctgcagcgctcaacctcactgacacccaagtcaagacctggtaccagaaccgcaggtcggctgcctccaatcctgaggtcatcactcatcaagaggggataatcccagggacagcaggatctgcttcgttacttggatttaggagccagaaacccatcaggcaactaaacagtaacaatgacccgccattaaacacactgagagaagagcatgatgaagagtttgtacaagaagaagccaggagcacttgctga

SEQ ID NO: 114960 - DNA, 525 bp, Homo sapiens
gctggctaaccctgaggtagatactcgggaaatgggtggaatagggaaagggactcagcccttccgcccttttccccagtcgaggcccgcgtcactgccctgtgggtgcagacgcctccagtgtcactcccctggatttcgcttgggcagaagaagagattgtaggccggaccccaacgccgaagccctgaggcttctaatgtgaggaaaaacacggaatgacaagtgtgggaaagagcaagcactaaattactgtcagaaaaataaacggagtagcacagtgctgctcggtgatttacgggggcaattagtcaccaccccacggcgctgctgaggacagcacggcagcagacaagtcaggcccatgaggaagaagaggctttgcactgctctccagacaacttttcaaacaacaagagaggatatttgagcacattaggttttgtgtcttcattctgggtacctactcttcatattattctaccaacttaatacataaacatatttttagcacaataaaaaaaa

SEQ ID NO: 114961 - DNA, 701 bp, Homo sapiens
gaccatttgacgtctggtggaattcggtgctggggcgggcgcaggactgcaggctggggctccgctccccggcgggagcccgcgcgtggttcccagcgaagtccccgcgcggctgggcccagcgtgagtattctccgcccgctgtcctccccctggaggcggcagcgcccgtttatttgaggcttctaatgtgaggaaaaacacggaatgacaagtgtgggaaagagcaagcactaaattactgtcagaaaaataaacggagtagcacagtgctgctcggtgatttacgggggcaattagtcaccaccccacggcgctgctgaggacagcacggcagcagacaagtcaggcccatgaggaagaagaggctttgcactgctctccagacaacttttcaaacaacaagagaggatatttgagcacattaggttttgtgtcttcattctggccgtgtgaagatgtgcctgcttcgccttccatcatgactgaagtttcctgaggcctccccagctatgctccctatacagcctgcagaacggacggctgcctccaatcctgaggtcatcactcatcaagaggggataatcccagggacagcaggatctgcttcgttacttggatttaggagccagaaacccatcaggcaactaaacagtaacaatgacccgccattaaacacactgagagaagagcatgatgaa

SEQ ID NO: 114962 - DNA, 1083 bp, Homo sapiens
atgttcctgcgacggcttggtggctggctacctcgcccttggggccgccggaaaccaatgaggcctgacccgccttacccagaacccagacgggtggacagctcctcggagaattcaggaagtgactgggatagtgccccagaaaccatggaagatgtggggcatcccaagactaaggactcgggggcattgagggtttctagggctgcttccgaaccaagcaaggaggagccccaagttgagcagctagggagcaaaagaatggattccctcaagtgggaccagcctatctctagcactcaagagtctgggagactggaggctggaggggccagtcccaaactcagatgggatcatgtggattcaggtggcaccaggagaccaggggtgtcccctgaagggggactgagcgtccctgggccaggagccccattggagaaacctggtaggcgtgagaagctgttgggctggctgcggggggaaccaggagctccctcccggtacttggggggcccagaagagtgtctgcagatctccaccaacctgaccctgcatcttctggagctgctggcctctgccctgctggccctgtgctcacgaccactgcgggcagccttggacacactgggcctgcgtggaccgctgggcctctggctacatggcctactgtccttcctggctgccctgcatgggctccatgctgttctgagcctacttactgcccaccctttgcacttcgcctgcctctttggtctcctgcaggccttggtgctggctgtcagcctccgggagcccaatggggatgaggcggccactgactgggagagtgaggggttggagagggaaggtgacatcacagctcttagccacatccctctggtgacatcacacgagcctctttcaccctgtaacaccagaagacttgctgccgccatcgcagcgttttcccgccttttcagtaacctgagtcgctacaggtgggagaacgccccgctgaccgaccgccacgagcctgcaaaaggagcgcgccggcgcgtgagcgaggtgcgcgcgcacgcgccccgccctcctagccgctgttga

SEQ ID NO: 114963 - DNA, 1953 bp, Homo sapiens
cccaaggccgcggccccgacgctgggcccgggagcggtccccgcgcacagcgcccggacgcgtaggtcccgaagtaggcccgcgctttgcttcgtaactggggatctctgaggacatcttagttctgaccttgtggaggccgcgtctctgctgcgtgttcgcgggccagtcgggccactttgtagaaatcatagccctctaaatcaagggacgaacgctgctggctggagtttgctggacactttcattccacctcctaacaaagagaattcctattccttgaggtcccttggggcagcagttaaagactacacgatccaggagcacctaggacctggggccaccttcctgcccgctttattggatggagcactgcctccccagtttctgggacaccttggggtgtggccttggtgagtgaaacttggggtgctgcctgctgggaaggaaatccggaaacgcagagaggactctctggtggtgacccaggccttgtcagatctgagattcttggaatctcagattgtgggggtgtggatggtgaatgaatttgggtatgcccccctttaccccagaactgaagaggaagcaaactacttgccacacttgaggctgcatgactattcagagaagggaggagccacttctgaattcagagtaggactgcatcaccaggcaaatacctgttctgagccagaaagactctggcttctgaggagatcctgagagtctgagtagtgccaggaagcagcctcagaatttgggggcccattacacaccccagccatgttcctgcgacggcttggtggctggctacctcgcccttggggccgccggaaaccaatgaggcctgacccgccttacccagaacccagacgggtggacagctcctcggagaattcaggaagtgactgggatagtgccccagaaaccatggaagatgtggggcatcccaagactaaggactcgggggcattgagggtttctagggctgcttccgaaccaagcaaggaggagccccaagttgagcagctagggagcaaaagaatggattccctcaagtgggaccagcctatctctagcactcaagagtctgggagactggaggctggaggggccagtcccaaactcagatgggatcatgtggattcaggtggcaccaggagaccaggggtgtcccctgaaggggactcgagcgtccctgggccaggagccccattggagaaacctggtaggcgtgagaagctgttgggctggctgcggggggaaccaggagctccctcccggtacttggggggcccagaagagtgtctgcagatctccaccaacctgaccctgcatcttctggagctgctggcctctgccctgctggccctgtgctcacgaccactgcgggcagccttggacacactgggcctgcgtggaccgctgggcctctggctacatggcctactgtccttcctggctgccctgcatgggctccatgctgttctgagcctacttactgcccaccctttgcacttcgcctgcctctttggtctcctgcaggccttggtgctggctgtcagcctccgggagcccaatggggatgaggcggccactgactgggagagtgaggggttggagagggaaggtgaggagcagaggggagacccgggaaaggggctgtgaccgtggggtgggggcaaagggtgaagagagtgtgggctttaggagaaaagtgtgaggcatgacccaaattgtaagcatagggacctcagggatggggaagaaacccgagtacgagggtgcagggccccccttcatacacaggagagaacagaactatttagggtggttgtgtttatggacagtgagggcactgctcttggacttcaccagctgttatttttgcttttacttttctcccaccttcagtttttttttttttttccacctccactttttaaaagc

SEQ ID NO: 114964 - DNA, 473 bp, Homo sapiens
tttttttttttttttttaaggcaacagactctttatttaatgtggtttaaaatacatcaaaatcaagtccctggctgttgtgaatacccaaaggagacaaaaaagctgccagtgcagcttcaaacaagtctgcatcagcaacgtgatctccttccccaaacccttggcttttttcttctcctgtggccttcgatggtctcggtcattctgttgtcccagaaaactgcttggcacaaacactggctaataccctggcaagtttgcaacagcagaacattcagcatataagaatggctctacacagtacatagtagttatgtactggagtgggggtagaacaggacacagaaacaactgtctgcagccattttatggatttctggggcccagtcaatagttcaatttcatttcttacctgttagacaacagctatgggctcccacacaggaagaagtagaatccccaaggacagg

SEQ ID NO: 114965 - DNA, 543 bp, Homo sapiens
gaattccacccaggccgcgaaacaagcccgcgtgactggcggaggcacagagaccaaggccgcttaacctggctggttgcactggtccctggagagcactgagcacaggggctgccacagtggccggctcagacatggcagagatcagcagagaatgggcaatcaggctcccctgagatgagcagcagcgcagaggaggtgcccctctcttactacaccaacttcagagggcgtcccctgcaggagagcttcatgcgcctggtggaggcctgtggggactcggagcaaagcatggacaactggctgagtcggctggacggctgccgctgactgtaacatgtaaagcaggcactgagcaccacctgcctggcagtccagggcatggagaggcacagacagcaccctgcttgtgacttcactggcccaactcatcctggaccccttgagcaagaccatggctggattccaggaactggtggagtggaagtggatccaggaaaatgccgtgtgaagggaggactcaaatgcactcccttgggtctg

SEQ ID NO: 114966 - DNA, 695 bp, Homo sapiens
cctgatagcccttcgacctgatcacgccaagcttggcacgagggcactccagcctgtcgctgtgcagacctggcttagaggacccctaaggctgaggggtcacttccagaactgagtccggtccgcaggttctgctacgctccagccagcccctaactggtccccagaagcggcgctgctacagggaccaggagctgctgcgaactgcgctggcgggggctcgtccttgggcgcggggcttcatcatggacacgctctcggcccaggccgcgaaacaagcccgcgtgactggcggaggcacagagaccaaggccgcttaacctggctggttgcactggtccctggagagcacttgctccctggctgtacttggcaagggcttgagctggaaaagatgaccagactcccaccgcccagagggcgtcccctgcaggagagcttcatgcgcctggtggagggctgtggggactcggagcaaagcatggacaactggctgagtcggctggacggctgccgctgactgtaacatgtaaagcaggcactgagcaccacctgcctggcagtccagggcatggagaggtaaggccccattgacatagagaatagggtgagatgggcagggctctcaacccctggatgcaaaactgtgattcagtaagcaaatatagcctagaactgggtccattctattcctg

SEQ ID NO: 114967 - DNA, 2626 bp, Homo sapiens
  misc_feature (1)...(2626): n = a,t,c or g
tttttttttttttttttttaaggcaacagactctttatttaatgtggtttaaaatacatcaaaatcaagtccctggctgttgtgaatacccaaaggagacaaaaaaagctgccagtgcagcttcaaacaagtctgagtggccgggctgggccataaggaaaaccagttacaagggacagaaggcagctcccttcccccagggaagggccaagaggagcaggtgcctgggctgtccctggggtagaccacctctgtgctcgtgcaatggcggaaaggctggggcagcagctgggagaatcagctcaagcaggccttggcccttcccccgtgggacaccagggcagcttccacttggccttccgggttcagcccttcagggccaaccgttgatgggggttggaggagggttaaaataacccatcctttaacagaaaataacagtctccctacagaaaagtgccctgaagctcagccccatggtcccgataacctcatggaaaacaaacaacaaataaaaaaaaaaaagtgctgctgacacctctcagaatctggtggacatgaagctctcagctggacaaggccctgaaaacaatttactattagcagagccatgcgctcttgagcttcacctgctgtggtccccctgaaggaaaaagctaanaaatcctaagaaacccaacacagatcttggtccctaaaaactgaaggtccaaaagtgtgggaccccaccccaggtgaggaagacactggccttcactcatggataggcacctcccctgcatctggccccaggaccctgggtttactttggaaagcagaagcagagcagctgtagtgattggttgatttggtcaatgaagagaagaaaaaggtagggaacctcatctgcagactggcctgaaggtctagacatggatggagctgtgagcaaaggctgcaccttgcctggggcccacattcctgacctgggaaacccagctggggccacctgctcactgtggcctcctacaccaccacactgggatccagcagctccagtccctccacaggcattaagaggtaagctgaaagtgtgagtccaggcaattatgtgggcccactgtaagccctttccccctctcttcaagggggaaggtgcaataccctctgccctccttcccctgcaccctactcctcgccctagcaaaacactctgtgaggttggcagctccttgtacccagcttagccctggcacaggggctggggtagggaaaaggccctactggagccagggaagaggccaaggacttacttccagacagagggatttcaaaggggaagaaaaaaggtcatgggaaacacttcacaggacagcagtatctcagcccagagatggcagagatctcaacactcacacagctgcttgagggcacctagatgtgaaggatacaccagagaatagcaggcaacttctgatgcagatcagtggtacctgccctggggcaggagaaggagaaatggtgtgccattcatttgccatctctggtctcagtcacacatgattcagtacttaacattctttgtgaaccaacttatctgagagatttaaggtaagggctaaaagagtgggctaggtatggaagatgaagggacctgcaggacaatgaactagcttcaaagaaaaacagcaagaagcaaagccctaaccatcctatccatcttggtctgactcattctgttgtcccagaaaactgcttggcacaaacactggctaataccctggcaagtttgcaacagcagaacattcagcatatagaatggctctacacagtacatagtagttatgtactggagtgggggtagaacaggacacagaaacaactgtctgcagccattttatggatttctggggcccagtcaatagttcaatttcatttcttacctgttagaccaacagctatgggctcccacacaggaagaagtagaatccccaaggacaggccagggaggtgccagggaaatagaatcagggacaaatcttgaggattgccacatgtgggggtggggggccaggaagcagaaaaaccccatgaagcccaaagaggcagctggacatgggaccccagcaactgctgccatgggagacagtgcctgatgggaactggtggtggccgtctcaggactgaaacccacaggttaagctttttgcaaagccatcagaagccctttccttttcttttaccacaaacaacctgatctcaccaaacaggaaacctcagcatcaagatggcaaaggagccaagtggggtggtgaaggaggtcctaactaagatgtcccctccttcgctgactcctcaggtggagttcggtgcctcttctgtgtgctcccctaacactctgagctctgacacggagagaacttctgtcactgatgggctctttacaggattctgtgtctccctcattggtcttgagcacttgctccctggctgtacttggcaagggcttgagctggaaaagatgaccagactcccaccgcccagagggcgtcccctgcaggagagcttcatgcgcctggtggaggcctgtggggactcggagcaaagcatggacaactggctgagtcggctggacggctgccgctga

SEQ ID NO: 114968 - DNA, 380 bp, Homo sapiens
attcaacagaaaattggcatcctgaaaagccagatggggcctgcctcaaaagggaaaacaaaattaatgaacagacaggaaatctgagaattatttttctctgaagtaggatgcgggggaggtaatggctttgtgaataaactggaggaggagggagagagaaacaaagctgtgtttccaaggttgattccccagctgctccgggtgtttcgagctagagggcactcagtggcagagtttgttaagcaccatggctccgtgggctcccagggccccaagctcgtggtgacgagagcaaggcttggtattttctccaggttccagtcaattatcacagttaaattggaacatgcatgtccttctgtggacagaagtgcagg

SEQ ID NO: 114969 - DNA, 610 bp, Homo sapiens
ggcacgagacactccactgaccatgggagctctgagagctagggtcacatacttggcggctgaccaacttcacccctactttcccgatccagtgctagccaattccccaaatcagccaggagtgtgtctgctgcatctctggactctcacagttgctacagtcccagttcagccccccaagatcaccctgcaaaaggactccccagggttccagtcaattatcacagttaaattggaacatgcatgtccttctgtggacagaagtgcaggagctgccgcagcttcttccaaaatagagctctcctggctgctgcagctgctgacgtcttcctgcatctctcaacctgctcttcctctcctttcttcccaccacgccatctcccctcgcctgcttcccctcacttggactggggcccgctgggacatcacccagtctaccaccctggtgtctcagaggtgcttgcacggctctgctctggtccctcaatctcctggtggcagttggatccccgtcctctgtccattttctccatctcagttttggattggacaccaggtatcactaacttcagatggtccccttgaagctccctccaaggctatggcttag

SEQ ID NO: 114970 - DNA, 1309 bp, Homo sapiens
  misc_feature (1)...(1309): n = a,t,c or g
atgctttcagcttctggagccgaaatcgtgtctaatactccttgccattttcaggacctaatttaccctgcaataagagagagaatgatatctgatgaccaaatagcaggacaggaaagaacaacaaggccaggactggagagcttgacacatatgagccttgcaccagctgccttcagcaagagagctggaatacactcttgtgactttgagtgccaatatttaatagtgtgtgcattagggccacagtcccggtttccggaattgctctacagggagaagtcagctgaggcgctggttccaatggcactcctagctcgttggttgaagcttattgatgattcaaagttgaggaaactttttcaatcagcgatattgctggaagtggcccttctggcactacctctgtgcttctatctctggctcagcagatacatgataattgctgaatgtgtctatggaaggaggaatggcaaggccacaagagctctgtacagctgctcagaagcttggggagtgaacctgggtggcagagtgagactctgtctcaaaacaacaacagcgacaacaacaataagaaggcagctgcttgtggaacctgttgttgacacttacctatttacaagtccacctaaatcaaactggctgtccactctagggacaattaccaatgatcagaatcaggccaacaataaaaattctaataaaggcaaaagagaaaacaaggagaaagggaacaagtgggagaagcctcgattgcctgcaattggattgttcctgggaactgatgactttatcctcatgaaattttatgacagcgtgcaaggcttgagaaaatctgaaaatttttccacttacaaaatcagagtcctgataaatgtttccatgtacagaatggaatgtcatagtgtagctgctgaagtggatattatcaatatggcagacaaagtaaattctaccaagaaacaatgcatcccaactccatatactgtgaggaaggaaacaggatgactatgcatggttacagcagaatgactgacggagcataatggctcattaccaaagactctggcacacctgcaggaaggcacctctgcctgcattaggtactaccacagaatctgtctgttatgcaccatgggaatacaccatgatcagtgagctcttcaaagaccattctgggaaacccggggcagaaatactatccacctatgtgatgggccacctgaaggcaacatgtcagcatgtttaaggcctccccaatttgacggtaggggcattcatggggttccaattccnggttttgttc

SEQ ID NO: 114971 - DNA, 369 bp, Homo sapiens
atgcatgtacgtctcttggcactgtgcctggtagtacatgatagtgtatccagaattggtgggttcttggactcgctgacttcaagaatgaagccacggaccctcgcagtgagtgttacagttcttaaagatggagtgaagctgcagaccttcgcagtgagtgttacaacttttaaaggcagtacgtctggagttgttccttccttccagtgggttcgtggtctcgctggactttggagtgaagctgcagaccttcgcaaagcccagccggcttcacctctcactggcactccctgcgggactttgcggcacctagcccaggcactctggcagcccagagggagctggtcccctgatgaagcccagcag

SEQ ID NO: 114972 - DNA, 792 bp, Homo sapiens
atgcatgtacgtctcttggcactgtgcctggtagtacatgatagtgtatccagaattggtgggttcttggactcgctgacttcaagaatgaagccacggaccgtcgcagtagacaaaaaagttctccaagtccccacccattcagaagcccagccggcttcacctctcactggcactccctgcgggactttgcggcacctagcccaggcactctggcagcccagagggagctggtcccctgatgaagcccagcagttccaaagtcgcttctacattttcgggtatcttctcagcaacgccccagtctaccagtaccaatttactgtattagtccattttcacactgctgataaagacctacccaagactgggaagaaaaagaggtttaattggacttacagttccacatggctggggaggcctcagaatcacaacaggaggcaaaaggcacttgttatatggcggcgacaagagaaaaatgaggaagatgcaaaagcagaaaccctaataaaaccatcagatctcatgagacttattcactatcacaagactagcatgggggaaaccgcctctgtgattcatattatctcccactgggtccctcccacaacatgtgggaattgtgatagtatgattcaagatgagattcaggtcatagagataatgtgtgagaaaagaggaattaaaactcaagccacctgctttcccctgaaaaagcttctcctgacaaaatacacggtgtcatcggataatggtgagagagacatgcccgtgtcaccaactcagaaatga

SEQ ID NO: 114973 - DNA, 1191 bp, Homo sapiens
atggggcagtgggctctctctctttctggcattttcgagttgtcctcactagctccagtgaaagaacacaagcagacattcccaaacattctaaagaagggttacctggagattagaaaggaccatgacagttactggcaaagctgttatgcagaactttcaccttacaacttatacttctacagcctcgacagcagtgggaatcaaaacctttatgccacgtaccagctttcacacttccagagcatatctgttttaggcaacctggaggccaggatggtggatactgttttgtatgacaacactcagctacagctaaaggcagagtcaccatgggaggctttggactggggacagaagctttgggaagtagtgcatgctgctgtgcccggttacatggggcggcagaatgagctgacaatctcaccagggcttggccatcatgatgactatacacagaatcatagtttccagaagaaaaccagtggggctgctgccaccgtcccctgtcctggacagctccaaacagtaccaaaacatcctcatgtcagggtctctctacaggctgactgtccaaaacagctggaaggcatttacatttgtgctgagcagggcgtaccttatggcttttcagcctgccaagatagacgaggatccgctgttgagctacaacgtgcacgtgtgtctgtctgtccagatggacatcctggatggctgcgactagtgctttctagtcattttcccccagaatgtccttctgcctccgagatgagacccaacagagggctcaggaatggatggaggctctgaagatagctgccaatgtggcgaggagttcagagcaaaccctccaagtcactgtgaggaccaaacccaagaatcaaatgggtgggcatgaactcaggaagaacaaacgccaatctgtgactaccagcttcctgagcattttgacgactttgtctttggaacgaggactcactgctcagagtttcaaatgtgcaggtatgaagcagattttcagcctatagctcattaaagaacaatcctgaaccccacaattggaattcactttaaaaatccccttaataggctagtcacagctatctcctgtttataaaaagtatctctcctcgagaagcttactgtattaaaacatcctatattaaattactatattataacataaggaca

SEQ ID NO: 114974 - DNA, 761 bp, Homo sapiens
ggcacgaggctgaattcactgctcagggtctcacaagcctacagtccagatgctaactggtctgtgttctcatctgggtccttgactggggaagagtctggttccatgccctctcccattgttgacagatttgatcttgtgcccctagggctgaagttggtttctgttttgctgctggctacgagcaggggctgctctcaggatctccaagagggcactggaagtttcctgccatgtggctctctccagaggcctcccacagcatggctggacccaatatgcacagtgaaggaaaaagtaagtgtggaggagtgactgcaaaacccgccaggtctgatggggagcatgacccagaagctgagcctcaaggctcccagcactgttgtttccggagttcctctgatgtccctgagctcctggctccccatctgaaaatgagggcgaacattcccctttctgcctcacagtgtgaaggggctctcagtggaagtgacctgtgcattcctgcagccagaatcaagcccggcactcctcaaacctgccagatgataagaaccccttggacagatgctcacatgaccagcctcatccttggaaatgctcatcagtggttgtgggttgaggcatgggaatcagtgctgatcagaaaatctttgaatctgctgatgatctggaatcctcctccactccaagccctgcagcttccagttgacccacctttccggacagaaccaatgttcatcttacatgaatttgattga

SEQ ID NO: 114975 - DNA, 1819 bp, Homo sapiens
  misc_feature (1)...(1819): n = a,t,c or g
tttttttttttttttttttcttaactggcaattttattaagttttcagttctcttaccttttatatactactaagaaaatttaaaccataactagacataaacattctgcagtttaattcaaattttcatatatacagaccagactacatatgtattacactggaaaacttacacatgactgaagctgagcctaataacttcaattaggccaacaacaggaaacactcccacttcctggcagtcacaggcaattaggctaacaataaaaacactccccacttcctggcaggtcacaggctggaaaggactttttcaagggcaggacttacatttgggggctgggaggatacaagtggatgttaggtttggacttggggggccanttacaaaacaaaagtcataggaattaaatgggattttcaatcactgtataattcattcccctggcttaagtacgttttaattttttcacagvrvggaatatatttcaggcaaataaaaacaaattccagattagcatagttcagcgtttcatttatcttacctttatcaaggcaaacaaagtacagatgctgtacattaaaaacatagaaatatatgactcacaccacatcaactcctacgggccaaaggggctttttccttaagccttgcttccttttctgaagcacaacacccccagcttaaatgtacaaaagagccatctgctggtccaacatagccaactccaatgagcaggacgttctatcagcgtcccatattccccaggcccaccgaaagctgaagagctttgccgaggcccttncccggccactggcccccggtaagaaacggtctgctcccaaaccccaccgagggtgatgccttaagagccagagcccgtagacccacttatagcctcccagtcccaattgcaaataataaccattttgggaaaaagtacggtttaccccaagcagtggacgtggtccccgcacccgtgccagttggcccagggttaccgctgcccgaaggaaccaggaacacccgtccatgccagcctggtggaagttgggtaacactccgtaatcctgtttccaggaaagctgcccagcaaaaatctgcaagtccatgttaatgatgaaagttcttttgggatttgaagtcttgatcaacacagggtaacagatggtttcactgcacagtcaaaaagtgacaggcttcccatagagtacaggagaagtttgttgtgcagtctatacagtctgcaggaagcctgctacacaagccattgctcggacatttcatcacataagatgggatttcagtactttcaccgcccgacagaatgcagaactgcgaaaggaagagcagcacgcgacacaaggcgcggaggccccgcagcgggcgcacccctcccgccatcttgccagcgcctgcgcacttccgggccggggggcggggcgcgcctgggagccggagcgtgaactggacgcaggcgcgctgcgactcctggcggccggcgtttgcgctttcgctgtcctcgcgcgggtcgcgggttttcttccggttgagccttctgggaggtccccgaggaggatgcgagcctgggaggttgttccatttccacgcgcccctcacgcccttggacgaggccctcacccctggttccactgcaggagacctgttaaaggtcatccgtggaccgaaatgcgcgcccgaagcaaccaagagcagaggcgggcgaacgcgggaggctggccgccccagtgtgtggtcggatgttgtgtgctggatctcgtgcgaaggttccgaggacactatcgcgtggcgtttcat

SEQ ID NO: 114976 - DNA, 1990 bp, Homo sapiens
  misc_feature (1)...(1990): n = a,t,c or g
ggttttctagcaaacagtaaatttaaacaagtaaactattatggtttccattgcttacaaaatgattttcctttacattcttatcatgaacactattttaagcatcaaatgcaatcatctaaaatataaaggtcaatcatttataatagaaacaccttgaccacaagcccttgattgaacattttataatatttcatctacttattaaaacaaataatttcccttgggttggaggggaagtgatttcataaattaattagaaagccatctttagcatattgcttatgtctggatccatgtttctgaggaaaaagacattctcaggtgatgtatttttttcatgcattagtatgcatttttaaaaaataatgcatgtttctttaataattaattttcatcttctataagatgccatgtgaagaagttgtggaaatgtagaataaaaagctaaagctgcccaaatttctgttgaactccttaaaaacagctccatggtttggtttggtcctctcgggttgtggcctagcctatttgcaatgtaatgaagctgcagggttcttgtatagctaaagcgttcaatgcatttcacgtgctgtggtggatgtggggtgctgtagacaggcttcttctcttcctgctctcaaaataccccggccttgacatttgggacagatcctgtccattgtttaaggctgaggcaaaaaaccacacaaaagttgtgtaaggaggatgaggataacaaagggagcgaggaggaaatcttcatgtggaattttnccaagttttaattcgttctccatgaaggattttccatttcagtgaaagtcgccagccagaagagggaactttctgggagtttttgagaatgcccaaaccacatttttatcacacttctttgggaaatcaatgcctttgcataggaaaatccaaattcacggacccccaaaggattttcagtgggggatgtctagtctgggggggtctgaggttgtttttactttattgtgttgtttaaatattttaaaaatatctttagcgtttgggtcttttttttttctgtaaacatttaatttggtctgagaaaagctgaatgtttgggtgtgaccgtttgactgaggtggatttggggctgcctgtggacatttagtgaacaggtggtaggcttcaggaatatcccagttttaatcagtttgcattttggtacagaattttgagtaatggtgaaaattgttgtctttgggaaagcacaaaagaaacctgggaaaggcagttcggctcaggtagctaccacataacattgtgtatgattttcacttcaaagctgtgcttngaaggaaatggcagtcagctccagctagtactatttattgtacccagataactaagatattgtttcatggccttgccttagtcagaggcccttttctctgtccctgaacccccaggtatgggtgaaattggaaattactaatctattggaaatcagttcctgacatagtaaagtttgctttcataactgcagcaaaaagggtccaactttgcccaggtcactgctgcccatggcgtgtacctgtattattttccaggaaaaaaatataatagtctgagtcccaagttatcttgatttaaaattgatagagaaaagaaactgtcggagcaagttaatataacaacctaacaacattggcactttctgtatatgaaatccaatatttaaataacttattcttcgtccattgctgttcttaaaaaaacattgtaagtagctgtaatatacccagtacccaatatgttccttgcaattgcttcagcccaagaaagctgtgtattgttttaaaaattgtaaaaattattgtgatgattcatttagcataaagagaggtggacggaagggttttcctatgtatcaaaacttgtctataattatgtcatctatgtacctagaaaaaagtaaataaatttcttcagttgaaaaaaaaaaaaaaaaaaa

SEQ ID NO: 114977 - DNA, 459 bp, Homo sapiens
cacccacatgattttgctcattgcttttatttatctaacagcatgttttggccatctccccatgtcagtctgtacaggtccactctatcattctatattgggacggcacacaattctataaacagtaataccatgatttatttgcccttcagcaaatggctttgccaattcttacacacaaaaaagggtatgatggaccagtttcttgcatctgtgctcaaactggacatcatcaatcttttaagtttttgccaatctgttgggtgataatttcttttcctttcaaccttcagggtcatttgcagctccctccacctgctctgcccaggcttctagctgctgacagccaaaggcaatctggtgctccaatgcattgattgacgcattgtcatcacttataaggtcagtatgttcatccaatcctttattcatcacgtaactatcaggcattgattccat

SEQ ID NO: 114978 - DNA, 425 bp, Homo sapiens
agcaggagacgcgaaccaacatgctgctggagctcgcaaggtcacttttcaataggatggactttgaagacttggggttggtagtagattgggaccaccacctgcctccaccagctgccaagactgtggttgagaacctccccaggacagtcatcagaggctctcaggctgagctcaagtgccccgtgtgtcttttggaatttgaggaggaggagactgccattgagatgccttgccatcaccttttccattccagctgcattctaccctggctaagcaaggctcgaaaacagcagcagcaacaccgactggagaacctccatggagccatgtacacgtgaggaggttggggctgagtgctggccctctgcgtcttccttattacccttgaatcctcattaaaggtttctttacccacaaaaaaa

SEQ ID NO: 114979 - DNA, 480 bp, Homo sapiens
ttttttttttggtgggtaaagaaacctttaatgaggattcaaggttaataaggaagacgcagagggccagcactcagccccaacctcctcacgtgtacatggctccatggaggttcctccagtcggtgttgctgctgctgtttttcgaacctttatctccgtctgtgctccctcataagtgtcgtcatcaagtgggcagctcatagcggcacaagggacaggaatttgtcagcctgagagcctctgatgactgtcctggggaggttctcaaccacagtcttggcagctggtggaggcaggtggtggtcccaatctactaccaaccccaagtcttcaaagtccatcctattgaaaagtgaccttgcgagctccagcagcatgttggttcgcgtctcctgctcagggtccgacggctcgcagtcgtgttcatcgaaataggacgccatggctgcccagccttctgacgtcgacgcggccgcg

SEQ ID NO: 114980 - DNA, 763 bp, Homo sapiens
agctcgcaaggtcacttttcaataggatggactttgaagacttggggttggtagtagattgggaccaccacctgcctccaccagctgccaagactgtggttgagaacctccccaggacagtcatcagaggctctcaggctgctctcaccgtgccctgggcccagtactcaagcttctttctgttcatggactgctgggggatggaagaagagtggcagttgggagcaggggagggtggttatcagcttatgaagatcagaccaaggctagaacactactctacttttctcagacaaattcctgtcccttgtgccgctatgagctgcccactgatgacgacacttatgaggagcacagacgagataaggctcgaaaacagcagcagcaacaccgactggagaacctccatggagccatgtacacgtgaggaggttggggctgagtgctggccctctgcgtcttccttattaaccttgaatcctcattaaaggtttctttacccaccctgaggctgtattgatcacagacctggccaggggctctgcatcctccatcaggtctctacttctgttggggaaggtgatcctaaatcgcagaaggcaccaggctgcggttttcctccctgctggcccatctggactcatggcagtggtaaagaactggattactgcaatagccagggcttgggcctatgtgttcatggttggaaggcaaaatgtgtcagggtctggtacccagctaattacttaaagctgataaacta

SEQ ID NO: 114981 - DNA, 870 bp, Homo sapiens
  misc_feature (1)...(870): n = a,t,c or g
cgctaggccgctatcgagcagggtccgagggctgtgtcagaaggctgggccanccatggcgtgcctattttcgatgaacacgactgcgagccgtcggaccctgaagcaggagacgcgaacccaacatgctgctggagctcgcaaggtcactttttcaaataggatggactttgaaaaacttgggggttggtagtagattgggaccacccacctgccctcccacccagctgcccaaagactgtgggttgagaaaccctnccccagggacagtccatccagaggctctcaaggcttgagcctcaaagtgcccccgtgtgtcttttgggaattttaaggaggaggagactgcccattgacgatgccttgcccatcacccttttcccattcccagctggcattcttaccctgggcttaagcaaagacaaatttcctgttcccttgtggccgctatggagcttgccccattgatgaacgacaatttattgagggagcacagaacgagattaagggcttcgaaaaacaggcaggcaggcaaacaaccgattgggagaaccttcccttgggccctgttacacgtgaggaggttggggctgagtgctggccctctgcgtcttccttattaaccttgaatcctcattaaaggtttctttacccacnnnnnnnnnnnnnnngggggggccgttttaaagaaacaaattttacgaccgggggcgggcaaggtaatattttttttatggggcccccaaaattaatttccggggcgggggtttaaaaagggggggaggggaaaaccctgggggtaaccaaattaaatggcttggaaaaaaatccctttttcgccggggggggaaaaagaaaaaacgccggttt

SEQ ID NO: 114982 - DNA, 425 bp, Homo sapiens; identical to SEQ ID NO: 114978

SEQ ID NO: 114983 - DNA, 480 bp, Homo sapiens; identical to SEQ ID NO: 114979

SEQ ID NO: 114984 - DNA, 763 bp, Homo sapiens; identical to SEQ ID NO: 114980

SEQ ID NO: 114985 - DNA, 869 bp, Homo sapiens
  misc_feature (1)...(869): n = a,t,c or g
aaaccggcgttttttctttttccccccccggcgaaaaagggatttttttccaagccatttaatttggttacccccagggttttcccctccccccctttttaaacccccgccccggaaattaattttgggggccccataaaaaaaatattaccttgcccgcccccggtcgtaaaatttgtttctttaaaacggcccccccnnnnnnnnnnnnnnngtgggtaaagaaacctttaatgaggattcaaggttaataaggaagacgcagagggccagcactcagccccaacctcctcacgtgtaacagggcccaagggaaggttctcccaatcggttgtttgcctgcctgcctgtttttcgaagccttaatcttcgtctgtgctccctcaataaattgtcgttcatcaatggggcaagctccatagcggccacaagggaacaggaaatttgtctttgcttaagcccagggtaagaatgccagctgggaatgggaaaagggtgatgggcaaggcatcgtcaatgggcagtctcctcctccttaaaattcccaaaagacacacgggggcactttgaggctcaagccttgagagcctctggatggactgtccctggggnagggtttctcaacccacagtctttgggcagctgggtgggagggcaggtgggtggtcccaatctactaccaacccccaagtttttcaaagtccatcctatttgaaaaagtgaccttgcgagctccagcagcatgttgggttcgcgtctcctgcttcagggtccgacggctcgcagtcgtgttcatcgaaaataggcacgccatggntggcccagccttctgacacagccctcggaccctgctcgatagcggcctagcg

SEQ ID NO: 114986 - DNA, 1017 bp, Homo sapiens
ccagaacaagcacaattaatttcttctataaacctaagaatgttgtcaggaaagaaagagaagaaccctgagttacacaggcaccattcaaaattgttctccttagaggtttaaaaatctcctcagagttttaaaaaacagatcccactctgagacgctcctaaaaacagctgaaaggctgatgaaccaggctacggtcagagagaagatagaagagcttactgacagaattcctacatcaaatgacaccactggccaccagtctaatgccaaaatacaatggcaacagaaaatcagaggcactcgatggagaacaacgacgatccacaatacctgccagcagccaaacgcctgagtgaagcccgtgaatcagctcttagtacatctggtgatcacaaggaaaaagtgctctacaactttgatcttttgacgagagaagagcatcttttaaatatatgtgagcttcgcttttcatgtattattttaccactgactgaagagaacagatctgctgagagaacaaccctggaccaagaggcagatggtctgggtttcagtcctgtccttgcctgtgtgtggctttggacaaggcaaccaagcagcagaatggagctagggtggaaagaatgtagatttgccaccagaaggagcatagcgataaagagaggggaagaggagaacacagctgtgctcctcctgtggggccgtcgtttcccaaacaggtgtcttcccctgatggccttttggtctttcctgccctctcaagaggatccagcctgtgtccagaaagggcagcttcctgagagtgggagacttctcaaagtgagactgaaagaaggctcaggaaggtggtgttcaggagcctgtgacatgaggggcttctttctaacctatatcaatgctgctaaagttttacacttgagtgtaaaatactcccagggtacaggacttgaccatagtggagagaactggagattaatgctggacttgaagctggctgctcttcctatgaactga

SEQ ID NO: 114987 - DNA, 562 bp, Homo sapiens
gtttttgtcaagcaggaaaggatttgcgtttggtatcactgtgtatggaacaaattgacatcccagcaggattcctcctggtgggggccaagtctcccaatctgcctgaacacatcctagtttgtgctgtggacaagcgatttctaccagatgatcatggaaaaaatgcacttttagggttttctggaaattgtatcggctgtggagaaagaggatttcgatatttcacggaattttccaaccacattaacttgaagctcaccactcagccaaagaagcagaagcacttaaagtactacctagtcagaagctcccagggtgtactgtctaaaggacctcttatctgctggaaagaatgtagaagccgacaatcctctgcttcttgccactctattaagccaagctcttcagtgtcgtcaactgtgaccccagaaaatgggacaactaatggatacaaatcaggattcactcagacagggatgggatattttcttttggcatttcaagcatcacatgtatatttaatgagactttttaaaatatatacttactgctggctggg

SEQ ID NO: 114988 - DNA, 618 bp, Homo sapiens
atggagaaaagagaaagaaatcaaagcgtatcactacagaaagtcatcaaatcacaaaggaagacaagggaggaagaaagcaacaaaacatctgtacaacagccacagaagaatgaacaaaaaggcaacatggggcgcacctggacctggcctgctgggacagcaaccctttctcagctgcaggcgacagctatgggagatggcgaggcgacggacgcccacttccgcttccggccagcagctgaaaggggtgggctgcccagctcgcacatttggcggattcgccctgaggacttgggaacggggcatcgcaggacaagtactgctgctcctacctcctctcccatggacgcaaacattggtgggagcaatcattttatttttatggcaaagagaagccctgaggggacccacatggatgtcttcaaggtcttgcaggcagcaggcgtgggtgaacgcttggcacttggtggagacagagaggccggcgggatatcagcagcgcagccggggtaccggaggtggtctcgggcgaggcgctccgggtctgaagggctccagccaaacggagctcgcagccaaacagtgctggtggctcctgagctgagtgaggcctag

SEQ ID NO: 114989 - DNA, 1620 bp, Homo sapiens
atgggtaaggtcctgggccttctaattgtatggaggtcagaggattataaaacccacgcatatcgaatatgccccttgagtggtacagagagtttcataacaggacccagttcacaggacacaacttgcagaagggattggggctctcacatgaggatgcattccgctgttgagattgtgactcatgtacttggacccaactcacaggagctgttgactgttctacttggagtgggtaaatatgtgggattgggggtctcatttctgggccttcccacagggaaagtccaggcaaaaaagaatagtcaaatctaccaggtgctgggcccagtaatacgtcacaataacccagaccaaggaggaggagaactgaactctggcccagccaggggagaatcaagtttgaagaggggggccatggagacgattgcgttcacgggtcccctggcccgaggttgcaggcccaggcttcagcccacatgtcacatagagcaggttctacgatgctgctggaaggcctggaagagcatctgcaactgctgtttcttccttttcttccactcctcctctttttcttcttcctcaaccaccggcatactttttgtcatcctatttgtcatcacagtagagtgcctgacactatggagacccgggaaccccacctatctcaggtcctgcaaaggtcaggtgaacaggcaagaagtccagaaggaaagtcatctgccacctccagaaagaacagaacaaaacccctacactccaagaagaagtcagcaggccagtgggaagtgccagtctagcccacaacaaactaggcatatggggtgctccgaggttcatgctcgtgtcctgcaggctggagcccacaccagggtccgcagtctgttctggactggaactagcgctttagctggttacccaggcgtccccgatggggaaagggtggaaagtgggtcaccaggcactgtagagactcgggaaatgcacagatatggggtcctgcagcatccaggtgaacatgccgggagtcagagaggaaagtcctctgaagcttccagaaggaatggaacagacctggcactgaaggaagaagcggggctcccagtggcggatgcaggccccacacgtggcagcagtaaacgcaaggcagagatcaagcctctagaatcttggcacagccacgggaggagtgagccagaagagaaccagggcagtggaggtgcgggctgcgctctcactggtgccacagacctaggctgtgttcccaggctgccgtacaaggggtactcggtgtgggtcccagcgcccctcagtggcctgagtgattggctgcagctgcagcttcttccagttactgagcaacaggggcctgtatcatttccaaaggatttcagacaatccccggtacttctggccatcctgcttgtcagcacattgggaaaactgggtgctggagactcggaaaccaccgtgcagacctcgagtccttcccaggcccagccaacagggtgtgaccccacggaaacacctccgcaacaagtaatccacagtgtcctgcttgccagcctaggcttcctcatcacctgctgtttccgaagagaacaatctacactggaatga

SEQ ID NO: 114990 - DNA, 480 bp, Homo sapiens
agtgaccccaacagagtgtcccgggactcatgcctctgatcaagttacccccagaggatcagagaggggttgacgaaggagaagcattcagagggcactggcttctggacagcaatgagtgcccgggccacgcggccccgaagccggcgagggaggcatgctccacccggtgaactggatcccgtggctgagagttcagaggaggtcgaggcagccagtgggagctccaagcccagctttgccccacctccggtgagctccgggctggaacaagctgggccccatggaggaaggtcagtggccaaggcttagggaagcaggacttgacaagaaagatggatgggggctctggcagggaacttggcctcaagccccgaagtgccccacaaaccttgcagtggaagcccaccaagccccagaagcagccctacagtacaaggagactgttgcccccttggaaatggggcccccgatgtgttt

SEQ ID NO: 114991 - DNA, 573 bp, Homo sapiens
atggagagccagacacctcctccacctcgtctgtttgcgcaagaagcaatatggaaaggaaaagcctacctgcctgcccctttaaggcagtttgccagatttggcaggaacttcttcaggtatctcacttgtctcatgggaccctgcaggctcctagataagattgctggatccctgcagctggctgccccggctgccgacctctgtgcacctcagggcggcctgaggttcagccttttaagtcaagccaaggacccactacttgtttttctgatcctctcccctcccagcctcgcctccgacagccacggtgctatggcagccacactggcttgcaagagctggctctgtgcatctcttctcaaccacagggtcagcggcgtcatctggcagctggaaactggcaccgtagcgctggctgctgctccctcctcccaccactgccgccgctccttacaccctcacgacactctgcctctcatcccacagcaacatgggccgagtcctcggcacacaggctctggggagatggctgaggagggtgggagctccaggaccctcagagtgaagtga

SEQ ID NO: 114992 - DNA, 2661 bp, Homo sapiens
atggttgaagaagttctcttggataatatcctgaagagtgttttccgacttggttccattctccccatcactttcagttttccttctgacagtcagggccctcttctgcaggtctgccggagtttgctggagatccactccagaccctgtttgcctgggtatcaccagtggaggctgcagaacagcaaagattgctgcctgttccttcctctggaagcttcgtctcagaggggcacctgccagatgccagctggagctctcttttataaggtgtctgttgaccccttctgggaggtgtcttccagtcaggagacgtgggggtcagggatccacttgaggaggcagtctgtcccttatcagagttcgagcgctgtgctgggagatctgctgttctcttcagagccagcatgcaagaataagtctgctgaagctgtgcccacagccgccccttcccccagagacgccctgtccagagaggaggaatctagagaggcagtctggccacagaggctttcccatgctcccatgggctctgcccagttggaacttcctggtggttttgtttacactgtgaggagaaaactgcctactcaagcctcagtaatgttggatgccccacctgccaccaaactggaacatcccaggtcgtcttcagactgctgtgttggcagcaagaatttcaagccagtggatcttagcttgctgggctccatgggggtgggatctgttgagctagaccacttggctccctggcttcagccccctttccaggagagtgaacggttctgtctctctggtgttccagtctctccacctttgtctgaggagattaaccatgcactgcccaaggcaacagtgatggcctcacttggggcagttgccaggaaagacaatgccgattctcttcatgtcccacccccaacacctctgtttgcttctagacctgtaactgcactaaagtactggcaggcccctagagaggacctacagccttttaccagggtaactctgcactggggaaaggggaatgatcagaccttttggggactagtggacactagctctgagctgacattgactccaaatgacccaaaacatcattacggtcctccaattaaagtaggggcttatggaggtcaggtaattaatggagtttttgctcatatccaacttagagtgaatccaatgggtcattggactcgtcctctggtcattttcccagtgccagaacgtaaaatcagcatagacatactgagcagctggcagaaccacattggctccctgattggcagaaagacagatggatcttggagaatgacagtgggttatcgtaagcttaaccaagtggtgactccaattgcagctgctgtaccagatgtggtttcaatgcttgagcaaattaacccgtcacctgaaagtgagtgtttgaaaatgagtcatcaaatcaccatgcgacctgaactgcctatcatgaattgggtgctttctgacccatctagccatgaactggggtatgcacagcagcatttcattatcaaatggaagtggtatatatgtgatcgggctccagcaggttctgaaagcacaaccagccctttcatcacccaatgggtccatgaacaaagtggctatggtgacagggatggaggttacacatgggctcagcaacatagacttccactcaccaagaatgacctggctatggccaccccgagtgcccaatttcccagcagcgagaccaacactgagcccttgacatggcgtcatcctcgtggtgatcagccagctacttggtggagggttgattatattgcacctcttccatcatggaaagggcagcggtttttcttcaccagaatagacacttactccggatataagtttatctatcctgcacccaatgcttctgccaaaaataccatctgtggactcatggaatgccttatccactgtcatggtattccacatagcattgcctctgatgaaggcactcactttatagctaaagaagtgcagcagtgggctcatgcttatagaattcactggtcttaccatgttccccatcatcctgaaggctggggcaaagttctccagaaggctgtacatgctctgaatcagcatccaatatatgctactgcttctctcatagccaggattcacgggttcaggaatcaaggggtggaagtgctatcactcaccatcacccttagtgacccactagcaaaatttttgcttcctgtttctgtcacattatgttctgctggcctagaggtcatagttccagagggaggaatgctgccaccaggagacacaacaatgattccattaaactggaagctaagattgccacctatccactttgggttccttctatctctaagtcaacaggctaagaagggagttacaatattggctggagcgattgacccatactatcaaggtgaagtcagtctactactcaacaatggacgtaaggaagagtatgtcaatgggaaacaacaacagcccaatcctagcaggactacaaatggcccagacccctcaggaatggtttgggtcactccaccaagtaaaaaaccacgaactgctgaggtgcttgctgaagacaaaggaaatacagaatgggtggtagaagaaagtagtcatcaatatcagctatga

SEQ ID NO: 114993 - DNA, 1892 bp, Homo sapiens
  misc_feature (1)...(1892): n = a,t,c or g
atgcccctaaatgggcgaatgctgaactatattgcgaagcgtaaggagtgggccgggcatgtgatgtgcgactgttacaactgccacatacgatataaggaggattggattcaccttgccttgtacgggactaccttggtgagacaaacaccgattgggggtaacgccgaagcgttaaagttgagtattggggtggtggcgataactggctgtatgtatgcagatgacgggctgctgatgggcgccggcaaactttatgaggaatggatgttatacgagttgccttttgttattgctgaaggccggagtggaatagtgacgcgaaacatgcgcgtacatgcataccaagtgttgacatgcaccttgaaaacgacacgggtggacggctttgaacggaggtgtccttggcgggaaggcgcgcgggaagggagtagggggtgtacaaacggaaagccggaaaggggggaggacaaatacagtgtacgaaactgctacgcttccgctactgtcaccggctacgctttcagctcccggagccgggctgcctctacctgcgcttttccaacgagatgtcaaccgaagttcagtaggtcaatagaccctactggcaaagctgttcaaactgcggatatccggctatctgctagagctacgctatggttaggcggttcgatagaggagagtccggttctgtgttcgactctccgactgctgctgcggcggcttccgccaccccttacctggaccagtccgaacagaccgactcaaccctgtaccgcgcaaacacagaccaaccagagcgtcggaatcgccgcacctagtgcaatacgcgttatttatccagagtcggttgtactcaacgctgttatttatttaccaggagacccagaagtatccgggttgcccagggccttcaaaaggcgttttagtgtcgaagtacggctcgattgtggaaccttcaaactcctattagtttattgtactcatccgggcgataaaaaagtgaatacgtgtaaaactggtatatcctccgaagtatatacccttaggctacgatttgttctaaaagtggctaaactgactgaagcacttagatccatattcctgtccgaactgcagtcaggcccctctgctgcaggtctgctggagtttgctggaggtccactacagaccctgtttgcctgcgtatcaccagtggaggctgcagaacagcaaagattgctgcctgttccttcctatggaagcttcatcccagaggggcacttgccagatgccagccggagagccggcaggcaggaacgtttaactctgctgaaactgtgcctacagccgccccttcccccaggtgctctgtaccagggagacgggagttttacctttaagcccctgactggtgctgtcgcctttctttcagagatgccttgctcagagaggaggaagctagagaggcagtctagctacagtggctttctggtgctgccnnnnnnnnnnnnnnnnnnnnnnnnnnnnnnnnnnnnnnnnnnactgtgaagggaaaaccgccaactcaagcctcagtaatggtggatgcccctcccccccccaaggtcaaggattccaggttggttctagaattttgtcctggcagggaaaattttcaaccattgattttagcctgttgggctttgggggggtaggatccccttaggtaaaccctttgggtccctgggttcagccccctttgcaggggaaggaatggttttgttttggcggggttccgggggcccctggggttttattaaaaaaaaaaagaaaacaaacaaactcctgcagctagctcagtgtctgcccaaacagcctcccagttttgtgcttgaaacccagggccctggtggtgtaggcacccgagggcc

SEQ ID NO: 114994 - DNA, 1220 bp, Homo sapiens
ttaggcccttctgctgcaggtctgctggagtttgctaggggtccactccagaccctgtttgcctgggtatcgccagtggaggctgcagaacagcaaaaattgctgcctgttcctttctctggaagcttcgtcacagaggggcacctgccagatgccagccggagctctgctgcagatgccctgcccagagaggaggaatctagagacatagtgtggctccagaggctttgccgagttgcagtgttcgaacttcccggaggctttgtttacaccctcaagcatcccaggtcgacttcagactgctgtgctggcagcaagaatttcaacccagtggatcttggcttgctgggctttgtggggggggatccactgagtaagaccacttggctccctggcttcagctcgttttccaggggagtgaacagttctgtcttgctggcattccaggcaccactgggatgtgaaaaaaaaactcctgcagctagctcagtgtctgcccaaacggctgtccagttttgtgcttgaaacccagggccctggtgacccgagggaatctcctgagcctggccatagtcattttaaaattagaatcccctgatgatccaaatacagttattcttgggaacaagaggctacatcctcaaactgatttcttctgcgtggcattctcagtatttctcgttttccttgacactggactggtggctttgcatgtatactggctctttcttctttcctccctgctgatgtctgaaatgcacacgaaagcacaagacctaggactaattcttacttccgcaccatctggtcccttctttcctattttattctggcttcagcccttagtgtctagtcaactacttcccacaaaaaagaaaccttcttgtgtttggaagaaatctggaatcaaaggtgaagaaagtgaaggaaaaaatctggaatcaagtagttattttgcttcaattcttactttagacgtggaggattattaccagggagttacattctattttctccagggcagcagtcagaatttcgataattttttcctccagtctttgatgctggaaaaagttattgaacattcactgaagttaagagggtttctctacctgcaggatttgctcatagggcacacgcacaaaagtgtcacttgtagcatgccagtgactcaagaacttcaagaatcatcatcatatgtgatgagaatgagacaataa

SEQ ID NO: 114995 - DNA, 429 bp, Homo sapiens
cccacgcgtccgaatctactccttatagaggaaacacttattgtttggattctttggatctgatgggggcaggcaataaatgaaacaagtgttgaaaatgttaaaggctgtgctgaagaaaagccgagagggaggaaagggaggcaagaaggaagcagactggatgttttcctagtgctttggattatccatgtcccatgtgagcaggcatctgcaagtgtgcccacacccaaccaccaacagcagagatgaccaggacctggaagagaaacagaagggtgggaagagaagaaatgccagctgacccagagcccatcaatgacaggactgtggcaggctcagcactgctggcatccaaccttcagagcagggcactggcactcttctttctgttatgcccgtgtccacttgtatcagctgcaaacaacg

SEQ ID NO: 114996 - DNA, 363 bp, Homo sapiens
atgtcccatgtgagcaggcatctgcaagtgtgcccacacccaaccaccaacagcagagatgaccaggacctggaagagaaacagaaggagcagggcactggcactcttcttcctgttatgcccgtgtccactgtagtcagctgcaaacaagcttgcctccgagcagtgcctacacacatgtcacttcgagcacatgctttgtggaatagagcttcatttcacccacttgccaagttaggccttagcagaatgaccggagccagcgccactgtgctgcagaagcagcaggcccaaatgctgcaagagttaataaatgtccagtacccacggagaggagaggaaactagggtgcttgatgactaa

SEQ ID NO: 114997 - DNA, 589 bp, Homo sapiens
tattctaaatcttaagagtcattaggttgatgtttgcaattttttatagttaatgcaaggcatgttaaaatataatttgtcttggttttaacattctgagccactgtgtagcagaatttatctgtattacttgacattgcccaattcttcctatattctgtgggataatgttttagctttacttgttcaattggaatatagtttgtactttttttagtttacgttattttacccaggaggcagctgttagttaaaaaaaaaaaaaaatttggaatatactgttcttttggtggttttattctatactaaaacttgaaattgtgagtgactcttggtcatgctttatttatgcagaatatcctccgaatcctaaatctagagctccaaggatgctggtcattaagaaaggtaatacaaaagacttacagctatctggattcccagtagtaggaaatcttccgtcacagccagttaagaatggaactggtccaagtgtttataaaggtttagtccctaaacctgctgctccacctacaaaacctacacaatggaaaagccaaacaaaagaaaataaagttggaacttcttt

SEQ ID NO: 114998 - DNA, 2498 bp, Homo sapiens
  misc_feature (1)...(2498): n = a,t,c or g
ttttttagatctgacataaaacctcaagtatttttgctctaagattatgctctttacataagttagaatatatttaaacataagggggagctaaaagcaaatgggggtaaacaaaccagaaaaatcaaaatacaaatatacacagagccaaaatagtatttccgtcagcagcaaaacagaaacaattccaaaattaatgtgcaaatgaaaataaagtagttaacagtcattcatttaataagcttgtgtatttgataatgaaaacgcttagctttccttttctgacctcggaaaagtaatcaccatctttagtaaggtattacttttaaaagtatgactttaacaagtgaataaagcatgtttagagtatgtttatgtttagaaacaataccttgaacactacagaaaacaacaatattctgaaaatccagtttattttccatgtcgtggacagatccagtcagtgtgatcagtttttctgccgtgtgtaaataatttatcaaaaataagttttctccacaagactcttttcccatcaactctgaaaaccctggtctgacaacataccccaataaagcttttgaaaatcacctcttgaaatttggaagaaaatgtgccaagtcttttcctgtaacatttactgcactacaaatggctaaagagcaatttatggtttaaaaggtgaatagtacaacaggtgagttcaggaaattgttttagtgcactttgctccagttttagccaacatgctacattttcctttttggtttttgttttgttgttgttgttttttggggggagggagaaggagaccgcacaaagtggacttgaggatttccattgtacgaaaaagatatgactctgcaagcaaaacagtgtaagctgccttttttcttaagacctggacattttaagacagaagctttgcaaaacattacacaatttttttattattaaatgagaaaatctcatttgttacatcgtcacattgctagtcagagaaatgttgcagtgatggaaggaaagtcaatgttggaccaaccccaagtcctccattcctacaacattcatttacaaagaaataatcgttcaacacagcccaacaaaacattcttgggttttcttcatattgaaggtcccccaaaaaaatcctcttctaatgggggtatttcacctacataaattataggttcttcatttttacaattcaccccaaactgtatggggaggtggtatcacacctaaggatttctaaaggctgttaggggaatcccttcacacatcgtcggtcatctgatggtattcactggcttacttgtctctgtggtccattcattctcagttgtgggggttttgaaagtgctgttcctcccagggtcccaaacttggaagtcacagatcaaggccatttttcaaaatacccattttttcctcagaccattccttctgtaactgttcactaataacttggaattctctcatttcatcctcagttaagggagcacatgtttccaccatttcaactgtcctccctgcccagccccatttccctttaaacaacctgtgttctgccctcaagtgaacttgaaagaacatcagtttgtgggaaggttgaagaccgaatgatctgctgggaaatcactgaggcattgccattctcttgaggaatttcattttcatcgaagtttcggtttatatccctttcttggtgagtactattgctgttatgtaaattaaatgagtcgtcatccttctctgagccagcacggctttcatcttcatgttcctcttctactctgtctcttttcaatgctttcaaaaattccactcttcttatcagtgcgcattcgtgtccagtttggttagacgaggctgctgattaagtttgtcaacaggagaagaggaatttgagcgattacactctttccactgaaatttgtaagatggaacctaaaagttccttggcaagttgatttaaaaagccattaaaagttgcccaacgcccaaatgtggactcatgagggaaagaagttcccaactttattttcttttgtttggcttttcccattgtgtaggttttgtaggtggagcagcaggtttagggactaaacctttataaacacttggaccagttccattcttaactggctgtgacggaagatttcctactactgggaatccagatagctgtaagtcttttgtattacctttcttaatgaccagcatccttggagctctagatttaggattcggaggatattctaagagaggagcttgggagattttttttggttgggtatgtgtgtgtctgagacgtgtaggccccacacacctgcagctaaagacttattgtgatttggttctctctcatactcaggatttaaagacggaaaatcctcagcttcaaactgtttgcgttctcncttgtcttcctttcctccccggttttcaatggtcaggtatgttggttttcatgtagtccctgggccttttcccgg

SEQ ID NO: 114999 - DNA, 1521 bp, Homo sapiens
atgtctaaaaggtgggcactggctgggttgggatgtctgcagtgtgccagggcctgcctgggccagctctccagtgctgtctgcacatctcctcctaactccagtgattttgtgttggtagaagaagaattctaccacagaaagggacaaaaaggcagctgtggagccagccgcttctggatctaccttactgcccaggtgagcatgctgcagagtgaatctcaggccatgcccaccacatctgccatctcgtcttcaccaacttgcttccaacagcactgccacaggtgcaggtcgatgtctttcaatacggtcaatcgattaatctatctgccccactacaatgtaagattcagtgaagacaggttcgatacctggtttggggtccctgtaggtccaattctgatgccagaaggaatgtctcagtgtggactgacttgcaatgaggacctagaggcaggcactggcagggcagagctgagcagagggagtggtaaatggcccagagcagagggggtggtaaatggcccacctgagctgagggatgaagcccaccatctccctggagcccgtggtcatgaggtcctcattgcaagtcagtccacactgagacattccttctggcatcagaattggacctacagggaccctgcagtctctggggaagccgatgtgagaggtgctggtggcagctgccgccagtgcttgccaaagttgcggactgccaaccacagctggtactgtccagggcctgccctgagcacactgacatctgcccgtgctgaagatgcaaagcctgttgcagcaggagctgctggcaccagccctgatcattccctccttttgcaatgcctcagctcttttatttccatctgttgttctatgataggctgctctccccacgtttctgatagctgtgggagagtggacagcccagagacaaccggagaagcagatcttattactggaataattgcacctttgtgttccaacactgcacagtatttttctcaggagccaaaactggcttctaagattcttggattccaggctcaccattccaggcaagtgctaaagggaaatgtccccaggccagagcaaagaacctttaccttcaaatataccttggatcaaagagagaaagcccctgcatccctccatcagattgatagtaggctcagtagctgtcctgagtcaaaagaccaaagaaaaagggaagcctcaaggagagatgagaggacagcagatgaaaatgagcctgcaggaaaccaagctctgaggagaaatgggcaggcagccaagagcagggcagaaactgcagcagtagcagcggcagcaatgaagtctccaagttatgagtggcaggctctgagaacaatgatggagcaggaagttaatgcagagggcaggcagagagcccctgagacgataagcaagatgagtggagaaaaccgacaggacttagacctgggcatgggcagcagaggaccttatcccagcagcagagggactggcagttaa

SEQ ID NO: 115000 - DNA, 359 bp, Homo sapiens
gttaacagcagggtgcactaggttaagctggggtaacaaatagccccccatcttaggggcttgtaagggtttatgtctcccttatgctccgtgtcccactgtgggtcagctgtccgagcccccaagcccttgaagtagccaccatctggaacattaccaatcttagggacgaaggcaaagtggacagcatgaaccaagggctggcacttaaaacttttactcagaagtcctgcatgccacttccactcacaagccacacagtcacacctaagttcaacgaggcagggatgtatattcctcccacaggaaagagcactgagagggagaagcaccaacctatttcgtgaaaaataatacaa

SEQ ID NO: 115001 - DNA, 597 bp, Homo sapiens
atgcagacttttacaacatgcatcagctacagtgagtattcttgcatgcttttggccaatgcaagctctcatggcacgctgtactgtaagctccgggtcggcatttgtttgttgatggtaccagctgtcaaaaaccaagcaagtggcagtgctagaggtgccacaaaagtgcgaaggaagtgtcaggctggatgtcaaaatgaacaccttggagaactggatgatggaacagacggtaaaaatcagctaaacatcagagaaaatggaggaagaggtcaaaactgtgaacaggaactagaagaaagtgtagcagaaaaagacttgtcacaaacttcgagagatttggagaaaatgatgtcaaaacacatcttcctcaagcccatgctgagtatctctgatttggttaatttcttgatgcaagtttccaaagttctggtgaaaacggctgaaggaatagtgttacagcaactgcccttggcttttccagctttacacttccatgcctatggaaatctcttccctgtctgtagctttaagcattacatctatatgatcgaccatcccatcttcatctccatccctgacttcctaacttga

SEQ ID NO: 115002 - DNA, 207 bp, Homo sapiens
cggccgcgtcgacgcccaactaaagtgtgctgcgttctctgggtcctgaggcggcagtctggccgcagtgaccagactaactgtgccccggaggctgcttggaattccacttaacgctggaagcacgcagacgctcttgaggcgggcagctgcgtagcgtgtggcggagccgggagagcgccccccaatgtggcacctgagcgtctg

SEQ ID NO: 115003 - DNA, 409 bp, Homo sapiens
tcacagttctgcaggctgtacaagatgcatggcaccaacagcttctctgatgaaggtttcaggctgcttccacttgcaggtgccttgtggatgttcaacagccattctttactcctgttcggaggcctctatccaagcagggcagggtgtgccccggactgcttggaattccacttaacgctggaagcacgcagacgctcttgaggcggccagctgcgtatcgtgttgaggagccgggagagtgcaccccatgtgggcctgagcgtttgggacgaaccccatgggagtctgatgggaaatacggaccaatatgctgtgagtgtgcacgaggtcctgtttttaccggggccgtgtcgtgataaggtggctgtatagtgaaaccacccgtaaatggttgtgtaacgcacat

SEQ ID NO: 115004 - DNA, 588 bp, Homo sapiens
atgactttgggctttgctaatgcaaagagaaacgtgcaggctccagccagggacccctcggagaacagtgcatgggctgtgcgcaactttgctgagccattttcccgcgaggcccccagcggcgcgggggctgtggggaggtggtgtgggagtacggtcgctgctgcgcggcgtggggagaactggagcggctgcccggacgcccccgccctggtcccggaaatactctatccaccccgctcccccaaaccgctgctccagattaggcgaggtgaagctggcaccgtgctctattttcgacctgtagcctctgcgaagccgccagttctgcgccagattagccccatccatccagtgtcaatggttgtcttgttgagaaaatcaacatttttgagctatactgtgacctgtgtcagaaaactgacgctgacaacagacctgcaagtacgaacttgttatccctgcttcacagataaaggggctgactcacaggaggattcactgatgcagccaggattgcaccgccagctcagagaggtcagtgagggaaaccccactctctctgactcaaagttcactctgacttga

SEQ ID NO: 115005 - DNA, 346 bp, Homo sapiens
cgacctttggggacgcaaccctattggtcatttggagagtgcccatgttctatccttatcctgctggatctacacaaagctttggacttcggggatcccctcctcttctttaaacccttccttcccctgaatttcaagagactatacgctgggtggctatctacctctctggctgcacatatgactgtcccacagaggccccttctttgctcccatccccgaacgggccttatcctccccgcccttgggctgtgcgcagattccgcagctcaatgccatataaatgttggcagctttcttatctctcctccacccaagccactcttctgagcaccaggcctctgta

SEQ ID NO: 115006 - DNA, 205 bp, Homo sapiens
ggcctgttaggaacagggctgaacagctggaggtgagtggtgggcgagcaagcaatgcttcatctgtatttacagcgattctacgttatggtgagttgtatttcattatatactacagtgtaataataacacaaatggaaaaagatgaatttggggactgataactctggagttatgcaaaggttctgtgatctactttctcata

SEQ ID NO: 115007 - DNA, 317 bp, Homo sapiens
tcatacttgtcttcctgagtcttctttatcccgaacatcctgagttttcgaatggttgacatgccagctggctttctgcagatgtacttctcgtgtgtaaatttccttctctgtgaggtattcatattgaacatgacctccaagtgtgtttgggtctgtgcagaagacaataggactgcgatttctgatgattaaaactcccgaagtccgcagtttggtgttcagctttaaaacgtgctctgggcgtcctgtggtggctaccagaggctttggtgagtcattgtcaacccagtagctagagaagtgctggaatgccc

SEQ ID NO: 115008 - DNA, 205 bp, Homo sapiens; identical to SEQ ID NO: 115006

SEQ ID NO: 115009 - DNA, 770 bp, Homo sapiens
aagtgtagaaatagaatcaaccttttgtgctgtctgtcacaggaagaattcagtaagggatagttcacaaggtacactaacatctagaatcaaacttagagcccataattaagtgatggattgaatgagtataatcccccagtgacccttagggatgaagtaccagaaaaaaaacaagattttcctttgtcttaggttcgaagagggaaggatcaagagggatttgaattaaggaactttcataaagtaaggcagtctactgggagtaaaacttgaagcaaaaacaaggcagaaagcacggagaggagtaaaaacagtaaggaaaggagcaaagaatggcaagaaataggacagtggaagttttcggagatgacaagttagagggaagaagaaatgagcaagaagacatagagaccgacaatgtaaagcaatggtcagagaatgaccgccaggccaaaaaaggtgaggagcacaccctgttccagatggttgatgcccagccatcagtcactccatctccaaatatagaaagaaagaacttacagctgtgtttgagcagaaccaaacaagcagtgtttgattttagagatagtctctacaacgtacaatccccatttccgtggattgttaaaactgcagcaggagagggtgagcaacagaacacagcagctatacaaattgacagtcaccaaatggtgaatacttttactctcttagtgatcattcttttcgttgagaacagagctagcagcaattcagtggcatcctga

SEQ ID NO: 115010 - DNA, 894 bp, Homo sapiens
atgtctaagtcagagtctcctaaagagcccgaacagctgaggaagctcttcattggagggttgagctttgaaacaactgatgagagcctgaggagccattttgagcaatggggaacgctcacggactgtgtggtaatgagagatccaaacaccaagcgctccaggggctttgggtttgtcacgtatgccactgtggaggaggtggatgcagctatgaatgcaaggccacacaaggtggatggaagagttgtggaaccaaagagagctgtctccagagaagattctcaaagaccagattattttgaacagtatggaaaaattgaagtgattgaaatcatgactgaccgaggcagtggcaagaaaaggggctttgcctttgtaacctttgacgaccatgactccgtggataagactgtcattcagaaataccatactgtgaatggccacaactgtgaagttagaaaagccctgtcaaagcaagagatggctagtgcttcatccagccaaagaggtcgaagtggttctggaaactttggtggtggtcgtggaggtggtttcggtgggaatgacaacttcggtcgtggaggaaacttcagtggtcgtggtggctttggtggcagccatggtggtggtggatatggtggcagtggggatggctataatggatttggtaatgatggaagcaattttggaggtggtggaagctacaatgattttggcaattacaacaatcagtcttcaaattttggacccatgaagggaggaaattttggaggcagaagctctggcccctatggcggtggaggccaatactttgcaaaaccacgaaaccaagtggctatggcggttccagcagcagcagtagctatggcagtggcagaagattttaattag

SEQ ID NO: 115011 - DNA, 2055 bp, Homo sapiens
cggaaattgggtatttttaaaagggccttcccagacactttcaaatctgcgggatttatggagcggcattagccagcagcttaggttcctaattcccctggcagagctttggaacttggaattgtgatagaagcattcaacattattatcagggggagtgggtagggaaagtccaaatctctgccagtcccaaatccatacagttgtcatttcattcaagagaattaaatcggtttattgattacacattgataatggataccacaagcttcattccccatctataattttaatctggtaccattattcaaattttagatatatggcatagggatgtgcccaacaattcacttttattaacccattccatggattttgcttggggtaatccccttttaatgggtgaaacttcagggtcacaacagtaacttatcaagttccactacaccaagggtttcccgaaggacaatgggcttctcccaccccaagcagggttggtataataaaatccccaaataggaccggggggcatcacccctgaaaggaatttcctaacttccacactgttggggggggaaattttacccaagatgggccttagggagtagggacttaaccttttacacaggcacattaaaaaaaaaagacatttatttcagcggtcacgatcaggacttgttacattttaggcaatcaaacaggcatgggggtgcaaaaaaaaaaaaaatctacattaaaaaccctttggttggaaatgctttacactttcccaccagaaacagaaaacttaaaataaccctgttatacaatttagtcacaaattacagtccctcgagtttttttgcccattacacatgagtatttggtctaaatacatgttcttctttggtagcagctaggccctggcacccactgtgtctggggcgagtttcacaaaatctgttgtaacctgtagctttcctgtcacttctctggctctcctctcctgcttaagctttgtttcctaattaaaatcttctgccactgccatagctactgctgctgctggaaccgccatagccaccttggtttcgtggttttgcaaagtattggcctccaccgccataggggccagagcttctgcctccaaaatttcctcccttcatgggtccaaaatttgaagactgattgttgtaattcccaaaatcattgtagcttccaccacctccaaaattgcttccatcattgccaaatccattatagccatccccactgccaccatatccaccaccaccacggctgccaccaaagccaccacgaccactgaagtttcctccacgaccgaagttgtcattcccaccgaaaccacctccacgaccaccaccaaagtttccagaaccacttcgacctctttggctggatgaagcactagccatctcttgctttgacagggcttttctaacttcacagttgtggccattcacagtatggtatttctgaatgacaatcttatccacggagtcatggtcgtcaaaggttacaaaggcaaagccctttttcttgccactgcctcggtcagtcatgatttcaatcacttcaatttttccaaactgttcaaaataatctcttaggtgatgttcttcagtgtcttctttaatgccaccaacaaatatctttttcacagttaagtgggcacctggtctttgagaatcttctctggagacagctctctttggttccacaactcttccatccaccttgtgtggccttgcattcatagctgcatccacctcctccacagtggcatatgtgacaaacccaaagcccctagagcgcttggtgtttggatctctcattaccacacagtccgtgagcgttccccattgctcaaaatggctcctcaggctctcatcagttgtttcaaagctcaaccctccaatgaagagcttcctcagctgttcgggctctttaggagactctgacttagacatgacggcagggtgaagagagactttaacgatgcttcttcggcggcgtccacgggcagaaaaggggctttgcctttgtaacctttcg

SEQ ID NO: 115012 - DNA, 401 bp, Homo sapiens
ggggaggagtgagacttcaaaagagaaacgcagcacatcaaatatctgctgtccatctaagatcaaagccgggctgcaaggccacatggctggattggccccctctccccacttcgttctcccaggccagcctacagccgctgcacgcgttcatcttgcagcctgggccctgccagcaagactgtgcccgccaagacagcctctacacacccagaggacagtgggccccccagcatggccaaactgccaatgagacaatgttttcccttcatgaagagtcctcacatacccagctgcagagcatttgacaccaggcatccacaagacacagaccctgctcctcagaatcttgggctcatccgtggaaatcaaggaacaatacaggggaagacagaatatga

SEQ ID NO: 115013 - DNA, 747 bp, Homo sapiens
atgctgcgccagaggctaagaagcccgctggacaccgaggctgagtccccggggaagctgaccacggccaggcaccgcctaaagggagtgtgtgagggatgggggccgcccctcccgcaggcacaggactcagccatcacaaatgccagtggtccttggaacacgtctgcccggctgagcctgccagatgcccagtttagggaagcgcatgggaaaactcagtctccgctggaggaactcattctacatgttcctgccattgatgctgtaggaagaaagtacacagaggtgcacaaggagaacctggctgctggccgtgtatggacagatgctgggtcaaataggcatttcctgttcctgggcatggtgacagctatacagacccactgcccacaaagggttttggtcacagcgcaaggaagctggggttggcctgaaattgcatctgatactgacaagcagaaaaccaggaggagctgcgagatggaagagagcagcgagaaagaggccggagcgagctggacatctaagaggctttgttttataaatgggaaccacagaaaacaaacaccagaactggaagcatcctctgaagcaatcaagtccaagcctctcactctgcagctggaggaactggccccagagactgaaaggggctctgccaggaagcaaaaccaggcacccccgggggatgagcacttcaagggcttcaccatgggtgatggagaccatgcttgccataattaa

SEQ ID NO: 115014 - DNA, 462 bp, Homo sapiens
  misc_feature (1)...(462): n = a,t,c or g
naagaagacatcgctagaccngcatacgccattcttggcacgaggagcacagtgaaagtccaaggcaatgacatctcccacaagctttagatttccaaagtgaggaaaaaggatgaaggcttatatgagtgcagggtgactgatgccaactacggggagcttcaggaacacaaggcccaggcctatctgaaagtcaatgccaacagccatgcccgcagaatgcaggccttcgaagcctcgcccatgtggctgcaggatatgaagccccgcaagaacgtctccgcagccatccccagcagcatccatggctctgccaaccaacgaacgcactccacctccagccctcaagtggtagccaaaatccccaaacaaagtccacaatcagcaaagagcaaatcgcctgtaaaatctacggagcggacagcaaagttgaccctaaactccaagcaccaccctgcaccg

SEQ ID NO: 115015 - DNA, 1161 bp, Homo sapiens
gttcagagctaaatgctctgcccaaatttccccactcagttctcacaagaagctatggactgaatatgattttcatgattgcaattttcttggatgaaggaaggtttgtaacttgctgtatggtcataaagctagtaggaggtagagctgactctaaacaccctgtttttaaccatagagctaaaaaacccgaatgcaaatggactcttgtggcatacacgccaatggcatctacaaagtcaaacaccatctgcttcagatttacctgggtgctgacagtgaaagtccaaggcaatgacatctcccacaagcttcagatttccaaagtgaggaaaaaggatgaaggcttatatgagtgcagggtgactgatgccaactacggggagcttcaggaacataaggcccaggcctatctgaaagtcaatgccaacagccatgcccgcagaatgcaggctttcgaagcctcgcccatgtggctgcaggatatgaagccccggaagaacgtttccgcaggcatccccggcagcatccgatggctctgccaaaccaacgaacgcactccacctccggccctcaagtggtagccaaaatccccaaacaaagtccacaatcaggtatggaaccccatttcgagctttttattttaccactcacaaacgctccacagaaagtatttggacgtgtgatgatgcaaaggtagacgaaaccgaaggtagtgaacgtctgttcactagcggtaacttgagcaacctgtgcttggcagatggcaaatggattggaagccctgttggacttgctgttattgactctgagtgtgcaatggtgatcaagctagcaggagtgtggactgagcttcttccaggacaagcacatggggacaataagcttctcaagatgacctttcaggagccaaggagcttccaggcttccatggtaccagtgggctaccaaatgcaggttgccctaggaagagtatggccttgggaagaggaagaccctgaaggagctgacagctggagtcggatgttcatgaattctctgcagctgagaaacaagcccttccctgaagagggtgggagggcagttggcctcatcaaaatgtgcgtgctgacaattgcaaagatgtggaaccagactaagagcccattgatcaatgagtag

SEQ ID NO: 115016 - DNA, 204 bp, Homo sapiens
atgctgagggcccagctaagacctgagcttgcatcctatggcaccaacgcctgccaaggtgggacgttccccaggaataagctcatccaccctcgggggttgctggtggatgccacagatgacgaggaggaaatggtggtaccgtccagcatctgtgggctgcaagaaagaagaaatataacaccagaccacctctggcattaa

SEQ ID NO: 115017 - DNA, 1063 bp, Homo sapiens
ttttttttttttttttgaggccgtctcgctctgtcgccaggctggagtgcagtggtgtgatctcagctcaccgcaacctctgcctcctcggttcacataattctcctgccttagcctcctgagtaggtgggattacaggcacgcaccaccatgcccagctaatttttagtatttttagtagagacggggtttcaccatgttagccaggatcggtctcgatctcttgacctcgtgatccgcccgcctcagctccccaaagtgctgggattacaggtgtgagccactgcgcccgcgccctcgttttgtattattttaaagtcttatactttatcagaatgaggtccaagcatgaacctgggcttgaagagctaggcagcagtagtcatgaaacattttcaataaattaaaaggctttcacagaatgaggttcagctaaaacctctttacattacaaaatacagctaggaggaattacaattctttaatcgctcgaattatgagggagaggaaaaaaagtctaaaaaaatagaaaactctctccatacctgggtatcaaggcaagatgtaacactgcataatgccacaatatgagcagtcactggatgacagatactccagaaacagtggtctctggggatctcggaattatgaccaagagatgaaaacactgtaccaaaaggcatgcatacaatcactgtgtgcattcaatgcgtgagctgcgacataagcccacttctagcaagacaatgaggcagtgttaaagagtatccattaaaaccggcgtgggcaactacatgttgattaaaccttccgcggcagcaaaatgtgggcacagcgccatgtctgggttctgcagctgtttgatgatcctcttgcggaatttctccctcacacgattaaattccattatgtccatggggtcctcttcgatccaaaacttatgaaattcatgcattaaatagctcagtttatcagcagcagtctgtacataattctttcctgtctgttgttccctggagcttactgcattgcctgatttccaggcatacggtacttggcacat

SEQ ID NO: 115018 - DNA, 604 bp, Homo sapiens
tttcgtagcgatttggggagtgttgtgaattccgagggctccacacttaagaggttgtacactcacctgtctacctggactccaatttccatatttccagccacttgaggactgagaggtggatgataaaccctgtcatagtggagcaagttcaggtgtttaaccgctgttatgggggatctgccttttctccctcttctttcttacttccataagtatgtatgtgcagagattgaaaaataaccttgagagagtccatccatctaactccagttcattggaaatttctgcttctttgagactgaggttatattccacttcttctgactacaccaccaccatcaatctccttctctgaactcttggatcattacttcaacctgaaacaactcatcaggcagaatagttgcctactgccccaaccccaccaaatgttccagcacctctgatattacctcacatggcaagagggctttgaagatgtgattgagtcaaggatcttgaatggggagattatcctgaattattcagctggacccagtgtaatcacaaaggtttttcaaaagatggaagagaggcagaagagccagaaaaggatatgttg

SEQ ID NO: 115019 - DNA, 454 bp, Homo sapiens
gggtcttacttccataagtatgtatgtgcagagattgaaaaataaccttgagagagtccatccatctaactccaggaaacattgcagcgttataagagaaattatagactatttgttgaagctcagcatgtccatctccctgctttgaagaaggatgttgggaactgactgtaaggaagacaggattggagaaccaggtttagaagagaaaaggcagtgccagaagtttttgattggagaaaactacagggcaatgttgcacaagaaccattgctggactgcatcattgcttacccaacatgactcagcctcggtattgccactgactcacggagctcctaatagaggagaattagtgtcacagatcgactggaaaaccaatccacatgaagccaggaagagaaatgaagctgctgttgctgaatccatagctggccttaatgatgctggctag

SEQ ID NO: 115020 - DNA, 480 bp, Homo sapiens
attaaaaggtaaccttttaatctcgtaggaggaatctcattaagacatttttcctgatatgtagagcagtctgttggcaaaaaggcaaatatttcctttccaaattttgtaaaattatatttaatggaattcttttcctttgattatcaaggactttcactgcaggcagtgctatttcttgtgcctaagaatgtttccaaaagtcgcatcgctaatgatatttgccaagttgagtgtacacaaagtttctcatatcctgttcaagttaatcaacatcaagcacgtggggatgctttagggtgagtctatagtacaaaatgcataaaccatgtccccaggaaatttgaaaggaagcaggtgctgaatggaatttttttccttttccatgagctgtgttaattctatctccagtaggcctaatgcttgaataagcaagatgtctaatcaataaattattttcatgctcagaaaaaaaaaaaa

SEQ ID NO: 115021 - DNA, 509 bp, Homo sapiens
atggtcacctgcaataacttagaatgggaatggaaatttgaaatgaagagggggcttagtgaaactgtgttctacttagtcacctggggactaaccccttgtggagcccgagctctcattcacagctttctagagaaatctgagcccgaacctgccagaataggggatctcacccacccagttcagcagcgaggacacctgcagaaatacattcccaaagcaaggctgggcggccgtgtgaagtaagcaatggcctcagttttgcttctgttttggatgaacaccaccacatagggcctgaatgtgaaagaagaccctctatttgtctgttccggggcagcctgggtagtaaaacactgttgaatgggccacagtttcagcagaccattcaggtgaatgggaccagtctctcttcttccaaaatatcagaagttaaaacacttgggaacggagatttggccaagatggacccatttacaggctggactcagtccagagactatagagat

SEQ ID NO: 115022 - DNA, 493 bp, Homo sapiens
  misc_feature (1)...(493): n = a,t,c or g
cgagttcccccacagtcggggaaaagccggtccccagcatcccactcttgccctcaagctgactgtggaacgcgagacagctttcaaagacaagaggacaggaaggcagttaacaaagtacacgtttccaagacagcctgagctgtctagtgctgatagcagacaggtggggtgttccaggccactgcttcctcccttatctcccagacctggccgtgtgtggaccatcaccagacctaccaaagctgttgggacctggacgggcgtgctgataaaatacgaccaaaccatggaaaataaccctggatttttgcaacttcagctaggaaataacaaggccacctacaccctctcacaagcataatggcagatccctggaacagaaaagcaacattgttattttgtctcaagaagcgaacgcgctggttcncatccnnnnaattnnnnnnngtntnctnantaccctgataggacggatttntttcggccaccg

SEQ ID NO: 115023 - DNA, 806 bp, Homo sapiens
ggaagttttcaaaagctaaagctgaagggtgtcaggcctgcgtcttgtctgagatggcagccaagccagcttcagagtcacctgctggacccacatgttcctgagccagatgccaggagctcacccacaggacgggaaagacctgtccccagcatcccactcttgccctcaagctgactgtggaacgcgagacagctttcaaagacaagaggacaggaaggcagttatcaaagtacacgtttccaagacagcctgaactgtatagtggtgatagcagacaggtggggtgttccagtccactgcttcctcccttatctgccagacttggcggtgtgtgaacctcaccagcctaccaagctgttgggcctggacgtgggtgctgttaaaataagacaaccctggaaaaaaccctgaattttgcaagttcggtaggaaataacaaggcacttagagacttctcaagctaatggcagtccctggagcagaaagcaacttgttattctgctcaagagaatccaccagcatgctcttggcctagaaactttttcccctttctgatacctgtttaacgtcattattactctgtaaacaagatgtggagaagatgacagtcaggcagtggcacaaagacttcatgactgttttgttttgaacacagatgagacaataggaacccttaaatcatctctgccttgcagaatcaataaattgatcaggtgtctccatgctctattcatatcgtaggtgttaagacccctcgtgccaagcgggcgtaagacagttcacaagtatcagtgcagcccgct

SEQ ID NO: 115024 - DNA, 478 bp, Homo sapiens
tttttttcccagatctttttttctatctttattgttttattgtgattatagtaggaatccatgcttcttacaaaaatgctcagatgaagaaattcataccgtagtgagagttgatcttggactttctaattgttgctttctggtcattaagaaatatgtaaatctcgacggcgacatacgcgtgcattaagaccaaatcaaagctaaagcttgtaggtgctccttctgtgcctgtacctggcccttagtttgaataaaaggcttggaaaggaagattgaactttgcaggcacctcggtaatattctctggaatgaaaatgacacttattttcccctctgcagtcctgtattccacattctggcagctcaaggtcctcttttcaggtggtcaccctcagacatcaactgttaaggccttttcaatgtcagccaagtggtgcctgctcctgtcatccagtctccactgagccctcccatg

SEQ ID NO: 115025 - DNA, 1191 bp, Homo sapiens
caaacagtttgcccagcagcaattaaggtgaggctaagatgatgccaaaaatgactggctgtttgctgccttatcactgcctgatgtggatatggagctgggcagagctgctcagcctctgcaaggcaattcagtggccctgggtggcacagcatgggctctgccatctgcttggaagccctctgtaagttcttccagcaccttcacctataccccgactagtacgctcttcaacctttgcagtcactttgcacaacaggtacggttggaggatggcagcttcagcatctcactccctggtccttttccagggacctcgatgcctgaactttcatcagggccaactcatgcaccagggacaggagggacagtcgggtctggcactgatcactcaccaatcgtggagacagcagtgaagaaacaggtcagctaggctacccccggagatgccatcgcctggtgctgattagaaaagagccagattatctactcacttgttctcatgaaggcattatgggaagttaaaggtaaccttcccaggtaaaggttttggccgtgctcctggagggagaaatttgatgagcgaatgagcttgcaggctggaggcccgagagccagtactcgcctatccctggctgatgcgtttggggctgggggtaggatgaggtccacagggctgttgtgcacaactgcagggggcgccagtcatccagaactcacagtgaaaggccccctggagcaccagacacattgtactctctgtgagtgatctgcaaaaggagcccctgctggtgagattgtgggcatctctcctgagtctctcgagaagctactcttcagggaaatgagacctacgtccttggtattgcctctatctgctggggttaccacagagaagagggttatcagcaaacaaaggtcagcaggctccatgagggcaggaccgtgtctgcttttgatcaatcaagtgctggatattccatgggctctcaatcgataccgtaaggtgaacgaaggagaagggacaatggcaggggatgtcagggaactttccacaggtagatgatccacattctggcagctcaaggtcctcttttcaggtggtcaccctcagacatcaactgttaaggccttttcaatgtcagccaagtggtgcctgctcctgtcatccagtctccactgagccctccc

SEQ ID NO: 115026 - DNA, 488 bp, Homo sapiens
gcataaaaaaaatcatgccattaatgtgtggaagcagcgaacacacacacacttctcggtgaatttttacttcctgctgacatttcttccacgaatttctcaatactggcagtaaaaacttatgatccttgactgaccgttcgctgttacgagtggctcttcttttccacatgccggatttctttcttcgttttcaccttaaaaccttctccctgcacatcatcacgttttctctcttgtgggataacaattcgtcttaatactttccgagtgatttttctggtgatgaggttgccttcttcatcagtaaattgttcttctgtgacagattcaccaggaatgttttttgcttcctctccctttataatcaaacgccggcgaataactcgggtagtgactctccgctcttcctctgagcttgaatcatctcactgtctttcaagtcctgacaaatgcatttttagtataattttaccatcacacttaaa

SEQ ID NO: 115027 - DNA, 775 bp, Homo sapiens
aagaataataaaataaaacagatgtagtggtgacagctgtagcattgtaagctttagagtagccctcatgcttctggccatgataacactagattctcaagttccttaggccagagtggtcacactgaagtgtctgtggagactaggcaggtcatctaagcaaaggggttgttgtagactattgtacataaataatagctgcctctccctgagggtggattacacttcccagccccaatgccttcacccttgccatggaacttgctttgggcaatgaaataacagcagatacttcaggagatagtgtatttttgttaatgtaccctttcctcactccagtgatgctccagagagactgctccctgctctgctggctggggttgaagatgatgtgggagcagaaccacagttcaacccaccataggttaaggcaatgttgaggcaagaaataaacctttctactcaaacatcatattctcaaggaaaccttccccgtcacctccgacccaggttaagtctctggcaaacaagtggacactggaggcagcttgttcgggtttgtatcctagttctgccactttttacttatgatcataagtttttactgccagtattgagaaattcgtggaagaaatgtcagcaggaagtaaaaattcaccgagaacaagatttggcaacaatggacctcattcccagaagggtcttcaccacgggcttcgaggatcgcgatggcgtaaggcgacgcatatcaaggagatcgaaaatagaggtctga

SEQ ID NO: 115028 - DNA, 14797 bp, Homo sapiens
aggtgaagagtttaacacaatttattttatgcttaaataatcgactaggtcatccagtgtatggtttttcatacatatgtcattagagctatgtgtcaatgaatgctgattttatgtgaatataatcaacaaattaaagaatttcaccaaaacccaaataaaaatgccctttaaaacacagcagccttattaacctaatatgacactgctagaatggttacaaatgattggcttactgaaaggtgtctacatcttatagccagtacacaatacagtaataattttacagcgtgctgccattctactagctaaggatttctgttcagtcctttttaaatacccccgactggggccttttatgagcaccatccacctctaaagcggcaagcatttacccccttttaagcactaacagatagcatccccccaccccctaaagcaactaccgtataggttatttttttttgttgtttttaggtcatttcattgaaaaattggcaatagcaacaaatattagatgaagggctttgtgtttacagataaaatcttttgtgttgcagtatactgtagtgtttgcaaaattggaaaagatttaatcaaaataaggtgatacacatgcatcaaaatattagtattctgaagaaaaaaatttttcacagaactacagaattcctcattttgggaattatttaaatttgcagcagattttaaagatttgtttttttttaaaatcaagctagcagttttgcatatacaaacattataattgctaatatacaagaatcagtgaagagtcacccccacccagaatccctccctcctcttctagggtgaagtcacttgagacccctatttgttaaatgcatttgcaatattctgtttgtgttctaagaggcagtgccttatcaacattttattctatttttctgttagaatttatacagtgttattatttacagcaaaactatcgatgttttaaaaaagaaacaaatagtgtttataccctgacagtttgggtccaagaaaaataaggcgagctgttgtagatttagtaattttagtgtttctctgtgatttgatcattccatctccttctgtcccttctgatggcaagaatttcttccttttgtaaatgacaccaaattacttgagataaactgttaacagcatggcttcttgtatatacactgcattgctaattgcacacgcgccaatccggaaatgaaagtgatttccatgctctgtaaattggctcatgctaaattaaaatgttgggtggttttcttttcttttctttttgcataaaaaaaatcatgccattaatgtgtggaagcagcgaacacatacacacttctcggtgaatttctacttcctgctgacatttcttccacgaatttctcaatactggcagtaaatacttatgatccttgactgaccgttcgctgttacgagtggctcttcttttccacatgccggatttctttcttcgttttcaccttaaaaccttctccctgcttttgctcagacccactgggacccctcttcttcatgggagggctaaggcttgggtttgccattctggctgggaggaaggtcctacttcatcttttttcatacttgacaggggcacacaggggtttaggtctcttctattataaggcttgctgggttttcttctaggaggatttctggatatggctgctagtggtgatgctggttcttcaacatgaccagatccatgtatttttggtttcagaagtttccttggtaatctgttttcctacatcactttggggattctgggaaagtagattttgtacattgcttctggagtgatttccggatggcttccatttgcttcaaatttgccagtttcccctttgagaaatgagggtatggaatccctacacgggtcagggcggcaacccagcggatctagtaacccaccagttactcttcgagcttgagcgcaggactctaggtttccacttgatgtctcattctgccaaccatcaacagggtcatggaaaacattgttctcatctgcaaaacttctggtgcctgaaatatttccataatcaaatattggtccttctagcagtgtcactatatctattcgattaatttttgtcaagaccgaagttaaggcatcagttgtggcattttttccgtctctggtaacccatttttttaataacatgaagctctgagaaattaaagaatttggattttccacacgtatttgattgatttcatccactgaaaaattcagttcccttgccagttctgtccaactaagtcccaggtgatcggctactattgccatcctgatatctgtccgttcacatggactctgtggaccagtccttctactgctccttttctcactgccggccttttcactctttgattttaaaggtgctgcctctgttttcttatctctagcagacttcgttgtaaccgaaggctggccaccccgggaagtctcggacaacgacgtgtttcttgaggtactttcttcctcatcggacaactcggactgcatctttttttcttcttcagagaggcggtccacaagctttaaggtctcaccactaattcccttaaaatattcaatggaatgtttacatacttccttgagctgacttttcctaactttaactgtgcagctggtggtggtggtagtggtggtagtggtggtggtggtggcagtggtggtggtggtagtgacacaggtggatcttacctttactggcaacttggatggaagctgtttggccttgcctttctctggctgcccttgcttttgtgtggcacatgcttttctaactgcaattatgttatccctgggtgtgtttttcactggaattctggactttacatctacacatgaagaagtagtaagggctttggttttctcggattgactaacctgcttcattttacttgctttagtgtttgacatatggttcggtgggaaggtatcttttggtgaagtggcctttatgggaagtttggatttttgcctaatccctatcaattcctttgttttttgctgttctccaagaactttctgcttatctcttacacagtgtccttgtagtacccctgtcttttttcctgatgagactttcactgggttatctttctctgtggtacaagtgggtgcagaatgttctgtcagaactatattactcataatgttatctgtctgtatagtggaagaatccaaattgttgttgttattaaagttatctttttgaaaatcatgtttttcatggggcctaacgcccatctggctattggctgtatttgaaatcattgttatagtttcattttctaatccctgacaactggtcatcaccgcttctatcttatctgttatttctccagggccttctttcttcatggtcatggtggatgcagaaattcccatttttataggcgtgcgcaacttggggtcaactttagaggtgttagtggctgctgctgatttctccagggagccactactggatgtgccttcctgacactctccgctggtcgggatgctggggttaggttccactgtaggtgtctctacatttctctctagattggtttctacagtggtgtcccctgactgtggctgtggtgtggcagtgaccatacttttatccccttccccctggtcccctgacttcccttcagaagtatgctcaccaatctggaaaaattggagcctctcttcaacaaaatccctcttgctcatgtcaattgcaccactgcgagtcatctcaaacatttttccttcatgaaatgggaaggggttaggctcactagttggggtactttcatcagttggcgttctggctggcgttgtatcaggggttgttgctggagagcggtcttctaccgccagcccaaatggcttagtttcatcttcccgtgatttactgtcaaaaacttcatcatcccctcggttattagaccaagggtcaaaatctagacctttggtagctactgttttaaaaggagtggcaaattcttcatctactttgtaactgaagtaagtatcaggaaacactgatctgtcaggatgtctgccttccagtgtgaagaactgggcccctgacttctgatcagtcttatcaggagtcttttcagatgaagaacttttagaaggtggcttgtcctcatctggtcccacctttccctcctcctcgataacttcaagtttactttggctaaaagagcggtcagctggcttcagaatgccctctgtgttccagatatctttcttaatttccatggcttgaattgggagtttagaatcactctctgtcaagccatcatcttcatcttgcaggtcatagccatccagagagtcgatctctgtggcatccgtgtcatgagaaaactctgctgtggtggcaatggaacactctgtgatggactggtcgttgttcccattctgggcaatttcattctgaggtgaatcaaggccaaggccaaattcattatcttttccagatccattactttccagttctttctggttggaagccttttcagcagaagctttgggtttttctttttgttcatcgtccacttcctttaatttgaaggtatattttttaactgggactggctgataaatagattcgtcatcgcttgaatcactgacgtctgccccgggaggaactggtgaaggtggctgcactctaatgacaggttcagccagctggtacttgtcatgctcatcttgcagattgacttcaatcatgtcaacctctttttctgggagataatgatgcttcttatctgactcaatctggtccgcatccagtggtggaggagggggaaattcaatataggcaactctgttatttttgggtctttggttagagtctttgctcacgtcattaggcatttcacgctcaactgctgtttcctccactgtagtctgcttaagggaggttgacttggcctgttcctcctcctctgactcctcagaaacctcgggaattgggctgggtttgcctggtatataagctatgagcgagtcaggtgtcttagatgtaaattcataactcacttcctctgaactgggtgtttctggggttaaagggcttttcccagagctgtctagaaaggatacttgctctagagtatcatcttctggactaccttggggagaaggaggttgcttttgctgtctagttgtataaaaggtccccctggtttcttgtactgtcttacattcctgacttatgattttttttacacctccttgttgtatctccttttcatattgcttccccacttgtacaaaactgacataaacgggtaaagtttttatctctttccctccctctgtctgggctagtggtgcgagtttttccaatccatcaatgggactgtggtcgaatacatcactagagggagattcctttcctgggctaaactctaaagaatcaggagatttggtgggggaggtttcggtttcctcgagaggtgggcataaacctacataactctggtgtttggaaactttgctgatttctgaataggtaactttttcatcttctatagaattaaagtgctgtgtctcaactgtctctttactcatgcttgactgggacaatttttgtgatagttcatgttttggaaatgccgactgttcacaaaaaccatcgggaatattagaagacagcattctcctctcatcagcaactctgacgggaatgtgtgacactgctgagctctcgctcctcctggaaggctgatcaagcaatccgcctggatggtccccttctttcacaacatattccctatataagacttttttggagggagattttacagtcatttctttaatttctgagagagagccgtttgttaacaatttgcgttctctctcagtcacagacataaattcattcttttgatcaacacttttactctcagggtgaccaatgtgattctctcttacatcatgaacaagtacatgcgaaagtttttctttctgagacttattgttagtggctcccgaactctcccatgttctaaagacctttttgtcccatggtcccctagttgctaaatctgaggttatatgacatgccaagtctttagcctgctgctcagaaaaagagtcaggcattgctttacttgacatttcagttctctgttttttcacattatcagagccagaatcatttacaacaatttcgttgctttgggcatgctcatctttggtttttaataccataaaatctttttgcacagatacactttcatctgggaggtctatggccttctgctgtttttctctagcaaaaacttggtagacgggtagcttgctctcctgtatttttttaactgggattctggactggccatctgactttctgtcttcttgagacatgtccttactttttgcgtgtgtgccttgttcaaattttaatctaatggaactgagtttagattgtttgagctggaatccagactggggcccatctggtgctttgctctgtgaaatacttcctttggcttccactgtggacttgctgtcctcagtctgttgggagagaaccatcttctctgggctgctgggcagactgggtgccttctcctcggccttggggaagccttgtccatcagggccatgctgtcttgccttaacccactcatcattggatgccagcagttctgtcagtagcactttctcagggctgctactggtagggctttgagaagaatattctttgccatttttagggcgtgcctttttctctggggactgcagttcatcatttagcttttcagttttgtcacgaaaaaactgtgacacttcagtcagtttttcttcagcctccttcacagtcctgtccaccctatcttcatatatcaacttctctctacctctgtctaatctgtcctcagtaaagcgcatccacatggcatgttttggactactaacattgccagaatagtgcaacactgtcactttatcaaaatgctcatctttagacactttacctacaccattttcagaaacatctttatagattttggagagaatttcttttttgggggcagtggctattttttctctggaccgcttatcagacccctgtaactctgagctagggggtcctgcatggtctgtaaccgattcctcagtatcagaatgagacacatctagcttttctgacagaagcattttctcagcaaacctgtaagactcccctcttagttctgacaactcatcgtcatggtattctattgagtgttgactcaaaagcttcaatgttttataagagtcatcagatatgagttgagcagaactagggcggctatcttcttcttgggacacaggagtgtttactctggaagactccagataagaaggcaatgactcttcagcagtaagttcttcttcttcttgctgaccctgttcctctgaacaaggaaaagcatcgtgtttttctggcagaaaatcttttaggttaatatctccccgggataagtctttctgatatacatacatttctttttctggatgctttttggtttctctaataatgacttcagtgggctcagcttggttacctttttcgatgtggacttctattatacgctccagtttgggtttcatttggttgtccttctctgcatgctgggctgaggtttcagcagcagacttgtgaacatctggagacactgccgacttatgttcaaacagacctgccagttctttggaaggatcccgcccggactgaaaggccttcatgatgtcatggactgacatggtttcttcaattctttcagatgcaccttcaccgcctggtggagaatgataaaccattctggtggttgtggttatgtgagtctcttctttaacacgcatgcctttgcttaaaacccgattgtggtcatcttcttcactactggctttcatttgaaatgctttaaccttttctttaatactagaggtggtgggctttggttccaattccataaaagtaggtgaaggtttaggtgacacaggctcctctggttgggtctggggaacatccccagctgagggatcatagctcctgataacatgaaccacttcagttcttgtttctgtaataacaggagggatgggaacttcatgaaaaagtggtttaggaccagtcgtttcagcgctttgtggggctgaaggtgtcttttcacttcttgtttcaaagccactgtcagacaagggacttttatcttggtcgtgttgagaaaagtcatcaggagactctaaaatagtatctgttccaaaaaaggaatcagccattttacacaattctttctcagaggtggaagtcctcatggaggctggaggcattttgagtttgtgttcctgcaaagcaattgctggttttaaaactcttttctgtcctccctcaccatccttctttgcatcctcaaacttgtattttaagtttgtcagtgaactactcccaatatcatttgttaggtaatcaataactttggtcaagttataatccttttcggaggcggcttttgcttttacttgcactctctctggcagagatggagactggctcgcagcagcttgttgtctggcttcccggatttcttccgaactaaattctatccagtcatcttcaggagagtgtcctttgtcactctttggtgatttgggtgatcctttattatctacacatacatcctttttaaggatttcactaactttcactaagtcttcctttactttctctacaattttgaaaggttcttcatcatctattctcccttcctttgggagttcaggttggaatggcttctcctcaggcacatctgtctgtagtattgcggtcatccgcattaggtcctctttcatttcagctacatcttttagtatctcctgactggaagataaagaagatggtgtagacaacttaagggcagagggtgcaaggaacaaagatgacttaactggagatgaagttcgactgaagtgaggctgaggatgtgtctccgtagtcaatgttttaatgggtgacagcaaggctgctgctgattttgtaaatgaattagagtctggaagtttctttaatgctggttctggcaaaacattgactacagagtatactggcactgttataattgatgaagttacagatgaggtagttgcagatattgacgacccaagggatgtatagagtgcacttgcggaaggagttcttagagactgaaaagctgatggtgctgcagaaacatatgacctgagtggggaaaatggcattgcagtcgtggtagaaaacactttctcaactgtgtcagtggctgcactgaccacagagctcacagagtttgtagcagaagaaattttttcctgtaacgtggcagtggctttgcatccattaattaaagttgaggatgatgcatattttagaggggaaatagatccattgactaatgctacctctgcatgtccaggcatctgcttcacaggtgatgagagagaagatgccattgtaattttggctgatgaaatgacatcaactcgtgatttaactggagacaccactgactttaaaggtgaagatattagcggtgctgctgatgtaataattgacttaaatggcaaacttgaggaatacatattaatgtttgatttgggggaggcagggggtgtcatagtaattgatgacctctccaaaagagaccctgctgtagtcactggagaggttcgagaggaaaacgtagaattggatgccagcccttttaagggcgtagcttccgtgactgctggagctctagccagggtaccagaggaaacctggatattgtatggagattgtgacaccacagtttttatcggcgaagacattgtccgtaaggatctaattggagatgccacgtcactaatggatttaactgaagatgtagttgacgcgcctaatgtggatttgattggagaaggtgtcgaaacagaccatattgattttaacggagaagctgatggcgtattagaggaagaacttgataaggaagtgaagcctgacttggctggcccaggcactgtaatcggagctgttgtccaggactggtatggtcttgtagaaaagaatggcttgtatgagtaagtggtggggagggatcttgttgctcctgtactccgttcaatcattccaggctcagtcaagtagctgtagcgcttacgtaaagctaaggatgcgaagctctgtcgtctatctgttttctcaatctcatcatcttgatctgactctgtctcctttttatgtgctggcagagtgatatttaagttgcaaaccgctgtttgaggcagtccttttgttgtctttcgttctttcagaaaagacagacgaccacagggctcttggctggtgtctctaatcttgatggaaaatggcagtctattttctttgaaagaataaaagttaaaaacaagttgctgtcctcctttggtaagtggggccaaatttccataacaatcaacataaataggttttccttccagaacctcaatatctttgcttcttgcgacttcctcaaaattctcttgttgctctaaagttttgtccactttgtcatctgtcatgcagaaacatcgcaaggaagattctacgggatcattcattttggcaaaaacaacaaacttggccatatatggaacacatatcaattctctgtacagttgcgtggctaaccccacagtttctaaaacttgatggcagtctgcaagccaaaatctggctgaaacattggttgtaaaggagacacaatcttttataaacgtcaaaggagttgttcctgtgatgtcttcccactgagcaggcgaagtgccccctgtaatgctacagagaagacgcagattgggtgtagtgtcccctttgtatccattggatacaccttctcctgagggcgggggcaccggaatggtcattgtgattggtttatggaatttccgtcttcttggttccacagtgacaattgggctaaaagttgctttgtttccaaggatctttttcacaatttcatctggaacaggctgggcctggaggcccactcgaattcttttagttagggcaccctctgggaaagatgcttgaacaaggggcactgtggtgctgctcagaattccaccttcaggaccaatctggttgctttcctgcttaatccgggaaaccactgcaaaatactgggggaaatctttcgtgataatcctgcagatacgctttttccctaactcttctgggctatcaagttcttcatccatgccattaagtaactcggttaaatcttcatttttgctgtcaaactgatgctccttccaagtttcaccattttcacttcgaagaacaatgagttctctctcttttcctctcatggacccaaagtgagggatttccactatgacagggcctaaaaattgtgcccctgcaggacccatttctaccagcctactgctaatccctctcctttcaccatgtgggggtgggttggccagtttatgtctctttaccaaacggcaggtgattcgagtgggggccgtacacttgcgtggaggaatgatgattctcatcccgtgatgacggcttcctctcatggagccccctctcgcgtccaccataaagctaaccagaaacccagaatgaatggggcttgaaacaagattgacattgtctaaggtgtctgcagcccagctgtaatgtctaagagaatctgaatcaaattcccttgtgaatgttagatgctgctctttggatggcacaaggagttcttcaatcatcatgctgtcccgtgcataggagcttctgttcaaggtgtaagacctatccgaactgaaggagcggaggctggcagaacgcgctccgagactaaagcccatgtaaccctctgcaggcagggaatcatcacccaattccttaaggtcctgtggcccaagatatttgtctgtgtccccggtcattgcatcttcaccttcttcaacatctgagatatattcgccatcactgagcatttcaggggcattggctttacgaacttcatcatcagacatatcaagaacttcattcatcgtttctggaacattcattttgtgcttctctgtgacagtagttgtggtcatggtttcttcggtcactatcttcagggtgtccactactgagatgtagccgaggcgccgggcaatgccaagggcagtattcccattcacagtgagttcattgggggaggcgttgttctgaagtaagacatttattatatgcgtatgcccctgctgtgctgcttgatgtaatggcgtatacccattctttgttttggcattaacttttgcagaatgctggagcaggaaattaacaatcttgatatttccatagtggcagcccacatgcagtggtgtgtatcccatctttgtctgggcgtccacatgagccccttggtttacgaggacttctgccacattcactcgatcttcttgagcagccaaatggagtggggtcaggccgctcttattgctcaggttcacattcgcatttctaccgaggagcagcgacaccatgtccacgtgcccttcctgagctgcgagatggacggaagcaattccttgccgggtaactgcgttggcatcagcaccatattccagcagagttgtcgctatgtccatctggttctttttggcagcgatgtgcagtggcgtataaccattctttgcggctgcgtgaggtgaggctccttggtccaaaagcagaagggccactttctgattatcgtaatgtgcagctacatgcagtggtgttagcccgctcttcccagcagcatctggagatgcacttttctgtagcaggagattggcgacttcaagctttccatattttgctgccacatgaagaggagtaaatcctttctttgttgttatagataaagacgctccatgatccaaaaggaacgcggccacatcctcatgcccctctcgggcggaaaggtgaagtggggtgtacccagaagttgtggctgcatttggagatgccccttgctgcaacagctgttgtactatgtctgctttccccagtcgggctgaaatgtggagtggtgtttggtcatccttagctttagcttctacctgagctccgtcttgtaccagataccgcacaacttcagcttggccggagcgagctgccatgtgcagtgctgtttctcctctcacattggtggtgtttggtgaggctccatgatgcattagttgtgatacaatatttacatgccccatgaaggcagcaacatggattggggtaaggcccgactcggttacagcttggatggatgcaccgtgtttcagaaggagttccattactttaattcgattcttcttgcaggcgatatgaagaggggtaaagccattcagggctttggcattggggttagctttcttatccaagagaaccttggcaactttgtaatggccacagtgggcagccacgtgtagggcagtcaggtagtcattggtgacatcatccacgggtacattatgctggaggagaagctggacgcagtttaaatgatccccttgtgtggccatgtgcaatggagataatccattcttggtttttgaaagaatgggggcagctcgatcaagcaacatttctaccacctgctcgtggccactccttgctccacagtgcagtggtgtcagaccatccctggttttggcatcgattttagctcctcgatcgagcaatagttttaccatatttgcatttcctctttttgatgcaacatgtaaaggagtgatgtcattccttgcggtgaaatccacagcagccgctcggtttaacagcaacgtggctacattgatatttccatagtgagcagctatgtggagcggagtgaagccactctttgattccacatctgcattgttgtcattctgcagcagcagggcggcggcttttgtgtcgtctttgcgggccgcgatatgaagagctgggagacgcacttttcctttggtgtcattctctagcaggagcgaaacgacttggtcgtgaccttgttgcaaagccactgccaatggtgtgaagccatcctctgtggctaggctctggcttgcaccattgtcaagaagaaacttgacaacttccaggtgattttcctgggctgccatatacaatggcgtgaaaccattctgagattgtgcattgacattggctccatttgtaaccaagacttttaccacctctgcttgcccagccaaagatgcgatgtgcaatgctgtgtttcctttctttgtagctgcatccacattggcttctctctgcagcagctcagaaacaacctctacatggccttctttggaagcaaggtggagagcgttcaacccattctgattgcaaatgttgatgtcaactccattttttatgtagtcgagggccttttcaaggtgtccagctcgagctgctcttaagtaacttgcattggcatcagactttttcttccgatcccgggaccgtttgcggtgtttcctttttttctcaggctcttcttcagcattgatttctaaatccctgtttttctttaattgtgaggctgcatgagccataatgcatttaaaaagatcctctcaagcacacacggcttccttgtaaaaggtgatatcctcaggcacctctaataggcttacagcagcattccaatcactagagagaaagctttgactagaagcaggaagatattcacaatgcaaagatgctggagaagctgaagcttttaaaaacccaaatgatggtgtccc

SEQ ID NO: 115029 - DNA, 873 bp, Homo sapiens
tttttttttatagtttttacctactttatctcattgagttggagttttcccccaacagagtacagtacatatctgcccatttttatggagaaggaaatggaggttctcagagtctgaatctaagatcccatggtcagtgattggtacagctaggatgcacacccaggtcttctggctctctctctttgctgttatctaactgagaaatttgggcaaaatagagtaaaggtcttgacatcagggataactaaagcaccaaggtcattttctacatcaaaacactttagtgaagcagctaaatccgatgatgtcctctttagctttggccttctctcactgtgtgctgtttggagaactctgttatgttgctctggcctttaactcaggctcagtcttccgaaatgagctgctgccggttaggagcatgttttatcacgtccctgttgcatcaaatcccagccactgctttgcttgaaggtaatcttgatatcaccctaactgtccaactccaaatcctagatgcccataatttcccttacaggctctgcctaatagacagatgcatatgctttatatcttcctccacttacccacaaatagatggactgaaaagtagcagagacatcggagacaaaatttcatttgtaagaagtaatggctctatcaacatgggcaagccctttaatttctgagtttatttttctgtaaaattagtagcccattttctacttcctagggttgttatataggttagaagcaatatatttaaaataccaagcacatggcaggtgtgcaacaaatgatagctatttttatgcaacagatacacctgcacaggagccaaatcctcgtgccaagcttggcgtagtcagt

SEQ ID NO: 115030 - DNA, 573 bp, Homo sapiens
ttttactcgggcctgcgtccgctgccgccgtccctcagtttgcccccggaggaggcagggcggccgtgccttctgccgtgcgcccgcgtggctgccaccgcccctccgaatcctccggggccgcagaggggttcgctacggagggaggtgggggccttcgggaggaggaggcggaggaggcggaggaggagggaaggaagatggcggccgtggaactagagtggatcccagagactctctataacaccgccatctccgctgtcgtggacaactacatccgctcccgccgagacatccgctccttgcccgagaacatccagtttgatgtttactacaagctttaccaacagggacgcttatgtcaactgggcagtgaattttgtgaattggaagtttttgctaaagtactgagagctttggataaaagacatttgcttcatcattgttttcaggctttgatggatcatggtgttaaagttgcttcagtcttggcctactcattcagtaggcggtgctcttatatagcagaatcagatgctgcagtaaaggaaaaagccattcaggttggctttg

SEQ ID NO: 115031 - DNA, 687 bp, Homo sapiens
tttgcttgctcatcagcacaaatatttactgagcacttaccatggactagaactgctcgaaacactgggaatagagaagggaatcaaacagacaaaaaacatgttcaagtctctcaagtctacgtgtcctatcaattccaaggactcatcatttttgtattttctatttttctattccaattcttcaaagtgagaaagcagaggtcttaaaaccctgctccaagtttccagttggagctgtccagcctcctgacctagtgtcagcagagggcacaactgagcctcaggtgcagtgaaaagaggtttcttgatcccagccagatctcttcttaacttctatgttccaggtgcccctcagctgtacaaaaagagttgcttctgagattccaggttgaggcctgggaactggcagtcattgtgacaatgggaatctgtgtgagaaggcaggccttcatacttcaggcagttgacaagacagccttagctttcgttttctgcttgctacagagccttaaggtcagccagaagcgagtgactggaaacttcttcattcccatctctctcctggacttcagcatgggctggacccagaccccaggatctaacaactggcgacgaggatggaaggaggtgagtgggtcttcagcccctgagggctcccgggacggctacgtggccgcagcatga

SEQ ID NO: 115032 - DNA, 694 bp, Homo sapiens
aaaacacccgctttcaaaaattagaatgcaaggtcttgtatttaagtagcctgaaataatcttttaaatggaaaataaagattaatcagagtgaaaattaaatgttattttgacacaatgaatcacaagcaacgattaaatgtatatattctgtatctatatgttttccaggtcaatcttcaaaatgagctgaaaacaactgtttagaatagtgtgattttgcagtctttgcattgctgtttagagtatcaaacaaaattctgggccacagatacgctgcatttctccagtctgggatgctcctgtcagggctttagagatgaccatagggatggaacaaaacactgatctggggataagggcatagcaaaccaaggacaaggaaaaggggtaacccactgggtgggaatctcatttttccattactgaccaatggacaatataccaatatttcaaattgtatcactttcaatcagaggatgagaagaggttttctcccacttgcctcatttgagctcaaccaggtagatgcctggagtcttctctagagcaacatgtgattcctttgaaggagtaagacagttcactttctcggcaaggcttctattttgccctggtggccctctgaaccagacaacagggaacagactgagttcttgaaggaagttagtatcacacaacccaatcgtcttcc

SEQ ID NO: 115033 - DNA, 738 bp, Homo sapiens
  misc_feature (1)...(738): n = a,t,c or g
aacctttttgtaatatttccnggaaacaggatagaatggaggtccctgaaaccatcccctataaacttccataaaattattcaggtaagaagggagggggagaaacaagaaacaaaaataaaccaaactttcagccccattcaatgttaaacactaggccagcttgaccctctgaacctgcttccccatggttgtttggggcctattacctcagaatcacccagagccctgttacaagattatttccccttagctgctctatagataacttcctgaacattatgaaacattgttttccctttgagatattctttcaggtcctgcatactagtaaaactgctgatatcagctgctctgtaggaccctattgacacaagctggtctgaaagaccccacaagaagctgagtcaccaaagaatgggtttcagtgtaatgatgatttcattctccttacctcaaccaacaactccaattttccaggcccttaccctctatgattcccttaaaaagcccagcccagaacttcaggatggggaaatggatttgagggtctccttcatctccgcacttggtgctctgctctgtggtcatttagctttttctctggggcaaatccagctgtctcagtgtatctgtcctgatgtctgccaagaagaggaggagaggcatcagggaagctttcataaggaaggaatgaataacaaaatagttactgctaatacgaaaggaagggtgtaa

SEQ ID NO: 115034 - DNA, 333 bp, Homo sapiens
ggcacgaggtttccagtggtagcaatgggtgtgctgaagtgggtggatgggactgtatcagaaccaaggtactttcagctgcagactgaccatacccctgtccacctggcgttgctgatgaggtcctgcagctgcttgttaagctttttgagactgagcactcccagctggacgtgatggagcagcttgagttgaggaagacactgctggacaggtggttcacctgctgaagcgaggtatgtacttcctgttgcagttacattccgaagtgtctggagaagctggacactgacatttcactcattcgctattttgtcactgaggtgcctgacg

SEQ ID NO: 115035 - DNA, 625 bp, Homo sapiens
ggctttttaaaaatttacttattacttgttcttagcaaattaagacaattacaataaaacatcagctaactgggttcttgtgagaaaactgaggtcagcttggaaaggagttccccgagtggagttcccagcggcccgcggctgacggccaacggtgcattgctgacctcagtgacaaaatagcgaatgagtgaaatgtcagtgtccagcttctccagacactttcggatgtaactgacaacaggaagtacataacctcgactcagcaggtgaaccatcctgtccagcagtgtcttcttcaactcaagctacagaagaagggggacagggagctggttagagagggtcctcctcagccctctggcaagccccacgggcactgctcacctgctccatcacgtccagctgggagtgctcagtctcaaaaagcttaacaagcagctgcaggaccctgggggtgcaggagctggtggcaggtgctgatctacaaacaggccagagggagcttcgctgagcagtgtggtcacgctcagcacacagagaaactgggcactgtcacagccaccaaagagcttatcactgtggaagaaggtcctgacacctaagccagggccatcagcttcca

SEQ ID NO: 115036 - DNA, 1146 bp, Homo sapiens
  misc_feature (1)...(1146): n = a,t,c or g
tgtagaccccnatccagtgtggtggaattctgtacttcctgttgtcagatacatccgaaagtgtctggagaagctggacactgacatttcactcattcgctattttgtcactgaggtcagcaatgcaccggtggtttcatgtttcatactgtttacactagcactgccctttttggcttaatttagttcattttgtacctaactgagaactgtgctttctgatgtagtgatgacaatgacagatactcgtttaccaaaaagcaccttctgcctgcagcagctgtatgacacactttacctccattaccaccctgggcatctgaatgttggagatgggtggtgtcaccggccggtgggggtggggagggattttttccaaactgatggccatttcacccgggatgtccggggatgccctgcactagtgtgcggaagaagtcaccctgtgctcccccacgcaggtgctggacgtcattgctcctccttatacctctggaattcgtgcaaacttttccttcccccatcctgggagaatgaccagcatcgcaggtacccatccaaaacgggaaggcgagcatgaccctgtgacggagtttatagctcactgcaaatctaaattagttcaccatgatgaagttagatttgcagtgagctaatttagagcatcctcccagagcttgaagcagaacattcccagaaccccgttgtggaaaaaacccctttcaagaaagctgtttttaagaggctcgggcagcgtccttgaaaaatggggcacccgctggggaggaggtgggatgaccttcctttacaaaaggaaaatgggtaggcagctttcagttgaggaaactgccctttacaaacagttcccttctctgctgttcaatccaatactgctcccaaatccctgtttttcagtgtttcattttccctcaagggcagggcgctggggcttcccacgaccccctcagggacagattctgggccgtccagccgcgggccgctgggaactccactcggggaactcctttccaagctgacctcagttttctcacaagaacccagttagctgatgttttattgtaattgtcttaatttgctaagaacaagttatcagttaatttttaaaaaagccttaaaaaaaaaaaa

SEQ ID NO: 115037 - DNA, 395 bp, Homo sapiens
tcttctgcccctcattttcccactctgtaactttcctgcggtgtcttaggtcttaacatccatcgctggtaactcactaagtccatctgaccgtggaaaggaaaagctcacagtgtgaaaggcgacgatgaggctgctcccacctacgagggccctgcagtagcagactcggaaggatcagccggaaaatgcgagagcctgctcgaggtcccctcacctgctgagctgcaagacagacgcctgctgcaaacacctcatcttccgttagatcagccagcttacctggagcctgcaaaacctgaacttggggctcctggcctctattccattttttccatttctgtgagggttaagaggttctctgaaaaagcctgggaaattttatagtacaaccc

SEQ ID NO: 115038 - DNA, 2360 bp, Homo sapiens
atggcgggagttgtggttcagctgcgggggccgcgcgggagctgccgggagctgtgggcgggccagaccctctacgcccgacccgccctcgcagcccatggcccatcggcccggcagtggacgcagagcctcggccccgttccctccccggaccccccggacccgctctccgtcctccctgcagagccgagggccttggcccagccccgcatcctccccgaccgtgctcgatccagcccgggtaagccgattggcaatgcttggaaccccatggactggctgctgctttttattccatggccagggaaactgaggcacagacagaccctgagggtcgggggtcaggccaggaaagccccttgggaagcccccggggagcagctggagcggggtcgccgggcggcgggaaggagtgggcgcctctatttaagcggcttccccgcggcctcgggacagaggggactgagcatggatttcggactggccctcctgctggcggggcttctggggctcctcctcggccagtccctccaggtgaagcccctgcaggtggagcccccggagccggtggtggccgtggccttgggcgcctcgcgccagctcacctgccgcctggcctgcgcggaccgcggggcctcggtgcagtggcggggcctggacaccagcctgggcgcggtgcagtcggacacgggccgcagcgtcctcaccgtgcgcaacgcctcgctgtcggcggccgggacccgcgtgtgcgtgggctcctgcgggggccgcaccttccagcacaccgtgcagctccttgtgtacgccttcccggaccagctgaccgtctccccagcagccctggtgcctggtgacccggaggtggcctgtacggcccacaaagtcacgcccgtggaccccaacgcgctctccttctccctgctcgtcgggggccaggaactggagggggcgcaagccctgggcccggaggtgcaggaggaggaggaggagccccagggggacgaggacgtgctgttcagggtgacagagcgctggcggctgccgcccctggggacccctgtcccgcccgccctctactgccaggccacgatgaggctgcctggcttggagctcagccaccgccaggccatccccgcccatcataataaacgcgggacccactcgctctcagggcagcccaaagaggtgactctcacccctttgacagttgaggaaactgaggcactcctgcacagcccgacctccccggagcctcccgacaccacctccccggagtctcccgacaccacctccccggagtctcccgacaccacctcccaggagcctcccgacaccacctccccggagcctcccgacaagacctccccggagcccgccccccagcagggctccacacacacccccaggagcccaggctccaccaggactcgccgccctgagatctcccaggctgggcccacgcagggagaagtgatcccaacaggctcgtccaaacctgcgggtgaccagctgcccgcggctctgtggaccagcagtgcggtgctgggactgctgctcctggccttgcccacctatcacctctggaaacgctgccggcacctggctgaggacgacacccacccaccagcttctctgaggcttctgccccagaaagggtacactggccagcagttttgccacgagagtatccagaacaaaggagacagggtcatttataacctgacgcgtccaccctactgctctgtccggtttccattggctggaacgggacggtttccattggctggaacgggacctcacattctgtatttatcccgatcggctagcagcttggaacttttaaaaagaggcaaaggcagaggagaacaaaggaaggaagaagtagcttgtggaatgctaagaaagtggaatatggcggtgcttccggtcccgctgccctcagcgaagatggcggcagtggagaagcggcggcaagcggtaccaccgccggccggtttcacggacagcggccgccagtcggtatcccgggcggcgggggcggccgagagcgaggaggacttcctgcggcaggtcggcgtgacggaaatgctacgtgcggccctgctgaaggtgctggaggcgcggcccgaggagccgatcgccttcctggctcactacttcgagaacatgggcctgcgctcgcctgtaaacggcggcgccggggagcccccgggccagctcctgctgcagcagcagcgcctgggccgcgcgctatggcaccttcgcctggcccaccactcccagagcgccggcgcaggggcccggggcttgctgggagttgtagtgcgcgatgccttcttgggtgggatggatcggacaag

SEQ ID NO: 115039 - DNA, 642 bp, Homo sapiens
atgggaccaaatagcaccttagagaacctcctgaagggggccacttcggtcttttataatagggaccaggaggaggcccaaaagaaagagagaaagctcaggggaaggacaaaggctctagcagcagctttgcaggctggcaaagtccaggagccccaagatgcatccattagttgctatcagtgtggcaggccagggtattttaaagaggaatgcccaggcagcaagacgaagccacctcaaccctgtccatccagtggcaaaaaccagtggagacagaactgtccccagatatggaggtcactgggttcagagccagtctcacagatgaaagggtacacttgccagaagttttgccacaagagtacaccgaacaaaggaggcagggtcatttataacctgacgcatccaccctactgctgtgtccgctttccattggctggaatgggacctcacattctgtatttgtcccgactggctagcaacttagaacttttaaaaagaggcacagacctagaagtagagcatcattctaaatcctcaccacgtgcaaccttgttagacaagtacgacaaccagatctctgacctctctttgacatctctggctttccaggcttttgtagcctttttaccaacttag

SEQ ID NO: 115040 - DNA, 1173 bp, Homo sapiens
atggtgggtcagcaacatgtgagcacagatgaaagcgcacggccgttcacggagcagctgaaggtgcagacgaggagcactggagggcgtgcagagcacaagagcccccttgcagccaaagccaaagggagagatccaagagaacatgtcggcagggcacagtggcaagcaaggtcaaatgccactcagaggcccggtgacaatgaccaccgcagcaaaggcgagaacagcagctttagcacagaccttgcgggacgaccacgtgcccatgagcgaaccagctgcctgaggcactgcagatgtcctggttggagctcaagggagctgtggagctgtggttttggtcagaagcagatggacgtctgcagggtctgcatagtactagcgagagctgcctgcctgcatggtggggcgtttcatctcttggcaaagctgcagcagacgttggcttcagagcaggcgggccaggagaggagctgtggccagacagccattgccaaggaagggtctggggctcgtagggtgccacagatacccacacccggtgcattttccacttatacccagacctatgcctacgggagctacatccctgccccacctcctccattccctgtccctgtctcacctcgggagcttcccactgggattgacaatgtggaactatggtctgcatttgggaagagggaggagcaggagggcttggcagttacccgctggctcctctccccaccacagaaagagtacactcgccagcagttttgccatgagagtacaccgaacaaaggagacagggtcatttataacctgacacgtccaccctactgctgtgtctggtttccattggctggaatgggaactcacattctgtatttgtcccaattggctagcaacttagaacttctaaaaagaggcaaaggcagaggagaacaaaggaaggaggaagtaacttgtggaatgctgagaaaggtatgtctttatcagcagcttgaaaatgaactaatacaaccagttgcagataaagaatctctgaatccacctataactgaccaaacctggatctgctcacttggcacaggaaagccaaagatccacaccaaggtttgtggcgagagaaagcagggcttttatttgccggcaccaagcaaggagaatcaggcagctcacacttaa

SEQ ID NO: 115041 - DNA, 6743 bp, Homo sapiens
agccttttgtcttcctggagtcagtggtgaggctggtgatggatgagggttatctgatggggaatggacctcccataagggaagtagtatcagaaaagtattcttgtgaggaaaacacagaggagaacaaagagagcaggttgatggttctaaccttggagagtgtggaggaaaacagggcactgacagcagcagagggcatgacatactcctttgcaggatttcttcgtttccaagcaaataccctgtacatcctggactggtggagccagcgagaggctggagctggagcctatcggctgggccccgcctcgcctcaggggacactgctcggagacaaagcccggggccctggccaagggcaccgcggaggcgccttcccagacgcggatgacgtggctgtcctgactgacgggaaggaaaatggctgctcgcccagctccatcaccagcagcggcttgtggacaactcgcccacgcatccctggagcacgagcacttgccaggggacgcctggggcgcccctcctcccagaagctcccgcggaagactggagcaggccacctggctgcggataatgggaaccacagagtgagagaactccacatcggcctgaaggaagagcatgtgaaggaagactcagaaacagagcctcatcaggaagaggaagaggaggaagaagaagaagaagaggaagaggaagaggaggaggaggaggaggaagaaaagaagaagaagaagaaacagtttctccactggagacacaccttgagttcagggagacatctctccacacttggaccatcttcacagaccctggcagcagtcgatgggcaaagctgtgtaacagtgatggccgtttaccattgcctggtattcattgtccagcacgatgatgtggagctcaaatactctgccatcctcagcgggcatattgttggatctctcctcacacttccaggcccacactcatggctgttcatgatcacccaatggccaaagtacactcagaaatggaaggcgatgtctgagtgctcatcgtccccctgtggaaatgcacctgcagctctcgttttcttaaaggacaaacgaaacttctcagcagccattctacaaatccttaaatccataatgcccaggaaagcaaggcagaaagggtacactcaccagcagttgtgccatgagagtacaccgaacaaaggagacagggtcatttataacctgacacgtccaccctactgctgtgtccggtttccattggctggaacaggacctcacattctgtatttgtcccgattggctagcaacttagaacttttaaaaagaggcaaaggcagaggagaacaaaggaaggaggaagtaacttgtggaatgctgagaaaggagttagaagccgctcttcacagagatgacgtggagtttatcagtgacctgattgcctgcctgcttcagggctgctatcaacgaagagatatcacgcctcagacattccacagctacctagaggacatcatcaactaccgctgggagctcgaagaagggaagcccaaccctctgagggaagccagtttccaggacctgcctcttcgcacacgggtggagatcctgcaccgactctgtgattaccggctggatgcagacgatgtcttcgatcttctaaagggcctggatgcagacagtctccgtgtggagccattgggtgaagacaattctggggcactatattggtatttctatggaacacgaatgtacaaagaggacccggtgcaaggaaaatccaatggagaactctctttgagcagtgaaaagcaggaagaaaattccttggcatccgagccacagacaagacatgggtcccaagggccaggccaaggtacttggtggctcctgtgccagacagaagaggaatggagacaggtcaccgagagttttcgcgagaggacctcccttcgagaacggcagctctacaagctcctcagtgaggacttcctgcctgagatctgcaacatgatcgcccagaagggaaaacgtccacagcgcacaaaggcagagttgcatcctaggtggatgtctgaccacctgtccatcaaacccgtcaagcaagaggagactcctgtgctgaccagaatagaaaaacaaaagcgcaaagaggaggaagaagagcgtcagattcttctagcagtgcagaagaaggagcaggagcagatgctaaaggaagagaggaaacgcgagttggaggagaaggtcaaggcagtggaagtgatgaaggaacacgccatgtcagtgtctggagtgtgcttagctcactcagcctttgtgttcattgtagatcgagcgaagaggagaaagctcagggaagaaagggcatggctgctggctcaaggaaaggagctccctccagaactttcccatctggaccccaattcccccatgagagaggaaaaaaagactaaagacctctttgagttggatgatgatttcactgctatgtataaagttctagacgtggtaaaggctcacaaggattcctggcccttcttggaacctgtggatgaatcttatgcccctaactattatcagattattaaggcccccatggatatttccagcatggagaagaaactgaatggaggtttatactgtaccaaggaggaatttgtaaatgacatgaagaccatgttcaggaattgtcgaaagtataatggggaaagtagtgagtataccaagatgtctgataatttagagaggtgtttccatcgggcaatgatgaaacattttcctggagaagatggagacacagatgaagaattttggattcgagaggatgaaaagcgggagaaaagacggagtcgggctgggcgaagtggtgggagccatgtttggacccgctccagggacccagaagggtccagcaggaaacagcagcccatggagaatggaggaaagtcgttgccccccacacgccgagcgccctcttctggggacgatcagagcagcagctccacacagcccccgcgggagaggccagcagtaccaggaacatttggccctctgcgaggatcagatcctgccaccttgtatggctcctctggagtcctggagccacaccccggggagcctgtgcagcagcgtcagcctttcaccatgcagcctccagttggaattaacagcctccgaggacccaggctaggcacaccagaggagaagcaaatgtgcggggggctgacacacctttctaacatgggcccacaccctggatccttgcagcttgggcagataagtggcccaagtcaggatggaagcatgtatgctccagctcagttccagccaggattcattcctccccggcatgggggggctccagcccggccaccagactttcctgaaagctcagaaattcctcccagccatatgtatcgatcgtacaagtacctgaatcgagtacactctgccgtctggaatgggaaccatggtgctacgaaccaaggacccttgggcccagatgagaagccccacctggggccaggaccctctcaccagcctcgcactctcggtcacgtgatggattcccgagtcatgagaccacctgtcccccccaaccagtggactgaacaatcaggcttcctacctcatggagttccttcctcagggtacatgcgaccgccctgcaagtctgccggacatcggttacagccacctccagtgccagcacccagttctttgtttggagcacctgcccaggctcttcggggggtgcagggaggggactccatgatggacagcccagagatgattgcgatgcagcagctctcctcccgcgtctgccccccaggtgtgccttaccacccccaccagcctgcacacccccgtttacctggcccttttccgcaggtagctcacccaatgtcagtcactgtgtcagcccccaagcctgccctgggcaaccctgggagggcaccggagaacagtgaagcacaagagcctgagaatgaccaagcagagccgttgcctggccttgaagagaaaccaccaggtgttggtacttcagagggggtctacctcacacaactacctcaccccacacctcccctgcagactgactgcaccaggcagagctcaccacaagaaagggaaacagtgggcccggagctcaaaagcagctcctccgaatctgcggacaactgtaaagcaatgaagggcaagaatccctggccctcggatagcagctaccccggcccagccgcccaagggtgcgtgagagacctctccacggtggcagacaggggcgctctatccgagaacggagtcattggggaagcatctccttgtggatcggaggggaagggccttggtagcagtggttccgaaaagctgctctgccccagaggcagaacgttgcaggaaaccatgccatgcacgggacagaacgcagcgacaccgcccagcacagaccccggtttgacgggaggcactgtgagccagtttcccccgctgtatatgcctggcctagagtacccgaattcagctgcccattaccacatcagtccaggcctgcagggtgtgggccctgtgatgggagggaagtccccagcatcccatccccagcattttcccccaaggggctttcagtctaaccacccacattctggaggctttccccggtatcgccccccacaaggaatgaggtattcctaccacccaccgccacagccttcctaccaccactatcagcgaactccttactatgcctgtccacagagcttttctgactggcagagacctctccatccccagggaagcccaagcggacccccagccagtcagcctcccccaccaaggtccctcttctcagataagaatgccatggccagtctgcaaggctgtgagacactgaatgctgccttaacttctccaacccgtatggatgcagtggctgctaaagtcccaaatgacgggcagaatcctggtccagaggaagagaagctggatgaatctatggagaggccagagagtcccaaagaatttttagacctggacaaccataacgcagctaccaagcggcagagctcgttgtcagccagcgagtatctctatggaactcctccgcctctgagttcaggaatgggatttggttcatctgcatttccaccccacagtgtgatgctgcagacggggcctccctatacccctcagcggccggccagtcactttcagcccagggcttactcttcccctgtggctgccctcccacctcaccacccaggggccacccagcccaacggcctctctcaggagggtcccatctatcgctgccaggaagaaggcctgggtcactttcaagctgtgatgatggaacaaattggcactagaagtggaataagaggacctttccaggaaatgtacagaccatcaggaatgcagatgcacccggtccagtcgcaggcctcgttcccaaagacccccacagcagcaacatcacaggaggaggtgccgcctcataagcctccaacacttcccctggatcagctcagcagcgatctgaactatatcctgggttccagaaaaggcagaggttcttaccgaaagcaggggaggaagccgcagcccaaggaggtcgtcacttgccgggaagacagccccaacagcggctaccccaaggagccagcagccttgtgtcctgggatccccagcccctgcagaatgacccaccaggatctgagcatcacagccaaactcatcaatggaggtgtagcagggctcgtgggggtgacctgcgtgttccccatcgacttggccaagactcgcctgcagaaccagcatgggaaagccatgtacaaaggaatgatcgactgcctgatgaagacggctcgggcggagggcttcttcggcatgtaccgaggggctgcagtgaacctcactctggtcactccagagaaggccatcaagctggcggccaacgactttttccggcggctgctcatggaagatgggtatggccagggaaagtccccctctcacaagagggcagctgcaccagggcaggcctgtggcctgcggctgaaggagcctgacgcctgttcccataggatgcagcggaacctgaagatggagatgcttgccgggtgtggggctgggatgtgccaggtcgtggtgacctgtcccatggaaatgctcaagattcagctgcaggatgctggacgcctggccgtccatcatcagggctcggcctcagcaccctccacctccaggtcctacacaactggttcggcttccacccacaggcgcccctctgccaccctcattgcctgggagctgctccgcactcagggcctggctgggctctacaggggcctgggtgccactctcctcagagacattcctttctccatcatctacttcccactgtttgccaaccttaacaacctggggttcaacgagctcgccggtaaggcgtcctttgcacattccttcgtgtcaggctgtgtggcaggttccatagctgcggtcgcagtgacgcctctagatgttctgaaaactcgaatccaaaccctcaagaaaggcctgggcgaggacatgtacagtgggatcaccgactgtgccaggaaactctggattcaggagggaccatctgccttcatgaaaggcgctggctgccgggcactggtcatagcacctctctttgggattgctcaaggggtctattttattgggattggagagcgcatcttaaagtgttttgactag

SEQ ID NO: 115042 - DNA, 516 bp, Homo sapiens
atgatatgtggcatatcttatcaattaaataatgttggacttcagagggtgaaggaattaggcatgaaggtatatctcaacagggctgtgaatgactggaaacaaggtcttctctcttcacactggttctcacttgatgaaggaaagtatttaagacaatacttctttaacatacttaataatggaatggatatagaaatgggagaaatcagtgtgaaagcaggctttgaaagggtacacttgccagcagttttgccacaagagtacacggaacaaaggagacagggtcattataacctgacgcgtccaccctactgctatgtccagtttccattggctggaatgggacctcacattctgtatttgtcccgaatggctagcagcttagaactttttaaaagcagcaaaagcagaagagaacaaaggaaggaggaagtaacttgtgaaatgctgagaaagctccctgagagcattttgaattatagcacagaacattgccatccacaaggtgcatga

SEQ ID NO: 115043 - DNA, 801 bp, Homo sapiens
atgatagcagatttgagcagacaaaagaaaaaaatcagtgaatttaaagataggtcaattgagattacacaatctgaggaacagaaagaaaagtatgaaaagtatgtaagtgcccacatcccaccactgatgccaccatgcccacgagaaggattgaaggggatagatactaaacgagataaagccaatgtgaaggataaaccacagagaaaatccacaaggttgtctgctaaacctgctcctctaaaaccagggccaaagccaaaaaaggcccttggtaaagaaaggaaagaaggtacccaaagcgggtctaagaaacagcctcacaggtcacccccagcaaacacaagcctctggccagccaagcagctggacacctgtgccacaggcctgagaaacagccctgtggtccacccaagcagatatatccccggaccagaccagcagcttacacccaaatcaagggccagagaagtagccccatgggccacccccagcaaacacatccccaggtcagccaagcagaaagggtacactcgccaacagttttgccacaagagtgcatggaacaaaggagacagggtcatttataacctgacgcgtccaccttactgctgtgtctggtttccatcggctggaacgggacctcacattctgtatttgtcacgattggctagcgacttggaactttttaaaagaggcaaaggcagaggagaacaaaggaaggaggaagtaacttgtggaatgctaagaaaggtaaaaatacttccaaataaggaagaggaacaagctacgacctaa

SEQ ID NO: 115044 - DNA, 912 bp, Homo sapiens
atgctctacatcctccctaccgtcaggcagattcccatagtagcatccagtagggaaatggtcgtgctttcagtgcccactgaagtcaacctgatcacattagacgtgttccacatccatgaattcaaccaagtgtcgatgaaaaatatttggaaaaatcaaatggaaggttgcatttgtactgaacatgtagagattttcgtgtcattcttccgcgtatatagttcagtacacagtgatacacgtctgcccatgattacgcgatatcctaccagaggacagacctcatgcagttttcataggcatctcttaactgcacaaccagagaataactttgagatattaggaaaaaggccttcaaattcattcattttaccaagaagcactgagcccttgatatgtacaaagaaagcatcagaggaggcacaaaaaaggatgcaaaagaagcaggaaatccgggttaagtcccatgtggtttcttccccccctccttggggtttctgggctctcctttgtgaagaaagaggtgcccctgagaacgcccagctgtgtatcacggtagagcggcgtatagccatattccgcttaggcgggttatcccgagtgaagcgattacgccgcttagcatcatctcggatgtcgccgtgcccggcgctagcgcatgaagccaaatgcggttttaccgtggcatcgcgttttgggagtaaccgtgtcgcagtagtagggccgagagaagcaaacactggggccctgaaaaaacatcagcaacttcttgtagcatctgtaggtggggaaggtttccaagccaccgagagggctgtgaacgcagttactagggctccactttttgcctacatgcctaataaagatacagttgcatacatacgcattctacttgctatgatgaactga

SEQ ID NO: 115045 - DNA, 458 bp, Homo sapiens
agaactgattattttgttgatcatgtttcaaaacccgtgccctttaaacaagttcccagagtaaattgaatgcaattgtgggaagtttaactttttaaaggaaatcttgttgtattttgagattgagggagaggatgatgggagagggtgactggaaacctgcccaaggactgaaaaatctaaggggatgggaggaaggatgaacagagaagagaaagactagaattctgggtcagaaactcttaccgaatgagtcatcccacaggacaaataaaacctcactcatcaccctgtcttccctctctgtagcgagagaagcaaacactggggccctggaaaaacatcagcaacttcttgtagcatctgtaggtggggaaggtttccaagccaccgagagggctgtgaacgcagttactggggctccagtttttcctcagccaagtaggaagaacctctaa

SEQ ID NO: 115046 - DNA, 405 bp, Homo sapiens
aaacttgggttaattttgctcagagtatccagagttagccactaggctgcgggtgaaatgggatggagaagaacaacagcaggcttcctggagccacatgggctgactagggcactctgtggctggcctggcatgggctcgcagccagccagccccctggcagcaggttctcctcagggcttgggtcttcaacctgtggcgacaggaggcagggcagactgtggaggacaggatgcaggtcagggagagggaaggcaggggtggaccgccatgagcatgaaaagacccgaagcaagttgactcttgcaatgtgcaactgttatgttctgcaaaatgagcaacgatgtatcaaattgatgcaaatttagatgttgatacttacaataaagtttttaatgtgtttta

SEQ ID NO: 115047 - DNA, 1359 bp, Homo sapiens
tgatacatcgttgctcattttgcagaacataacagttgcacattgcaagagtcaacttgcttcgggtcttttcatgctcatggcggtattgagcggagtccgctggctgacccgagcgctggtctccgccgggaaccctggggcatggagaggtctgagtacctcggccgcggcgcacgctgcatcgcggagccaggccgaggacgtgagggtggagggctcctttcccgtgaccatgcttccgggagacggtgtggggcctgagctgatgcacgccgtcaaggaggtgttcaaggctgccgctgtcccagtggagttccaggagcaccacctgagtgaggtgcagaatatggcatctgaggagaagctggagcaggtgctgagttccatgaaggagaacaaagtggccatcattggaaagattcataccccgatggagtataagggggagctagcctcctatgatatgcggctgaggcgtaagttggacttatttgccaacgtagtccatgtgaagtcacttcctgggtatatgactcggcacaacaatctagacctggtgatcattcgagagcagacagaaggggagtacagctctctggaacatgagagtgcaaggggtgtgattgagtgtttgaagattgtcacacgagccaagtctcagcggattgcaaagttcgcctttgactatgccaccaagaaggggcggggcaaggtcactgctgtccacaaggccaacatcatgaaacttggggatgggttgttcctgcagtgctgtgaggaagttgctgaactgtaccccaaaatcaaatttgagacaatgatcatagacaactgctgcatgcagctggtgcagaatccttaccagtttgatgtgcttgtgatgcccaatctctatgggaacattattgacaatctggctgctggcctggttgggggagctggtgtggtccctggtgagagctatagtgcagaatacgcagtctttgagacgggtgcccggcacccatttgcccaggcagtgggcaggaatatagccaatcccacggccatgctgctgtcggcttccaacatgctgcggcatcttaatcttgagtatcactccagcatgatcgcagatgcggtgaagaaggtgatcaaagttggcaaggtgcggactcgagacatgggcggctacagcaccacaaccgacttcatcaagtctgtcatcggtcacctgcagactaaaggttcgaacctctgacatgggtggctatgctacttgccatgacttcactgaggctgtcattgctgccttgccccacccataggccctgtccatacccatgtaaggtgttcaataaagaacatgaaccaaaa

SEQ ID NO: 115048 - DNA, 434 bp, Homo sapiens
ttttaaaacacattaaaaactttattgtaagtatcaacatctaaatttgcatcaatttgatacatcgttgctcattttgcagaacataacagttgcacattgcaagagtcaacttgcttcgggtcttttcatgctcatggcggtccacccctgccttccctctccctgacctgcatcctgtcctccacagtctgccctgcctcctgtcgccacaggttgaagacccaagccctgaggagaacctgctgccagggggctggctggctgcgagccaggagggccaggcagttagccctgccagccacagagtgccctagtcagcccatgtggctccaggaagcctgctgttgttctactccatcccatttcacccgcagcctagtggctaactccggatactctgagcaaaattaacccaagtttcatggagaact

SEQ ID NO: 115049 - DNA, 1597 bp, Homo sapiens
tgatacatcgttgctcattttgcagaacataacagttgcacattgcaagagtcaacttgcttcgggtcttttcatgctcatggcggtattgagcggagtccgctggctgacccgagcgctggtctccgccgggaaccctggggcatggagaggtctgagtacctcggccgcggcgcacgctgcatcgcggagccaggccgaggacgtgagggtggagggctcctttcccgtgaccatgcttccgggagacggtgtggggcctgagctgatgcacgccgtcaaggaggtgttcaaggctgccgctgtcccagtggagttccaggagcaccacctgagtgaggtgcagaatatggcatctgaggagaagctggagcaggtgctgagttccatgaaggagaacaaagtggccatcattggaaagattcataccccgatggagtataagggggagctagcctcctatgatatgcggctgaggcgtaagttggacttatttgccaacgtagtccatgtgaagtcacttcctgggtatatgactcggcacaacaatctagacctggtgatcattcgagagcagacagaaggggagtacagctctctggaacatgagagtgcaaggggtgtgattgagtgtttgaagattgtcacacgagccaagtctcagcggattgcaaagttcgcctttgactatgccaccaagaaggggcggggcaaggtcactgctgtccacaaggccaacatcatgaaacttggggatgggttgttcctgcagtgctgtgaggaagttgctgaactgtaccccaaaatcaaatttgagacaatgatcatagacaactgctgcatgcagctggtgcagaatccttaccagtttgatgtgcttgtgatgcccaatctctatgggaacattattgacaatctggctgctggcctggttgggggagctggtgtggtccctggtgagagctatagtgcagaatacgcagtctttgagacgggtgcccggcacccatttgcccaggcagtgggcaggaatatagccaatcccacggccatgctgctgtcggcttccaacatgctgcggcatcttaatcttgagtatcactccagcatgatcgcagatgcggtgaagaaggtgatcaaagttggcaaggttcgaacctctgacatgggcggctacagcaccacaaccgacttcatcaagtctgtcatcggtcacctgcagactaaagggagctagagccctttatttcttccaaccttgcaaggaccacactccccatacccttcagtgcagtgtaccagggaagagaccttgtgcctctaagcagtggaccatggtcaccccttgctgggtagagcctaggttgtccttgggccggcttccttaggggacagactgttgggtggtgatggggattgttaggatggagcccaggccacatggatgatgatgattctcccccacaggttcgaacctctgacatgggtggctatgctacttgccatgacttcactgaggctgtcattgctgccttgccccacccataggccctgtccatacccatgtaaggtgttcaataaagaacatgaaccaaaa

SEQ ID NO: 115050 - DNA, 1516 bp, Homo sapiens
tttttttttttttttaaaacacattaaaaactttattgttagtatcaacatgtgaggttggcatcaatttgatacatcgtttctcattttgcagaacataacagttgcacattgcaagagtcaacgggctgggggtcttttcatgctcatggcgggccaccctctggccttccctctccctgacctgcatcctgtcctccaaagtctgccctgcctcctgtcgccacaggttgaagacccaagtttcatggagaactcccagaaccttgaaccagtgcatggttatcaccattctttgttactagatgtaggagaaggtactgcagagtcctctggcctggaacaggcaagggatcgtttctcctcttcctggggtgagccgtggccaggccagccacagagtgccctagtcagcccatgtggcttccaggaagcctgctgttgtttctacttccatccccattttcacccgcagcctaagtggctaaactccggataactcctgaagcaaaattaaccccaagtttccatggaaaactcccagaaccttggaaccagtgccatggttatcaccattctttgttactagaatgtagagaaaggtactgcagagtcctctggcctggaacagcttgggggaggattcagctccctgtttctccctcactcccaggagattcgaaaagcaagtttgagagaaaaaacagtaactaaaaaagtccatgaagaaggatctgacatgtccttttgtgaagtaacattacccctctccccatcacgacgcaggagatgacatgttacagtaagagggttacagcaattccccatctggagtgccattcaactgcctgcagaaatcttccattttaatgcattttaaacacattcaaaacgagtgctgactctccaacctaggggaaaatgccccaataaaaaatatagatagaaaatacatgctaatgtaatggcaaacttatctccacactaaaacggcaacagtcttgcggttgagggcaggggtgcggtggaacctccctcttcccacaagaacatcagcaccagagatgctcggtccccgggctgatctgatgggtgggggaccacggcactgtcactcgggctgccggtccggtcccagtgttggcctgggggcttattcagtgcttgcagcagggaagttgggtgggcgacattgagggtcattgtttgaaggctctcagggcttccaaagcatcacctctggaaaatcccatctccatgagccgggcgacctgttcctcagaaacttctagagggggcgctgctggctcagactgccgaccgccttgatagtttactgttttgtcgctgacgtaaaggaggaaaaagactgattccaattgatcattcctccctgctgctgtctctgtcgcctcccttgtgcaaactgagagaacatcagctgccggtccagcagctccattctctgctgtctctggatgtccagcgtggctcccatcccaattctggcttcgct

SEQ ID NO: 115051 - DNA, 375 bp, Homo sapiens
atgggagagctcaggatgctgttccttgggaagggaacccaacaacaacaagggaagaaaacgtgggggagtttctcgggacaggaaatacctgagcagaaccttaaaagatgggttgaaaattgtcagtcatggcaggctcctgggcacatttccccacccacccctctagggacaggaaaactccctgtggcttcagagggtaattctggagaccatctggtgcccagactgaccgtgaagcatttcatggctcgtctgtccccagcagtgaaatttgctgcaggcactgtgctccgcctaaggatgcagagtgatgacatgatcggcactgatgggatggagcagtcaattcaatcaaaacgcccaagttga

SEQ ID NO: 115052 - DNA, 268 bp, Homo sapiens
ttttattttggatgtcgacaaaagccctgattaccatgctgccctagcaacaacagagctggggttacaggacaactataagcttaaaatccaaggaaagacagatctttcccaggagagacgagatgcaagcactggcttacctgtggtggagcagaacaggaagagatgtcagcaccatacacccacaaggcttactcccttgccttctgtggaagacagcaaaaatggctgtccccctcagtatctacagccttttgcaatgtga

SEQ ID NO: 115053 - DNA, 762 bp, Homo sapiens
atggccgggtactcctctgagacaaaacttccagaggaacgatcaggcagcaacaattgctgttcaccaatatctgctgttctgcagcctctgctgctgatacccaggcaaacagggtctggagtggacctccagcagactccaacagacctgcagctgagggtcctgactgttagaaggaaaactaagaaacagaaaggacatccacaccaaaaacccatctgtatgtcaccatcaaagaccaaaggggagaatggaaccaagttggaaaacactctgcaggatattatgcaggagaacttccccaatctagcaaggcaggccaacattcaaattcaggaaatacagagaacactagaaagatattcctccagaagagcaaccccaagacacataattgtcagattcagcaaagctgaaatgaaggaaaaaatgctaagggcagccagagagaaaggttgggttacccacaaagggaagcccatcagactaacagctgatctcttggcagaaactctacaagctagaagagagtgggggccaatattcaacattcttaaagaaaagaattttcaacccagaatttcatacccagccaaactaagcttcataagtgaaggagaaataaaatactttacagacaagcaaatgctgagagattttgtcaccaccagacctgccctaaaagagttcctgaaggaagcactcaacatggaaaggaacaaccggtaccagccactgcaaaatcatgccaaattgtaa

SEQ ID NO: 115054 - DNA, 642 bp, Homo sapiens
atgcaatatgttcaacaaaaacctaaacttaaatttcaggtgcacatttgtgcttatcggaaaacagttctgcagcctccgctgctgatacccaggcaaacagggtctggagtggacctccagcaaactccaacagacctgcagctgggggtgctgactgttagaaggaaaactaacaaacagaaaggacatccacaccaaaaacccatctctacgtcaccatcatcaaagaccacagagaagtccttaaaggacctgatggagctgaaaaccaaggcacgagaaatatgtgacgaatgcacaggcctcagtagccgattcgaccaactgaaagaaagggtatcggtgatggaagatcaaatgaatgaaatgaagcgagaagagaagtttagagaaaaaagaataaaaagaaacaaacaaagcctccaagcaatatgggactatgtaaaaagaccaaatctacgtctgattggtgtacctgaaagtgagggggagaagggaaccaagttggaaaacactctgcaggatattatccaggagaacttccccagtaatctagcaaggcggccaacattcaaattcaggaaatacagagaacgccacagagatacacctcgagaaaagcaactccaagacacataa

SEQ ID NO: 115055 - DNA, 1980 bp, Homo sapiens
atgttcgctgttctgcaggctccgctggtgatacccaggcaaacagggtctggagtggacctccagcaaactccaacagacctgcagctgagggtcctgattgttagaaggaaaactaacgaacaaaaaggacatccacatcaaaaccccatctgtacatcaccatcatcaaaaaccaaagtagatacaaccacaaacatgggggaaaaacagagcagaaaaactgaaaattctaaaaatcagagtgcctctcctcctccaaatctaaagaagaaaagagagaagaatcaaatagatgcaataaaaaatgataaaggggatatcaccaccgatcccacagaaatacaaactaccatcagagaatactataaacacctctactcaaataaactagaaaatctagaagaaatgggtaaattcctcgacacatacaacctcccaggactaaaccaggaagaagttgaatctctgaatagaccaataacaggctctgaaattgaggtaataattaatagcttaccaaccaaaaaaagtccaggaccagatggattcacagccgaattctaccagagaaccaaagacaaaaaccacatgattatctcaatagatgaagaaaaggcctttgacaaaattcaacaacccttcatgctaaaaactctcaataaactaggtattgatgggacatatctcaaaataataagagctatttatgacaaacccacagccaatatcatactgaatgggcaaaaactggaagcattccctttgaaagctggcacaagacagggatgccctctctcaccactcctattcaacatagtgttagaagttttggccagggaaatcaggcaagagaaagaaataaagggaattcaagtaggaaaagaggaagtcaaattgtacctgtttgcagatgacatgattgtatatttagaaaaccccatcatctcagcccaaaatctccttaagctgataagcaacttcagcaaagtctcaggatacaaaatcaatgtgcaaaaatcacaagcattcttatacaccagtaacagacaaacagaaagccaaatcatgagtgaactcccagtcacaattgcttccaagagaataaaatacctaggaatccaacttacaaggggtgtgaagaacctcttcaaggagaactacaaaccactgctcaacaaaataaaagaggatacaaacaaatggaagaacattccatgctcatggataggaagaatcaatatcatgaaaatggccatagtgcccaaggtaatttatagattcaatgccatccccatcaagctaccaatgactttcttcacagaattggaaaaaactactttaaagtgcatatggaaccaaaaaagagcccacattgtcaagtcaatcctaagccaaaagaacaaagctggaggcatcatgctacctgacttcaaactatactacaaggctacggtaaccaaaacagcatggtactggtaccaaaacagacatatagaccaatggaacagaacagagccctcagaaataatgccacacatctacagctatctgatctttgacaaacctgacaaaacaagaaatggggaaagaattccctatttaataagatggtgctggtgctggcaaaactggctagccatatgtagaaagctgaaactggatcccttcctcacatcttatacaaaaattaattcaagatggattaaagacttaaatgttagacctaaaaccataaaaaccctagaagaaaacctaggcattaccattcaggacataggcatgggcaaggacttcatgtctaaaacaccaaaagcaatggcaacaaaagccaaaattgacaaatgggatctaattaaactaaagagcttctgcacagcaaaagaaactaccatcagagtgaacaggcaacctacagaatgggagaacatttctgcaatctactcatctgacaaagggctaatatccagaatctactaa

SEQ ID NO: 115056 - DNA, 456 bp, Homo sapiens
atgaagcttccagaggaaggatcactcagcgatatttgctgttctgcaatatttgctgttctgcagcctctgctggtgatacccagggaaacagggtctggagtggacctccagcaaactccaacagacctgcagctgagacaaacagagagccaaatcatgagtgaactcccattcacagttgcttcaaagagaataaaatacctaggaatccaacttacaaaggatgtgaaggacctcttcaaggagatctacaaaccactgctcagcgaaataaaggaggacacaaacaaatggaagagcattccatgctcatggttaggaagaatcaatatcgtgaaaatggccatactgcccaaggtaacctatatattcaatgccatccacatcaagctaccaatgacagaattggaaaaaactaaagttcatatggaaccggaaaagagcctgcattga

SEQ ID NO: 115057 - DNA, 475 bp, Homo sapiens
agggcgcgggcgatggggcgcgcctcgacttcgtggtgcgctatgagacccctgagggcactttctgggccaacaaccacggccgcaactacacagtcctgctccggatcgcacccgctcccacacccactgatgccgaagggctgccccagcagcagcagctgccgcagctggagccacagcccgagtgccagggtcccgtggaggctgaggccaggcagctgaagagctgcatgaagccggtgaggcgcaggcctgccgaggaggaactgaagacgaagaacatggatgataacacctttgccatggcagagcatcctgatgtccaggagtcagtgggtccactggtagcccccacccctctccgtccatggccccagatgacacttcaggtctgctggagtttgttggagttccactccagaccctgtttgcctgggtatcaccagcagaggctgcagaacagcaaagattg

SEQ ID NO: 115058 - DNA, 1251 bp, Homo sapiens
atggctgggtactcctctgagacaaaacttccacaggaacggtcaggcagcaacatttacagttcaccaatatccgctgttctgcagcctctgctgctgatacccaggcaaacagggtctggagtggacctccagcaaactccagcagacctgcagctgagggtcctgactgttagaaggaaaactaacaaacagaaaggacatcccacaccaaaaccccatctgtacatcaccatcatcaaagaccaaagggattttgccgatttcggaaccaccatcaaacaggattttcgcctgctggggcaaaccagcgtggaccgcttgctgcaactctctcagggccaggcggtgaagggcaatcagctgttgcccgtctcactggtgaaaagaaaaaccaccctggcgcccaatacgcaaaccgcctctccccgcgcgttggccgattcattaatgcagctggcacgacaggtttcccgactggaaagcgggcatgtatgttctctggcttctctgaagcagtcacatgacattttgcccatcaaaatggcaaaggccattctctcctctgccgggaatgttcttcagatccagactgatagagatttggccgatttggggaccgccatcaaacaggattttcgcctgttggggcaaaccagggattttgccgatttcggaaccaccatcaaacaggattttcgcctgctggggcaaaccagcgtggaccgcttgctgcaactctctcagggccaggcggtgaagggcaatcagctgttgcccgtctcactggtgaaaagaaaaaccaccctggcgcccaatacgcaaaccgcctctccccgcgcgttggccgattcattaatgcagctggcacgaccaggtttcccgactggaaagcgggcagtgagcgcaacgcaattaatgagcaaactccttgtgggcctcgtggcagcatccaggtgggggtgcgtgcaactcgcaaagccccagagggcatgttacagggctcttttagctctgcggtctgtggacgggttaagtgttaatagctcaggggccctttgccttgctgcatggggtggctgccttctgccagcgagggcaaagagccagtgtgacagccttctttgggtacccgcacccagtacatccggaattcttgtctggtgcccaagtgaaatgagattgacacctagaggcgacgggaccatcacagtaaaggaagaagtgtgcgctgtggatcctctaccgtag

SEQ ID NO: 115059 - DNA, 642 bp, Homo sapiens
atggagtttgagatcggcgaacggacagactgcctcctcaagtgggtccctgatccccaaacgaaggttccagaggaaggatcagacagcaacatttgtcgttctgcaacatttgctgttctgcagcctccgctggtgatacccaggcaaacagggtctggagtggacctccagcaaactccaacagacctgcagctgagggtcctgagtgttagaaggaaaattaacaaacagaaaggacatccacaccaaaaccccatctgtacgtcaccatcatcaaagaccaaagagaaagactttgacaagctgacagaagtaggcctcagacgatgggtaataacaaagttctccgagctaaaggaggatgttcgaaaccattgcaaagaagctaaaaaccttgaaaaaagattagacaaatggctaactagaataaacagcatggagaagaccttaaatggcctgatggagctgaaaaccatggcacgaaaactacgtgatgcatgcatgagcttcagtagccgattcgatcaagtggaagaaagggtatcagtgattgaagatcaaatgaatgaaatgaagccagaagagaagtttagagaaaaaagagtaaaaggaaacgaacagaacctccaagaaatatag

SEQ ID NO: 115060 - DNA, 570 bp, Homo sapiens
atggctgaatgggaacagctccagtctacagctcccagcatgagcgacgcagaagacagggtcagaccgacacctcacacggccaggtactcctctgagacaaaacttccagaggaacgatcaggcagcaacatttgctgttcacccatatctgctgttctgcagcctctgctgctgatacccaggcaaacagtgtctggagtggacctccagcaaactccaacagacctgcagctgagggcacaagaacatgacgaatgcacaagcctcagtagccgattcgatcaactggaagaaagggtatcagtgatggaagatgaaatgaatgaaaagaagcgagaagagaagtttagagaaaaaagaataaaaagaaatgaacaaagcctccaagaaatatgggactatgtgaaaagaccaaatctacgtgtgattggtgtacctgaaagtgatggggagaatggaaccaagttggaaaacactctgcaggatataatccaggagaacttccccaatctagcaaggcaggccaacattctaattcaggaaatacagagaacaacacaaaaataa

SEQ ID NO: 115061 - DNA, 687 bp, Homo sapiens
atggtcttagaaaaggctagagaagaggtagatccccccagtatgctgattcccccagtaacccagtgtgggcagctgcccaggtcacagtgcccacagccaaccctaagtagaatgttaacactggaggtagggataagcttgggcattattgtgctcatgatttcactctggccagacaccgtaaaggaataccaaagcagagaagccttgagtttcaagaagtacaacaagaacccaggtctgctgaagtttgctggagatccactccagaccctgtttgcctgggtatcaccagcagaggctgcagaacagcagatttctgccctttgtttcctttggaagcttcgtcccagaggggcacccaccagatgccagccactgctttcttatacgaggtgtctgtcagcccctgctggaagctttgtttacaccatgaggggaaaacctcctattcaagcctcagtaatggcagacgcctctccccccaccaagattgagcatcccaggacaacttcagactgctgtgttgccagcaagaatttcaagccagtggatcttagcttgctgtgctccatgggagtgggatctgctgagctagaccactgggctacctggcttcaatcccctttccagggtagtgaacggttctgtcttgctggtgttccaggcaccactggggtatga

SEQ ID NO: 115062 - DNA, 5450 bp, Homo sapiens
atgctgttttgggcctttgacaaaattcaacagcccttcatgctaaaaactctcaataaattaggtattgatgggacgtatctcaaaataataagagctgtttatgacaaacccacagccaatatcatactgaatgggcaaaaactggaagcattccctttgaaaactggcacaagacagggatgccctctctcaccactcctattcaacatagtgttggaagttctggccagggcaatcaggcaggagaaggaaataaagggcattcaattaggaaaagaggaagtcaaattgtccctgtttgcagatgacatgattgtatatctagaaaaccccatcatctcaacccaaaatctccataagctgataagcaacttcagcaaagtctcaggatacaaaaacaatgtgcaaaaattacaagctttcttatacaccaataacagacaaacagagagccaaatcatgagtgaactcccattcacaattgcttcaaagagaataaaatacctaggaatccagcttacaagggatgtgaaggacctcttcaaggagaactacaaaccactgctcaaggaaataaaagaggatacaaacaaatggaagaacattccatgctcatggataagaagaatcaatattgtgaaaatggccatactccccaagaggactccattattatcgctgcctagtacattatatgaggagctgtggagacttaggtcctacttcccattgtgccctcaactttacaacatggagcagaataccacagactgggtaatttataaagaacagtgcatttggctcacagctctggagactggggagtccaagagcactgcaccagcatttggcaagggttatcccatggcagaatacatcatatggggcagattgacacctcacatggctggctactcctctgagacaaaacttccagaggaacgatcaggcagcaacatctgctgttcaccaatatccgctgttctgcagcctctgctgctgatacccaggcaaacagggtctggagtggacctccagcaaactccaacagacctgcagctgagggtcctgactgttagaaggaaaactaacaaacagaaaggacatccacaccaaaaccccatctgtacgtcaccatcatcaaagaccaaaggatcaaattcacacataacaatattaaccttaaatgtaaatgggctaaatgctccaattaaaagacacagactggcaaattggataaagagtcaagacccatcagtgtgctgtattcaggagacccatctcacgtgcagagacacacacaggatcaaaataaagggatggagggagatctaccaagcaaatggaaaacaaaaaaaggcaggggttgcaatcctagtctctgataaaacggactttaaaccaacaaagatcaaaagagacaaagaaggccattacatgatggtaaagggatcaattcaacaagaagagctaactaccctaaatatatatgcacccaatacaggagcacccagattcataaagcaagtccttagagacctacaaagagacttagactcccacacattaataatgggagactttaacaccccactgtcaacattagacagatcaacgagacagaaagttaacaaggatatccaggatttgaactcagctctgcaccaagtggacctaatagacatctacagaactctccaccccaaatcaacagaatatacattcttctcagcactacaccacatttattccaaaattgaccacatagttggaagtaaagcactcctcagcaaatataaaacaacagaaattataacaaactgtctctcagaccacagtgcaatcaaactcgaactcaggattaagaaactcactcaaaaccgctcaactacatggaaactgaacaacctgctcctgaatgactactgggtacataacaaaatgaaggcagaaataaatacattatttgaaaccaacgagaacaaagacacaacataccagaatctctgggacacattcaaagcagtgtgtagagggaaattcatagcactaaatgcccacaagagaaagcaggaaagatctaaaattgacaccctaacatcacaattaaaagaactagagaagcaagaacaaacacattcaaaagctagcagaaggcaagaaataactaagatcagagcaaaactgaaggaaatagagacacaaaaaatccttcaaaaaatcaatgaatccaggagctggttttttgaaaagatcaacaaaattgatagaccactagcaagaccaataaagaagaaaagagagaagaatcaaatagatgcaataaaaaatgataaaggggatatcaccactgatcccacagaaatacaaactaccatcagagaatactataaacacctctatgcaaataaactagaaaatctagaagaaatggataaattcctcaacacatacaccctcccaagactaaaccaggaagaagttgaatctctgaataaaccaataacaggctctgaaattgaggcaataattaatagcttaccaatcaaaaaaagtccaggaccagatggattcatagccaaattccaccagaggtacaaggaggagctggaggccagcatcatcctgataccaaagcctggcagagacacaaccaaaaaagagaattttagaccaatacccctgatgaatattgatgcaaaaatcctcaataaaatactggcaaaccgaatccagcagcacatcaagaagcttatccaccatgatcaagtgggcttcatccctgggatgcaaggctcgttcaacatatgcaaatcaataaacgtaatccaggatataaacagaacgaatgacaaaaaccatatgattatctcaatagatgcagaaaaggcctttgacaaaattcaacaacccttcattctaaaaactctcaataaattaggtattgatgggacgtatctcaaaataataagagctatctatgacaaacccacagccaatatcatactgaatgggcaaaaactggaagcattccctttgaaaactggcacaagacaggggtgccctctctcaccactcctattcaacatagtgttggaagttctggccagggcaatcaggcaggagaaggaaataaagggcattcaattaggacaagaggaagtcaaattgtccctgtttgcagatgacatgattgtatatcgagaaaaccccatcgtctcaacccaaaatctccataagctgataagcaacttcagcaaagtctcaggatacaaaatcaatgtgcaaaaatcacaagcatttttatacaccaataacagacaaacagagagccaaatcatgagtgaactcccattcacaattgcttcaaagagaataaaatacctaggaatccaacttacaagggatgtgaaggatctcttcaaggagaactacaaaccactgctcaaggaaataaaagaggatacaaacaaatggaagaacattccatgctcatgggtaggaagaatcaatatcgtgaaaatggccatactgcccaaggtaatttatagatttaatgccatccccatcaagctaccaatgactttcttcacagaattggaaaaaactactttaaagttcatatggaaccaaaaaagagcccgcattgccaagtcaatcctaagccaaaggaacaaagctggaggcatcacactacctgacttcaaactatactacaaggctacagtaaccaaaacagcatggtactggtaccaaaacagagatatagaccaatggaacagaacggagccctcagaaataatgccacatatctacaaccatctgatctttgacaaacctgacaaaaacaagaaatggggaaatgattccctatttaataaatggtgctgggaaaactggctagccatatgtaggagaaagctgaaactggatcccttccttacaccttatacaaaaattaattcaagatggattaaagacttaaatgttagacctaaaaccataaaaaccctagaagaaaacctaggcaataccattcaggacataggcatgggcaaggacttcatgtctacaacaccaaaagcaatggcaacaaaagccaaaattgacaaatgggatctaattaaactaaagagcttctgcacagcaaaagaaactaccatcacagtgaacaggcaacctacagaatgggagaaaatttttacaatctacccatctgacaaagggctaatatccagaatctacaaagaactcaaacaaatttacaagaaaagaacaaacaaccccatcaacaagtgggtgaaggatatgaacagacacttctcaaaagaagacatttatacagccaaaaggcacatgaaaaaatgctcatcatcactggccatcagagaaatgcaaatcaaaaccacattgagataccatctcataccagttagaatggcgatcattaaaaagtcaaaaaacgacatgctgactggaacaagacaagaatgcccacttttactgctgtttttcaatatagtagtggaagtaatgtctggagcaattagacaagagaaagaaataaagggcatccaaattgaaaagcctccgctggtgatacccaggcaaacagggtctggagtggacctccagcaaactccaacagacctgcagctgagggtcctgaccgttagaaagaaaactaacaaacagaaaggaatagcatcaacctcaacaaaaaagacatccacaccaaaaccccatctgtaggtgaccatcatcaaagaccaaaggtagataaaaccacaaagatggggagaaaccagagcagaaaagctgaaaattctaaaaaccagagtgcctcttatcttccaaaggactgcagctcttcgtcagcgatgaaacaaagctggatggagaatgactttgacgagttgacagaaggagccttcagaagtcttagcaaatggcacaccaggagattatatcccgcatctagctcagagggtcccacgcccacggagcctcggtcactgctagcacagcagtctgagattgaactgaaagctgggtgcccctctgagatgaagcttccagaggaaggatcaggcagcaacatttgtcgttctgcaatatttgctgtgctgcagcctctgctggtgatacccaggcaaacagggtctggagtggacctccagcaaactccaacagacctgcagctgatggtcctgactgttagaaggaaaactaacaaacagaaaggacacccacaccaaaaccccatgtgtacgtcaccatcatcaaagaccaaagagctaaaggaggatgttcgaacccatcacaaagaagctaaaaaccttgaaaaaagattagacaaatggctaactagaataaacagcatagagaagaacttaaatgacctcatggagctgaaaagcatggtacgagaactacatgacgcatga

SEQ ID NO: 115063 - DNA, 859 bp, Homo sapiens
caatgccaaccacaaatggggccagctaagggtgtggtgggagaagccatcctgcagctctgagatccacaaagtggagatagcagtagcaccaactccactgctttggaggctgcccagtcgaatttgggagccagcgagggacctgacagcagcacattggacaccagaagacacccaaagggagaggagtggaagaccttctggtgtgggctgggcagcaattcacttgaaggagaaacagcccgggtgtggagaggcggccatccttggcgggatcctttctaaggagccgagaaatcaacgtagagcttcctctatctgattctctaacaactgcagaccttccatgagtcaagctttgtgtcaaaaggacaaattaaaaggacctataaatggcaccacccagcccaatggacagatgccccaggctgcagattctgtcagtgctgttctcgaagaggcccaggcacatgctgaaacatggaaggataagaagccagccctcgggaaccaccaggagccaggagcacccccggccccccaaggccccaagtccagcctgccccaccccctccggtgcagaggtcctgtgacaccagtggcagccccgccacaccccccaaggccaagggcacaggcagcgtggtcttccccgccccgcccgactacttcctgccgccacagccaccaatgccgcccctggagtacccagagctcccgctgccgtccccggacttcatggagacccccctggacttcgtgctccctcccctcgctgtcgccaagaggcctcctatgccccacccccccaacaggcacgaagcatcaatgttcacaagcagcaaatgaataaaag

SEQ ID NO: 115064 - DNA, 1231 bp, Homo sapiens
tttgcagtaggaagaacgtttaacttttattcatttgctgcttgtgaacattgatgcttcgtgcctgttggggggggtggggcatagaaggcctcttggcgacagcgaggggagggagcacgaagtccaggggggtctccatgaagtccggggacggcagcgggagctcctgggtactccaggggcggcattggtggctgtggcggcaggaagtagtcgggcggggcggggaagaccacgctgcctgtgcccttggccttggggggtgtggcggggctgccactggtgtcacaggacctctgcaccggagggggtggggcaggctggacttggggccttggggggccgggggtgctcctggctcctggtggttcccgagggctggcttcttatcctggctaattttttgatttctagtagagatgagccccttgttctgttgcccaggctggtctggaactccggagctcaagcaattctcctgggggacggctgggtggaatgtatgccagctgcttgctggttttaccttccatgtttcagcatgtgcctgggcctcttcgagaacagcactgacagaatctgcagcctggggcatctgtccattgggctgggtggtgccatttataggtccttttaatttgtccttttgacacaaagcttgactcatggaaggtctgcagttgttagagaatcagatagaggaagctctacgttgatttctcggctccttagaaaggatcccgccaaggatggccacctctccacacccgggctgtttctccttcaagtgaattgctgcccagcccacaccagaaggtcttccactcctctccacctctaatcccagctactcaggaggctgaagcaggaggatcacatgaactcaggaagcaagggttgcagcgagctgacatcgcgacgtagcattccagcctttgggtgtcttctggtgtccaatgtgctgctgtcaggtccctcgctggctcccaaattcgactgggcagcctccaaagcagtggagttggtgctactgctatctccactttgtggatctcagagctgcaggatggcttctcccaccacacccttagctggccccatttgtggttggcattgtgggacagcgtgttcagggcaactctgctcctgtatattgcgggctggtctgcgctgtctgcacactcatagacgtcagagcacaggctggtctgcacaacccttgtgccgc

SEQ ID NO: 115065 - DNA, 1659 bp, Homo sapiens
atgcagacagcgaaggtgcaggccgcgatatataggagcagaggcaccctgaacacgctgtcccccaatgccagctacaagtggatccagctaagagtgcggagggagaagccgtcctgcagctctgagatccacgaagtagaggtggtagtagcaccggaccccactgctttggagcctgcccaatcgaatttgggagccagcgaggttcctgactgcagcacattggccaccagaagacacacaaagcggggccagctcaggatgcggtgtttggagcagtcctgcagctctgcgatccacgaggtggtggtgggagtagcgccagagtccactgctttggagcctgccccgtctgattcaggagtcatgacgaccagaagacgccaaaagagaaaactggatttgaataccacttccatcactctttatgatgtgatggtgaatgtgtttttaactcatctgagcctcagtttgctcatctatagaagatgtgattgttgtaaggcttccataagtgtgcagacagagaaggcgcaggctgtgatatacaggagcagaggagccctgaacacgctgtcccccaataccagccacaagcggggctatctcagggtgcggtgggtgaagccgtcctgcagctctgcgatccatgaggtggaggtggcagtactaccagactccactgctttggagcctgcccagtcgaatttgggatccagtgacagacctgacagcagtacattggcaaccagaagataccccaggtggtggtcctcagttggtggtcttcagttgttgggcagtgatggaaggaggatgaatctgtgctctctcctgccccagtcacagctctcaggcttgttgcatccaggcctttctaaaataaactggacaggttggcaggattttttagcagacaagtcagctcagagtatggggccagccccagtcagggccggcacaagggttgtgcagagccagcctgtggctctgacgtctatgagtgtgcagacagcgcagacgcagcccgcaatatacaggagcagagttgccctgaacacgctgtcccacaatgccaaccacaaatggggccagctaagggtgtggtgggagaagccatcctgcagctctgagatccacaaagtggagatagcagtagcaccaactccactgctttggaggctgcccagtcgaatttgggagccagcgagggacctgacagcagcacattggacaccagaagacacccaaagggagaggagcggaagaccttctggtgtgggctgggcagcaattcacttgaaggagaaacagcccgggtgtggagaggcggccatccttggcgggatcctttctaaggagccgagaaatcaacgacctataaatggcaccacccagcccaatggacagatgccccaggctgcagattctgtcagtgctgttctcgaagaggcccaggcacatgctgaaacatggaagccaccaatgccgcccctggagtacccagagctcccgctgccgtccccggacttcatggagacccccctggacttcgtgctccctcccctcgctgtcgccaagaggcctcctatgccccaccccccccaacaggcacgaagcatcaatgttcacaagcagcaaatgaataaaagttaa

SEQ ID NO: 115066 - DNA, 640 bp, Homo sapiens
  misc_feature (1)...(640): n = a,t,c or g
gatgaaccacctgccggataacatcaatgtttatgcaactactgctgccaaccccagagagtcgtcctacgcctgttactatgatgagaagaggtccacgtacctgggggactggtacagcgtcaactggatggaagactcggacgtggaagatctgactaaagagaccctgcacaagcagtaccacctggtaaaatcgcacaccaacaccagccacgtcatgcagtatggaaacaaaacaatctccaccatgaaagtgatgcagtttcagggtatgaaacgcaaagccagttctcccgtccccctacctccagtcacacaccttgacctcacccccagccctgatgtgcctctcaccatcatgaaaaggaaactgatgaacaccaatgatctggaggagtccaggcagctcacggaggagatccagcggcatctggattacgagtatgcgttgagacatttgtacgtgctggtcaacctttgtgagaagccgtatccgcttcacaggataaaattgtccatggaccacgtgtgccttggtcactactgaaganctgctcctggaanttttccaagtgtgancgcccaccgactgtgtgtganagagctganagtgaatnagagntccgtgtnggcctct

SEQ ID NO: 115067 - DNA, 607 bp, Homo sapiens
  misc_feature (1)...(607): n = a,t,c or g
aatgatctgnaggagtccaggcagctcacggagnagatccagcggcatctggatgatanaattgtccatggaccacgtgtgccttggtcactactgaagagctgcctcctggaagcttttccaagtgtgagcgccccaccgactgtgtgctgatcagagactggagaggtggagtgagaagtctccgctgctcgggccctcntggggagcccccgctccagggctcgctccaggaccttcttcacaagatgacttgctcgctgttacctgcttccccagtcttttctgaaaaactacaaattagggtgggaaaagctctgtattgagaagggtcatatttgctttctaggaggtttgttgttttgcctgttagttttgaggagcaggaagctcatgggggcttctgtagcccctctcaaaaggagtctttattctgagaatttgaagctgaaacctctttaaatcttcagaatgattttattgaagagggccgcaagccccaaatggaaaactgtttttagaaaatatgatgatttttgattgcttttgtatttaattctgcaggtgttcaagtcttaaaaaataaagatttataacagaaccaaaa

SEQ ID NO: 115068 - DNA, 2373 bp, Homo sapiens
  misc_feature (1)...(2373): n = a,t,c or g
aagaagaaacataagaaggaaggaaaaatagaatatatttaaagaaaagaaaaaaatatagttgtaaaataattaaattaattttaggagtgctgtaaggggttctgatataaatctttattttttaagacttgaacacctgcagaattaaatacaaaagcaatcaaaaatcatcatattttctaaaaacagttttccatttggggcttgcggccctcttcaataaaatcattctgaagatttaaagaggtttcagcttcaaattctcagaataaaagacttccttttgaaggggggccttaaagaagccccccttgaggcttccttgctcctcaaaaaacttaacaggcaaaaacaaaaaacctcccctagaaaagcaaatatggacccttctcaaatacagagcttttccccaacccctaatttgtaggtttttcaagaaaaagactggggggaaggcagggtaacaggcgaggcaaggtcatcttgtgaaggaagggtcctggagcgggggagcgagcccctggagccggggggctcccccaggggggggcccgagccaaccggaagactttttcacttccccttttccagtctcctgatcagcacacatgtcggtggggcgcctcaacacttggaaaaagcttccccaggaggcaacctccttcaagtagtgacccaaggcaacacgtggtcccatggaacaattttattcctgtgaaacggaataacggcttcttcacaaaggttgaccagcacgttacaaatgtctcaacgcaatactcgtacgtgggggagtgcccagttggaagccatggggtccggaagtgcatgcagggcctctggggtagcaggcttgntcgccggtgagcggggctctcgtcgggacagggagctgctcccacctcagccctcggacgctgcccagcaaaggaaaacgatctaacgcaactgaacttctccaaatgaaggtgccctgccatcccaaatgcccgctggatctcctccagtgagctgccctggactcctcccagatcattggtgttcatcagtttccttttcatgatggtgagaggcacatcagggctgggggtgaaggtccaaggtgtgtgaactggaggtaggggggaacggggaaaaactggctttgccgtttccataccctgaaactgccatcactttccatggtggagattgttttgtttcccatactgcatgacgtggctggtgttggtgtgcgattttacccaggtggtactgcttgtgcagggtctctttagtcagatcttccacgtccgagtcttccatccagttgacgctgtaccagtcccccaccgtacgtggtcctcctctcatcatagtaacaggagtagaacgactctctggggttggcagcaagtagttgcataaacattgatgttatccggcaggtggttcatcatggacccagactcacaggcttcaatgtagaacaccatctttcgggtacattttgtgtttgtacatgtaatggatggtctcattcaggtcctttacatgaagatcttcattgggaaaaaccagtattccagtagatccatggtcagtgaagtaaatgaacacgtgatcctgggggccactcttcaggactttgccggatcctatgcccttcactgcttctgcatcgcctctcaacacagcaaggaaattttgtggggtaacatcctctccagtgtagtccttcgggactccctgatagacatctgtgccattgggcctgttgatcacaattcctggagtgggattgtcttcagagtaagcaatgtcatcgtacatcatcacaacgatctgttcgtcaggaatcccattgcggtgaaagatctggtaggcacggcacgcgtctgccaccacaaccaccgccaccgccaccaccaccgccactgccaccaccaccaccaccaccaccaccatcaccaccaccgccaccaacaccaccaccgccaccaacaccaccaccgccaccgccaccgccaccaccgccgccgccaccaccgccgccgccgccaccgccgccaccgccgccaccgccaccgccaccaccgccaccaccaccaacaccaccaccaccaccaacaccgccaccaacaccgccaccaacaccgccaccactaccaccaaaggagtgcgcagcctggattcctcatatacgcagatcacgatagggttcacgctcctattagaattggcatcggtgacctggtgcctataattataccagccatttgaacctgccacgatcaccacccagtgcttgcctccatcttcaggatcatctataggaacggcaccaatgcccagggccacactgaggaatacagctactttccaaaccat

SEQ ID NO: 115069 - DNA, 927 bp, Homo sapiens
attataagaattaaaatttattttcatttgttgttgtgtaaaactcacatgtggaagtgttccttgcacaggccgcagcactgaaatacagtttcacacttctgccagatattctatctcagaaagcaaattacctgcaaactaacactggatgacaagtgtcaccagaagtgctttggaaacatgattatgttatacaaagacttggcaaatccaacagcatacagtgcaactgaaaccttccccaaggatctgagaagtcttgccgatggaatccttggacatcaagagccaggcgaggagcaagtttccgatctgctgagattctgctccgccttcacgcgaatcagcatagccaagtgccccatccaccagccaagtccttcagtgctgaggacgcacgcatagccaggacagtcacgggcaaacgtgacatcaaatccgaagggcggctgtcggctcccttcctgtctcaaccacttggtccgcctcgcttatcctccctcaggtagcaccagatgatcagcgccacgaggaagcagctgaggggcagcaccttccaccagggccgctgatgtccctttcccattggtatggcccaccgaccagcggtgagggttggctttgctggaggaaaactcaatggggcggtcagggtcgtcctcttcctcggcggcagggtgggcccgattcccgggaaccgggcaacggatgaaggcttcgggaagcccagcctatgagcctcagcgcccggacggccgccttggcgcgccgtgatagcgtcacttccgtcgccggaaaccggaaaccgggcgccataccaggcctccgctcacgactacagaacgtggtcccagtagcgcagcggaaatgacgttcggctgcgaagagctctttccgtcgcaggcccggagtgcgcgatggcat

SEQ ID NO: 115070 - DNA, 1403 bp, Homo sapiens
  misc_feature (1)...(1403): n = a,t,c or g
aggtttaccccctattccccttaaaaatttataatttccctaaagcctttaaaattcgtaaggagattgttccaataagtcccccccccaaaataaaggttcctttcaaaaattcccaagtaaccaattttcccattcccacctttttaaaactcgggcaaagcccaagttataaaaagactccccataaggaaaaaaattttacgttgcaaacccgcgttaaatttgggccccccaagggttctttaaaaaggcccccccnnnnnnnnnnnnnngatttttcataattttattaaatcatcactgggtaaactaatggtttgcgtatcacacgaattacactacaatctgataggagtggtaaaaccagcccaatggaatccaggtaaagtacaaaaacgccacctttctattgtcctgtcttatttcctcgggaaggaggacttctacctttaccaccatttcatgagcccagcagtggacttgagttacaatgtgtaaggttccttggggttatagcctggaaaaaaagccatcaaattcttgaggacttgacatctctcggaaaagaagccaaactagtagaactgatgagctggattgctttagattgataacatttacaaatacggagtcccagttgacatgcttattaatgttggaaataaaccatgcctgtactgggtcagtgagtttcggtcagctgggttgggaatacccagttcccagagctttagggcgacaccatttgaaattgaggttatcaattgtaggaggagtcatgggctcccatcaggctatggggtatccttctttgggtctgaagccctaatcaagtccttaccaactgtaagcagccactgccttggtaaaactttgcccacggaagtctggcctcactgaaactccaagctgtctgaacaaattcattgcgcttcctgctcaagccccagccctcgaaaaccaattgatccccaaaagatgttagctgggcacttcaaagatagaaaggtggtccggtctgcccccagacacacttaagctgcctcccagactatcccagcagtggttgtaatttttcctggcactgccttagcctacccaggtcctctaggaaacgttcacggctggggacctgaccaattggcaaaccaggtgaagaatacacttcatctccctgggaggtgatgtaagacatcatgaggaggggaagggttagtattgtgtggtactgagggtaagagcagatgcgaaggatagtggcattgaagaggatgactccagtggcatccatccccttttctctcgaagggcacccgaatgattgtcacgagtctttagactccaactcctgcggcagcttacgaatttcctaaaaaccctaagctgggccagccaggcag

SEQ ID NO: 115071 - DNA, 351 bp, Homo sapiens
atgactgtggaagccatcagggtgcagcatccttcttggtttgcaaaggtaatcactgaagagtccaaatgtcaggcactgagtgctacactgcaggacagggtccctccctggagggtgcttgggccctccacagctaatggcatgcacagacaggaaaacatactgttggtagcaatgagggtgatgggggtgagggtaggagacatggaaaatagagaagcacttaagaggctgtttcaggcaaaaatgacaacaaaaatatatgggaataaaccggagtcgactggagaggaaccaagggattctggaattaaaggagttacgggaaagggaaggaatcaaggataa

SEQ ID NO: 115072 - DNA, 1284 bp, Homo sapiens
atgcctgaagagaggtgtcgggatcatcacatggcttgccttgcatgtgggtgggtcatggattgggctgttccttccttctgcatctccatcgtcagaaatgcaggctctcaggctccacacctgagctacttaaccagaagttcttggggtacagttcccaagaacctgtcttcaaaagaactcaatttccccaagcaattcggtagctggagtttgctagtgatgccttggcaaattggagagaacatcaacccttctgtactcgacaaagacaagtttaaacagattccgggcccaacaggggactcatttgccattttccatggcaaagaatctgagcactggaataagccagagaccctcttggaagctgcactcgctcttgcagatgacttggtagatgactcttatgccgtgaatcacccgtatcctccaagagcacgtggaagttcagatacagcttttctccctgagagtgctacaagcatcctaaggggccttaccttgagtccaggtgctggggcccaatctcagctgaagatcccagagatctggggaagtgatgaagagatctggggaactgactcagcagggggaagcctgtgtacaacccacacctgcaggctacgtgctcctgtgctggctgagccgatggactcagcttcaccagatcagtgttgttgccactcagaaatgcctttggctgttggagaaaccaggctgtatgcctatctgctgcatatgaaattcctgatgatgcatgcaacgtatagggaattctacattgacccagtaagctcagcccctgtgcacactgccgacctcccgcaccctcctgctggtgcatggaataaggtggacataaagaaacagaaagaaagtaaaaaaaaattctttggggctgactgtaagcagccacttcgcaatcccgaaggctggccagtcacatgcagaggtagtcaggccccagtagtacaacttacacctaaatggagcctggacatcacacatgttctttggatcgcacgatgccttgccactccacacccatcacagttggccaaagcatcccccgtggggttgtgtgaaacgttagtcagaggagggaatcatagttgtggtcagggaggaggtggtggacagttctgcggtccaaaatggatgtacaacttggattcaaagttaaagaacgtctttgctgcagaacttcttggggtttttaaaatgttaatgattgctgtgaagattcaagaggggcctaaactaggaaaggttttctga

SEQ ID NO: 115073 - DNA, 997 bp, Homo sapiens
tgcagaacgataccacgctgatcgccagaccgtgggtcaagccataccttggtttggagataatgaggatagtaggaaattgaccacatcttacctggtgtttcccttgtactatgtacatacctcttttctctcagctattgtgttgccctgtgagctttggccaatgtggggcattccgaaacccgggacacccaccttccccgaaccccgaatttttcctgggccccagaaggtgcaatccaagtctcgggcacaaagctttggttcaagaggcagcaagcgacacacccggaaaaagctccgggtaaaagccccccgggccccatccccaagcccattggaccaccctgacccggaaaacacaaacccgatgcggcccccagcccccacagatccgggtcaccaacccagaagcctcatgaccggcagacagcgctttcacaccgcacaacaacgtttcacggtccgaccccagcaccaccgctcgctcatccagcgccgaccgtgtcaacgccagcgagtacccaacatccagcgaggagacatcaggtcgctccgcttcgggtgttttgcccgacaccatccacggcaccaccggaacatccacgacagaacccgaacccggccccgcagactgactcggcactcccgggggctgttcgaggatgacgtgcgcgttagtaccactgatcccgaacgacgacacccccacccgacgaacacgaccactcctgggccagggcgtgttctccgtaaggagttgaaccgtccccgccgaccaatccacctccggcgacggcgattccacgtgcaacgtgcgtggcagctgcccgtgccgcatcgccatcaccatcttgatcacaccagccacacccgccgccgcttgcgtatgaccgatgttcgacttgaccgaccccaaccacaacggccggccaggatcacgatcacggccgtaggtggcgatcagcgcctgcgcctcgatcggatcagctag

SEQ ID NO: 115074 - DNA, 684 bp, Homo sapiens
ttacttctttatccctttgtttgtccccccttccccactaaatataaactcgatgaaagaaggaccttgttctgattcatgtgcctctatatcctgcacccaggtcaattcttgaccttggaacttggcaaaaagaggaacaaaaagcagctcttgtgtggggtagatggaggagggataagaaataatccaccgcccgcatttgagttcttcaggttcagttccagcggcagcagcgttgctgcaaaaatcgcttgctattcgagatagccagcagagggaatcggaactttgcttgcagcaggggttgaagcagcctttttttttttttttcttggaggaaatactgcagccttctggactgcgtacgctgctccctggagaggctctctcggttccacccaccggcctgtcatccagttccctgcctcggagataaagattccagctacatgggcaaacgcctggatcagccacaaatgtacccccagtacacttactactatcctcattatctccaaaccaaggtatggcttgacccacggtctggcgatcagcgtggtatcgttctgcactttttgtttgtttctttgtgtttgcttttttgaatgaccgactgactgttttatctgggatttgtttctgaagttgtattttagggcatttgttctcaaactttagcat

SEQ ID NO: 115075 - DNA, 1470 bp, Homo sapiens
tgctgtgttggaactagcgagtggtggagtctctgaagcctcatcagtcaccaggactgccggggacagtggattaagagaaagaagctcgcctgcctggaggctcatataccctgttactcagtttcctgcctcggagataaagatcccagctacatgggcaaacgcctggatcagccacaaatgtacccccagtacacgtactactatcctcagtacctccaaaccaagcagtcctatgcaccagctccccaccccatggctcctcccagccctagcacaaacagcagcagcaacaacagcagcaacaacagcagcggggaacagttgagtaaaaccaacctgtacattcgaggcctcccaccaggcaccactgaccaggacctaatcaagctgtgccaaccgtatggaaaaattgtatctacaaaggcaattcttgacaaaaacacaaatcagtgcaaaggttatggttttgtagattttgacagtcctgcagccgcacagaaagcggtagcatctctcaaggcaaatggcgtgcaggcacagatggctaagcaacaagagcaagacccaacaaacctatacatctcaaatctccccatttctatggatgagcaggagcttgagaatatgctgaaaccctttggacatgtcatttccacaagaatactaagagacgctaatggagtcagcagaggtgttggctttgccagaatggagtctactgaaaaatgtgaagtggtaattcaacattttaatggaaaatatctgaaaacaccaccaggcatcccagcccccagtgagcctttgctgtgcaaattcgctgatggaggacaaaagaagcgacagaatcaaagcaaatatacccagaatgggaggccttggcccagggaaggagaggctggcatggctttgacctatgaccccacagctgccatacagaatggattttattcttcaccgtacagtattgcaaccaaccgcatgattccacagacatctatcacgccattcattgctgcttcccctgtctccacataccaggtccagagtacttcatggatgcctcatccgccatacgttatgcaaccaacaggtgctgtgattacaccaaccatggaccatcccatgtcaatgcagccagccaacatgatgggcccactgacacagcagatgaatcacctttcgttgggcacaacaggaacgtatatgactgctgctgctcctatgcaagggacctacattcctcagtacacgcctgtgcctccgacagctgtttctattgaaggtgttgttgctgatacctctccccagacagtggcaccttcatcccaggacaccagtggtcagcagcaacagatagcagtggacacatccaacgaacatgcacctgcatattcttaccaacagtctaagtaagtctgggctgtgctaagctcttttcctcaagatcagccatcttgacatcac

SEQ ID NO: 115076 - DNA, 211 bp, Homo sapiens
ctctcctcccttgcctcgggatgacctgccacacccttctttcttcgggcacagctcaaaggccgttccctccacccaagtcttgcctatgtgcatcagctggcagcgagagacccacctggacagcagccttaaagaaacaggtctatttgtgggctttgatgaagaagaaacggctgcccgtatttttagctcacaaatcaacttttaa

SEQ ID NO: 115077 - DNA, 211 bp, Homo sapiens; identical to SEQ ID NO: 115076

SEQ ID NO: 115078 - DNA, 339 bp, Homo sapiens
aaaccatcatatggtccatgctgactaaccatgtgagtatgagtctgtattttgttggatttttctcagctgtaatcacaattttgctggttttacttagaagcatttataatgcgatcattattccagctttttttcttgagtattttcagtttggggtttggaaaataatttttttcctggaagcaagcacatgataaatgcctttagaccttgaaggtggcttttctcatctcaatttttgggtggatgttctttcttctcccttttggaacaggaaaggtctcagctagaataattagaaaggtagggttataatttataaaacctgtaagagac

SEQ ID NO: 115079 - DNA, 876 bp, Homo sapiens
atgagtgaacacatcatgaagattgtgttcacagagcacagatacaaagccaaaagatggttggatttaaccagagttgtggttgttctaggcaaggcaatagcaggaagagcaaaggaggatttcagtggtgggcaggctaggagggataggaggactaagttatcaaatgatgaagatatccccaaatatgatatctatccactggaaataacctttgagtttttgacctttagtaaaagggagaaggataacattgttggcagaaatgtggatggtgataggggaaaccagaatgggaaaccatttgttgaatttttttacgagactcagataaaatgtaccccaccaatttcccaacatcagccaattggtgctgcagtctatttcccttgggtcggggatctcttcagtatggtccctttgcagttcaccatggaagagaaaagtcctgatcctgacgccaagagagagttcttggatcttgcaagaaagaattcaggtgtgtacactggaacagacattgtgactgatcatctaggaaactgcctggtcctcagatatcagagctatctgctccttgaccacgatctcttgtttgttgctctagctcggggagacaccctccatggtgcattgccccgtttttcagatgaagatgtagagacaaagaaagaaaggggtcctgatccagaccccgaaagaaggttcttggctctcacgcaagaaagaattcaggacactgagtgtggcagcttacagtacgactgcactcagtttttcattccccattctgtggaacaatacattcctgcatgctgcaacatcacttgcagttacttcctgcaagagaaatatacttccccacctcagtga

SEQ ID NO: 115080 - DNA, 613 bp, Homo sapiens
tttccaccgtaggcctcaaagcgctccaaatatccacttgcagattctataaaatgagtgtttgaaaaactgctcaatcaaaagaaacgttcaactccatgacctgaatgcacacaacagtgagaagtttctgagaaagtttcttggtctccccgcacaggttgttaatcttggttgccttggccttgttttttttaaagttgaaaattgaatttacggccattggtccttggattctttccttcattggccaattggttccccttcttctccaggcttggcctcgcccagggttcctgtgttcagtgttagtaaggtggtaaaccttgttgggcacagcagaaagaaactcacatttggagttaaactgagctcctcgctcaagaagcctgtaatcgtcagcacgttcaggaaaggagtcagcttggacgcccacggaaattttaaggacccaggcctgggacacagcagtgacataccatctctggtgtgaggtgtttggatcatggaagtgatttcctccatgctgttcttgtgatagtgtgggagatcgcaaaacatctgatggtttaaatatggcagtttcccctgtgcgttttttctctctctccat

SEQ ID NO: 115081 - DNA, 294 bp, Homo sapiens
atggagtgcaaggggcctccaatgtcaagcggagccaagagaggagcagacaaggagaaggtggtgtcccgcacgctagggaaggaagaaagaagctggagactggttaattgggccaaagatacaatgaaggaaagtgacaagaaggaaggtgtccatgttcctggccatggccgctataccaaggtgcatgacagttcacatacacaacgtaatttgatgccgccggcaggatctatgtctgttttacccaccaatgtctacacaccacctagcatcctgcttggtgtctag

SEQ ID NO: 115082 - DNA, 400 bp, Homo sapiens
cttgtctgcagacctcattcttcctggtcacaggacaagaacttgggacccgtcaaatggcaaggctaaaagagctggtataacacaaacagggctgagacatgccccttgcttgccatgctatgggggaagagaaggagagaagagctgcagcccttcagggagcctagacttgggagccccccaggccaggaacaagcaggagccctgccccttctgagttggactccctctttggggccctgtggttcctggcatactgcattccccagtgccagctgtggaagctgcttgcagtgcacctggtccagctgcagccttgcagagagtgggcgcccatgccagcactggagctgcccaccttgcagcagctgcgggtgtgcctgactgcacagtggct

SEQ ID NO: 115083 - DNA, 936 bp, Homo sapiens
atggcagaggaccgaattgcctcccaagaccacacctccaaatactatcacattgaggattgggtcctcaacatagaattttggcagacattaagtctttatatcaaagcagccttcattgtatcgcatcggagaattcatactggagagaaaccttacaaatgcaaagaatgtgcaaggtcttcagtgaccgttcagcttttgcaaggcatcggagaattcaactggagagaagccttacaaatgcaaagaatgtggcaaggtcttcagtcatgttcacgtcttacagtgcatcggagaattcatagtggagagaaacctacaaatgcaatgaatgcggcaaggtctacaataatccatacaggagaaaaccatatacatgtgatgtatgcgacaaggtcttcagtcaacgttcacacttgcaaggcaccagagaagtcatactggagagaaaccttacaaatgcatgaatgtggcaaggtcttcagtcagacttcacatcttgtggggcatcgagaattcatactggagagaaaccttacaaatgtgataaatgtggtctttaattccacttcgaaccttgcaaggcatcggagaattcacctggagagaaaccttacaaatgtaatgaatgtggcaaggtctttcgtcacaatcaacactagcacgtcatcggagtattcatactggagagaaaccttcgtgtgtaatgagtgtggcaaagcctttagacgtagccacatttgccacaggtcgacttctgaaggtggtaggcctagagccacggcggcaacacaacgtgtgcgtcttattgcgacgctttccaacaatgacgttcccttcgtcatctggcttctgcggccaagaccagagaaccggaagagaaggcacttccgctatatcacgctcagaagctcaacattcgtgttgaattag

SEQ ID NO: 115084 - DNA, 1324 bp, Homo sapiens
atgacatcagagaagagacacttgaggctttctggaggacttaagcttgaagaaaacttagccaggcttaaaaagcttccaccgccgaccgggcagccccagttacccgataacgctcccaaggccccgtgtttacattctttcccactggaagcagaaattatacgcccaaattcctacctgccttccctggattcctggtttcctaagaaagggtttggcccacccctgggcgttcgaacagtccacagaagcgggcaaagaaagacgactcagtctttcccctccgccaatctcttctccgggaccacaatcccagaatcagggccacgcggctgggcgcgccctctagcagcagccctggtgaccgcagcgcacgagcgcgggaaaatgaggctgcgcgggctgaagacgcaccgagaggagccgcccccgcggtaccgcgcagcctcgcgtcccgtagtggggaacaagggctgccgtaacaatgtcacagactcaatgacttacagcaaagaaaattattctttgccagtactggagataggatctagatgcaacagcactccagaaacaatgagaaacctagcactgaatcttggtttctattaccattctccaataaaagcatcgggactccttggagaaatggctgattctaaaactagggcaggggataacaaaatgggtctggagcatcttgtagtggcagaaaggaaagtagcgtcggccaaaagcctccgggatcggaatgaggaggctgctggagaattgctttctcctaaaagggattatcccaggcgcacacggtcattacacgcggggacgctcagtcggtgcgggcccgacgaagactcgcccatccggtcgccagaaaactgggagtccgcccgcctttccggcactgaaacgcgatcggccctgcctgacgaagggaacgtcatctttggaaagcgtcgcaataagacgcacacgttgtgccgccgctgtggcttaaggcctaccaccttcagaagtcgacctgtggcaaatgtggctaccctgccaagcgcaagagaaagtgcatggattccgtgaaggaacaacacctaaacccagagggcagctgttgcagcatccagttcatcttaagaatgtcaacgattgtcatgcaataaatgttctggttttaaaaaatacatatctggttttgcctcaaagcacagcagtcaatgctcaagtcaaacatgtcacattccaagatgcattggtccagtcacaagggtggtccttatccactggcaacactttcctgccttcatcaacattctgtcatcaagggtaa

SEQ ID NO: 115085 - DNA, 421 bp, Homo sapiens
atcgatacgactttttttttttttttttttttttttttgttttttaaaaccagaacatttattgcatgactaaacgttgyaaatccttaaaaatgaaactggaatgctgcaaaaaactgccctccttgggtttaaggtgttgttccttcaacggaaaccaatgcctgaatctgctggtaaaaaaattttaaggtgcctcattcgaccagttccgaaagtattatcgtcttttaagccttggcactccaagtttataactttctcttgcgcttggcaagggtagccaacatttgccaaaggtcgaccttctgaaggtggtaggccttagagccacaagcggcgggcacaacgtgtgcgatcttcagttgcgacgcttttccagaacgatgacgttcccttcgtgcatctcgcttctgcggcc

SEQ ID NO: 115086 - DNA, 720 bp, Homo sapiens
atgattaaattagatcctgaccttcgtcgctctaattacaacgaggacccgaattactggttctggcccatttgtgaagttgctgccctttcacaagctgtgaaacacccattctacaggaaccagtgcatcttgccaaagggaacatgtaggagagactgtgctgggtcagaccagcaggtgctgactgacgtggctacagcaaggggaccacctgtatggccgctgcacctccaagctgtgggacgcagggacagctgggaccagtcgacgtccactggccctctgatggctcctaggactgaatcttggactccaggggctagcgggagccggcacaagagggtcgaggagccaggaaccccaaacgtccggcgccaggcgctagccaagctgctgcgcgccccggcgcccagctggctcggggacagccgctgggtgtcggagaccggagctagcggattgcagcggaaaagcaaagcccaaaagctcttagacaggggctctgccaacccagggggattccgtgttactcagacattggagtgtgaccattcatgttatatagatgggcccctggaaatccccatgataaggacagttggggagatcaagggactcgtgagtgtgaatgaattatatcagtactggaagccttctgcttacttctgtgaaagagcttgtgtcccacacctgcttcccgtttttgtccgtaattag

SEQ ID NO: 115087 - DNA, 219 bp, Homo sapiens
atggggcagcagggcacctcccgagacagcatcgtgcacctacgagcatctggagttggtccaggccaggtctactgctccaatgcagtacagacacctactgacccagaaaaaaacggccaattgctgacaaacgatggccgaccaatcactggtgactttaatttggatacccatgccagtccaatcacctatggccaggaacattcaacagtttga

SEQ ID NO: 115088 - DNA, 222 bp, Homo sapiens
atgatcacggatggaagcctggatctccacgcaggagtgaagagctctggaaatggtgatgttaggtggagggagaatgatcacagatggaaaaaagagctccggaaatgccacggcttgtccctggcaagaggaccccaggacaagcgggaaatccaggcccacggaaggtcggtgtctcctcaggcctgcactcgcccagtgggctgctctgctgagtga

SEQ ID NO: 115089 - DNA, 989 bp, Homo sapiens
atttatttgcatataaatacatttatcatcaaagttttaaaaatggtggtggtgggatggaggtagcatctctgtcctaagtggtgagcatctggccaggtgtccaagtcagtggggaagagaaaaatgtcttaggctttctggttgatgacattgggaatgtttaccttgggaaagaggagatttgcataagtaccttaaatgtcattctgattgagttttaggatgagtcacagctggaaggaggaggcagaaaagaaagatcttgacactctagatgatgggccaaatgtagcaacatgaattgtgtggggatcaatgccagtatctttcctgaggttttacaaagccacctgcctgcatacagggaggggagtagccctcaagagcaacgctcatcacaacaagcctccagggtcttggttaactccaagaggaagtcaaaaagtcatgcagctgccaagaaaagaagaaagaattcaactgaggggcataagacagaaggagagaccaaggcaggggtgaaaggaaggaaagtgcacttggaagagggccaagcagacaacttgagagatcaagggggatcaagtcccagacgaaaatcccccgtggctcgccgactcgccgactgccggcaccgcgctaacctcacagttcggtaccgtagtataggcgcggtgccccaaggacccgcaggacgttgtgtaaacctgggcaagcttttgaagttggtttgccagtctcagagaattagaacactgcataaaaccttagaactcagtgtattccagctctcacagtctactgatgaagaaactgaagccaagaaaggtagccacagtgcctgggccagacagacccaggttccagagccagcccaaccatctcccactatcccacgcttcctctccagcttacactgtactgtacagatatcggtaaaggagtcatcatttgtaaataaggctggcaatgttccctcctcctaa

SEQ ID NO: 115090 - DNA, 588 bp, Homo sapiens
atggcaccagaagtggaaaattccacccctctggtcccaagcatttcagataagggatattcaacctataatggtgacaatgaagatgatgtcaacactgcagaaaaagtgcccagagacaacatgttgaaaatgtgtgaagggcttattcaagggctagggcagtgtgcattcacaataaaacatgaaatcctgtcagtgtataaaatcaaagacttattttccggcttgcatccggatcagtgtgttggctgtaaaccaaccaacacagatgatcaatattacagcacaaaggaagtaaaaagcctttgtgattatccaagccccagggaagcagcttccacctccacattccaagctgccatggaaacaacaatgctgcctattccactacaggctttgcgagactcctctgaagacctccctccagagtccacagttgcgagactcctctgaagacccctatccagagtccacagttgcgagactcctctgaagacccctctccagagtccacagttgacttcctcctcagagtcctaccacaggattaattcctgaaatctttcccaaatccaaacgttaagc

SEQ ID NO: 115091 - DNA, 1149 bp, Homo sapiens
atgaagcttgcactggcgtcgtttacaagcgtactggaaaacctggcgtacccacttaacgccttgcagacatccccttttgcactggtaatagcagagcccgacgatcgcctcccacatttccacctgatgggatgcgcctgtgggtttttccctcggatctgggggatttccacgcatagcatcctaaccacatctgaaacgctgtttgttataaaccattttaaaagtcaccttagttacaaacagctgctcaatgtgtggcccacggactgcagctttagtattacctgggagcttattggaaatgcagtggctaaggcctactcaagactgaacgaggaactgtattttatcaagattcccaggggtccaagaggtgcttacttgatctctagcaggctaaccccaagacggcacaatgccattcaggctgggttccacaattccgcctgcagaaggaatgatcgcaggtctctcaagggcaaaccgaaatttggcagatgtctgaaatcacactggaaagcgagcaacgagagagaggggctttattgtggggtgaatcatccccacgtagatgatctgaacaacccctgtatgcatactgacatcatcaggagagacttggaggcagaggatactatgccccgagcaactagcattctatcttctgtcttgaatctgactactctaggtacttcaaccaggaaatttatccactttagaagagtcatgtcattagattgggcccacctggataatctaggagactctccccgttttaagacccttaaacttaatcacatctgcaaagtcctttcggccatctaccctcttaaactccctgaacaagagccatctggaaatcttgttcctgtcctccatcctttctgtgagaccacaccagcacagctgggttgcagcaggcactgccgaggtgctgctggactggctatgctccagaccctcactgttaacatgcaattcttgtccttttgtgttaagcatgatgggacagtcaagatgcaggaaagcaagctagggttcccactgattctacattatgtccatggaaaaactgtcttccatgaaaccggtcctggtgccaaaaagggatatgccaaagatagtgagattgacattgcctaa

SEQ ID NO: 115092 - DNA, 747 bp, Homo sapiens
atggccagtgtaacaggacaggatctgccaatattcaacctcacaagatgcaacagaagatacctctggccatgggatgtgagagagtggaagaccgagtggggctggatacatgcagaagctggagctcagcttggaaatgatcatagtgttgagtccgggaagatggataagggcctgtggcaatgcagtaggaataaacaggtggtgatggacttccagcagggacccaacatgctggtgaccattcatttggatgtggaagatgaaggaggagatggtcaaagcaatagcaggtttctgcctcaggtgaccagccaggcctgggccacacgggtaggaataccctggcagttcacattctcactcagtctcacactcactttgtactctgatgctgacatgaagtggctctgctggcagcccacgtgtttccagatacttgacccagctgcaggtatgaaggccttacctcctggcaaatgtgaaacaaaagtcgaaggagacaaagagcctatgcagctgtgtcatgggtggtggtggtgggcacctccactgtgctccagcatagacgtgctgctctctaaggctgccttggttgtcagcagcaatggagaccccagtcccgtaagcagaggcagatggtgccttgtgttggaagcagcttggattcctgagttacagattggaggagagcccccaagatacctacccaatcagaaacatccacattggaattttttctga

SEQ ID NO: 115093 - DNA, 529 bp, Homo sapiens
gcagacagaacaagagacccggagaccccgtctgggggtgggagtggcgggcgggaaacggcgacaaaagagggagcgagaatgggagaaaacgcaaaaagagccaataggaggtgccacacagcatcccccgcctcgcgccaagactataattaaaaagcctaccccgaggaaaacccaagagccgtcaccgctgaaacaggaggcgaaaacctttctcgcgacattgccaagcaggagcgaacagcccggaaacgccccggagtttacgagctagtctctgtcattgagccatcaagaaggaaaaaccactcagaccgcgttctctccctctcactccccaatacggagacaagaacgatcatcaatggctgacggcagttgcagcgaaacaacacgccaaaaagccggcttcacgctcaggagaaaaacgctacctctcttcctcgtggttttcggtgctctacacgttcagagaaacttctctagtaacacactatagcggacgcgtgggcggacgcgtgggcga

SEQ ID NO: 115094 - DNA, 685 bp, Homo sapiens
atgcacctgctgcaagcagccctactgttggctgtgccctgccttctctgctatgttgctgttggctatgccttctctgtgctgctgacactgctgctgactgctccggctcttttgccagatgattttgagggcttcaatataagggaaaaaacaggctggtatggaaagaaggagggtatggtcacattatcgaatccacaagttgcaagagaaaaggagcagttcaatgatttgtattttaacgccaagcaggctgagcagaaggggtatctgaatactgctagacgagaagccagcctggcattcaaagtgacagagaccacccataacaagagtgggttgatcactgagagctgattaggtgctcaggcttccagtggaacattgttcttcgtagcgagcaaagccagcgtcctttttcgtagggaagcattcttcttatatgtcagtctcctatccgtgccattttctggtaccaagacctctggcatacactatcttctggcatggcatgtatactaaaacttgtacacgctctcagatcttaaaatgcagcaattatttctctaattagatagttacctatcttctatgacttcagtgattgcaaattccagcagaagctactgttctaataagaaaagaatcagaggtcttaatgcatagtaaaagagtgcctcgc

SEQ ID NO: 115095 - DNA, 549 bp, Homo sapiens
atgatcaagtcaagctggttctatgttaagttcaagtatgcagagaaggaatatgtggtaacaagttatatgataggggaaggtgatctatttgaaagtctaatgcagaataaagtagtagtagttatcccctggcagagtaaaaagataagcaaaacttgggacgtcaacttacagcaagagctgtatggaagagaacagtgtgcagtatcccagcagcaggattctccagggacaaggcctaggtctgccactgagggtagtctgcttccttcatcagaattgccgctgctggccttctggaccattagagttctttctggttgttatccacttttcattccttctcaacccatagaattccaggtgctagcagtcagagacaaatggctaaccctctttgagtctcttggagtaaagcctggttgtgttctgcgtggattgcatcctgtgcagattgtggatagcaagggcttccttgcaggcctgttgggagcattgattgagatcatgggtgtagaaagcctggactatagccagagtcaataa

SEQ ID NO: 115096 - DNA, 384 bp, Homo sapiens
atgggcccgacccggaagcccaacgtgtgcagccggctgagtcgccgggcgctgggctgcttctcgcgcgacgcaggcgtggtgcagaggaccaacctgggcatcctgcgggcgctggtgtgccaggaaagtactaaatttaagaatgtctggacaactcattccaggtcacctatagcctatgagagaggaagaatatattttgacaattatcggcgctgtgtcagcagttttggaggcagcagtttgccctgtgacctgaattctctgatggatctaagaataattatggattttcagattgttcagcatttttcgtgctatgaggacagacgggtggcacttccaggctgttttcgtcttggaccagaaaccagaatttag

SEQ ID NO: 115097 - DNA, 180 bp, Homo sapiens
gattcggcacggggggggatcctggagccatggggcgcgcgccgacgccatccgtggatgcgctgggtgaacctgaccgccgaggagctcaagaagttcaaggtgaagctgctgtcggtgccgctgcgcgagggctgtccatggacgccttggacctcaccgacaagctggtcagcttct

SEQ ID NO: 115098 - DNA, 657 bp, Homo sapiens
  misc_feature (1)...(657): n = a,t,c or g
cgtcaggcggctgcagcggggtgagcggcggcagcggccgggtgaatccgtggagccgatggggcgcagcgccggacgccattccgtgnggatgcgctggagaacncgtgaccgccgaggagctcaacgaagttcaagctgaagactgctgtcggtgccgctgcgcgagggctacgggcgcatcccgcggggcgcgctgcatgtccatggacgccttggacctcaccgacaagctggtcagcttctacctggagacctacggcgccgagctcaccgctaacgtgctgcgcgacatgggcctgcaggagatggccgggcagctgctggctgacacgcatccagggctctggagccgcgccagctgggatccgggcccctcctcagtcggcagccaagccaggcctgcactttatagaccagcaccgggctgcgcttatcgcgagggtcacaaacgttgagtggctgctggatgctctgtacgggaaggtcctgacggatgagcagtaccaggcagtgcgggccgagcccaccaacccaagcaagatgcggaagctcttcagtttcacaccagcctggaactggacctgcaaggacttgctcctccaggccctaagggagtcccagtcctacctggtggaggacctggagcggagctga

SEQ ID NO: 115099 - DNA, 640 bp, Homo sapiens
ttttttttcaagctggcttttcgtatattgtgtataaaaagatcagattcaggatgatttggtgggattgccaggggctgaccggagtgttgctgggaaggagcctcagctccgttccaagttcttcaacaagttaggattggaactcccttagtgcctgaagaagcaattccttgcaggtccagttccaggctggtgtgaaactgaagagcttccgcatcttgcttgggttggtgggctcggcccgcactgcctggtactgctcatccgtcaggacccttccccgtacagagcatccagcagccactcaacgtttgtgaccctcgcgataagcgcagcccggtgctggtctataaagtgcaggccctggtgcgtgggccgcttgcagttgcccggccatctcctgcaggcccatgtcgcgcagcacgttagcggtgagctcggcgccgtaggtctccaggtagaagctgaccagcttgtcggtgaggtccaaggcgtccatggacagcagcgcgccccgcgggatgcgcccgtagccctcgcgcagcggcaccgacagcagcttcagcttgaacttcttgagctcctcggcggtcaggttctccagcgcatccagaatggcgtcgcgcgcgcgccccat

SEQ ID NO: 115100 - DNA, 675 bp, Homo sapiens
atgcccttgttcttctttactacactgagatgtttgggtggagagaaacataaatctggcttacttgcacatccgggcacagtaccttcccttgaacttcattatgacatagattcttttgctcacaagttttttgctgaccttctcctaattatcaccctgttctcctactacattctttttgctgaaataatgaaaataataatgaactcagaggccggtgctgcagtccttggcctcaaagctgtcacaaatattcctttgcagatcccagaaaaacagtggttccaatctgctcaatcaaaagaatggttcagctctgtgagagtagtgcacacatcacaaagcagtttctcagaaaccttccttcgggtttttaagggaagttgctacaaaaacatgatttccaaactgttcaatcaaaagaatggttcaactctgagagatgaagaacatatcacaaaaagtttctcagaaagcttctgccagtttttacgtgaagatatttcctttttcaccataggcctcaaagcactcacaaatatccctttgcagattctagaagaagcctcaatgtgccccgaaatttccattgcagattcaccaaaacaggtttctaaactgctgaaggaaaagaaaggtttaactctgcgagatgaatgcacacataactaa

SEQ ID NO: 115101 - DNA, 797 bp, Homo sapiens
ttttttttttatagagaaacgatagttgggcccaggggaccagcactcaggataccaaggacctgcaccagcaccggcctctgagttccctcagtttttattgattattattttcattatttcagcaaaaaggaatgtagtaggagagcagggtgataataaggagaaggtcaccaaaaaaaacatgtgagcaaaagaatctatatcataattaagttcaagggaaggtactatgcctggacgtgcacgtaggccagatttatgtttctctccacccaaacatctcagtggagtaaagaataacaaggcagcattgctgcaaaacatgtctcacctcccaccatagggcggtttttctcccatctcagaactgaacaaatgtacaatcgggttttataccgagacattcagttcccaggggcagacaggagacagtggccttcctctatctcaactgcaagaggctttcctcttttactaatccacctcagcacagaccctttaagggtgtcaggctgggggacggtcaggtctttctcatcccaggagcccatatttcagactatcacatggggagaaaccttggacaataccctgctttcaagggcagaggtccctgcagctttccgcagtgcattgtgcccctggtttattgagactagagaatggcgatgacttttaccaagcacactgcctgtaaacattttgttaacaagacacatcctgcacagccctagatcccttagaccttgatttcatacaacacatgtttttgtgagctcaaggttggggcaaag

SEQ ID NO: 115102 - DNA, 421 bp, Homo sapiens
gcagttttcaagtctggggaaataggcacatggacagattattatgaaggtatttcattagctttcttctctttatggcagcttcagattgatgaatttgaggtacaaatgagtgagtgacatatgtatattttcctctgattttatgactgatttacaaattaggagtgcaaatgggctgttccccgatagcatcttctgggaagaatccaaccaagatacaaagcagatgatggtggatcggcaaactcttttctatgaaaagaaaaaccagatataccagggactggaaagcacctgcttgaaaattgatatgagcatgtctgaatttttcccttataagagcctgagtattgtaacagggactaaacttaatgcagaatcaaatgtaaggaccacatatcaagaagcaggacagtag

SEQ ID NO: 115103 - DNA, 486 bp, Homo sapiens
tttttttgaactctgaactttttattggcctcctgctccccaaagggtaccctgcttctgctggcttaatgcctcagaactttggtgtcattggtctcagacaccactttgccatccactatccggcgggtggtggtcttttggatggtttgcatggagttgctgctgtccaaggcatcaccaagactgtaacagaagaccaagcccaagttataaacagccccgtggagtagaagggagacaagaaaggtagagggaaaaagcctcctgacctctacctttatctccaaatcaccctcagcctcttcctccagaaaagggaaactcaaggccaaacttcatttgcatactaagtacagctagggacaatacttagtttgctttcttcaagggggagacctctgtaactgttactcccttgaagacacaggagcacccacggagcaacggcccagtgctcagtggataccagtgaacagacacatg

SEQ ID NO: 115104 - DNA, 897 bp, Homo sapiens
atgggccaccatcgtcggcaaagcctgagtcctgtcctatctctctcctccccggacagcatgagcttcaccactcggtccaccttctccaccaactaccagtcactgggctctgtccaggcgcccagctacggcgcccggccggtcagcagcgcggccagcgtctatgcaggcgccgggggctctggttcccggatctccgtgtcccgctccaccagcttccggggtggcatggggcctgggggcctggccgcggggatggctgggggtctggcaggaatgggaggcatccagaacaagaagaccatgcaaagcctgaacgaccgcctggcctcttacctggacagagtgaggagcctggagactgagaaccgtaggctggagagcaaaatccgggagcacttggagaataagggaccccaggtcaaagactggagccattactgcaagaccatcgaggacctgagggctcagatcttcgcaaatactgtggacaatgcctgcatcgttctgcatattgacaatgcccgtcttgctgctgatgactttagagtcaagtatgagacacagctggcgatgcgccagtctgtggagaacgacatccatgggctccgcaagctggagacagagattgaggctctcagggaggagctgctcttcatgaagaaccacgaagaggaagtaaaaggcctacaagcccagattgccagctttaggttgaccgtggaggtagatgcccccaaatctcaggacctcgccaagatcatggcagacatccgggccaaatatgacgagctggctgggaagaaccgagaggagctagacaaatactggcctcagcagtttgaggagaacaccacagtggtcaccacagtccgccgaggttggagctgctga

SEQ ID NO: 115105 - DNA, 1493 bp, Homo sapiens
  misc_feature (1)...(1493): n = a,t,c or g
tgacatccaatgaactctgaactttttattgngcctgcctgctcccccaaagggtacactgcttctgctggcttaatgcctcagaagctttggtgtcattggtctcagacaccactttgaccatccactatccggcgggtggtggtcttttggatgatttgcatggagttgctgctgtccaagggatccaccaaagattaaaagtcctcgccaatcttccagcaggcgggcggtaaggtggcgaatctcagcttccagcttgacctttgatgtttcagcagggcctcatactccctgggcctggcgctgtcccctctgcccggggtctgtgccaagctctgactcaaggtgcaagcaaggatccccgttggagctggctccaatctggtaagggcgtaggngggcctccacctccctcaaggctgttctccaaagctgggccttccagatttctcatggagtccaaggtcgatctccaaggactggaactgtacgtttcaagcttctgtgagcgtgcgtctcagcaagctccaaacctcaagcagactggttgtggtgaccaactgtggtgctctcctcaatctgcttgagacgagtacttggctagcttcttctcggttctttttcgagcccagctcgtcatatttgggccccggatgtcttgccatgatctttggcgaaggccctgaagatttgggggcaatctaacctccacgggtcaaccccagagctggcaatctggcgtcttgataggccttttaacttccttcttcgtggttccttcttcatgaagaagcagctcctcctttgaggagcctcggatctctgtctccagctgcaagtcggtgtgataattggtgtcatcaaatggaccttggggagcccatggatgtcggttctccacaagactggcgcatggccagctctgtctcatactttgactcttaaagtcatcagcagcaagacggggcattgtcaatctgcagaacgatgcgggcattgtccacagtatttgcgaagatctgagccctcaaggtcctcgatgatcttgaagtaatggctccagtctctgacctggggtcccttcttctccaagtgctcccggattttgctctccatgctccggttctcggtctccaggctcctcactctgtccaggtaagaggccaggcggtcgttcaggctttgcatggtctccttctcgttctggatgcctcccattcctgccatgacccccggctcactcccgtggccaggcccccggaccccatgccgcccctgaagctggtggagcgggacacggagatccgggaaccagagcccccagcgcctgcatagacgctggccgcgctgctgaccggccgggcgccgtagctgggcgcctggacagagcccagggaccggtagttggtggagaaggtggagcgagtggtgaagctcatgctgtccggggagagagaaaggacaggactcaggctttgcggacgaccccg

SEQ ID NO: 115106 - DNA, 990 bp, Homo sapiens; identical to SEQ ID NO: 114725

SEQ ID NO: 115107 - DNA, 1531 bp, Homo sapiens
cggggtcgtccgcaaagcctgagtcctgtcctttctctctccccggacagcatgagcttcaccactcgctccaccttctccaccaactaccggtccctgggctctgtccaggcgcccagctacggcgcccggccggtcagcagcgcggccagcgtctatgcaggcgctgggggctctggttcccggatctccgtgtcccgctccaccagcttcaggggcggcatggggtccgggggcctggccaccgggatagccgggggtctggcaggaatgggatggcatccagaacgagaaggagaccatgcaaagcctgaacgaccgcctggcctcttacctggacagagtgaggagcctggagaccgagaaccggagcctggagagcaaaatccgggagcacttggagaagaagggaccccaggtcagagactgggagccattacttcaagatcatcgaggaccttgagggctcagatctttcgcaaatacttgtgggacaatgcccgcatccgttctgcagattgacaatgcccgtctttgctgcttgattgattttaggagttcaagtattgaggacagagctagcaccatgagccagtcttgtggagaaccgacatccaatgggctccgcaaggtccatttgatgacacccaatatcacacggacttgcagctaggaagacagagatccgaggctctcaaggagggagctgctctttcaatgaagaaggaaccacgaagaaggaagttaaaaggcctacaagcccagattgcccagttcttggggttgacccgtgggaggtaagatgccccccaaatcttcagggaccttcgccaagattcatggcaagacatccggggcccaattatggacggagctgggctcgggaaggaaccgaggaggcagcttaggacaagttatttggtcttcagcagattttagggatgggcaccacagtgggtcacccacacaagtctgcttgaggttggaagcttgctgaagacgacgcttcacagagctggaggacgtacagtcccagttccttgggagatccgacctggggattcccatggaggaaatcttgaagggccagctttggagaacaagcttaagggaaggttgaaggcccgcttacgcccttacaagatggagcaagcttcaacggggatcctggcttgcacctttgagtcagagcttggcacagaccccggggcagagggacagcgccaggccccaggagtattgaggccctgcttgaacatcaagggtcaagcttggaagctgagattcgccaccttacccggccgccttcttggaagaatggccaaggacttttaattttggtgattcctttggacgaacgcaactcctttcaaaacctcccaaaaaaccaacaccccgccgggtaatgtggatgggaaagttggtgtttgaaaccaatgacaccaaagttctgaggcattaagccagcagaagcagggtaccctttggggagcaggaggccaataaaaagttcagagttcattggatgtca

SEQ ID NO: 115108 - DNA, 481 bp, Homo sapiens
  misc_feature (1)...(481): n = a,t,c or g
tctaaagcctcttggagggccttttctttttggaggtggaggcgggccacgtttcccaccttcaaatgaagggttggtgggctggttcccccccaaggcgttttccctctaaaagcattcccttccagtttttggggggcaccctagggtttggtggggcttccaaaggggcaaaaacaaaaccctcttatttgttgggttcccgggtttttctcaaaaagaatttccccttttggcccaaatttgccaaaaactggttcaaaaaccttttcctttggtttcggttttaagccccccaaagaaaagcttttctgggggattttgtttcaccccnnnnnnnnnnnnnngggccggtgagtcggaggggtgacaatgggttcaagctccaacgagctcggcgataggggcttcctagcagctcagcaccatgtggcggctgccgggtgcgaggaccgaaccgcgaagccgctagcacacgaaa

SEQ ID NO: 115109 - DNA, 2104 bp, Homo sapiens
  misc_feature (1)...(2104): n = a,t,c or g
gggggttgcgcagtacgtgctagcggcttcgcggttcggtcctcgcacccggcagccgccactggtgctgagctgctaggaagcccctatcgccgagctcgttggagcttgaacccattgtcacccctccgactcaccggcccaaaaaaaaaaaaaaatggttgaagcagatcgcccaggaaagctcttcattggtgggcttaatacggaaacaaatgagaaagctcttgaagcagtatttggcaaatatggacgaatagtggaagtactcttgatgaaagaccgtgaaaccaacaaatcaagaggatttgcttttgtcacactttgaaagcccagcagacggctaaggatgcagccagagacatgaatggaaagtcattaggatgggaaaagccatcaaggtgggaacaagccaccaaaccatcatttgaaagaggtagacatgggaccgcccccacctccaagaagtagaggtcctccaagaggttttggaggttggaagaggaggaagtggaggaaccaggggacctccttcacgaggaggacacatggatgatggtggatattccatgaattttaacatgagttcttccaggggaccactccccagtaaaaagaggaccacgaccaagaagtgggggtcctccctcctaagagttctgcacctcctaagagatctgcaccagttcacagcagcagtgaatggaaggaagagctcctttatcacgtggaaaagatagttagggaggtccacctcgaagggaaccgctgccctcttcgtagagatgtttatttgtccccaagagatgatgggtattctactaaagacagctattcaagcagagattacccaagttctcgtgatactagagattatgcaccaccaccacgagattatacttacccgtgattatggtcattccagttcacgtgatgactatccatcaagaggatatagcgatagagatggatatggtccgtgatccgtgactattcagatcatccaagtggaggttcctactagagattcatatgagagttatggtaactcacgtagtgctccacctacacgagggcccccgccattcttatggtggaagcagtcgctatgatgattatagccagttcacgtgacggatatggtggaagtcgagacagttactcaagcagccgaagtggatctctactcaaagtggtcgtgaatcgggttggcagacaagaaagacggcttcccccttctatggaaagggggtacccttcctccacgtggattcctacagcagtttcaagccgcggaagcaccaaaaggtgggtgcccgtgggaggaagccgatttaatagagggggaggcagaaccagatactagaaacaaacaaaactttgacccaaaatcccaagttcaaaagaaacaaaaaaaagagtggaaacttattctatcataactacccaaggactactaaaaggaaaaattgtgttactttttttaaattccctgttaagttcccctccataaatttttatgttcttgtgaggaaaaaagtaaaacatgtttaattttatttgacttatcgcattgcttttcaacaagcaaatgttaaatgtgttaagacctggactaatgttggaccctttccaagaaaaggtatccccgtaaaggccacttccgtatcgtgatttttcccaggcaaatgagggcagggcaattctaaggatcttccacaaaacatctaggccatcttaaangggaggaggatggaatcattcttacctattacaaacaaggctaggctattagagggtggttggggtatgctactcataagatttccagggtgtcttccaactggaaatctcaatgttcctcagttacgaaaaaccctggaatccaccatgccctatggtaagggaaaagtggcctattcacccagtaaacccaaaaaaagcaaatggataatgctggccatttttgcctttctgacatttccttggggaatctgcaagaacctcccctttcccttcccccaataagaccatttaagtgtgtgttaaacaactacagaatactaaataaaaagtttggccaaaaccaacaaaaaaaaaaaaa

SEQ ID NO: 115110 - DNA, 654 bp, Homo sapiens
atgactgcttttaactctggtaaagtggatattgttgccatcaatgaccccttcattgacctcaactacatggtctacatgttcctgtatgattctacacatggcaaattccatggcaccgtcaaggctgagaacgggacgcttgtcatcaatggaaaccccatcacccattttccaggaccaagatccctccaaaatcaaatgggcgccccagccaaggtcatccatgacaactttggtatcatagaaggattcatgaccacagttcacaccatcactgccacccagactataaatggcccctccgggaaactgtcacgtgatggctgcagggctctccaggacatcatccctgtctctactggcgctgccaagcctgtgggtaaggtcatccctgagctgaacgggaagctcactggcatggccttccatgtccccactgccaatgtgtcagtggcggacctgacctgtcgtctggaaaaacctgccaatatgatgacatcaagaagcaacacccactcttctaccttcgatgctggggcagccattgtcctcaaggaccactctgtcaagctaatttcctggtatgacaatgaatttggctacagcaacagggtggtgcacctcatggcccacaatgcctccaaggagtaa

SEQ ID NO: 115111 - DNA, 1414 bp, Homo sapiens
gggttttttttttttttttttttttttggttgagcacagggatactttattagatggatacatgacaaggtgcggctcccataggcccctcccctcttcaaggggtctacatggaaactgtgcggaggggaagaattcaagtgtggtgggggacatgagtgtggcaggaaatccccaacagtgagggtctctctcttcctcttgtactcttgcttggggctcggtggtcccaggggtctttactccttggaagccatgtgggccatgaggtccaccaccctagattgctgtagccaaattcgttgtcataccaggaaatgagccttgacaaaagtggtctgttgaggggcaatgcaggccccagcgttcaaaggtggaggagtgggtgtcagctgttgaagtcagaggagacccacctggtgcttcagtgtagccccaggatggccccttgaggggggccctgccgacggcctgctttcaccaaccttgcttgatgtcaatcatattttggcaaggtttttctagaacggcaggtcaaggtccaccactggacacgttttggcagttggggacaccggaaagcccatggccagtgagctgtcccgttcagccttagggatgacccttgcccacaggccttgggcagcgcccagtagaggcccagggatgatgttctggaagagccccgcggcccatccacggccacagttttccccgggaggggccaatccacagtctttcttgggttgccagtgatggccatggaactgtggtcatgaagtccttcccacgattacccaaagttgtcatggaatgaccctttggccagggggtgctaagccagttggttggtgcaggaggccattgctgatgaatcttgaggctgttgtcaatacttctcaatggttcacaccccatgacgaaacatggggggcatcaagcaagagggggcagagattgatgaccccttttggctcccccctgcaaaatgagccccagccttcttccatggttggttgaagacgccaagtggacttccacgacggtactcagcgcccagcattcgccccacttgattttggagggatctcgcttcctggaagatggtgatgggatttccattgatgacaagcttcccgttctcagccttgacgggtgccatggaatttgccatgggtggaatcatattggaacatgtaaaccatgtagttgaggtcaatgaaggggtcattgatggcaacaatatccactttaccagagttaaaagcagccctggtgaccaggtgcccaatacgaccaaatccgttgactccgaccttcaccttccccataggtgttctgagcgatgtggctcggctggcgacgcaaaagaagattgcggctgactgtcgaacaggaggagcagagagccccc

SEQ ID NO: 115112 - DNA, 481 bp, Homo sapiens; identical to SEQ ID NO: 115108
  misc_feature (1)...(481): n = a,t,c or g

SEQ ID NO: 115113 - DNA, 1627 bp, Homo sapiens
gggggttgcgcagtacgtgctagcggcttcgcggttcggtcctcgcacccggcagccgccactggtgctgagctgctaggaagcccctatcgccgagctcgttggagcttgaacccattgtcacccctccgactcaccggcccaaaaaaaaaaaaaaatggttgaagcagatcgcccaggaaagctcttcattggtgggcttaatacggaaacaaatgagaaagctcttgaagcagtatttggcaaatatggacgaatagtggaagtactcttgatgaaagaccgtgaaaccaacaaatcaagaggatttgcttttgtcacactttgaaagcccagcagacggctaaggatgcagccagagacatgaatggaaagtcattagatggaaaaagccatcaaggtggaacaagccaccaaaccatcatttgaaagtggtagacgtggaccgcctccacctccaagaagtagaggccctttccaagaggtcttataggtggaagaggaagaagtggaggaaccaggggacctccctcacggggaggacacatggatgacggtggatattccatgaattttaacatgagttcttccaggggaccactccccagtaaaaagaggaccaccaccaagaagtgggggtcctccctcctaagagttctgcaccttcaggaccagttcgcagtagcagtggaatgggaggaagagctcctctatcacgtggaagagatagttatggaggtccacctcgaagggaaccgctgccctctcgtagagatgtttatttgtccccaagagatgatgggtattctactaaagacagctattcaagcagagattacccaagttctcgtgatactagagattatgcaccaccaccacgagattatacttaccgtgattatggtcattccagttcacgtgatgactatccatcaagaggatatagcgatagagatggatatggtcgtgatcgtgactattcagatcatccaagtggaggttcctacagagattcatatgagagttatggtaactcacgtagtgctccacctacacgagggcccccgccatcttatggtggaagcagtcgctatgatgattatagccagttcacgtgacggatatggtggaagtcgagacagttactcaagcagccgaagtgatctctaatcaagtggtcgtggtcgggttggcagacaagaaagacggcttcccccttctatggaaagggggtaccctcctccacgtgattcctacagcagttcaagccgcggagcaccaagaggtggtggccgtggaggaagccgatctgatagagggggaggcagaagcagatactagaaacaaacaaaactttggaccaaaatcccagttcaaagaaacaaaaaaaagagtggaaactattctatcataactacccaaggactactaaaaggaaaaattgtgttaccttttataaattccctgttaagttcccctccataatttttatgttcttgtgaggaaaaaagtaaaacatgtttaattttatttgactttcgcattgcttttcaacaagcaaatgttaaatgtgttaagacttgtactagtgttgtaactttccaagtaaaagtatcccctaaaggcc

SEQ ID NO: 115114 - DNA, 1499 bp, Homo sapiens
atgaagattccctggaaaagatctaatcttcaagtaaaggatgaggaggagtgggccaggcaaagaaagatcctgtttgagtttggagccacaggagcaagtgtgggaggtggaagcaaggagacagcatcccatcttcagtcaaagcctcatttgccagattctcttataggctgtggccacaacaataggagtatggatataggctttgggagaaggttgcccacctggctggatgcaaccacaacagcacacagatcctggtaaactgcctgagggcacttatcagggaccaaggtgatgcgtgtgtccaacaagatgagattcctccaactgaacttccagagagacccggaagaggtgtcaacaacctggaattcaattggctcttgccttatatcatgaagttcccgctaaaccggcaggcgatgagaaaggaaccatcactaagatgctctggagtacccgcaccctgttgaatatcaccaaggagcaggtaccacttgtggtggaggagtacctggacaatgtcaatgagcatgtctggaagatgctacgaaaccccccggctccacaccctccccatacacccagaaggtgtccctcttctcgtcagctcctccctgggttacattgctggatacagaggcgggagggctacctactactgccccatcgtcccaccttgtctcctgcccccactcaggtcctcccacggccacttggagtctctcctgaagtgctgccaggccccatcccgcgtggatcggcccggttctgggctggccgagctggagcagttccccatggtggttacggcagagccaggctttggaaacccacggccggtgctggacgtgccccgcgacaggcacgtgcctacaagacgtggagagcatgaacagcagagatttgtcctcaacggaaaacagcagatcttctccgtttcagaggactcctggtcctcaacgtctatagcccagctgaggtcatggtatgggtccatggagcgctctgataactggcgctgccacctcctacgatggatcagctctggctcctatggggatgtggtcgtggttacagtccagtaccgccttggggtcctggcttcttcagcactggagatgagcatgacctggcaaccagggcttcctagatgtggtagctgctttgcgctgggtgaagaaaacatcgcccccttcgggggtgacctcaactgtgtcactgtcttggtggatctgccggtgggagcatcatctctggcctgcctttcagaggccacagaggaggagaagcagctaagcctcaccatgatggcccatggacccactttgcccggacaggcccttaaagtgtcggcgctctgtgactggagttatgctcttttgaaatgtcacaaggccgcctccacctctggggcattgtacaagttcttccctctccctgaagtgcctttccgctttcttcgtgaggagctctctcaaaatggggattag

SEQ ID NO: 115115 - DNA, 4746 bp, Homo sapiens
  misc_feature (1)...(4746): n = a,t,c or g
atgactggaatctgctacacagaagatgaaagatcatataagaaaaatgctcaaccaacggcagcaagtaaaaagcaaaaagaaacacagaaattctgtctaagagtagacgggcaacaaaaagtgaagctctcggtgctccaggagaaaagcgcgcagctcacagtacaacttaagagccagaagttcctgggccaccccacagcgggccggggtcgcagcgagctctgcctggacctccccgatcccccagaggacccagtggcactggagacccggagtgtgggcacctgggttcgagaacgggacttgggcatgcctgatggggaggctgccctcgccgccaaggtcgctgtgctggagacccagctcaagaaggcgctgcaggagctgcaggcagctcaggcccggcaggctgacccccagccccaggcctggccaccgccggacagcccggtccgcgtggatacagtccgggtggtagaagggccacgggaggtggaggtggtggccagcacagccgctggcgcccccgcacagcgggcccagagcctggagccttacggcacagggctgagggccctggcaatgcctggtaggcctgagagcccacctgtgttccgcagccaggaggtggtggagacaatgtgcccagtgcccgctgcagctaccagcaacgtccatatggtgaagaagattagcatcacagagcgaagctgcgatggagcagcagaaatgaaatgggaggaccagaacattggagatcagtgccaaaatgccaagagaaatctaaggatggcattaacatcctctctgggctgtggatttctccaggttgtgctgagactccagaatttacagcaggtgatagtcagctatttcggccagtgcaagtttggatgcctgcaaggtcaatcatgcgagcatcaggaatatggagagaagccatatacacataagcaacgtgggaaagccatcagtcatcagcactccttccagacacatgaaaggccccccaccggaaagaaacccttctattgtaaagaatgtgcaaaaacctttagttctcttggaaacctccgaagacacatggcggcacaccatggagatggaccttataaatgtaagttgtgtgggaaagcctttgtttggcccagtttatttcatttgcacgaaagaacacacactggagagaaaccgtatgaatgtaagcagtgttctaaagcctttcctttttacagttcctatctaagacatgaaagaatccacacgggagagaaagcgtatgaatgtaagcagtgttccaaagcctttcctgattacagtacctatctaagacatgagagaactcacaccggagagaaaccctataaatgtacacaatgtgggaaagccttcagctgttactattacactcgactacatgaaaggactcacacgggagaacaaccctatgcatgtaagcaatgtgggaaaacgttttatcatcacacaagctttcgaagacacatgataaggcacactggagacggaccacataaatgtaagatatgtgggaaaggctttgattgtcctagttcagttcgaaatcatgaaacttacttcacactggagagaaaccctatggaatgtaaagcagtgtgggaaagtgttatctcatagctcgagctttcgaagtcacatgataacacacacaggagatggaccccagaaatgcaagatatgtgggaaagcctttggttgtcccagtttatttcaaagacatgaaaggactcacactggagagaaaccctatcaatgtaaacaatgtggtaaagccttcagtcttgccggttcccttcgaagacatgaagcaactcacactggagtgaaaccctataaatgtcagtgtgggaaagcctttagtgatctctcttcctttcaaaatcatgagacaactcacactggagagaagccctattgaatgtaaggaatgtggaaaagcattcagttgtttcaaatacctttctcaacatagaaggactcacatggctgaaaaaccttatgaatgtaaaacatgtaagaaagccttcagtcattttggtaacttaaaagtccatgaaaggattcacactggagagaagccatatgaatgtaaggaatgcaggaaagcattctcttggctcacttgccttctgcgacatgaaagaattcacactggaaagaaatcttatgaatgtcaacaatgtggtaaagccttcactcgttctcgtttccttcgaggacatgaaaaaactcacactggagagaagatgcatgaatgtgtctgcaaggtggacaaacagaaccgtgctggctacagccctattatgctcaccgccctggccaccctgaagacccaggacgacatcgagactgtccttcagctcttccggcttggcaacatcaatgccaaagccagccagccatatgtggcccagggggacctgagtggattccaagacattggtggctacacaaaaaggaaactggacttttattccacgctgttggctggcagtccaggacctcagcatccaggaagtcacctttgtcctcagaccaacctggaaaaatctcgcttttctgcccgtggacaccgccgaagaagcatcgttaaagtctctcttcaccctgccggtcatgtctaagtcagagtctcctaaagagcccgcaacagctgaggggngggaagctttttcattggagggttgagctttgaaacaacatgatgagagccctgaggagccattttgagcagatggggaacgctcacggacttgtgtggtaatgagagatccaaacaccaagcgctccagggggctttgggtttgtcacatatgccacttgtggaggaggtggatgcagcctatgaatgcaaaggccacacaaggtggatggaaagagttgttggaacccaaagaggagcttgtcttcccagaggaagattctcaaaagaccagggtgcccacattaacttgtgaaaaaagatattttgtttggttggcattaaaagaagacacttgaaagaacatcaccgtaagagattatttttgaacaagtattggaaaaatttgattggattgaaatccatgacttgacccgaggcagttggcaagaaaaaggggctttgccttttgtaaccctttgaccgaccatgacctccgtggataaagattgtccattccagaaataccatactgtgaatgggccacaacctgtgaagtttagaaaagccctgtcaaaagccaagaagatggctagtgcttcatccaagccaaaggagggtcgaagtggttcttggaaacttttggtggtggtcgtgggaggtgggtttcggtgggaatggacaacttcggtcgtgggaggaaacttcagtggtccttggtggcctttggtggccagcccgtggttgtgggtggatatggtgggcagtgggggatggctataatggatttgggtaatgatggaaagcaattttggaggtggtggaaagctacaatgatttttgggaaaataccaacaaatcaggtcttcaaaattttggaccccatgaaggggaggaaatttttggagggcagaagctcgtgccccctatgggcggtggaggtccaatacttttgctaaaccccgaaaaccaagggtgggctatggccggttccagcagcagcaagtaactattggcagtggcaggaggttctaattacagccaggaaacaaagcttattcaggagaggagagccagagaagttgacagggaagctacaggtttacaacagatttgtgaaactcgccccagacacagtgggtgccagggcctagctggcttacaaagaaagacatgtttttaggacaaattactcatgttgtatggggcaaaaaaactcggagggactgttatttgtggactaattggttattaacagggttattttaagttttctgtttctggtgggaaagtgttaagccattcccaaccaaggggttttaatggtagatttttttttttttttttgcacccccatgcctgtttgattgcctaaaatgtaaccagtctgaatcggtgaccgctgaattaaaatgtccttttttttaaatggtgcctgtgtaaaagttagtcttactctttaagcccatcttgggtaaaatttcccccaaccagtgtggaagttaggaaattcctttcaggggtgatgccccggttcctatttggaatttatataccaaccctgcttggggtggagaaagccattgtcttcgggaaacctctggtgtagttcgaactgaaaaagtactgtttgtgacctgaagtttcacccattaaaaggggnttaccccaagcaaaatccatggaattattggttattaaaagtggattgtttgggcacatccctatggcaattatatcctaaatttgaataatgggaccagattaaaattatagatggggaatgaagccttgtgtatcatccattatcaatgtgtaatcaataaacgattataattctcttgaatgaaatgacacctgtatggatttgggactggcagagatttggactttccttacccactccccctgataataatgttgaatgcttctctcacaattccaagttccaaagctctgccaggggaattaggaacctaagctgctggctaatgccgctccataaatcccgcagatttgaaagtgtctgggaaggcccttttaaaaatacccaatttccg

SEQ ID NO: 115116 - DNA, 411 bp, Homo sapiens
ttttttggtataaatttgtattccaaacagggtcaaaagcttccaggatcacagtggtctctacctgccctctctctgctaggcaaaatcctcacagtcctcaagggcctagtaaatgtcactgccacgaagcccttccagatttccccgctgggacaagcctactctgcaactgttttatatcatggctaccaaaagtcctagcaatgccagattagactcctgctcatgctgaagttctttccatagtagccaggctcattacagtgcctgagattctactatcaccatatccatcttgcaggtatagtaccagcatccctaaaagaagggatcacattcagttatggagactcacaaatattttggctgacgaaaacccacaataacaaacctgctaagagagagggg

SEQ ID NO: 115117 - DNA, 1185 bp, Homo sapiens
atggaccctgctgccactaccctgatgaagtgctttggcctgcaccactcattggagttttgtggccagcagactgagatcagttcggcctctccaacacagcaggttcctagccttgaggggccagagaacaaaggcctcccctcccctggcatgtgtaccaccagccctgagagtgggcttggagtggctatctgcttggggtgtggacagaacccagacatgcagactggcatgcccacacgtctgtgcacagagattcttgcggagtgtgccaaactaaaggtgaaaaaaaaagtggggttcatgaaagccttaagttatgcatcattagataaagaagatttattgagtcctattaatcaaaataccctgcaacgatcttcctcagtgcggtccatggtgtccagtgccacatatgggggttcagatgattacattggtcttgctctcccggtggatataaatgatatattccaggtaaaggatattccctattttcagacaaaaaacataccaccacatgatgatcgaggtgcaagagcatttgcccatgatgcaggagaaagtacagaagacactggactacaggaacatacagatgataactgcctttattgtgtctgtattgacattctgggtttccagcccagcaaccaactgagtgcgatatgtagtcattcagactttcaagatattccatattctgattggtgtgagcagactatccataatcctttagaagtggttccctctaagttttcggggatttctggatgcagtgatggggtgtctcaagaaggctcagctagcagcaccaaaagcacagaattgttactaggtgttaaaacaattccagatgatacaccaatgtgccgtatactccttcgcaaagaagttctaagattagtcattaatttgagtagttcagtttcaactaaatgtcatgagactgggcttttaacagaggtagacacccagatacaagaaatccagagaacacctgctggattctacacaaaacgaacatcactagggcatataggcaccagattgtttaaggccagcactaaagaaaaaatcttaaatgcaactagagaaaaaggtcagatcacatacaaagggacccccatcaggctaacagtggacttctcagcagaaaccttacaagccagaagagattga

SEQ ID NO: 115118 - DNA, 1292 bp, Homo sapiens
tttcgttctgcccacctccctccctccatctcagctctaaatttataacttagtaagtgggtgtgtctttggggctggtttggatccctcaagtagaagagagcaagccagaaacacatgtgcaagagatttactgggggaaggacttgtaaggggaaagggagtaactgtaggcacagagccttcagacccagtgcaggtgtgatgcctgtggaaggagatggggaggaaggaaggtgggaaggagttgcttccagctgcagccattgggtgggagcagcctggggtgtgtgaatcttccacagatctgaaggggcagtgtctgaaggctgtcagtcatctacgctctcttgaagggagcactgaggggcacagctgcacactgccacagttctctttcagagatgttcttaggttcatgaaagccttaagttatgcatcattagataaagaagatttattgagtcctattaatcaaaataccctgcaacgatcttcctcagtgcggtccatggtgtccagtgccacatatgggggttcagatgattacattggtcttgctctcccggtggatataaatgatatattccaggtaaaggatattccctattttcagacaaaaaacataccaccacatgatgatcgaggtgcaagagcatttgcccatgatgcaggagaaagtacagaagacactggactacaggaacatacagatgataactgcctttattgtgtctgtattgaaattctgggtttccagcccagcaaccaactgagtgcaatatgtgagtcattcagactttcaagatattccatattctgattggtgtgagcagactatccataatcctttagaagtggttccctctaagttttcggggatttctggatgcagtgatggggtgtctcaagaaggctcagctagcagcaccaaaagcacagaattgttactaggtgttaaaacaattccagatgatacaccaatgtgccgtatactccttcgcaaagaagttctaagattagtcattaatttgagtagttcagtttcaactaaatgtcatgagactgggcttttaacaattaaggagaagtatcctcaaacatttgatgacatatgcctttactctgaggtttcccatttgctgtcacactgcacattcagacttccgtgtcggaggttcatacaagaattatttcaagatgtacagtttctacaaatgcatgaagaagcagaggctgtgttggcaacaccaccaaagcaacctatagttgatacatctgctgaatcctga

SEQ ID NO: 115119 - DNA, 443 bp, Homo sapiens
ttttttcctgcagggcttttattggctctataagtcaacttcgattccttaaagcagtctgtttatatttgaaagcacgacatttcaaaaccttggtaaaataaccatcatatccaattgtgtccctttttgtcagcatataaggtttccaggtttcttttctctgcagcttccagaagaatggacagtcagactgagtcaggcctgttgagcttccactaacaattcctccaggtttcagcaaatgtgaccgaccagacaaactggaagagcctgttggactttcatcagcaatttcttcagagatctcctcaccaaggcataaggctcctatggaggacgagctgaccacgtactgagctgagtgttgagttgaccaccagccttaggggaatgtctttgtagcgaggagcactgcggaaatgttgcacggcctaatcttg

SEQ ID NO: 115120 - DNA, 562 bp, Homo sapiens
  misc_feature (1)...(562): n = a,t,c or g
atggatatgcgacgacatgtgagatgccgtgcgggacgtgacgttgtctggaggaatatacgagaccttccagaagaatggacagtcagactgagtcagcctgttgagcttccactaacaattcctccaggtttcagcaaatgtgaccaccagacaaactggaagagcctgttggactttcatcagcaatttcttcaagatctccnnnnnnnnnnnnnnnnnnnnnnnnnnnnnnnnnnnnnnnnnnnnnnnnnnnnnnnnnnnnnnnnnnnnnnnnnnnnnnnnnnnnnnnnnnnnnnnnnnnnnnnnnnnnnnnnnnnnnnnnnccaaggcataaggctcctatggaggacgagctgaccacgtactgagctgagtgttgagttgcccaccagccttaggggaatgtctttgtagcgaggagcactgcggaaatgttgcacggcctagtcttgtggcatttccctctgtggggacttcagctttcacctcattctcttattctttcaactcctttcctccctctcctttacttcttacccttctgtcgtcttctcgcagc

SEQ ID NO: 115121 - DNA, 387 bp, Homo sapiens; identical to SEQ ID NO: 114599

SEQ ID NO: 115122 - DNA, 400 bp, Homo sapiens
gcttggcggagctgtgagtggtaaagagggacttgtaggcctccgattcttcactgtcagcgatggacctctttgtggctccacacggaggcttcccagcttttccagaagagctctcattcattgctgtgcttttgggagccaagttggttttcttctctctagaatcaaggctggcttcttcaggcttccctgtcttaacttttgatggccctggggcttcttcactgacatctggttttgaaacagactctgctgccttgggtttctttgttttcttttccacgttcgctctcagccttctctcctccatccttgtcttcagcacgtccacatcctccttggtgccattgagaaattcaatgacggcatctttgttataaagtctgccaagttcaca

SEQ ID NO: 115123 - DNA, 412 bp, Homo sapiens
cccacgcgtccgcggacgcgtgggtcggaggcctacaagtccctctttaccactcacagctccgccaagcctccgtgtggagccacaaagaggtccatcgctgacagtgaagaatcggaggcctacaagtccctctttaccactcacagctccgccaagcgctccaaggaggagtctgcccactgggtcacccacacgtcctactgcttctgaagcccgcactgccaccgctcctgccccagaaggttgtttagtttccacgtaggcaggtcgctttgtgcctctgagtgcgctgctgtgtgttctctctatagttctgtgtcataaagctgtcctggccagccttcaagctggtgtggccactcttgatgtgaggcgtgtcggttccaggggggacatgggaggggctgca

SEQ ID NO: 115124 - DNA, 1134 bp, Homo sapiens
atgggttgcgacgggggaacaatccccaagaggcatgaactggtgaaggggccgaagaaggttgagaaggtcgacaaagatgctgaattagtggcccaatggaactattgtactctaagtcaggaaatattaagacgaccaatagttgcctgtgaacttggcagactttataacaaagatgccgtcattgaatttctcttggacaaatctgcagaaaaggctcttgggaaggcagcatctcacattaaaagcattaagaatgtgacagagctgaagctttctgagcgagccttgaaagagataaaagcggaagtttgccacacgtgtggggctgccttccaggaggatgatgtcatcgtgctcaatggcaccaaggaggatgtggacgtgctgaagacaaggatggaggagagaaggctgagagcgaagttttaaaagaatatcaaagaaacccaaggcagcagaggtctgtttccaaaacccagatgtcagtggaaggaagccccagggcccatcaaaagttaagaccagggaagccctgaagaagcccagcccttgattctagagagaagaaaaccaacttggctcccaaaagcacagcaatgaatgagagctcttctgggaaaagctgggaaagcctccgtgtggagccacaaagaggtccatcgcttgacagtggaagaatcggaggcctacaagtccctcttttaccactcacagcttccgccaagcgcttccaaggagggagtctggcccactggggttcaccccacacgtcctacttgcttctgaaagcccgcactgccaccggctcctgccccagaaggttgtttaagtttccacgtagggcaggttcgtttgtgcctctgagttgcgctgcttgtgtgttcttttctattagtttttgttgttcataaaaggtgttcctgggccagccttcaagctgggtgtgggccactctttgatgtgagggcgtgttcggttccaggggggggacatggggaggggcttgcacagtgggcccgaggttcatgctttgtttccacctgcatgtgccatttgggtcctttccatggccaggaagccctgtgggctgcactttttatgcttgcagtaacaagagactccgagagt

SEQ ID NO: 115125 - DNA, 999 bp, Homo sapiens
gcgcttggcggagctgtgagtgataaagagggacttgtaggcctccgattcttcactgtcagcgatggacctctttgtggctccacacggaggcttcccagcttttccagaagagctctcattcattgctgtgcttttgggagccaagttggttttcttctctctagaatcaaaggctggcttcttcaggcttcccctgtcttaacttttgatggccctggggcttctttcactgacatcctggttttgaaacagactctgctgccttgggttttctttgttttcttttccagcttcgctctacagccttctctcctccatcattgtcttcagcaagtccacatcctccttggtgccattgagcacgattatcatcatcctccctggaaaggccagccccacacgtgtggcaaaactcccgcttttatctctttccaaggctccgctcaagaaaaacaacacaagccgcaaccacccgaaggaagcagaactctgtgtctggccagttcatctcccaggcccaccaacgggggaagatgaagacgcgcccgctggaggtcatctgtgcttgtccaccttttagtgtttcctttatccccttcccagggcagggattatcaggaaagcttcagcttgtgtcacattcgttaatgcgttttaatgtgagatgcctgccttcccaagagcctttttctgcagatttgtccaagagaaattcaatgacgggcatctttgttataaaagtctgcaaagttcacagggcaactattggtcgtcttaatattttcctgacctaaagtacaatatgttccattgggccactaattcagtcatctttgtcgaccttctcaaccttcttcggccccttcaccaggttcatgcctcttggggattgttcccccgtcagcaacccatcgcaggacgggagtcagacccagcagcaaacccccaaagctgtcacttccgggatttccggcgaaaaaaaaacccacgcgtccg

SEQ ID NO: 115126 - DNA, 759 bp, Homo sapiens
atgataggccatctgcaagctgaggaaaaagaagccagtagtggctcagttcaagtccaaaagcctcagaagcaagaagccaactgtgcagtcgtcagcctgtggccagaggccacagggcccccgcaaaccaccagtgtaagtctaagagtccaaagaccaaagaacctggaactgatgtccaagggcaggagaagcagaaggaagcatccagcacgggagaagatgaaagccagaagactcagcaagcaaaggtatcccaccttcttctgcttctgtgttctacctgagctggcagccaattgcatggtgtccacctactcgaggcctcccaaaaggctggattacaggctggagcccccacacctggccccaagtctgaccgttgagcgaacaaacgcccctgctgcaggttccacgtggctggcactgagcccgaacgcctctgctgtggccaccatggactcaacaggactcaccatctagacctactcgtgaccgatttattccagtgaagggatacaaagcaaaaccagctgagggagagctctagcctctcggaatttgtcttcttcagtggaaaccccgagaagactgatcagttcttcagttctaaaacaatggcccaggtgttggcagtatgcttcccgggtgttgttaatgtgtcaccaccatgaagcacctggtgtcggttgtagctcctctttgccattggcagtcattggcactgcttacattctcacactgggggctcaaatg

SEQ ID NO: 115127 - DNA, 450 bp, Homo sapiens
atgatgttagacaaaaagcaaaaccgagtgattttcttatttgagttcaaaatgggctgtaaagcagtggagacaacttgcaacatcaacaatgcatttgacccagaaactgctaatgaacatacagtgcagtggtggttcaagaagttttgcaaaggagacgagagccttgaagatgaggagtgtagtggctggccatcggaagtcaacaatgaccagttgagagcaatcatcgaagctgatcctcttacaactacgcaagaagttgccaaagaactcagcgttgaccattctacagtcatttggcatttgggacaaattggaaaggtgaaaaagctcgataagtgggtgcctcatgagctgactgcaaatagaaaacatcattgttttgaagtgtcatcttattctacacaacaacaaaccattcctcaatcagattgtaatgtgtga

SEQ ID NO: 115128 - DNA, 412 bp, Homo sapiens
cgccttttccccaaatcagccaggtacatgccccagaaaacactggcttgcctcgttcccaccttaattaccggaccaaacgaacgtgaacacactgttttcaaaaccaaactcaattgggatcacgggggcctcggtttccttgattgtaaaatgggtatatcgccccccactctatttagcccaagaaaacaatttatctcttgatgtctctttcgtctccaggatctatgcttttacagactcactgggaggaaatatccagaccaaatcctaaagcctgatctaatttgggagatgctcagaagttttggttctatgcaagaacagcagtggtaataatccaagcttggctttagacacaggacgtttccttaggggcatatgggatctctgctggctcaaagtgatg

SEQ ID NO: 115129 - DNA, 585 bp, Homo sapiens; identical to SEQ ID NO: 114600

SEQ ID NO: 115130 - DNA, 412 bp, Homo sapiens; identical to SEQ ID NO: 115123

SEQ ID NO: 115131 - DNA, 1740 bp, Homo sapiens
  misc_feature (1)...(1740): n = a,t,c or g
cggacgcgtgggtttttttttcgccggaaatcccggaagtgacagctttgggggtttgctgctgggtctgactcccgtcctgcgatgggttgctgacgggggaacaatccccaagaggcatgaacctggtgaaggggccgaagaaggttgagaaggtcgacaaagatgactgaattagtggcccaatggaactattgtactctaagttcaggaaatattaagacgaccaatagttgcctgtgaacttggcagactttataacaaagatgcccgtcattgaatttctcttggacaaatctgcagaaaaggctcttgggaagggcagcatctcacattaaaacgcattaacgaattgttgacagagctgaaagctttctgataatccctgccctgggaaggggataaagggaaacactaaaggtgacaagcacgatgacctccaagcgggcgcgtntttcatcttgccccgttgtgggcctgggagatgaacggccgacacaggttctgcttccttcggtgctgcggctgtgtgttttctgagccgagccttgaaagagataaaagcggaagtttgccacacgtgtggggctgccttccaggaggatgatgataatcgtgctcaatggcaccaaggaggatgtggacgtgctgaagacaaggatggaggagagaaggctgtagagcgaagttttaaaagaatatcaaagaaacccaaggcagcagagtctgtttccaaaacccagatgtcagtggaaggaagccccagggcccatcaaaagttaagaccagggaagccctgaagaagcccagcccttgattctagagagaagaaaaccaacttggctcccaaaagcacagcaatgaatgagagctcttctggaaaagctgggaaagcctccgtgtggagccacaaagaggtccatcgctgaccagtgaagaatcggaggcctacaagtccctctttaccactcacagcttccgccaagcgcttccaaggaggagtctggcccactggggttcaccccacacgtcctacttgcttctgaagcccgcactgccaccggctcctgccccagaaggttgtttaagtttccacgtagggcaggttcgtttgtgcctctgagttgcgctgcttgtgtgttcttttctattagtttttgttgttcataaaaggtgttcctgggccagccttcaagctgggtgtggcccactctttgatgtgagggcgtgttcggttcccaggggggggacatggggaggggcttgcacagtgggcccgaggttcatgctttgtttccacctgccaggtgcaatttggtccctttcccatggccccaggaacccctgtgggctgcaacctttttatgccttgcaagtaacaagagactcccagagtccctcaccggtgcaagagttggcacatattaattaactaaaattctaatgatcttgctaccagcaataaaatcaagtaaggccaagtgaaactgggctttaaaaaggatggatttccaatacccctgtgcccactagaagcttcggaagggcctcgtccctctgctacagccctgggaggagccaggatccttgttggtctagctaaatactgttaggggagtgtgccccatctcatcattctcgaagatagcagagtcatagttgggcacccggtgattgggttcaaaaataaagactggtctgtctcttcccaatattttgtgaaaaggtaaaacgggaaag

SEQ ID NO: 115132 - DNA, 300 bp, Homo sapiens
caaacaaataaataaataaatggtcatgctaaaattgcagggttccagacgttccctctgcacctggcctagaagtaaacagacatatgtgcatccgtgtgtttgtttcagttttggccaaacggattcgtgttctcgagctgctgcggcggccacaaggaacccggatgccgctgagcttagcccgccagactctccggcttatggctcccaggcccaggcacccggcctgcctcgtccgtggcgcgcatgcgcaggcccagatcggcgctccgcgccggctgtgtcgccacctggcgg

SEQ ID NO: 115133 - DNA, 375 bp, Homo sapiens
atggcagttctgctgaaatttgtttcagaaggggacaacatcccagatgcattaggtcttgttgagtatcttaatgagtggcttcagatactcaaaccactttgctgtcctgtgatagcgagttatcatgagatctggttgtttcagtctgtagcacctcctccttccctctttcttcctcctgctccagccatccaggacgtgctggcttccccttcaccttttgcgatgactgcacagggaacacccactacaaagaagacaaacaggtttaacctcacgtgccaactccaaataattagtagtggccacctgaagcatcctgttgagaactcttggggctgcttacgaattcggcagcaaaaaatgcggtaa

SEQ ID NO: 115134 - DNA, 653 bp, Homo sapiens
tttttttttttttttttacttaggaaataaaattttattgtacaaaatttacatttggtgcatatgatgaaaagcatggcaaagagacccttaatctttttttctttgatatttactgtgaaagtaatttcctaataccagatcatacaattttttttgtatagaatgtttaacagctgtgttggtagtaagtgttttgggtataaggtataaaacagaaattagatcagaaaagtgcagaggggaaaaccactgccaaagagtaatctccaagaacttggtattttccacccgtgaggcagatactgtggggtcatcgctaagtggttttgagtattctgaaggccactcattaagatactccaacaagaccctaatgcatctggggattgttggtcccccttctgaaacaaatttcagcagaactgccatttggatttctttagaacagctttcatcatagagtgtttttgtgatacctcctcccggaatgcggatacaaaactcggaatcatctatttcaggaatgcaccggcttttttccatttcttcccagttaaggctctttattttattttgaacacttttttgcatggaaggtgtaagtaggtaccggaagggagtactacgaagctgcagatcattacgctgat

SEQ ID NO: 115135 - DNA, 494 bp, Homo sapiens
atcatcacctacaggaccctcttaagaaagtgtattgtgtactgaaaaacacaccagctgtctctggatgcttttctggttgccttgaagttcatgcaggtggaggacgtggacattgacgaagttcagtgtattctggctaacttgatatacatgggacacgtcaaaggctacatatcgcatcagcatcagaagctggtggtcagcaagcagaacccatttcctcccctgtccacggtgtgttgaaagtacacggagccccgaggacggactcggctggttctggagtctttgtgagacttctttgaaggaggctttgcgtgaaggctgctcggctcacttttcctaagtgtggttcctgaaggctgtctttgtaactttttgtagttctttgtgtaaaaagcgtattctgaatttatacacatggcatgttcttcattatatcttccaggatacatctatttttatatattaaatttgaatgtgttatcaaa

SEQ ID NO: 115136 - DNA, 802 bp, Homo sapiens
ttttttttcaaaggcaaataaaataagtttattgggatgtaaccccatcataaattgaggagcatccatacaggcaagctataaaatctggaaaatttaaatcaaattaaattctgcttttaaaaaggtgccttaagttaaccaagcattttgataacacattcaaatttaatatataaaaatagatgtatcctggaagatataatgaagaacatgccatgtgtataaattcagaatacgctttttacacaaagaactacaaaaagttacaaagacagccttcagcttctccaggatgaggaagattccgcagcgaatgaagaaggcctcgtgcttcgccagcgcctcgtgcagcagcagcaggttgccctcgctggtgaggggggaggcgcgtcagaaggagggtgagtttctcacagagcgtgcacgtcaactctcatcaggcttgcatttttaaaaccccaaacaggaaggatggcatactctacctcacagctctggttacttccgcaaactgcatcaggtgatactttttcaggagctccacagtgggcatgtgacccaatagcatttttactggaagcaaatagatcagaatcatccttttgttcttctgactagaacggtgacaatgctcaaaggcaaatgacaggtactcctcagcttgcttaaaatcgctgtcaaacatagccttgcgtccaacgtagtatttgtatgttactctctgtgcagtgctgtaatcgtctttcagggttgagctgtcaattgctctaaataagggtttacataaatggagtttgtg

SEQ ID NO: 115137 - DNA, 871 bp, Homo sapiens
atttgcttccagtaaaaatgctattgggtcacatgtccactgtggagctcctgaaaaagtatcacctgatgcagtttgcggaagtaaccagagctgtgagcgagggcaacctgctgctgctgcacgaggcgctggcgaagcacgaggccttcttcattcgctgcggaatcttcctcatcctggagaagctgaagatcatcacctacaggaacctctttaagaaagtgtatttgttactgaaaacacaccagctgtctctggatgcttttctggttgccttgaagttcatgcaggtggaggacgtggacattgacgaagttcagtgtattctggctaacttgatatacatgggacacgtcaaaggctacatatcgcatcagcatcagaagctggtggtcagcaagcagaacccatttcctcccctgtccacggtgtgttgaaagtacacggagccccgaggacggcctgatgaaaacctgggaattcctttttcacagactcggctggttctggagtctttgtgagacttctttgaaggaggctttgcgtgaaggctgctcggctcacttttcctaagtgtggttcctgaagcgctgtctttgtaactttttgtagttctttgtgtaaaaagcgtattctgaatttatacacatggcatgttcttcattatatcttccaggatacatctatttttatatattaaatttgaatgtgttatcaaaatgcttggttaacttaaggcacctttttaaaagcagaatttaatttgatttaaattttccagattttatagcttgcctgtatggatgctcctcaatttatgatggggttacatcccaataaacttattttatttgcctttaaaaaaaaa

SEQ ID NO: 115138 - DNA, 959 bp, Homo sapiens
agtagcaggtgtattaaatgtattttcaatttaagatggttttttaaaagaaatttttttttaaccaacaaagcaaaggcaaataaaataagtttattgggatgtaaccccatcataaattgagagagacatccatacaacgcaagcctatataaatctggaaaatttaatatcaaattaacattctgcgttttaataaaggtgcgcttaagttaacccaagcattttgatagacacattcaaatttaatatatataaaatagatgtattcctggaagatataatgaagaacatgccatgtgtataaattcagaatacgctttttacacaaagaactacaaaaagttacaaagacagccttcagggaaccacacttaggggaaaagtgaggccgagcagcctttcacggcaaagcctcctttcaaagaagtctcacaaagactccagaaccagccgagtctgtgaaaaaggaattccaggttttcatcaggctgaaatttagttacaaatgaagggagattactcgggggtgtgcttgaaaattctcagcctcagcatccctggggaaaagcgcctccaagagttccggcttcagggagccttggttgcagtaccggaccggtctcatcagcacaaccaaagtggaaagaaacaactgctcccccgtcctcggggctccgtgtactttcaacaccccgtggacaggggaggaaatgggttctgcttgctgaccaccagcttctgatgctgatgcgatatgtagcctttgacgtgtccctgcggggcagaaagggaggaatgcgtttacatttttggatctgagtcatgtcaaagatgctgggtgatctaattaatttggcattagcattcttccccaagagcggcacagttcagttcagcgggaacccaatgagtaaaaataaaaacaatcggccctctaaatccacggtgggtttcat

SEQ ID NO: 115139 - DNA, 4953 bp, Homo sapiens
ttttttttttttttttttccgcttttagttacatattcttctaagttttctgattacttaccaggtaattttcaaccatataagaaaaaggaaccaacactcagctctgtagaaatctaccttcttttagaaacctcaggcctctgcacccctttagacaactcatttacaaccacaaccttccatggcttctcacatgccagccaggggcaggggtaaaaacggcaatttctttacaccgaaaaggtccctttttatgtaccaaaacagaccctcccccaaacccacaacttttttgggcccttatggatggacttcgccatggagatcaatctcctaggtgtccccctggactggccccggacagggtctaggacaacacagggttaaaaagggacagcaggggtcgttcaactgcccacactggcctcagggtgttttcttcaaggcacggacaattctggcaatggggggactttacacgtggggaaaaggaatcaaactgtgcaggtaccctcagtcctctgccactacccagctcaatagcttgaagctcagaggatcaagtcaagtctctgtctcacttttaatctagcacacaagaggcacaaactcaggcagtacacgggtattgaagcatgcaacaggtcattggtaacaaaactcagttagattaagagtacattaaataaatctttgtagttgagtagaaatcacaaaacagttggtgaggacaggtctgtaggctcagctttacatcccaggtttttatacaccagcagccagattcacaattgatagatattgcaccggaaagatgtgtgcagggaaaagaaatcatcatcacatttaagtgttcatgataaaaaaataaaaacaaaaccagatatgacctccatgtagtacataaagtgccttcagaattggtgcatttacaacaaaaactgggttatttagctaccattagcaaacgcatacaaacaggagactaaacagatctggtttccacagttttgaatcaagcagtgccaagtttcattcaaaatgtctctactacaaacagcaaagaggaaatagaataaaagatgactgtacagcgcccaggaagggttaagtaatttctcggatgagaaatgggagtccaaccctgtctcaaatgtgttagaacacatgtaattacttctaaggaataatggtgtgattcctttcaagtcaacacaaaatttgtcatgctatgttacaattctctcagcctgtagctattagctaaatttgtacaaaaaaaaccccaaaacaaaaacgtaatatccagtttttcattctgagtatggaaaaaattatcattatgtctaatattatattggaaattctctcaaagtacttgtctgtaggtttttggacaaaaatttgccttccaattctaataaagtagagggtggaggtgtcagagtacttcaaaaataaaaatgtcattgacattaagcctggtataaaagtgaaatacaaaaaaaaaaaaaaatgctcacttttccaagtacatgagacatctttaatcataacgaaataaaatctgaaaatcggtctaaatcattttaaaaagtaaacatgagtcgtaatactatacctgttgagtgattaattccattcattgtcattagaaaggatgtaaaatatttattaagggctttgcctgcagaggcacaacataaatagcattaagtcctcctgaaatgtaattagtgtacacatcaaccagttgataatttgtggtgggaaaggcaggaactcaagctgggaccaggttcccgcatccgaacttggacgagtgcgtggtgaaggctcggctccagggaccatgcctgcagctgctctctgccatcgcctctgcaaaagtctgttaggcaaatgcaaaagtgcaagcagaacttgcttgaagaacaaccacccccgaggcacagggtgcttaatccaccccttcaaatccttgagcattttccacggccatgagaagtttctctcgtaaatcttcaaaggtttcatatggaggtaagtcaaggcgattaaagcatgtgtgagctctgggcagtttctcaggactgccccattgctctattgtaaacagctgaggaccattggaaccataaagttcggcaaatccattcataggtactcgcgatgtccctgtgacaaactgcagtaaccggatacgcttttcggcgtccatgagtagcacagccttccagaaccactgaatgacggggtggtttgggcagtagccgttcttgtaaatagaatgctgtctccagtcattcacatccacatcaccgaggccgcacatgagcaactccagctcattttcgtcaaaaattttaatcaaatcaataggaagtagttctgtgaatccctccaagaaggcgttcatctgcttctggaccctgttcacaaatctccactggatgactaagtcgatatattcccttttgttttcatttgtgaccattatttctgacccattgggcttcaaatccacttgatatgtctgtccaaagttttcttcgtctatgcagaacatgaggtccagctcagtagggtcattctccaggatccatttcaaagagttgtaatattcactatccacagattccatgtcattcagggttatctgctttcccaacatcatcttgtaaaatggtctaatgaagaaaccatctaagagcttcccatgaaatacggccagaccagcaactcttccaataaaagtgaagtaggacaaatgatcctcattacagaggcctgaattagggttgatctgaagggtgtagttgtccgtggcagagtactcaaagaggccgtagtaggggttgaacatctctttggacagtaagaagaaccattctctggccacacccccatagtcaagacctttctctgattcaaactcaatccacagtctagcttttaggacatctggtcttttcacggacataattctccgataggactcttcaaatatgttatttctgtgaagtttcatttcaaacctattggggatatcagcaggtttctttaatttcttcctgaagtagtcatatttctgcttaaattctctggagtaagggacagccggaccagtaatagctgggttctgcagtcttgggtcttcccactgagtaattttgctattatgatcaatataaaacgttcggccatccaagtgaattctttcttcccagccaggaggaagggggccaaggtcattggggtttaaagatgtctttgaccgcatatgtactggaaatttcaaacgtggatcttcccaggttgtagtctttgtgttatgatcaatgaagaagggccggccgtttggcgctatcctcatttcccagccgggtggcaagaagctctgtgtgactttgtgttgtggtttgggggagttgtaaggtgatggctgtggggactgtgggttggaaagggtgtctttcacagcccgacgtacgggtgagtccttggcaccctccagcggggcagataaagttactgttggcgagctgaggctacgaggccggcggatctgaggctcgattagatggttgttactgtttgtggctgatccggacgcaccatcttctgcaagctgcatgataggtcgagtccaagttgtggttcgattgttatgattgacatagtatgtgcgccccttagcatcttttctttcttcccagcctgaaggcagacccggcgtggtatgtacataggccactgatggcggtggtagatggccctgttctgcaactgcgtcggtgacactgcatgacctcaaccttgaggagggttctctttgaatcaaagagctgaactgttccccattggagtctggagtgatctgaagccttctgcttagttcctctgacagctcctgagggctggtccgagatcctggggaggccggtggtgggggcagagccagaccgagagagtctccagcgatattcacttcctctgaaatggtctcccaaggctcggggacatccccgccctccgagggctcgggctccaagtcttcgctgatgtgcctgcgggagcggaagcgccggtgtgctgcctcctggttgatctgtctgatgttattgtccgactccgaggacacgtccatcaggcttggtctgtgccactgagtggtccggttgttgtggttgacatagtaagttcggcctaaattgtccactttttcttcccacccgggaggcagaggaggaggaggaagttcctcttggtgctgagaagccgagtcatttgagtcaacaacttcccatccatgctccatgtcatccctctggtcactgttttcttcatcttgacctccattttttggcatataggccattttcaatcgcaaaaatcccttaactcgagacttatgacttcttggtctgaggagaaagtccttaaatgtatagggtcgctccatggttggatcttctgtcggaaggtgactaaggggcacgtccacctggcccaggaagtcgtctcgtgtcagtctattttcgtcaaatacttcaaataggagtctgtgattagatgggtttaccctgaaataaaattcttcattccattttgggttcagtgtctttttaattgtttttgtctggaccaaagcaagttctctattctcatccgctacgtacaatgaaagtttcacatacggatcacagattccaggcaggaagagctcgtctgaagtggggagcggagagagaggcaggtctagatgcagatggtctgtttcccctaacaacagcaacggcggcgaggagaaatcctggtctctgccagctcccggccaggtaaccaacagcctggagtgggaggtgccgtgctggggaggcaccgcgtggacagggctctgcagccgctcccgcccaggtagggccctgcgcagccacccacccgggc

SEQ ID NO: 115140 - DNA, 1560 bp, Homo sapiens
atgggatttcgacagagttttgaaaaaaaaaaaaaaaaaaaaaggcccggagagagctcccttcctggtcagttttgttcagatgaccgcagtcttcgggttgggctgtgcccttctgcttctcccggcagttccccgagcttgtctgctcagaggacccagggtccggagccccagcgtgggcgcatcacgggagagggtccttctgctccaggtaggcagggagacccccaaggaagcggcccttcccccggtgcctgttgccgagcagcaaccctccgagaggggaaggcgcagggtgctagccagaaccgagctccagcaccaccacctacctctcgcagcggacctgagtgctgcacacggtggaccgcatacctgcgacacgaggcctggcaccaaataggccctcgatcaagaatagcaaaacctcggagagagaaggagccttggtatacaggtttaccaaataccaaggggatcccacgactcaggtatgaggagggcgacccaggccacaacggctcgggaaccgccgccggtatccgcgtccgcagcgccgccagccaggcgagagccgtgtgggatcccagcgcccgcactcccgcccccgccaaggagccaggaatggcacaactagagaggagcgccatctctggcttcagctctaagtccaggcgaaactcattcgcatatgatgttaagcgtgaagtatacaatgaggagacctttcaacaggaacacaaaaggaaggcctcctcttctgggaacatgaacatcaacatcaccaccttcagacaccacgtccagtgccgctgctcatggcacaggttcctacgatgcgtgcttacaatctttcccttcctagaatggatgtgtatgtatcgattaaaggattggcttctgggagacttacttgctggtataagtgttggccttgtgcaagttccccaagctctacgaggacaggggccactctgcctcttcaccatttatccccagcctaacatctggtacatgacagagaacgcttcactacgagtgtatcgttctggtgaaacagtcctgaccaccaatgggtggctactgcatagagttccctgcagggaactcatagaagatggtgaaaccccaggagcagctgctctttgggaagccttgaaggaaaaaaactggcctaacaaaggggacgctgcctgaaatgttctcccagtggtcctatatggacccaggtttgtcaaactgtacccacacacatcgtgacagtaatcattaacggagatgacgcagaaaatgtaaggcccaagccaaagcccaggggatggagaatttgtggaagtcatttcgttacccaagaatgacctgctgcagggactcgatgctctcgtagctgaaaaacatcttacagtggatgccaaagtctattcccatgctctagcactgaaacatgcaaatgtgaagccatctgaagtgcccgtcctgaaattttaaggccaaagacgacactggccatttttgtaaatgagactaccaggccttcttcacaaaggctttgtattc

SEQ ID NO: 115141 - DNA, 535 bp, Homo sapiens
ggcggtttgcactgatcgcctgcggaattcggcacgaggaggcgccggtgtttcgagccgtggcaccggcatcggctgacactgctgcctccagctagttatttcgtcctcttccgttcttcacccctacaccttggaggtgaacttctcacctgagggctgtaaagactcgtttgaaaatggagagccaagaaccaacggaatcttctcagaatggcaaacagtatatcatttcagaggagttaatttcatgaaggaaaatgggtcaagcttgaaaaaacaaccgtacatggatcctactggtaaaactagaacttgggaatcagtgaaacgtacaaccaggaaagagcagactgcggatggtgtcgcggtcatccccgtgctgcagagaacacttcactatgagtgtatcgttctggtgaaacagttcccgacccaccaatggggggctactgcatagagttccctgcagggtctcatagatgatggtgaaaccccagaagcagctgctctccgtgagcttgaagagaaactg

SEQ ID NO: 115142 - DNA, 572 bp, Homo sapiens
tttttcaatatgtgtggtactttattttttatgttctttttttaaatctggggtattagtctgtgctttgggagaaatgcactagctctgcaattcccagctgggcaagtgtgtctctagtatctccacgcaactgatacactggtcccttccccatgtcctctccaggcactgtgggtcttgggaagtggttcttgtcagcccgagggacactgggttctccactgtccttcacaggaaattctagcttcctcagcctttgtgccaccacacttatagcttcctgtgcaaagtatttgacatccatgtcttcatcttgacctaacttctgtagtactggcttcacttctccctgtaaagcattggtatctagaattggtccaatcttttgtagagatttggccacattgaagcgaacatttgctacttggtctcctgccatttttaatacgatggggcagcatttgcttagtagttatttcctgaccacaggcctcagacagtggcattaatgcagaataaagtggtcattctatgcaagtaattaggatgatttgccattactaacactt

SEQ ID NO: 115143 - DNA, 873 bp, Homo sapiens
atgagttctgaaaggagccaggtctttcctgtggttggggctctggagaccatcagtgaccaggatgtggggaacagccaggtggacaccaaaaggcccgatggggtggcgctttccagggccccgagggaaaggcacctcagcacgaccctgggctgccccagctttctctgcccagtgccccatatacttgtaggctgctgctggacacccaactctgctggcacaactgagggcatcctggctgggaagcacaggctgaggaagctagaatttcctgtgaaggacagtggagaacccagtgtccctcgggctgacaagaaccacttcccaagacccacagtgcctggagaggacatggggaagccgaaagaaacagggacagggattcatccagctcgttgtagtctgaaggagccaggaacctacctgaatgatctgcgctgtgccctcttaagactcaggcggaccaaagagagtgcccgaggccaggaggaaaaaggctttagcacctcccctgacttcttcctggccctgagccactggatctccagccctaatttctccgctcagactcaaacttccacagaacccctccacctcttcccgcggctctttctccagaatggtatctggctcctgctccgtaagacaaataacgcgggcggaacaccccatgattatatttccaggaagggaatatgctttaaaagacttagagccattgctgacaatttacttctgaagaagcttatcttccattggtcctctgagactgtcctggtcctaacctctagccccggaaattctagaaagcctcctcaagggccagatattgtatggcagcaatgctttgcactctccacctgctga

SEQ ID NO: 115144 - DNA, 358 bp, Homo sapiens
acttcctcctctctgaggtccgtaaaagccctgggctcagccagagcagggcagaggatgacgggatgaccagctgcagagaggagtactctactgataactggagatgatgggcgaccaccttcagagagaaactgttagcagagaggagctgccgtctgctgagagcttcagagacctgcagacatctgaatgacttgcctgcagagaggagccactcttttcagggccttctctcagctgagagctgaacacccaatgggataattgcctacagagaggagccacccactcctcttgagctggttccaacaccaatataaacttctttttcacccttcaaaaaaaaaaaaaaaaa

SEQ ID NO: 115145 - DNA, 777 bp, Homo sapiens
atgagattcatactgacgttggggggttggtatgggtgtgatgatgatgtgaccctacaagatgagggacctacaaggactagccaaagggttggctcgtttactcagcccacagctttcaaaccttcacaggacggggagcatgcaggtgacaggatggctaaatgtttcatagctcagtgtgacagtcctctatatcccaagctcttgtttggcgtccaggaagaatcaggtcacacgaacaaattgaagggtggatggggtggtgggaagggccaggatggttttggaaaaggcaacattcgggcaggaaaacaggaatgcatgttctcactttgggccatgggtctaggcttgagggtgtggccctcgccggggaccaccccctcttctacccagtatttccctgcctcctgtccatatcacatgtacaaagatgaaagctccacccctggtccactgagctatggaaatttgttcagactatgggaagacagaggagaaatcctcaagacagttggaaatccaagaacaggagagaatgtgggcatccctggcaagtcattcagatgtctgcaggtctctgaagctctcagcagacggcagctcctctctgctaacagtttctctctgaaggtggtcgcccatcatctccagttatcagtagagtactcctctctgcagctggtcatcccgtcatcctctgccctgctctggctgagcccagggcttttacggacctcagagaggaggaagtacatgctgattggtccatag

SEQ ID NO: 115146 - DNA, 1273 bp, Homo sapiens
atgaaaaaggcgcttactgtggccacttcctcctttcccacctctgccctagaaggagcccttgggaatgcacagccctccattgtttgtctggtgctgtttctgccaaaactcccaggagaagcccggagccctgacccaagggcctttggaaaggacaaatccccgaggattttcatgggttccaatggagcctcggattttctaggtttgcttgagcgactcatcaccagcctctccatttgctcagaaaatgttcagaaacaaaatgaaataaagagacaaaggaaaaaaaaaactggcaaagggtcaggttttgagaattgttttcaagaagtcattgtattcagattggtggagcaggctactgtaaacccctcaggcagttcctccatggatgagacacaggggcctctggccatgactgtccatcttcttgccaactctgggcacggctcccttctgcagaggactctggaccagctcctggattgcatttgcccagaggtccggctctttcaggtgtctgaacgggccagtcctgtgaaatactgtgaaaagtcccattccaagcggtcccggtttccagggatgtccgtgttgctcttcctgcacgaaagcccgggagaggataggctatttcgcgtcctggactctctccagcattcgccatggcagtgctaccccacccaggacactcggggaaggctgtgtccctacttttttgccaatcaggagttctacagcctggacagtcagctgcccatctggggggtgaggcaggtagcactgtggctccgagatcctgagggcgacgctgtactgcagttttgatagctatgaaaacgccatcagactctacgagatgatcctgcagagagaagcgaccttgcaaaagagcaatttttgtttcttcgcgctctatgcctccaagagctttgctctgcagctctccctgaagcagctgcccccgggaatgtcagtggaccccaaagagtcttcggcgctgcagtgtaaggttcaagagatcggccagttagtgcctctgctacccaatccatgcatgcctatcagcagcaccaggtggcagactcaggactacgatggcgacgagattctgcttcagccaggcatccgccagggtcgccagctggctgctagcagctctgagggttacatccttcatgtggattccaagtgccttgccccaccatggcgcaacaaaatgtctggacttcagttagaccaactaggatcagattctcttctctaa

SEQ ID NO: 115147 - DNA, 240 bp, Homo sapiens
atgaagcagaagtgccacatcattgggaactatgatgatgatgacgacgatgacgacgatacacttattctggattctatcagcaaattaaataatatgagctatgaacaccaaggttctctcttcagccgcagtctacgatcccagttagatggactgctgatttctgtttttaacctgtcacatccaacacaaagtcaaggtacaactgcagacactttgctcttccaaggttactaa

SEQ ID NO: 115148 - DNA, 945 bp, Homo sapiens
atgcttctcgcactggctcatgaacacccccagctgtgcgtgcctgggacagagacccatgggaaatggccatttcctaggactaactcagggcagtccctccgcctgcccttcagcaactctccagaacaaaagccgaggtcacctcccctgctcttgaaaaccctcaatggtcaagaagctttgtcaaatcctcatgagccttgcacagtgccaggtgctgtacctaatggaggcagcgtagaaacagagaagagaaggcaacaggaagctgcagccacttcctttgagaagaggtggacagtgagcaagagtttagggggaaagaagctgaaaaaggacagtaccggtccaggggttggaacagctggaggactccctggtaccacagcacaaatggggctgggtgccccaggaacaagaacatacacacataccccaccttccacacaccttttttctgtaaacagacctcatttctcggaccacagaagtggacacatggctgagctgttccctgccttgggaacaagccaatctgcacagaagcagaagcagcacagagagcagaggcagggggacgggaaacacatagggaaaagacagcaggggaggcctgaagagagaaggaacaatggtaggaccacttcccaaatcaatgaaacgaccgtcctcttttgtgtcttgacttcaggtgtccggccgaacgacggagtcttttcctttcttgtcgatgcagtttctcagcctcctgttgcttcttctgctgttcagactaaaagagaaaatgaaatgagtagagggaaagagagaaaattctatacctcttttctggtaaccgtcaggctgccaacagtaccaccaccaatctcagaactgctgccaggagaaatgctgcccacaggctccaggggacatggtggggctgcctggactctgctctga

SEQ ID NO: 115149 - DNA, 732 bp, Homo sapiens
ttttttttggtatttctggatggtttaatcatgaatggcggtaggcagtgtaagaaaaaagttcctagagcatgataaaccttggtttctggcacaggataaacctttcatttcatggtgtacatttcacaatattaaaaaaaaaaccccaacctggttttcatgattaaagccgtggggaaaggacaatgttcccagggagcaacgactcgcaagcacaccccctggggctgtgcggttggccgtcggcggggccagcttcaaagtccaacccacaaggcacaggttttcaaatctttacctctgtgtacaagaacgtaacaagaaactttaaaaaaacgtgtgtttcccctcgtctgtgtttaaacacccctaacgatgaatcagtttggggaagacgtacccctcccctaaatcaacaggtaggacccacttccccaaatcaatgaaacgaccgtcctcttttgtgtcttgacttcaggtgtccggccgaaacgacggagtcttttcctttcttgtcgatgcagtttctcagcctcctgttgcttccttctgctgttcagacctctttaacgtgaatgtcaattgtttgctgccaacggtggtgtcggatacactcaatgtcccattttttgcttcaattttcaaacgatcttcaagggttttgttcatcagtttctgctttgtggcagaatctttgaagcttataaattcttctcctgctttgatctc

SEQ ID NO: 115150 - DNA, 453 bp, Homo sapiens
catagaccgctttggagacctctgcacgagctcgcccgggagatccgtgccctggagagaagcaaggagcagctgctctcggagagagctggacagaagtttgtattacaggctcgtagcaccggaggtttctgatggagcagacaagttgaggaaggccggccttgctgaacacagtggactgaccgggtctggacccctcccccacaggtgactgtgcactgcagcagagagaagaggaaggagtcagaaacactctactgagatcctcccggatagataacgtacgtacatattgatacctctacccggactctgtgattaatggtgaggtggggagcacccgagtcctctgaactgaacagctgtgcagcaacatctgctgggtggaatgctggaaggaccgcgtcacacaccaatcctagctaaagtttcacccaagtcttctgaaaa

SEQ ID NO: 115151 - DNA, 229 bp, Homo sapiens
gcatgatgttgctgcacagctgttcagttcagaggactcgggtgctccccacctcaccattaatcacagagtccgggtagagtgcacagtcacctgtgggggaggggtccagacccggtcagtccactgtgttcagcaaggccggccttcctcaagttgtctgtccatcagaaacctccggtgctacgagcctgtaatacaaacttctgtccagctcctgaaaagagag

SEQ ID NO: 115152 - DNA, 712 bp, Homo sapiens
gtaccagtctccccagacctgagctgcaggagggctgtgtgcttggacgatgccccaagttcagccggctacagtgggtcgcttcttcgtggagcgagtgttctgcaacctgtggtttgggtgtgaggaagagggagatgaagtgcagcgagaagggcttccagggaaagctgataactttcccagagcgaagatgccgtaatattaagaaaccaaatctggacttggaagagacctgcaaccgacgggcttgcccagcccatccagtgtacaacatggtagctggatggtattcattgccgtggcagcagtgcacagtcacctgtgggggaggggtccagacccggtcagtccactgtgttcagcaaggccggcctttctcaagttgtctgctccatcagaaacctccggggctacgagcctgtaatacaaacttctgtccagctcctgaaaagagagattctgcaggaagccagttaccatgttgtgatggtcctcaagcagtccatgaagaaggactgaggtttcctgacaaccactgggctatgtgagaaagccttccagaagcagattccccagcccagccgagtattcagataactacagccccacctcgaatctttcttgcagcctgatgagacctcaagccagaaccacacagctaaccatttctgaatttccatgcaataaatgcataatgttataagccaaa

SEQ ID NO: 115153 - DNA, 474 bp, Homo sapiens
atggcagaggcactgaggatcctccagatgcactgccaagagaaggaaagcgagctcagagatgctggagcagcgactggcccgggagatccgtccctggagagaagcaaggagcagctgctctcggagagtgagcctcccgcccaggctgaaggcggagctggagatattcggggagcaggtccgagcgcccccgaggtcggggccggcgagggagagtgctcagagtaccacgtgcttcagggaattgagctagaagcctactggcaactgtctgttcctcagagcaggctccttcatcacagcggcagctcacagatgttctcggtgctcagctcctggtctcaaaggcagctggtctctctagagttgaaaggagctggacagaagtttgtattacaggctcgtagcccggaggtttctgatggagcagacaacttgaggaaggccggccttgctgacacagtggactga

SEQ ID NO: 115154 - DNA, 335 bp, Homo sapiens
tcatgcggaggaatccctttggtgtggacatctgctgccggaaggggtcccgaagccccctgcaggaactctacaacccaatccaggtgcagaggcggctggccatcagggtggacggtttcctgggacccagtgaagagtatggcgcttttgtcccaagtctccgattcatgctgatgcccgatgtttcccccagaagttccttccggaaagcgataaatgagctggagtttgaaaagaagtgtgacttcttcaaggaactggcagatactaggggagttcagaagcagctgacatccaattattcacggtcatgggggaaagggattgaatga

SEQ ID NO: 115155 - DNA, 633 bp, Homo sapiens
gcggccgcgaagcgactccgatcctccctctgagccttgctcagctctgccccgcgcctcccgggctccggtccgcgcggcggggtccctgctcctgcgccccgggcgcgcttcccggacatcccggtccccgcagccaggacaaagccatgaagccagcgctgctggaagtgatgaggatgaacagaatctgccggatggtgctggccacttgcttgggatcctttatcctggtcatcttctatttccaaagtatgttgcacccagtcatgcggaggaatccctttggtgtggacatctgctgccggaagtggtcccgaagccccctgcaggaactctacaacccaatccagctggagctctcaaacactgctgtcctgcaccagatgcggcgggaccaggtgacagacacgtgccgagccaacagcgccacaagccgtaagcggagggtgctgacccccaacgacctgaagcacttggtggtggatgaggaccacgagctcatctactgctacgtgcccaaggtggcctgcaccaactggaagcggctcatgatggtcctgaccgggcgggggaagtacagcgaccccatggagatcccggccaacgaggcacacgtctccgccaacctga

SEQ ID NO: 115156 - DNA, 315 bp, Homo sapiens
ttaatttttaatacaacatccccagtggtaattctgaaagtgatttaaatgctttaaatatagcataaatgaccaggtttttatttgttgttgttttttttccaggcttaattcactttatttttcttgtgtaaaaaccctatgttgtagccacagctggagcccgggtcctctgtacggagactctagtgtgggtcttgacgaggtggtcagtgaattcccgatagggagacttggtgaatacagtctccttccagaggtccccggtcaggtagttgtaggtcttagagatggcatcaaaggtggcctcgtgcc

SEQ ID NO: 115157 - DNA, 1239 bp, Homo sapiens
ctagacataaaggttctccaaatccctactagactcaggagtccagctggcttcacctagtggatctcgcacaggggccacaggtggagctgcccacagtccggcccgtgcacccgcactccacagcccttgggcagtcgatgggaccaggggcaggctggctggaacagcaggcttatggagtcccaggcctgcattccatttcaaggtatccctctctctgcctttttcttgtgtttcctctccttttcctgggcctcctcttggtccttctccaagaaaacaccaaatggcagatgatgctggtgcaggagtagggggccggaggccccgggggcctaggatggggaacgtggtggcttccgcagaggctttggtagtggcatccggcaccagggttgtggctgtggacagggccagggccaaggccgtggagttcgtggaggcaaggccgagtataaggagtggatgaccgtcaccaagctgggccacctggtcaaggacatcaagatcaagtccctggaggagatctatctcttctcctttttcaaaacctcgtcctctctcaaggacgaggttttgaaaattatgctggtgcagaagcagacccataccagccagtgtaccaggttcaaggcgtttgttgccactggggactacaatggccacatcagtctgggtattaagtgctccaaggaggtggccactgccatctgtggagctatcatcctggccaagctctccattgtccctgcgtgcagaggctactgggggaacaaaatcagcaagccccacaccatcccttgcaaggtggcaggctgctgtggctctgtgctggtgtgcctcatttctgtgcccaggggcactggcattgtcttggccccatgtgagggcgataggggattgagaaagtcctctccagcaagcctgtcccctgagtcttgtaaggatggcagccactctagaagcttttaactggctgaagggcgcagtgttttgtttaattaaaaaaactgtgccactactcggaaagatacacaatgttgtgaattcctgcaggggggattctgctctgttagtgaatgtttcctcactgctggctagggaattcatctgaagttgcttgccattccaccatcttccagctcctaaaatgctggtgttattgtgtccggaatttagtccttctggtgggttcttggtcttgctgacttcaggaatgaagccgtggaccttcat

SEQ ID NO: 115158 - DNA, 1438 bp, Homo sapiens
  misc_feature (1)...(1438): n = a,t,c or g
atgtccgagtatggcagattgcattttcccaaaaatggccacaacagtatcactggtcccacctgctttcccccttgctgtgggcttgcttttctgaacgccgtcattccccttgctatggcatccatttcctctcactcaacctgggcaagcctttgtgacttcctcgaaactagaatatggtggaaatgtcacggcgtgacttgcaagactggatttaaaaagcgccgaacactgtctttctgtgaagaacctgaccgccatgttgtgaggaagcccaggcatctgaacaaaggccacatgcaggtattctggctaatagctccaactagggccccaagccagcccctggcatcgatcatcagacatattgataatgatgtgggttcaagaaactctcactttcctcttaatacgaaagaaaacaacagtgcaaatgtgatgatgtatgataacggacaactagggagttatggggtgggcatggaaacgtgctgcaggtaccaagcaatccaaagagagcatgggtctttcagaggctgtggtgagttggaacagccaaagctggtcgtcaatggaagcctagaagaacgcaatccacaaaggaaaagaggctttggtagtggcatccggcaccagggttgtggctgtggacagggccagggccaaggccgtggagttcgtggaggcaaggccgagtataaggagtggatgaccgtcaccaagctgggccacctggacgaggttttgaaaattatgctggtgcagaagcagacccataccagccagtgtaccaggttcaaggcatttgttgccactggggactacaatggccacatcagtctgggtattaagtgctccaaggaggtggccactgccatctgtggggctatcatcctggccaagctctccattgtccctgcgtgcagaggctactgggggaacaaaatcagcaagccccacaccatcccttgcaaggtggcaggctgctgtggctctgtgctggtgtgcctcatttctgtgcccaggggcactggcattgtcttggcccctgtgcccaagaagctactcatgatgactggtatcaatgactgctacacctcagccaggggctgcactgccaccctgggcaactttgccaaggccacctttgatgccatctctaagacctacagctacctgacccccgacctctggaaggagactgtattcaccaagtctccctatcaggagttcactgaccacctcgtcaagacccacaccagagtctccgggcagggactcaggcttcagcttgggctacaacataggggttttaatacagaaaaataaagtggattaagcgggnnnnnnnnnnnnnnnnnggggcgcccgttttaaaggaaccaagtttacggccccgggcgggcaagggaatattttttttaagggggcccca

SEQ ID NO: 115159 - DNA, 733 bp, Homo sapiens
gaattccgtatcccccggctgcaggaattcggcacgaggcgcaccaggttcaaggcatttgttgctatcggggactacaatggccacgtcggtctgggtgttaagtgctccaaggaggtggccaccgccatccgtggggccatcatcctggccaagctctccatcgtccccgtgcgcagaggctactgggggaacaagatcggcaagccccacactgtcccttgcaaggtgacaggccgctgcggctctgtgctggtacgcctcatccctgcacccaggggcactggcatcgtctccgcacctgtgcctaagaagcctgctcatgatggctggtatcgatgactgctacacctcagcccggggctgcactgccaccctgggcaacttcgccaaggccacctttgatgccatttctaagacctacagctaccctgacccccgacctctggaaggagactgtattcaccaagtctccctcaacaggaactcactgaccacctcgtcaagacccacaccagagtctccgtgcagcggactcaggctccagctgtggctacaacataggggttttataccagaaaaaaataaggtgaattaagcgtgaaaaaaaaagacaactaaaaaggggccgccgtttttaagggatccctgaggggccccaagttacgcggtgtttgcagtgacaaagcctttccctttcagggagccgatttttaacctccctggagacttt

SEQ ID NO: 115160 - DNA, 496 bp, Homo sapiens
  misc_feature (1)...(496): n = a,t,c or g
ccggnaggaggctcatgcgggatttcaagcggttacaagaggacccacctgtgggtgtcagtggcgcaccatctgaaaacaacatcatgcagtggaatgcagttatatttgggtacttttaaactagtaatagaatttnctgaagaatatccaaataaaccaccaactgttaggtttttatccaaaatgtttcatccaaatgtgtatgctgatggtagcatatgtttagatatccttcagaatcgatggagtccaacatatgatgtatctnctatcttaacatcaattcagtctctgctggatgaaccgaatcctaacagtccagccaatagccaggcagcacagctttatcaggaaaacaaacgagaatatgagaaaagagtttcggccattgttgaacaaagctggaatgattcataatagacaactggtctgttaatctttttcatcattgttgtgtataatttacctctcattagaaaggctancaaatttt

SEQ ID NO: 115161 - DNA, 450 bp, Homo sapiens
  misc_feature (1)...(450): n = a,t,c or g
aaatcttaacatcaattcagtctctgctggatgaccngaatcctaacagtccagccaatagccaggcagcacagctttaatcaggaaaacaaacggagaatatgagaaaagagtttcggcccattgttgaacaaagctggaatgattcataatagacaactgttatgtgaaagtttggcgctggaggatctacctctgagatggctcattcacatggctgtttgcagcagatctcagttcattactacatggatctctccacaagactgcttgagtgtcctcacatggcaggaggtcttccttcccgtctctattaaaaatacaaaaattaggcagggcgcagtggctcatgcctgtaatgccagcactttgggaggctgaggcgggtggatcatgaggtcaggagattgaaaccatcctggctaacacagtgaaaccctgtctctacta

SEQ ID NO: 115162 - DNA, 2634 bp, Homo sapiens
cgtccctctttctccaccccgccgagcctaaactagtgacggggagggagacgggatagtgtttctgtttccgtggtctttgaatccacaacctctagtctgaacacagagaacacaaatttgtcgattacttcaggaagcccagggggaaccgcgccccgctgaagggctcggggaaggcgcgctcccgcgtcccgccccctcctcccccagcactcacactgtggtagcggcggagggcggagggatccggaggcggcggagggagacgtcattgcagggttgtttgtcagtctcggcggcggcggcggcggcggcggcggcggcggcgatccacagtgattcggccgccgcccaggggggagggggggctgcgcgggacttttttttttttcagactgaccgtaggggcagctgcggagcatgttcgaccccggcccggaggaggctcatgccgggattcaaagcggtaacaagaggacccacctgtgggtgtccagtgcgctaccatctgaaaccaccatcatgcagtggaatgcagttatatctggacccgggagggacaccttttgaagatgggtaccttttaactaagtaatagaattttctgaagaatatccaaattaaaccacccaactgttagggtttttatccccaaaatgtttccatccccaaatgtgtatgcctgatggtagccatatgtttaagatatcccttcagaatcgatggagtcccaacatatgatgtatccttcctatccttaacatcaattcagtctctgctggatgaacccgaatcctaaccagtccagcccaatagcccaggcagcacagctttatcaggaaaacaaacgagaatattgagaaaagagttttcggccattgttgaacaaagcctggaatgattcataaatagacaactgggtctgttaatccttttcatcattggttgggtataattttacctctcatttagaaagggctaacaaattttaaagtgcacagggttttaaggattctgcagaaaaaaaaagaaaaaagtccttccagtttaggaacctacaaaagcttgtgtatcttgattaatgtactttttattgcatgggtgtggagctaagttattgctgcataaatttgtaatatatcctgtttgtatttttttccaagtgtataatgttggtgtggagttttcatgacagaatatacacattttgtaaatctgtacttttttcaaatattgaatgccttatttttgaattctttagatttttaaattggagaaaagcacttaaagttttttatatatgaatattacatgtaaagctgttaaaatacataacttcagtgcaagagactttgtcacttatttccttatgtgtgtaggaggggttaataagtctctagctctccatctattgatagtttcatttacaatttcaaaagaacattcttatattttatcaaggaagtcttcaaatttgattctaaatagcgattataatctccaactttattttgaatgtacctctattagtttcaattgagtaattctagacataactggtttgactctgtccaactctgtatttaggccatttgttacagtttcttcatgcattacttactgttaaaactgtaccttttgcgatttcacagttggcacttctgccatgagcagagaactgatgcgacttgttttgctgcttggtagcactttaaaaaattttttgattaatgaagaaagtaaaaccataaacattgccaaaaattcatgccccagtattagcaatgaattagttgaattggtttgagaaaggcacatattggagggaaatcttggtgtaacttaaatatttgaaaattacctttaatgcaatgcatatctgtttattctgggaaatgttttaatgccagggcctgctgagttgcttcttcttgtggagattttttttttaatctcctgagttgtataaaagttgtactgcatcttagtttactggataaatttaaaacacagtattgtagaaagctaatacaaaactatcctatgccttcaaatagtatagaaaatggaaaatatacaagtaaattctgttgaaccacctgtgtagtctctctagtagttaaaacagctattttagtaaccccaagagtttcttctcatatccataaaattggattacagtatggcaatatctacagcttctattcattatgcaacgtttaacattgattggataaatgcttataggctgggccaggtggctcccacctgtagtcccagcactttgggaggcaaaggcgggaggatcacttgaggccaggactttgagaccagccagggcaacataataagacttttctctactttaaattttttaaaaaattagttgggcatagtggcacttgcctgtagtctcagctacttaggaggctgaggtggcagaatagcttatgcctaggaggttgaggctgcagtgagctgtgattatgccattgcactccagcctgggtgacagagcaataccctgtctttaaaaataaaagctattacttggcaaaaaattccgcactatataattcgcacacattaattagggtttatgtaccatacaaaaaaaaattaattagggct

SEQ ID NO: 115163 - DNA, 1852 bp, Homo sapiens
gactaggaagctctgataggagtatctgtttccagaagaagcaattctttggaacagacagccaagcccttggtgacaggcatgctggagagcaaagaggaggatgtggaggtagaaaagtggtctcctttgagtctgcatcttcatacactgaagggatatggacaggtgcaagaggccagatactcacccaaggtgaggccttcaaacttatgtactccccatggcttttcacaggtgagtctgttgaaatagtcagtgaggtcagagtagaagtaggagaacttaacatcataaaagactggggaagagagagtgtggagaaaggaggggcagtaatatccatggaagcagagagagtaaaaggccaagctatgatagcaactggtggagtgataactggcctggccgccttgaaaaggcaagactctgccagatcacagcagcatgtcaacctcagcccgtctcctgctacccaagagaagaagcccatcaggcgccggccccgggcagatgttgtggttgttcgtggcaaaatccggctttattccccatctggtttttttcttattttaggagtgctcatctccattataggaattgctatggccgttcttggatattggccccaaaaagaacattttattgatgctgaaacaacactgtcaacaaatgaaactcaggtcattcggaatgaaggcggtgtggtggttcgcttctttgagcagcatttgcattctgataagatgaaaatgcttggcccattcaccatggggattggcattttcattttcatttgtgctaatgccattcttcatgaaaaccgtgacaaagagaccaaaatcatacacatgagggatatctattccacagtcattgacattcacacgctaagaatcaaggagcaaaggcaaatgaacggcatgtacactggtttgatgggagaaacagaagtaaaacagaatgggagctcctgtgcctcgagattggcagcaaatacgatcgcctctttctcgggttttcggagcagttttcgaatggacagctccgtggaggaggatgaacttatgttaaatgaaagtaagagttctgggcatcttatgccccctttgctctctgacagctctgtgtctgtctttggcctctatccacctccttccaagacaactgatgataagaccagcggctctaagaaatgtgaaaccaagtcaattgtgtcatcgtccatcagtgcttttacattgcctgtgatcaaacttaataactgtgttattgatgagcccagtatagataacatcactgaagatgctgacaacctcaaaagtaggtcaaggaatttgtcaatgggattcccttgtggttccttttgcccaacaccagtgaatccttccagcccgtcagcacagtgctaccaaggaataattccattggggagtcgttgtcgagtcagtacaagtcatctatggctctcggacctggggctggacagctcttgtctcctggggctgccagaagacagtttgggtccaatacatccttgcatttgctctcgtcacactcaaagtccttggacttagaccggggtccctccactctaactgttcaggcagaacaacggaaacatccaagttggcctaagttggatcggaacaacagcaagggatatatgaaactagagaacaaagaagacccgatggataggttgcttgtgccccaagttgccatcaaaaaggactttaccaataaggagaagcttcttatgatttcaagatctcacaataatttgagttttgaacatgatgagtttttgagtaacaacctaaagaggggaacttctgaaacaaggttttaa

SEQ ID NO: 115164 - DNA, 3000 bp, Homo sapiens
atgctggagagcaaagaggaggatgtggaggtagaaaagtggtctcctttgagtctgcatcttcatacactgaagggatatggacaggtgcaagaggccagatactcacccaaggtaatcattgagatttggaaaatgggagttgattggtccacaggcctagttttaaaggcagagcagcattcttttgcatttggtgttatggaaacaggaatcagaataagaaaaaagaaaacctcaaatgaaagcaaatctggaggcccctccccatctcaaatgggaggctctgggaacctgattggaagaggaagaagaaagggaggagttaaaaataactgtaaagagccaaatctgagaactgaccctgctaaaaaagtcagacaagtcaagtggtgcagctggtgtgtgctagaaggtgagtctgttgaaatagtcagtgaggtcagagtagaagtaggagaacttaacatcataaaagactggggaagagagagtgtggagaaaggaggggcagtaatatccatggaagcagagagagtaaaaggccaagctatgatagcaactggtggagtgataactggcctggccgccttgaaaaggcaagactctgccagatcacagcagcatgtcaacctcagcccgtctcctgctacccaagagaagaagcccatcaggcgccggccccgggcagatgttgtggttgttcgtggcaaaatccggctttattccccatctggtttttttcttattttaggagtgctcatctccattataggaattgctatggccgttcttggatattggccccaaaaagaacattttattgatgctgaaacaacactgtcaacaaatgaaactcaggtcattcggaatgaaggcggtgtggtggttcgcttctttgagcagcatttgcattctgataagatgaaaatgcttggcccattcaccatggggattggcattttcattttcatttgtgctaatgccattcttcatgaaaaccgtgacaaagagaccaaaatcatacacatgagggatatctattccacagtcattgacattcacacgctaagaatcaaggagcaaaggcaaatgaacggcatgtacactggtttgatgggagaaacagaagtaaaacagaatgggagctcctgtgcctcgagattggcagcaaatacgatcgcctctttctcgggttttcggagcagttttcgaatggacagctccgtggaggaggatgaacttatgttaaatgaaggtaagagttctgggcatcttatgccccctttgctctctgacagctctgtgtctgtctttggcctctatccacctccttccaagacaactgatgataagaccagcggctctaagaaatgtgaaaccaagtcaattgtgtcatcgtccatcagtgcttttacattgcctgtgatcaaacttaataactgtgttattgatgagccaagtatagataacatcactgaagatgctgacaacctcaaaagtaggtcaaggaatttgtcaatggattcccttgtggttcctttgcccaacaccagtgaatccttccagcccgtcagcacagtgctaccaaggaataattccattggggagtcgttgccgagtcagtacaagtcatctatggctctcgttttcgtggctggacagctcttgtcttctggggctgccagaagacagttcgggacttatgactctgatgatcttagatatattacattccaagtgaggaatgcttccaccaggagacacagcagtgggttcacaaaactgaaagttgaagctgccacctgcctctttgtacaactcatgccagccaattttcaggcaaagaagggagctacagtggtggctgggaagatcgatcctgattatcaagaggaaatggggctgttacttaatgagatacctgctaaaccccttggactgataaaccttaatgtgccagctctcctggctttcaaaaaaaaaatcatggcatgcccttgctctcctcctgctggactcctggagcatgggcccggtgactccagccacagtcttcacccagtcctgaggagctccttcttctcagtccctacttccctcaggactgctccacttcttcaagaccacggatcaacaaggctaaaaggacccaaagagaccaatctagaagtcccagaaaagagagttccagttttcgtgttctctttcctgagggacagtggaggcctagggctcaaaggagatgtaaaggggagagaaatcaacaaggtagaggaggctctttccctctaccttgcatcctactatggggccttgcattctaccgtgctatacgtgctgcagacaatcaatgcagaaaaagcatttgacaaaatccagcatcgctttatgattaaaacccccagcaaaatcggcatacaagagacatacctcaatgtaataaaagccatctatgacaaacccatagccaacataatactgaatggggaaaagttgaaagcattccctctgagaactgaaacaaaacaaagatgcccactctcatcatttgtattcaacatagtactggaagtcctagccagagcaatcagagaagagaaagaaataaagggcatccaaatcggtaaacaggaagtcaaaccgttgctgtttgctgatggtatgattctgtacctagagaatcctaaagactcctccaaaaagctcctagaactgataaattcagcagtttcaagatacaaaattaatgtacacaaatcagtagcagtgctatacaccaacagtgaccacgctgataatcaaatcaagaactcaaccacttttacaatagctgcaaaaacaaaacaaaataaaataaaatacttaggaatatacctaaccaaggaggtgaaagacctctacaaggaaaactataaaacactgctgaaagaaatcatagatgacacaaacaaatggaacacaacccatgttcatggatgggtcaaatcaatattgtga

SEQ ID NO: 115165 - DNA, 426 bp, Homo sapiens
cctcgtagtccctagtcagtgtggtggaattcggtgaatacagcaagtaagacctccctcttgccagaatccatccctaagacaagccaaggagatgccggagatgacgcgtttccagtcctggaagagggcctctagaagattcaggaaaagggggagaacagtcacatttcgcctctcaaaagaagcattgccttgacagatccatgcaaattgtcgcatccgacgggtttacttctcagacagactctactcagaagatgagctgccggcagagttcaaactgtatctcccagttcagaacaaggcaaaggtaagccagtcttccccagaggaaggtccaccagtgagtggggggagctgtgttcctggaaggtgctctggtctaagaattcagctgcagagcctctctgtgttgacactttg

SEQ ID NO: 115166 - DNA, 1414 bp, Homo sapiens
cgtacgctcagcttggcacgaggctggaagaattcccggcgcggacggtagatgctgtggtttttgttctgatctcgcagcttagggagctgaaggatcgcgggacttaggcgttgccgcgttccgagtccggccatcagtggctgcagatccggaggccaggagctcaaccacccttcttcggaacagggccggcctgctgctgtgcccttgacgctcggtgcctgtatctactccggggcctaggtcggctccgggggcggcttaggagaaggccgccggcgaagatgttcaaaaacacgttacagagcggcttcctctccatcctctacaagcatcggcaagcaagcctcttgcaaatctggggacaaaaaggtacggaatgggccacattcaaaagaattcactgattaatggacatccagttccctgggtgcttaggagatttgaaggggacaaatgttaaggcaccacatattttcaacatggcccttgcaggaccccaaggaagacgttggggatttaaaatttccttttccttggtcatggtttatcaaaaacctgaagaagtattttaaccttcgaagtgcaggtactagatgccaataatgtgcgtcgtcgctttcgggcaagtaactaccagagcaccaccccggggtcaaacccttcatctgcacccatgcccatgcgggttgaatgacggctggaaccaagattcagttcaactttgctagactttcacacggccgagcatacggcacccaattacatcgagacccctcaggagtgcagatcccatgcaaaattggtcgcatccgacggggtttacttctccagacagactctactcagaaagatgagctgccgggcagagttcaaactgtatctccccagttccagaacaaggcaaagcaataactggaattgtgactcgagggaatagaccccctgggatgtgactcttctttttaaaaggaaacctatgtggaggaccgatgccaaaaacatatttatcttagtttgctctgcctgtagttctggttatttatacttggtgttgctttgtcattggacaccgggtgaacatgcccgtaactctgtgactgccattgtaagtgccagtgggggtaagccagtcctgtgagtggcgtcatgacacgctggagcttattccgccgccctgccccccagtgtggggggagatacctttaccatgaacttacagaattaaagatggcccataaaggaattcccagaaccaatatttcttcctgcgggtttattctatgttttatatattatctaaatatatgtatatgctgtgtcatactcataatctggaaatgaataaagtgatatattacctggtttgtaaaaaaaaaaaaaaaaaaactcgagggggggcccggtaccc

SEQ ID NO: 115167 - DNA, 480 bp, Homo sapiens
atgaccctagagaaggtggacgccactgtgttcacagacagtagagctttctcgagcagggagtatgaaaggccggtgcagctgttaccatgggacagatgtgccgtgggctcaggctttacaagcaaacacctcagcgcaaaagctgaattgatggccctcactcaggctctccgatggggtaaggataacgtattaacgtttacactgacagcaggagcagaaagtgtcaaccttgcagcagatttggacactctgggagccaaactggatgtggaagctccaaagctaagagaccagacagactccatcttggctctttcactggcagctccctcctcaaggcttaacttgtgcaagctgactcccagcacgtccaagaatgcaattaactataagatactgtggcaagctatatcagcagttcccaggaattcatctgatgataacgcccaaagccccgggtctatcaccttgtaa

SEQ ID NO: 115168 - DNA, 730 bp, Homo sapiens
ctgtgcggtggcattcttaatatctcagtataacccccttgttataattgaggaatcaacgatttgattccccaataacacaagtggggaatgtaatgcccaaccttgtttttactaaccctgtttttagactctcccttttcctttaattacccagccttgtttccacctgaattgactctcccttagctaagagagccagacagactccatcttggctctttcactggcagccgcttcctcaaggacttaacttgtgcaagctgactcccagcacatccaagaatgcaattaactgataagatactgtggcaagctatatccgcagttcccaggaattcgtccgattgataaacgcccaaagccccgcgtctatcaccttgtaatagtcttaaagcccctgcacctggaactgttgtactttcctgtaaccatttatccttttaactttttgcctactttatttctgtaaaactgttttaactagaccctcccctcccctttctaaaccaaggtataaaagttaatcaacgccctgccttggggccgagagaattttgagcgttagccgtctttcggtcgccagctaataaatggactcttaatttgtctcaaagtgtggcgtttttctaactcgcttgggtacaacaaggccaaggtggaaggatcacttgaagctaggagtttgagcaacctgtgcaacctagtgagacccccatctttctaatag

SEQ ID NO: 115169 - DNA, 480 bp, Homo sapiens
  misc_feature (1)...(480): n = a,t,c or g
attcggcacaggaataagaaggggaagactatctccctaacagactttctggctgaggatgggggtactggtggaggaagcacctatgtttccaaaccagtcagctgggctgattgaaacggatgacctggaagaagatgtttcgaccacttggcacagtaacgatgacgatgtgtatagggcgcctccaattgaccgttccatccttcccactgctccacgggctgctcgggaacccaatatcgaccggagccgtcttcccaaatcgccaccctacactgcttttctaggaaacctaccctatgatgttacagaagagtcaattaaggaattctttcgaggaaaatccagcttccaagttcagttctgcaagcaagtatgctggctctctnttgttgatggtgaagatgaaaaattaaggggagaagattatggccgattagacntttacatcctgtgcttttctcnagtttctgtncg

SEQ ID NO: 115170 - DNA, 504 bp, Homo sapiens
agcgtcataatctttatttccagcttgcttttcatgatggcatatccctacatggaactttttagtggattttgtttgttttttgtatttttgtgtgctgtagaggatgtggaaagaagggcttcaggaaggaagtctgggttggggtgaggttagtttccctcagtacatgtgggcacagttttcttcagcttaagggaaatcttaggagagggacattgatacttttacttgcctttaatttgtttacattactgcccaagcagatgaaaataaagtagatgggatgaatgccccaaaaggccaaactgggaactctagccgtggtccaggagacggagggaacagagaccactggaaggagtcagataggtatgcttgttctctttctcatctttcctctgatccacatgtttgtgtaattaagaaattaagttcttggttctcagagcactgccagatcgctcattgtgagcaaactaaagtcagccaacgtagacagtt

SEQ ID NO: 115171 - DNA, 2566 bp, Homo sapiens
cgacccacgcgtccgtttctctctcccacatggcggcctcagcaaaaaagaagaattagaaggggaagactatctccctaacagactttctggctgatgatgggggtactggtggaggaagcacctatgtttccaaaccagtcagctgggctgatgaaacggatgacctggaaggagatgtttcgaccacttggcacagtaacgatgacgatgtgtatagggcgcctccaattgaccgttccatccttcccactgctccacgggctgctcgggaacccaatatcgaccggagccgtcttcccaaatcgccaccctacactgcttttctaggaaacctaccctatgatgttacagaagagtcaattaaaggaaatcctttccgaggatttaaatattaagtgcaagtgccgtttacccacgtgaaaccccagcaatcccagagaggttgaaaggttttggttatgctgaatttgaggaccctggattccctgcctcagtgccctgaatcttcactgaccagtctctaggtaacaggagaattctgagtggagcgttgctgatcaagcacaggatagagagagggatgatcgttcttttggccgtgatagaaatgggggttctggcaaaaaaaagtacagagtgggagggctggtctctgctacagacagctttgatgactacccccctacgaagaggtgatgatagctgtgggagacaagtatcgagttgggttttatttcagaccggtttcgggatggggtatcgggttgggtttcgggaatggccccgccaggaataggattcgatatggtggccgggatcgctatgatgaccgaggcagcagagactattgatagaggctatgattcccggataggcagtggcagaagagcattttggcagtgggtatcgcagggatgatgattacagagaaggcggggaccgctatgaagaccgatatgacagacgggatgatcggtcgtggagctccagagatgattactctcgggatgattataggcgtgatgatagaggtcccccccaaagacccaaactgaatctaaagcctcggagtactcctaaggaagatgattcctctgctagtacctcccagtccactcgagctgcttctatctttggaggggcaaagcctgttgacacagctgctagagaaagagaagtagaagatcggctacagaaggaacaagagaagttgcagcgtcagctggatgagccaaaactagagcgacggcctcggaagagacaaccaagctggcgaagtgaagaaactcaggaacgggaacggtcgaggacaggaagtgagtcatcacaaactgggacctccaccacatctagcagaagtaagtcagaccaggatgcacgaaggagagagagtgagaagtctctagaatatgaaacactcaataaaggaggaagattgccactctccaacttctaaacctcccaaaacctgatcagcccctaaagggtaatgccagccccctccaccaaagggagaatgcttgggtgaagccgaagttcttaaccctcctgcttcgatctcaagagctcaagacacagagcaggaagtcccctaacaagtggtggggaaaatgtagctccaggctcaaccatctgaggaaggaccaggaaggaaagatgaaaataatagtagatggggatgaatgccccaaaaggcccaaacttgggaactctaagccgtggtccaggagacgggagggaacagagaccactggaaggagtcagataggaaagatgggcaaaaagggatcaagactcccagattctgcaccttgagccaaagaaacctgaggaaaatccagcttcttaagttcagtttcttgcaagcaagtattgctgctctctctgtttgatggtgaagatgaaattgagggagaagattatgccgaatagcccctctacatcctgtgcttttctcctagtttctctccacccctggaaccattcgagagcaaattcaaaacctctattccagacaagacaaaataaaactcaacatctccctgaagacctttcttaccttttttttaaaaacaaaaaatgaaattattttgcatgctgcctgcagccttttaaagtattggagtaactgggagaattgccaatacagccagagagaaagggactacagctttttttagaggaaaagttgtggtgcgttatgtcaccatgcagttgccagtgtgattagtgcctaggggtctccatttagcagaaatggtaatgacagtgatataatgcctggaacctggttgggcagtaggggagggaggtaagaaggaaaagtgtgagatttctaccttttagtttttatcctattgtggcatatatgaattctcaaaccattatctgaataaaattttcccactcttggaaaggtagatttagcctcaagttgttctagtctccaggaggctgccagcccctcctcttatttaattctgagttttgggggccagcctaggagggaattccttttttttttttttttaaccccccaggggggtagttgggaatgagacta

SEQ ID NO: 115172 - DNA, 648 bp, Homo sapiens
atgaactcgctcaatcccattgctttactctgggcagcagctggggaagccatgagatgtcagccaattgacagagtacccggcatttatcaggccccaggttcaaaacaccagatccaggagataagtaaagccaagaccagcgctgcccaggatggagacacaggtgcctacatctccagtggtggctgcggcgaaggcagaagtcttgggccaagcgactgctaccaagtgacactgtgcaggcaggggagcttcggtgtcttccctgagaaactgaccaaggccaaggcatacttgggcttaggtttcctgcaggaactatggctagctagctcaccccggcacacgctgaccttgcatcaagtgctggagcacgtcatcaagctaaagcagcaggggctggccaacctcctgagctccattcccgactgcaagggaggcctgtcaccccggaacattagtcaaagggctgtgttgacagtgatttcaactcttgaattatacgaaggacctggccgcaagaaggcattgagccccgaggaggacaacaggcctcagacctctccagagtccgatgtccttctgcacaagtccttgttgtccagtctgtggcccaaacacccacagggcatggtggaggcctga

SEQ ID NO: 115173 - DNA, 207 bp, Homo sapiens
atggaggtgaggccgtcgctgaccgcgctgtttaaaatccagtgcttagaacagtgcctggtacccagcaggcaatcggcaaatgcctgcttagtcagtacatgctcagtcaatggccgcagcctgctgctgggtgcctttggatttgggtcccaaatgccggcctccagagtggcggacacatttaacagatctgaagttgactag

SEQ ID NO: 115174 - DNA, 492 bp, Homo sapiens
atgtcctttatccagattaaaaaacaacaaagtaggttacacagtggaccttccagcaagttttcaaaagatttccattggcccatggtcatcgcacagtatatggcctcatccaggtccctggctcctcgcatgcgttcttccctggctctgtttgggtcccaggagcagcccatgctgttcccttgggcttgcatgcttttcttcaccctctatcttatgtcaccctttatccctgcatccctcaggcctatctcagtcatcacttcgtggggcacccaaccctggtttctgcccacccttgttcagtctcctttagcgaagggctctcgggtcctttccttcggaagccctgatcaccattccctccaagtagctggaactacagtccttaaagaaactggagcaagagcatgtggacctatccgtgctgactctcgactggggattttcctgctgctcagggatcaggcattaactcttcatgtgtaa

SEQ ID NO: 115175 - DNA, 830 bp, Homo sapiens
ttaccttaagagggacaactgaaacagagacaagcaccccaacagtagggtgcttcgaggtcctggaggggagccctggccctgtggagagagaccgagtcgtgcagcgtccgtggcctgcatttgaaactgaagggcaagaggctggtgagatccgagagtcatgccgctgcgtggaggaacatgctgaacctctggaggaacggctctacctccagtcgcagttggctggtgtttgtttgcacaaggattctttggtaacaatctgcagtcggtttctggcggaatgtgaggtgaagtcacgactgactttcgggatggaggttgttcctggtgaacaggacaaagtccttgcattcatggagcctgttctgcatcctcccttgatgtatgttcgggtgaagcagccctcgatgcacacctatgagctcagggactgtgcgcaggtgaaccagcctgtgacacacgcctacgagctcaaggagcacggtgcagagaccacagtgcaggtgaaccagcctctgacactcatctacgagaatagggtccacgtgcaggtgtaccagcccttgatatacacctatgagctcagggtccatgtgcaggtgaaccagcccttgacacaaacctatgagctcagggtccatgtgcaggtgaaccagccctccactcacacctatgagcacagagaccatgcgtctcccttctctcctggacagaaggccgtgtcctgggacttctctgatggcgagaggctgcggctgtaccagcgaatccactttctgttgccacccgtggaacgttctcactcttccaagaagccaggctag

SEQ ID NO: 115176 - DNA, 525 bp, Homo sapiens
atgaaggtgtctctcacaccccttgggcccctgctgcggatgctggtgttgctgggttctgtagaagtgggaatgctggtgctggcttccctcacatctctgtccctctcgctgcaggacagcaatttgaggctggcgcccatgcggctctacacgctctccaagcgccactttgtcctcgtgtttgtcgtcttcttcatctgctttggcctgaccatcttcgttgggatcagagaaacttctattaagacaagctttcccatgactgttaaagtcgatggtgtagctcaagatggaaccacgatgtacattcataacaaagttcacaaccggacaaggaccctcacatgtgcagggaaatgtgcggagattattgtggctcaccttggctacctgaactacactcagtatacagtgatagtgggatttgaacacctgaagctccccatcaagggaatgaacttcacaaacatcatctcctacaagccttttatggttctcagcacctttctccagaagctgtag

SEQ ID NO: 115177 - DNA, 930 bp, Homo sapiens
atgccacccactgaagacggcaagggaagaggccagaaagtgctacgaacaaggaggaaacagctccaagttgttgggcagtcgggcgctgggtctcaaaggagggccacttgcatggacagaaggccagcccaggagacaaagagggatttaccgaagggctgtgggacccctgataagaacaacggactccatgcaggttctcacgactggttctctctgtctctaggaaattctactcactcagagctgttccagaccccagacattcaggtaaataaaggtatggagcaagcttgtgttggctttgagtcaattgcatctcccacagacatcccctccagcaacctccttgatgacgttcaagccagggagaggacaaatagttccccaaaagaaaattggagggctgctggaaggggaaagatgcaccggaaggccacagaatgccagacagccattccacgaagacacgcattaactcacaaaggtcataccatctctgcccttgtggctttctctacttcctcttactcatgtggccggaagaaaaaagtgaacccatatgaagaagtggaccaagaaaaatactctaatttagttcagtctgtcttgtcatccagaggcgtcgcccagaccccgggatcggtggaggaagatgctttgctctgtggacccgtgagcaagcataagctgccaaaccaagacgtctttttacaagggaaacggttccacgaagccttggaaagcatactttcaccccaggaaaccttaaaagagagagatgaaaatctcctcaagtctggttacattgaaagtgtccagcatattctgaaagatgtcagtggagtgcgagctcttgaaagtgctgttcaacatgaaaccttaaactatataggtctgctggactgtgtggctgagtatcagtaa

SEQ ID NO: 115178 - DNA, 606 bp, Homo sapiens
gttcagtacccctagtccatgcggtggaattcgaaagtacgggtcgcgagaggttgttcgcgccttgagagttaagcgaagtgtggtggcttccaaggaatacaaacataaaggccttcgaccgttgcaaatagactaaagtgaaaacaaatctgaatgaagatgaagttatttcagaccatttgcaggcagctcaggagttcaaagttttctgtggaatcagctgcccttgtggctttctctacttcctcttactcatgtggccggaagaaaaaagtgaacccatatgaagaagtggaccaagaaaaatactctaatttagttcagtctgtcttgtcatccagaggcgtcgcccagaccccgggatcggtggaggaagatgctttgctctgtggacccgtgagcaagcataagctgccaaaccaaggtgaggacagacgagtgccacaaaactggtttcctatcttcaatccagagagaagtgataaaccaaatgcaagtgatccttcagttcctttgaaaatccccttgcaaaggaatgtgataccaagtgtgacccgagtccttcagcagaccatgacaaaacaacaggttttcttgttggag

SEQ ID NO: 115179 - DNA, 563 bp, Homo sapiens
ttgaattatgtttgtcaatttgggcctgctcctcttcaagtttttcttggtcttgcctccaaaacatacatgcctgtgactggactcagttatcctgtccctgcccacacacttgcaccaggtgaggcaccctggattgaccaccaaaactacttcacagatgctaaaagttggtgctggcgcttagcacttgagagagctgagatttccgagtattcagcaagtcctgttaccaccagctggatgactttccagcctattgtaacagccttcctcctggaccacctccagaacaaatgggctgaggaagggcttgagcgtcctttgcaatggctgtgtccttatggggtcttctcccagcatcctaaactgaaaccacactttgtggatgatgttaatatctaagcttatctgttaacccaggttaagctttcttaaccttcctgttttcacttcaaattagcaactacagtgccaaggaaaacggaaatgagtgacaatgtttacaacaatagcaccattaagttgttttttaagggagctgcttagggataatgttaaaa

SEQ ID NO: 115180 - DNA, 431 bp, Homo sapiens
tgcatgctgctgccaaaccagagatcacttgtagacttgaaagggaacatgagctttgggtgaaggattcccagcccccaacagaggccaaaaagctaccacccagccagcttgtcctggcccgccagcagagccgcagcactgcagggcccttctgttgtgagtgccagggcccttgctggctgcctgagcaaggcaaaaggttcaaaacaggaagtctctgggcagctattcccagttgtttcaatgtcttttttaaaaatcacatacactcgagtaagactgagtctcctcaccgaagagatctggctgtatcccgagtctctgaaacctttgctccagtcccgtgggagcgtgccgtcccgaggatgtggagccgcaagggctcgccagagggatctcaggagctaggcctcaaggagcgctgttga

SEQ ID NO: 115181 - DNA, 590 bp, Homo sapiens
  misc_feature (1)...(590): n = a,t,c or g
ttctgttgttctgcatagtttacaaagtgctttcacatacatgatctaatttggtttactgaacttagaaaggtagactttcaaggaaaaaaacatcgatttccaccaatagtaaaagctactgcatcagacctgtcactcaacagcgctccttgaggcctagctcctgagatccctctggcgagcccttgcggctccagcatcctcgggacggtcacgttcccacaggactggagcaaaggtttcagagactcgggaatacacccaaatctcttcggtgaggggactcagtcttactcgagtgtatgtgatttttaaaaaaagacattgaaacaactatgggaagcagaggcaaagggcaggcaaggctttgggttttggcgactggggaatccngtgcgggcctccctttgggtgaaggacctgaccccgtggtgggggtgaacagggttttccttgaccccgtcccaggggtttccctttcaggacagatggatttcactaggggaagcgtgatgctggtagcctccactctcaggctgggcagggtaggctcccagggaggcagctcccagcgcagcctcttccat

SEQ ID NO: 115182 - DNA, 1881 bp, Homo sapiens
atggatgaagctggaagccatcatcctcagcaaactaacacaggaacagaaaaccaaacactgcatgttctcactcgtaagtgggagttgaacaatgagaacacatggacacaccagtctgatgattgcaatgatctgatcgtagaataccacaagcctaaccaagctgcggccctgctacagctgccaaacagagcagtattgttgctaaagcagattattaaaacctcagtggaagtggatcatcgtaaaggtcttcatcctcatggtctttacgttgagtgggctgaggaggaagataagggaggagttggtcttgctgtctcaggggtggcagagatgggagaaaattcccctctttacaattcttcaaaatccacaattctattgatctttgaccagattacaaataggaacaatgagagttgccgtggccatgggctcagtttgtttgtcccatttgtgtatgatcgccttcccctgcggggaactgggcaaggggcaagcctggtggttcagtcctctggagtcctgatgcttgttgggctttttctttttgccagcatgctctggcactggcaaacaagtcatttagagggagctgaggagagatcaacagaatctgagaaaagtaggcaatgtgcacgcagaggccgtcacgtgggtcgccgaggctcgcaagtgcgcgtggccgtggcggctggtgtggggttgagtcagttgtgggacccggagctgctgacccagcgggtggcccaccgaaccggtgacacagcggcaggcgttagggctcgggagccgcgagcctggcctcgtcctagagctcggccgagccgtcgccgccgtcgtcccccgcccccagtcagcaaaccgccgccgcgggcgcgcccccgctctgcgctgtctctccgatggcgtccgcctcaggggccatggcgaagcacgagcagatcctggtcctcgatccgcccacagacctcaaattcaaaggtgatggatgagtatttatacgaccagaacaatactacactgtatgaaaatggtgtaaaagaagtaaaagacatggtcccttccggccccttcacagatgtagtcactacaaatcttaaattgcgaaatccatcggatagaaaagtgtgtttcaaagtgaagactacagcacctcgccggtactgtgtgaggcccaacagtggaattattgacccagggtcaactgtgactgtttcagtaatgctacagccctttgactatgatccgaatgaaaagagtaaacacaagtttatggtacagacaatttttgctccaccaaacacttcagatatggaagctgtgtggaaagaggcaaaacctgatgaattaatggattccaaattgagatgcgtatttgaaatgcccaatgaaaatgataaattgggtataactccaccagggaatgctccgactgtcacttcaatgagcagcatcaacaacacagttgcaacacctgccagttatcacacgaaggatgaccccaggggactcagtgtgttgaaacaggagaaacagaagaatgatatggaacctagcaaagctgttccactgaatgcatctaagcaagatggacctatgccaaaaccacacagtgtttcacttaatgataccgaaacaaggaaactaatggaagagtgtaaaagacttcagggagaaatgatgaagctatcagaagaaaatcggcacctgagagatgaaggtttaaggctcagaaaggtagcacattcggataaacctggatcaacctcaactgcatccttcagagataatgtcaccagtcctcttccttcacttcttgttgtaattgcagccattttcattggattctttctagggaaattcatcttgtag

SEQ ID NO: 115183 - DNA, 452 bp, Homo sapiens
  misc_feature (1)...(452): n = a,t,c or g
ggctggcataaattttaataaagtatgtacatggaataggtgcatgtaatgcaagtagattataactaattttgtttgggaaatacaaaaagcgagttcagaaactacttttgctttaacatagctattattagtatatgtttcttatgcattaatgcatttttataaagtgttaatgtttagagcctaatgctttctgtgtcagtcattcccaatatcatgcagaataaatcagagttcggtgagaatctgagaatatgtttcccatgccatctcagggtataactgcaccagggaatgctccgactgtcacttcaatgagcagcatctacaacacagttgcaacacctgccagttatcacacgaaggatgaccccaggggactcagtgtgttgaaacaggagaaacagaagaattatatggaacctagcanagctgttccactgaatgct

SEQ ID NO: 115184 - DNA, 733 bp, Homo sapiens
tatttttgtaagcattacaagcactctgatatggagacggctgattcttcagtggagagacctgcctttgataatgagcacacggcctgatgtgatcagtaaacattcctctggaaacacttgccactttgggaagtaaggcagcccactgtttgggtgtaggaagcctgcagaaccgcatctgagtgggtccaggtaagtccccaagctcctgcaggcctgcttctctctcggcggcagggcggagatgcacggtacctactttgaggctgaggattcaatctctgaccacacaacgcacagtccagtccgcatcatgcctgacacacagcaagcactccataaacacgactaccgttattcatttacaattaaggaagaaagaggtaagtatgcttgcctgaccatgattttcaaaatcattttcaagccgaatccaagaatgtgatgagtgtgaagacactggaagaacctgatcacgcaggctcctttctcaagaaccccgatgcccgcaggtgaaggggcacatgccaaggacaagcccgcctcagccctggacatcgttcatcgcgcgagtgagcaatgcttgagtgagaaacctgacagcggtgtccccataacttccaccgcctctggagccacccggcaaaagccagcgtctgacaatccttcagtaatagtgaagacacctgttatattgctgtccagccaaaagctccttgttgcaggatga

SEQ ID NO: 115185 - DNA, 622 bp, Homo sapiens
tcactttagagcctctgaattccaaatccactcttcgttatcctcctttgtgatactggagatgaatcctgtaaacatttctttgcctgctagcacgatattaagtgctgctgttttcaggatgagcaaatcactttcagctgaccacactgtggcatctggccagcaggatctctcctggtacagggggaaggaaggaagacttccttcccagagacttctcagagtttattactgcattcttctcctcttcctgatctaatcgaaggttggattctcccaggtctccttccatgaacctcttctctttcctctcttcactttttgtcatagtatcttccatcattcccttggctttcatggacagggtgatgatctccagatttgtatcccagaccctgaggtcttccgtgagctttagactcacagacccaactgtctactcagcttggcatcagcatccatcctgctggattctgcagatcctgctgcccagatgccacagtgtggtctgtttgggtacagactagccatctcaaacctaatgtattcaaagctaaattactgatttgtcgttcctggtttgtttcctctacagtcttccccatctcaggaagcagca

SEQ ID NO: 115186 - DNA, 492 bp, Homo sapiens
atgaggactgtacagaggagagtagtccagagggagaacagcaagtgtaaaggccctgaggtcagagtgtgcctagaatgctcagggaatatcaatgggacagcgaaatggtacttgggagaagaaaagttgacagcagaagagccgtggaggtgccagcatgctgtcctcagcctgtgctttgagtggttgactgactcacctatcaagactcagcctgaaacgggcctcctcattgaggcttctggggccagtcccccagccctgctgccccttcctctcctctcacaccacaaggagatcattctaccacctttctcatcacaatatgcaagtggaagaaagtggaggggtgagagtgaaagggcttcagggccacatgctgaaagcctagagtttaaaactgagaagcccagccagtggtggtggtggtatagcggtgagtacagctgccgtccaaactatgaagccagtacttactgcagtgcataa

SEQ ID NO: 115187 - DNA, 815 bp, Homo sapiens
  misc_feature (1)...(815): n = a,t,c or g
atggcagtcagggcaatgaccagccacatcaacatatgctccaaattgggagccgagctgaatgactttgccgtcttcaccaccttcggcttggcctccgctctgctcctaggcgtggatggacttctgagtgggatcctggccatcatctatgtgtcagctgcttctttccacttgtgcttttattcacctggagtcccctccacatacaagggtctaccctgcccctatgcttcctgcatcttggcttccacctcccttctgaccaaaggcaacaggttcatcctctgctgcatggcctcactcatgattctcttcatgatggaccagagctactatccatatgacaaaatcctggagtctgagaactggaaaaaattggtttatataggagatgtaaagcttcaaaaatatctctgtacctttgagaaactggggatggaccacatcaggatgagggaattctgggcagagtgtttctccacgacaagaatatacccaaggctgagagatgttaatacaagcagttcccaactaagaatctttccagacaatgatcatgtctttcctggttatgtgaaatctgaaaacatttcccatgaaacaatctgaaaggtggctgggaagggaagtaacattttctgagtgctatggtttgaatatgtcccccaaagttcgtgtgttagaaannnnnnnnnnnnnnnnnnnnnnnnnnnnnnnnnnnnnnnnnnnnnnnnnnnnnnnnnnnnnnnnnnnnnnnnnnnnnnnnnnnnnctgtctgttattgctggagtaggctagttatcttgggagtg

SEQ ID NO: 115188 - DNA, 377 bp, Homo sapiens
gctcttcactcatgttccttggagtttttccattcctggttcttgctcttcttgtcccacttttgaatctttcttggagttactgcttccagggtttccatccaggcccaacttacagaagcagctcagtagcttcctcctgttaggattcagcccccaaccctgttccctcccagcatcctcagcccacgttctgggttcagcctcctccactgctccctgcttgctttcccatgcatcctattgtgaagaacttttcgtccttacagcacgtctatgtacagtacctcactgatgactacaaaaaatctcatgaagtcatccagggagatggattattttcttcatttttacagatgcagagattgagatgccag

SEQ ID NO: 115189 - DNA, 763 bp, Homo sapiens
ccagtgcacctgcattgtcgatataactgctgagaaaaattggcagcttgacccaagtaaatacggaaatcctcataataactgcacaaaggtggaagggtcaggtcctcatccccattttagaaatgaggaaatggaggaacagagggtacggtccatcagtgggccatccgtatgcagagagattcaccagagctatcgaggcttggtgatgcggggccccataattggtcttagcgcgcacgtctatgtacagtacctcactgatgactacaaaaaatctcatgaagtcatccagggagatggattattttcttcatttttacagatgcagagattgagatgccaggccaaacaccagagcaccctagaaggtttaactaaaagaatgctcatgtttgacccagttcctgtcaagcaagaggccatggaccctgtctcagtgttccgtgtcatccacagacttgccattcaagtctacagcttcattcagattctgaataagaacactgagcaagttagggccagggacatcattgccgcagtgagggtggccttcagtacaaaggataaattaagggcaagggcctggaatgatggtacaccaggtgtcctacatggaaactctgtccagcggctggtgaagccagctgaaacctcatcttctaaaatgcaaagtaaatgtgaaaactttgggagcctgggagagaaaaactccctggtttggaaactcagcggaacaggaactcgatcttacaaatga

SEQ ID NO: 115190 - DNA, 228 bp, Homo sapiens
atggcaccatcatctgctcaagttctggagaggcttcagggagttttactcatggcagaagataaagttggagcagcctcatctccaatcgtggggaagagagaaactgaaattcttcctgtgactgaacacatgagaatgcgacagttacttggggtaacaggtttcctgtgggtcctgtgtgaagagtatgcattcattccagtgtcggggaggggagaagaatga

SEQ ID NO: 115191 - DNA, 477 bp, Homo sapiens
  misc_feature (1)...(477): n = a,t,c or g
agccatcctggcggnnnnccccgaacgttagcancgtcangcgnggaannagacttccccagtgggagaagctaagcccaatgccttcatccagatggctttgctgctggcctactacaggatctacggacaggcatgtgccacctatgaaagtgcctggctgcgcatgtttcacctgggccgcaccgacaccatccgctcggcttccatggactcactcacctttgtcaaggccatggatgactccagcgtcacggagcaccagaaggtggagctgctgcggaaggccgtgcaggcccaccgaggctacaccgaccgggccatccgcggggaggcctttgatcgacacctgctgggcctgaagctgcaggccatcgaggacctggtccctgccaagacagactgtgtcatgttcttcgggcccgtggtccccgacggctacggtgtctgctataaccccatggaggcccacatcan

SEQ ID NO: 115192 - DNA, 384 bp, Homo sapiens
tttttcaccaacacaattcccctttattgatgaccttccacattaatatcatacagcagggcgggggcaggaaccaagctgagtggaaccagaggcggctcgctagcaatgttatccacaggagcacagccgcaacggaggtgaaacctcacaccctggcccctcggcccagacaatcctgtctccaggtcctgggagtttgggaagcagggtacagatggtggcctggtcatggagttggcagggagtggccggggctgagctggtgagacaaagagctcttgccagtctcctgctctggagggctggttcccttccccagaggaggcaccggtggaggacgtgccagggatgacccacggaaggcacttggctggggctgca

SEQ ID NO: 115193 - DNA, 271 bp, Homo sapiens
  misc_feature (1)...(271): n = a,t,c or g
cgagaccctgcccgtggagtacctgggggggaagccactgtgcatgaaccagtactatcagatcttgtcctcctgccgagtgccgggccccaagcaggacacagtcagcaacttcagcaagaccaagaagcctcccacgcacatcaccgtggtacacaactaccnagacaaggtgaaccgggattccgtgcgctccatccagaagagcatcttcaccgtgtgcctagatgcaaccatgcccagggtctcagaagacgtgtaccgcagccac

SEQ ID NO: 115194 - DNA, 205 bp, Homo sapiens
acaaggtgaaccgggattccgtgcgctccatccagaagagcatcttcaccgtgtgcctagatgcaaccatgcccagggtctcagaagacgtgtaccgcagccacttcatcgtggcagaagatggctcctgtgggcttgtgtacgagcatgctgcagcggaggggccccctattgtcacccttctggactatgtcatcgagtacac

SEQ ID NO: 115195 - DNA, 2859 bp, Homo sapiens
ccccgcctcgcgagtcctcctccccgggtgcctgcccgcagcccgctcggcccagagggtgggcgcggggctgcctctaccggctggcggctgtaactcagcgaccttggcccgaaggctctagcaaggacccaccgaccccagccgcggcggcggcggcgcggactttgcccggtgtgtggggcggagcggactgcgtgtccgcggacgggcagcgaagatgttagccttcgctgccaggaccgtggaccgatcccagggctgtggtgtaacctcagcggccaggcagtctctgtcctccagccaagttttccctcatcaaaacgatcttcgcagattctgacaggtgaagcctctgggcttcctgaagcccttctccttgatgaaggcttccagccgcttcaaggcacaccaggatgcactgccacggctgcccgtgccccctctccagcagtccctggaccactacctgaaggcgctgcagcccatcgtgagtgaggaggagtgggcccacaccaagcagctggtggatgagtttcaggcctcaggaggtgtaggggagcgcctgcagaaggggctggagcgtcgggccaggaagacggagaactggctgtctgagtggtggctcaaaaaccgcctaccttcagtaccggcaagcctgtggtcatctactcgagcccacggcctgacgctacacatatcaggactttttggacctgcatggtcagctccgatttgctgccaaactcattgagggtgtgttggatttcaaggtcatgattgacaacgagaccctgcccgtggagtacctgggggggaagccactgtgcatgaaccagtactatcagatcttgtcctcctgccgagtgccgggccccaagcaggacacagtcagcaacttcagcaagaccaagaagcctcccacgcacatcaccgtggtacacaactaccagttttttgagctggatgtgtaccacagtgacgggacacccctcactgcggatcagatctttgtgcagctggagaagatctggaactcatccctacagaccaacaaggagcctgtgggcatcctcaccttcaaccaccgcaactcctgggccaaggcatacaacaccctcatcaaagacaaggtgaaccgggattccgtgcgctccatccagaagagcatcttcaccgtgtgcctagatgcaaccatgcccagggtctcagaagacgtgtaccgcagccacgtggcaggccagatgctgcatgggggcggcagcaggctcaacagcggcaaccgctggtttgacaagacgctgcagttcatcgtggcagaagatggctcctgtgggcttgtgtacgagcatgctgcagcggaggggccccctattgtcacccttctggactatgtcatcgagtacacgaagaaacccgagcttgtgcggtcttcccatggtgcccttgcccatgcccaagaagctgcggttcaacatcacccccgagatcaagagcgacatcgagaaggccaagcagaacctcagcatcatgatccagggacctgggatatcaccgtgatggtgttccaccattttgggaaaagacttccccaagtcgggagaagctaagcccagatgccttcatccagatggctttgcagctggcctactacaggatctacggacaggcatgtgccacctatgaaagtgcctccctgcgcatgtttcacctggggccgcaccgacaccatccgctcggcttccatgggactcacttcacctttgtcaaggccatgggatgactccagcgtcacggagcaccagaaggtgggagctgctgcgggaaggccgttgcaggcccaaccgagggttacaccgaccggggccatccgcggggaggcctttgatcgacacctgctgggcctgaagctgcaggccatcgaggacctggtgagcatgcccgacatcttcatggacacctcctacgccatcgccatgcacttccacctctccaccagccaggtccctgccaagacagactgtgtacatgttcttcgggcccgaggtccccgtacggctgacggtgttctgctgatgaaccccatgggaggcccacatcaacttctccctgtcggcctacaacagctgcgcggagaccaacgccgcccgcctggcgcattacctggagaaggcgctcctggacatgcgtgccctgctgcagagccacccccgggccaagctctgagcccctaggactcaggcctgccaatgccacagccaagcccaccctaggatgggccacccaccagggctcagctccttggttccctcttccttggttccctcttccctggtccccccaaatctactgagccacggaccgcatcctccagggggcctgcaggccccagccaagtgccttccgtgggtcatcccagcacctgcccagggcccgaccctggggctgagttgcaagaggctgagcaggacgtttaggcccgggcccctggcacgtcctcaaccggtgccctcctctggggaaagggaaccagccctcccagagcaggagactgggcaaagaagctcttttgtctcaccagctcagccccggccactccctgccaaactccatgacccaggccaccattttgtaaccctgctttcccaaactccccaggaccctggagacaggattgtctggggccgaggggcccagggtgtgaggtttcacctccgttgcggctgtgctcctgtggataacattgctagcgagccgcctctggttccactcagcttggttcctgcccccgccctgctgtatgatattaatgtggaaggtcatcaataaagcgggaattgtgttggtgaaaaaaaaaaa

SEQ ID NO: 115196 - DNA, 584 bp, Homo sapiens
atggtagaggtcgagttagaaatcagaaaggttggtgctttgtgtgtgggggtgaagggccacaagggaactttgaggggtggcagaaatggtctacatcctgaagtattcctggtgcacacagttgttgcaatttatggaactgtccacaaggcagggctcacaatgtgggggaattcctcaggaataagaatggaattcctcaacattgtggaggaacgttgtgggaaattcctcaagaaaaagaagctgtttaataaatgcactgtggctacacagcaggaaaaatgcctccttcccctgcactgggccctaggccttgaggaagaaacctgggttcctgtgacagcccctctctccccagctgtcacttttcccgtgcgtgcactgggtagggaaggccaacaactagggagctacccaatgttaccagagccagggggcccagagccagcagttcaaggcacctcggtgcattgcaccagggagagcctgtgtcactcgtcatgcctggctttggaggagcagatgtctgcaagggcgctgtgggaagcttctgatcagaatcagctctgacgcagtga

SEQ ID NO: 115197 - DNA, 129 bp, Homo sapiens
ttcttttattttttgcatcttcatccttcagagctgggttcatatgtcatgtctttagaaaaaccatccttggccttcccatttctgcagataaacagaaagttaggtcaggtcatcctgtacgatata

SEQ ID NO: 115198 - DNA, 1107 bp, Homo sapiens
atgttgtactggcttatgcctaaaggcaaattactctggattgccagtttcctaaccaggctacaagggatccagcatactctacccagagtagaggaaaaatctatacaatcagtaaaagatgacaatatctaccatccgcacccaagacccagaattgctgtagttggaagcagctccacagtaatttcctatagccctggggagtatgcttttaccaatggcacctctagatgcccttcactctctcttgcagcagggccaagactgataacgaatggcccgtgggaagcgcacgaagtccaacgtgaatcaacgatagcactaatgaaattgcttcaagttctagagcagaaggtgaggctgagagaaggacattcactgggaaccgtcaagatgtcaaaaaatatcaatcccatgggccatgtttccaatcctcctacctcctacccagacgaactcattacgaaacaggtttgtcctggatcccatccaaaaagacctggtgaagtcaagcacaacgaggaggttcccacttctcaggatagagacacttgtacaacccaagaaacacagtactcagtgagaaaaataatttctgctgaagatgattttacagtcaaaaattacaatcatataaggaacaagttcactataccatccagaaaggggcagcaagcccacagagcctggctgaataaagccattcctcagccaatgccaacttcagcaacttctctgttagcagctcttgttagagctgcaaagcaccgaaatcaacagccccaagacttagctcagtcctcttctcatcacatctaccttttcatcacaattacatttggcagtcttcgtgattccgagctgaaaagcaaaagaggccctgaccctcagctgtcgctggagctcgagatggtggccaaggcgaaagcagtcaagccggagaactcccgaaggtggttctcaggtaaccagctgggctcaattataaacagcccaaagaaaggctctgctgtcctggagggcacctttcaagagaaacaaaaatgggacgctcgcttaacaaaaggggactgtttggccaccaacgtcctgaacagggtctga

SEQ ID NO: 115199 - DNA, 421 bp, Homo sapiens
tttcgttgttgtcaagatggcggctgcagggttgctgccgccccatctgctattgcccggcgaggtcgccgctgcctcagctgccatcgccgctacaggcaccagtgccgctgcgcgggagctagggctgtcgaggccaacccttccgcgcccgtgacgcggggcctgagagacggagtgtagggaggggccgagcaggaggaggaggaagccggagctgccatgagggaggttctgggggcgagcagacaggcggcgctgaagtgaaagatgctggcggggaggcccggaacccggagcgcggtcggggaactgggcactgaatcattggacaacctcgacagagcccccctcggccctcgggagagcggcgggcatcaccgacctggctcttacctagatatgagaatccatctggaga

SEQ ID NO: 115200 - DNA, 703 bp, Homo sapiens
gaccgtatccatcaggaaaacaaagccattataagaattatgggactaaggtacttatcacaggaattacattttaccaaatataggagctgggaaaatgagggtctggaaaaggaaaattgaaggatcagagtatatggggcaagggataaaaatgtagcctgctctactgtggcgtgccagtcaggatcagagaaaggatgactgagcaggctgtttgaagcactggtgtgggtaaacaaattgaagcttgcagggaaatctgataatccaagcatgcccaagctgctgaagtggaactatgaagggggagcttgctggggaaatctatggaaactgccgaatgtggaacgactctgcttttctgaagctactgtcttcaggtctgcagcccagtgcctggtggtcggcctagggctgctgttggtcagcagggcctgtagtcatgaagatgctatagagtggagaggagactcttcagtagttaacattgtagaagatggatctaatgcaaaagatgaaagtaaaagtaatgatactgtttgtaaggaagactgtgaggaatcatgtgatgttaaaactaaaattacacgagaagaaaaacatttcatgtgtatcttccacaatgttcagtcactgggaacagtctgcggggagaaaggcattgatgtgaacaccatggtggatgcaggaggtacagcag

SEQ ID NO: 115201 - DNA, 828 bp, Homo sapiens
atgcccaagctgctgaagtggaactatgaagggggagcttgctggggaaatctatggaaactgccgaatgtggaacgactctgcttttctgaagctactgtcttcaggtctgcagcccagtgcctggtggtcggcctagggctgctgttggtcagcagggcctgtagtcatgaagatgctatagagtggagaggatgcaggctacactttgatccccttccccacgaactcccagatggacaaaggacaggggaccaggaaggcaagaaaatggccactaagagccactttcatcgctcaatagaaccctccacatacaccacccttcagtccgttcgtgtgatccaattcttcctccacaccggacaaggattcagcatgcactggagtacaaagaacatcctagaaattggagacaaaggggataagaaaacagagttaacttggaaagagaagacactcatctctgacaagactgaagatgattacacaacaccatcattgccaaccaagtcctttgggaatacaaaggccccgcgtcacgggcgcggaagggttggcctcgacagccctagctcccgcgcagcggcactggtgcctgtagcggcgatggcagctgaggcagcggcgacctcgccgggcaatagcagatggggcggcagcaaccctgcagccgccatcttgacaacaaccgacggcgcgtccttgacaacggaaacctgggaggagctacaggtcggggcgggacgatgtgcccgaagcagccaatcgcaggctccggcggcccctccagcttcgagcggcgggtggcaacccaagcatccctag

SEQ ID NO: 115202 - DNA, 1110 bp, Homo sapiens
atgggacttctgatatgtcttggagccttggatgccaggccggagcgggctccctcagcttgcggggaggtgtggagggagaggcgtgggcgggaaccggggctgcccacggtgcttgcgggccagcgcgagttctgggtgggcgtgggctcggcggccctgcactcggagcggccggctggccccaccaccccgggcagtaaggggcttagcacccaggtcagcagctgtggaggacgcacagggtcccccagcagtgccagcccactggcgctgcgctcgatttctcgctggggccttagccacctcccccatggggcagggctccggacctgcagccccgccatgcctaaacctccccactccgccgtgggctcctgtgccacccgagcctccctgatcagcactgccccccgctccagggcgcctggtcccatcgaccacccaagggctgagacctgccaacgcacagtgcaggaattggcaggcagctccacctgcagccctgtgcaggatccactgggtgaagccagctgggctcctgagtttgaagggagcgggccaaagcgcagagccaatgggcgcggggcttacggtctccgggatacgggtgtacacagcagcggcgtcgcggcccgcagccccgcggcggcggaaagatgggtgcaaggattccctaagcagaatgttcattttgtcaacgacaacaccatttgctacccttgtgggaattatgtaatatttattaatattgaaaccaagaaaaagactgtactgcagtgtagtaatggaattgtgggcgtcatggcaactaacatcccctgtgaagttgtggctttttctgaccggaagctaaaacctctcatctacgtatacagctttccaggattgaccagaaggaccaaattgaaagctgaccaggagagggacccctttttgtacctcttccaggttgctgaattcctgacgcagggctgccttcagatcagtgcattctctcccacatctcaacgctaccaggcactccttggtcaaatgtgggacctaatcagaggacacaggttctcagtggagaagtctgtggaaacttccagttcctgttctgcctga

SEQ ID NO: 115203 - DNA, 936 bp, Homo sapiens
attgaaaccaagaaaaagactgtactgcagtgtagtaatggaattgtgggcgtcatggcaactaacatcccctgtgaagttgtggctttttctgaccggaagctaaaacctctcatctacgtatacagctttccaggattgaccagaaggaccaaattgaaaggcaacattctcctggactacactttactttcattcagttactgtggcacctacctggctagttactcctctctcccagaatttgaactggccctttggaactgggaatcgagtatcattttgtgtaagaaatcacagcctggaatggatgtgaaccaaatgtcttttaaccccatgaactggcgccagctgtgcttatcaagtccaagtacagtgagcgtgtggaccattgaaagaagtaaccaggagcattgtttcagagcaaggtcggtgaaattacctctagaagatgggtcattttttaatgaaacggatgtcgttttcccccagtcgttgccgaaagatctcatctatggtcccgtgctgccactgtcagccattgccgggctggtaggcaaagaggcagagactttccggccgaaagatgatctatatcctttgcttcacccgactatgcattgctggactccaacaagtgacttgtacattggctgtgaagagggtcatcttttaatgattaatggagacaccttgcaagtgactgtacttaataagatagaagaggaatcgccattggaagacagaagaaattttatcagtccagtaaccttggtatatcagaaggagggcgtgctggcttctggaattgatggctttgtgtattcttttattattaaagatagaagttacatgatcgaggattttcttgagattgaaagacctgtagaacatatgacattttctcccaattatacagtgttgctgattcaaaca

SEQ ID NO: 115204 - DNA, 663 bp, Homo sapiens
tccttgtagttcttccccgcgttctatcctttatcttctagagaccttggtagttcccataggaatagtgctttacggagtctaatggtgatttcttaggtaaagacaggaaacatttttttcttttttacctacaagttccatatcaaaaaatgaatgtaaacttttcatgcagttttacacattgaaaatgcaggttattttaattccattccatttttcagaattctcaatcacaatcctctgacaactgttgaagatccgtatctctttaaattgccagcattaaaatatctgtaagtactatagtactctcatgagtcaagagatgatttatactctttttaaatttttcatcaaagattaagtattttgcatttaggctaaaatgtcataatttaaattttaactgagttattgaaaaaaagttattggcgaagaaaaaaattaagaggatgtataatggtcaagacagccagcaggggaaagagaacagtgttgaagaacccatatagatttggaacatgtagacacatggaggaatattacttaaccaagaaagcaaaggggaaaaggtgttcattattctaaaaaggaagaaaagagtaaataatcaagatgggtcaatccaatatgaaaatgagaagtaagataatggtaaaa

SEQ ID NO: 115205 - DNA, 647 bp, Homo sapiens
cgccctgttccctcctgatgctaggccttcctacctctttgaagtgccttttctggatgctccttggggccaataaggactctcttcactctctgccggttttggcctacagtttgaatctttgccaggctgtttcctgtggttggcagtttaattaacggtagtaacagtgatttcacttataggttaaccgctgagaaataaggtaacatgcaacgtagtgtactgataaaatcactctcgtcattggtgtatagttgctcactcccaaagcctgacaagttgatgccagttctgtttgagggctcctttggctcaacaatcagctcagtgcttgtgtagttcttccgggcttgtaacaccttcatgaacgctccttatggattccctacctatgcttcttcagctgtcaaaaaagaagagactgctttgatcatgaaagatgatgggatgggatgcatcagtccatagctgtacaccccagtcacgcagagtaggagttcagcaaacattcgagttgcctttcagagagggagaaacacacacccaatcttaacccacaatgaggcagaaaagtatactcaaaatcattagtatttcagtcacaattaatgaaaagatgagttagtcagtatagccgtatcctg

SEQ ID NO: 115206 - DNA, 795 bp, Homo sapiens
  misc_feature (1)...(795): n = a,t,c or g
atggcgccgccgctctgcccaccccgcgcaccccaggcggccgccgagcccgcgcgcgcgccctgtggagcgaggacgccggggacgcggccagggacgcgcgctgaaaaacagaatggttgtgtaggtcttcaaagtacagtttctgctgaatgcctatcacctttgcactattgtaaagttgaaaaaagaattctcaatcacaatcctctgacaactgttgaagatccgtatctctttaaattgccagcattaaaatatctagacatgggaacaacgctagtcccacttacaacacttaaaaacattctcatgatgactgttgaactggaaaaactaggaccgcctttcattgcattcagctgtgatggtagcacgaacacagctgaagaagcatcggtagggaatccagaaggagcgttcatgaaggtgttacaagcccggaagaactacacaagcactgagctgattgttgagccagaggagccctcagacagcagtggcatcaacttgtcaggctttgggagccacctgatgaagcttctcagtgggcagcaggaagtaaaggcatccaagatagaatgggatacggaccaatggaagattgagaactacattaatgagagcacagaagcccnagaatatgttgtcaccgaaggtcattacaagaagatgaagaaggattctcaaggggcattttcagatttctgccatggaggggatgctcttcgcgaagggagagtcagggacagcgaagccccaacggaggaggaggagagtgaagccctgccatag

SEQ ID NO: 115207 - DNA, 896 bp, Homo sapiens
gctcggcgtgcattcaacttagggccaactgttaatcaatctgagacaaaatgggaatacaacaacgtgggcactgacctgtcccccgagcccaaaagcttcaattacccattgctctcgtccccaggtgatcagtttgaaattcagctaacccagcagctacagtcccttatccccaacaacaatgtgagaaggctcattgctcatgttatccggaccttgaagatggactgctctggggcccatgtgcaagtgacctgtgccaagctcatctccaggacaggccacctgatgaagcttctcagtgggcagcaggaacgtaaaggcatccaagatagaatgggatacggaccaatggaagattgagaactacacttaatgagagcacacgaagcccagagtgaacagaaagatgaagtcgcttgagttcacaaaagaacttccaggatatggctataccaaaaaaactcatcttggcgttaattgtgactggaatactaacgattttgattataacttttctgcctcattgtcatatgttgtcaccgaagggtcattacaagaagatgaagaagcgatcctcaaggggcattttcagatttctgccaaggaggggatgctcttcgcgacggcggagtcaggatggactttcctcatttggacagccgctctggtttaaagatatgtacaaacctctcagtgccacaagaataaataatcatgcatggaagctgcacaagaagtcatctaatgaggacaagatcctcaacagggaccctggggacagcgaagccccaacggaggaggaggagagtgaagccctgccataggaggagaacacagcccacctcaggcctcctgcaaaaatacatagaataaacaacaacagttactaa

SEQ ID NO: 115208 - DNA, 371 bp, Homo sapiens
ggcacgagattatataaaaaaagcatggaaactgggcattttaattagcaagtacagccttgacacaaataaaggcatggctttggttatgcagtgcatttatttggttttcttgaaataagaaaaaaagatatcttctccatcaccagagttgctgagtttgacagtgtgaatgagatgacctctaaggcctctacttatagatctgcacggttgggcctgggagctgtactacctcagctggtgggtgataacttactcacagtctgtgctgtgtcctgcactgtccattatctgcaggggtggtactgctgtccccagggaagagaatgctgtccacaaagagccagccatttatactcttaaaagaa

SEQ ID NO: 115209 - DNA, 654 bp, Homo sapiens
atgaccagcgagagtcctgaggtcaagagctgtgagcccaccacaaaccacagggaaactatcagggtagatgagcagagaaagaaaagcagcagaccaaccactacagatttcagccaacacaaatttctccccggtgacaatgccacatggaactgtgagtccatcaaatctctttttgttgataaattacccagttttgggtatgtctttatcactagtgtgaacacagacaaatacatcctggatgagcctggtgggcctaatgcaattaaaagggtcattgtaagagggaagcaagaaggtgacaaatcacacaggaatcccagtgggtgtgtggcactgagaggcttcgggcagggctatttactaaataatgtagaattatttgatattacaacaccaggatacagccactctggcagtataaatggctggctctttgtggacagcattctcttccctggggacagcagtaccacccctgcagataatggacagtgcatgacacagcacagactaacacacacaagcacgtcctcagagaaagacgtgggtgcttctttatgtggcttcttaagtccaccacttgtgctcggcaaagtcactgcactgagcattgtgaatgaacgatcaatttcacgaaatacttag

SEQ ID NO: 115210 - DNA, 3294 bp, Homo sapiens
atggggatctgcaaagacgatctggcaccttcattaggtcgtgccgatgaagtcttcctgctgcaaccggcgcatattccgtggcaggtggcagaagtggcagaagcctgcgttcagcctgcacactggagtggcgatgtggatacgctggcagatatggtggtgaaaaccgctcagcctggcgaccatattctggtgatgagcaacggcggttttgtgacctttcgggctagcttccagtacctgtaccggcagcggcgaatcgaagctggtacggcggctgatattcactttcccaaggcgcaggaagagattcaccggaccctgaatacgcacgaaattgtccggataagatctcccaattggcacattgaccattctacaattttttatcccattgaacattatgagaatcgcgatgtttcggtcgatggtgcggaaaagcgcggcgtgctctactgccgcattgtgccgccgatgaccggaaaagcgattcatgtgatcgcacttgcgatgctcgccgaatgggtgaatgagctaccggacggcgaaccggtattggtggcgggtgatttcaatgactggcggcaaaaagctaatcatccgttaaaagtgcaggccggactggatgagatttttacccgcgcccacggacgcccggcgcgcacgtttccgtgcggagattcatttatgaaatgtagctggcgcgaaggcaataagatccagttgctggaaaacggcgagcaatattatcccgcggtgtttaaggcgattggcgaggcacaagaacgcatcattcttgaaacgtttatctggtttgaggatgacgtcggcaaacaactgcatgcggcactactggcagcagcgcaacgcggggttaaagcggaagtcttgctggatggctacggttcgccggatctcagcgatgagtttgtcaatgaactgacggcagctggcgtagtgttccgctactacgatccccgccctcgcctttttggtatgcgcaccaatgtgtttcgccggatgcatcgcaaaattgtggtgatcgacgcgcgtatagcctttattggcgggctgaattactccgccgagcatatgtccagctacggtccagaggctaaacaggattacgcggtacgccttgaagggccgattgtcgaagatattctccagtttgagctggaaaacctgcctggacagagcgcggcacgacgctggtggcgacgtcatcacaaagcggaagagaaccgccagccgggagaagcgcaggcgaacggatatgccgttgtcagattcggtcgcctttctggatactatctggttaaaggcggcgttcaggtttttgagtaccgccgccgcccgctccacggcaaagtggcattgatggacgatcactgggcgacagtagggtccagtaatctcgatccgctcagtttgtcactgaatctcgaagcaaatgtcatcatccacgatcgtcattttaaccagacgctgcgcgataatctgaacggcattattgccgcaggattgtcagcagcaaagaagatcctcacctggctgttttttatcgcggtgattgtgttgctggtggtctacgccaaaaaagtggactgggaagaggtctggaaggtcatccgcgactacaatcgcgttgcgctgcttagtgcggtcgggctggtggtcgtcagctatctgatttacggctgctatgacctgctcgcacgcttttactgcggtcacaactggcgacgcctttgcatgcctgtccggtcgactctgcttgatccccagagagtggacactgattggccttgtattgctcagcttagtgaagtcattaatgctactgcggttggtctgctggcagtttcgctaatgctggccctgcacgttgtgccttggaaagacattacccgctataacagcgcatggaacacactggtcaacctggcaactctggttgtgatggctaacggcctgactcgttctggttttattgactggttcgccggtaccatgagtacgcacctggaaggattctcaccaaacgcaacggtgattgtactggttctggtgttctactttgcacactacctgtatgccagcctgtctgcgcacatcgcaaccatgctgccggttatttctgcatcaagcgcgcgccaccgaatgtgttcatcgccggaaaccggattatcactggaaacggccgctaaactaagtgaagtcatgccaggagctggcggacgttcctgcctggaacgctacgaatatgccaaacacggtgcctgctttggttttgatccggacgcatacttcggtacgatggtacgcctgaatcaagaaattaaagagagcgaacgcggaaaattccttgcggataattacggtaaaacagtgagccgccgtgactttgacgccgcctttgccaattttaaaggttattattggtataactttatggagtatattgaaaacattaatgcgtgtgatgatgttttttctgagtattgttttgatgatgaaaatataagtgtccagccagagcggataaatacgccgggaatatctgatttggattctgacattgatttgtctgggatatcttttattcagcgtgaaactaaccaggcattaggattaaaatatgctcctgtagatggcgatggatattgtctgttaagagctatactggttttaaaacaacatgattattcatgggcgctggtcagttataagatgcaaaaggaagtttacaacgaattcattaaaatggttgataaaaaaacgatcgaggctcttgttgatacggcattctataatctcagggaagatgtaaagacgttatttggcgttgatctacaatctgacaaccaaattcaggggcagagtagtcttatgtcatggagctttctgttttttaaaaaacaattcattgatagttgcttgaataacgaaaaatgtatcctgcatttacccgagtttatatttaatgataacaagaacttgcttgctttagataccgacacgtcggataggattaaagcggtgaagaattttcttgttgttctttcagatagcatttgctcattatttattgttaatagtaatgtggcatcaatctccttggggaatgaatccttttcaacagatgaagatcttgagtatggttatttaatgaacactggcaatcattatgacgtttacctccctcctgaactttttgctcaggcttacaagttaaacaataaggaaatgaatgcgcaactcgactatttaaatcgttatgcaatttaa

SEQ ID NO: 115211 - DNA, 862 bp, Homo sapiens
tgcggagattcatttatgaaatgtagctggcgcgaaggcaataagatccagttgctggaaaacggcgagcaatattatcccgcggtgtttaaggcgattggcgaggcacaagaacgcatcattcttgaaacgtttatctggtttgaggatgacgtcggcaaacaactgcatgcggcactactggcagcagcgcaacgcggggttaaagcggaagtcttgctggatggctacggttcgccggatctcagcgatgagtttgtcaatgaactgacggcagctggcgtagtgttccgctactacgatccccgccctcgcctttttggtatgcgcaccaatgtgtttcgccggatgcatcgcaaaattgtggtgatcgacgcgcgtatagcctttattggcgggctgaattactccgccgagcatatgtccagctacggtccagaggctaaacaggattacgcggtacgccttgaagggccgattgtcgaagatattctccagtttgagctggaaaacctgcctggacagagcgcggcacgacgctggtggcgacgtcatcacaaagcggaagagaaccgccagccgggagaagcgcaggcgaacggatatgccgttgtcagattcggtcgcctttctggatactatctggttaaaggcggcgttcaggtttttgagtaccgccgccgcccgctccacggcaaagtggcattgatggacgatcactgggcgacagtagggtccagtaatctcgatccgctcagtttgtcactgaatctcgaagcaaatgtcatcatccacgatcgtcattttaaccagacgctgcgcgataatctgaacggcattattgccgcaggattgtcagcag

SEQ ID NO: 115212 - DNA, 1447 bp, Homo sapiens
ctactccgttggaggtagccacggacgtcccagcgccgatccctgtacgccatgttcattcagatagcgatccagctcgaccattcccgtccatcgattttcgcaccacagcggagcaagcagcgtcgggcgacgggcgctggcggaaatgcggtggtagatcacttccggtggcgtatggcgaatcatttctccggcagtgagcgtgtaatcctccagttcaataccgttcaaacgccccgcttcccaggctttcgccataatgctgcctttcacaatatgcagcggatgcagctttatgccgtccacgccggtttcaaccactcgctccagcgtttgcaaacattcagcctgcccttcgccaggcaggccgacaattaagtgggaacacaccttcagcccgcgctgacgtgccagctgggttgtacgctgataacaggcaaaatcatggccgcggttgatgcgatgcagagtttcgtcgtgggcggtttgtagccccagctccagccacacttcgtaaccctggtccttatattcgcaaagcagatccagcaccgcatccggcacgcagtccgggcgggtacccacacacaaaccgacaatatcggcctggctcaccgcctgctgatacatagaacgcagcacctgaacttccgcaaaggtgctggtatacgcctgcaagtaggccagaaagcgttcagcgcggttaacacaacaccaaccatagaggatccccgttttggcgttatcccaataatgggtattcggtaccacgaccagtttttcattgactacgcgctctttaagaacataagcgccattgccgatcagatttccgggtttcgtccactctttaccgctttctacgttggctttttgcaccgggaagaaggcaaagttagcggttaaattcacaaaccacggcaacggtttatcaagctgaattttcaaagtatgggcatcaactgcggtgacgccaagctggtcaggcgtagctttaccatcaataatcgcctgtgcgttgttgattcccgccagcgcggcaaaccatgcaaatggcgacaatgtttttgggtccaccagacgttgccagctgtagacaaaatcttgcgccgttaccggtgtgccatccgcccattttgcgttatcgcgcagggtaaaagtccagatacggttgtcattacttttccactgagtcgcaacgccggggacaatctccccctttttcgttctgattcaccagaccttcaaacagatcgcgaatgacctgaatctctggcaggcccacggctttagcgggatccagcgacgcaggctcatctttaatgtggcgcaccagctcctgcttctctgccagtactgtgccgctcggaacttctgcagcatacgaaagagaaatgctgctgaccaacagcgcacaacacgtgactgaaacagagtgcttcat

SEQ ID NO: 115213 - DNA, 930 bp, Homo sapiens
atgcaccggctcgcgttggataatctggcggaaatgggcccgcaaaaactgcgtgtgctggatgctggcggtggagaagggcagaccgcaatcaaaatggccgagcgtgggcatcaggtcattttatgcgatctttctgcgcagatgatcgaccgcgcaaaacaggcggcagaagcaaaaggtgtgagcgacaacatgcaatttatacattgcgccgctcaggatgttgcttcgcatttggaaacgcccgttgatctgatattgttccatgcggtgctcgagtgggtggctgatccccgcagcgtattgcagaccctctggcgggaatgccgaaaaagaaaaaacggacgctttcgccagattatccacgcgacccggcgcaggtttatctgtggctggaagaagctggttggcaaattatggactattgctactggttcggaacgtattgtattaagcattcgacttgatctcctagagttacgttgcacaattaaacatcggacgatttgttgccaggcttttacacctgttatggccttcccgggcttcgttattgtttgtggtggaacttgtgagcgggataaccaatttttcgacaacaggaaaaccaaggcttatggaccccattggatttaccggaatttccgagcttctggcttccagtactatgggtccgcgccctctgttcgtctcctccctcgtttctttcgtctgcccgtctttttttctgtctttgtcggtcgcgtcttcgctcgcttcgccgtggcgccgggcgctctggccgtgtcggtggcgtctctgcgggtgctcgttggctgttcggtttctgtggtggtgctggttgctgtcgttgtgcttcgaggcaatgttgttcagggtcaattggcccgtattgtgtttgacgggtgtatcctccacatcgcttga

SEQ ID NO: 115214 - DNA, 3969 bp, Homo sapiens
atgtctggcgtggatggagtgtcgattgctacctgcgactttgcgcaagaagaatacgacacgctgtttggcgaagtagtatcagcagcgcagacgcacgggtatttgtcgaaggccgctggcagtttgatgatgataactcaatacgttgcatcatttaggttctttatcaagcctcccatttggggcgcgatttcggcatcccagatagcttgccaagttctggttgaatctgctagtatgacgcaactgcattatcgaagctgtgctctaactgtatcagcattgacgagaatctttaagagcgtggacgcccgagaaccggcgtgccgtctggcgtcatcgggcgcagaccagtcagaaagtcgcctgctcgacatgaccgccgcgtggatagagatcgcgaacaccatctccagcgtttcacgacgcggttgcaacagctcggtattaaaacaacaatctccgtcattccggcaacacgaatgcggttatcgaaacgggtatggcgattttgtaggtttcatcaagaatggtggataccggggcaccatctcctgcgcaatgggaatggccgcccgtcagttttgcgccacttctgccagcgcgggctccacttccgccaggcggctggattcagcagctgatacggtacgccggcatcttccagcacggcgatatcgcggtcgcattttcatactgttgttcggatgtacagattcgttgaaggcttatgacatcaatctgacggacctgctggaagaaggatcgacccggcgctgggtaacggtggtctgggacgtctggcggcgtgctcctcgactcaatggcaactgtcggtcagtctgcgacgggttacggtctaactatcaatatggtttgttccgccagtcttttgtcgatggcaaacaggtgaagcgccggatgactggcatcgcagtaactacccgtggttccgccacacgaagcactggatgtgcagcatggcatcaatgcggaaaaactgaccacagttcctatccaaacgacaaccatactgccggtccaaagctgcgcctgatacagaatacttccagtagtgcctgttcggtaacggatactccgccgcaaccagaatcagcaatatcggcagaatcatcacccgccagcggcccactgttttcggtagctgacgcgaggctgccacggccctgtcagcagttcccttccgtggtaatggcgggcagagctgtaacgtcaggcgttcagcgtctgcgccagcccatgctgatagcttttccggtgcatgccgactacgataacccgttgcgcatcgcaagccataaacccacaggaatggacatccagtccggcgcgacggtagcgcgggtgatgccgttttctgcaaccactgcgcaatgttgcgcatatgctgttggtgaatcactgctcggttgccagttgctggtcgatattcaacggggcgaaatgcaggtcatcatatcctgcttcagctcctcttccacgttcctgtccacgaatcatagccgctattttctcgccaatcataattgtctggcgttcaaattcccggtgataatcttcggcataatcgacgcatccacacacgcagcccttctaacccgtgtacgcggccttcgccgtcaaccacggcatctcgtcgtaacccattttgcagttaaacagaatcgccggatgctggtgcgggtccgggatttaatccgcacatgcccacggctttgcgagcgcattgagccgagtggcactggaaaccgtgctctttcactgcattcgagccgttatagttatcgctactggcaggaaatggtactgaatattcggccacgcaaattcctccggctgcgaataaatccacctgcttcaaagtggttgctggcaccaacgcagtgccgccaaacagccactccgcaccgattttcggctggttccaccacgcagggcaggggcaggcagtcaggtagctccagttctccagaccgggttcttgcgcccagttatcgagatcagcgcattgccacggatgtagcacatgccgttgatcagcgacgatccaccagacctttaccgcgtccgcactccatgcggcggttattcataaacggtcaggttccgtttcataggcccagttgtagcgtttaccctgtagcgggatgccagggcagcgggcatctgggtgcggaagtcaaagcgatagtccgggcgcccgcttcaagcagcagcacggagcagcttcatgctgtagtgactctagaggatcccccggtggcccggctcaggatttcaccacctttaaagatggtcagacggcgatgtctatcctgtatgcaggctgagcgcgaactggtgcaggactgccgctcactggcgcttttgcgctgcgtggtattccggcgctaccggctggcggtgcgcatattgcgtgacgttccaggtcgatgccgacggtcttttgagcgtgacggcgatgagaaatccaccggcgttgaggcgtctattcagcgaaatcgcttcgatgatcaaagactcaatgagctatccgagcaggacgtaaaagcccgaatgctggcagaacaaaaagtagaagcgcgcgtgtgctggaaagtctgcacggcgcgctggctgctgatgccgcgcgttaagcgccgcagaacagagcgtcgttatcgatatttcgggaacgttcgtgaattggtgttccgttcactatgtaatcgtacctctttcgcctttgcgggtatgacgcctgccatggcgaagctatgcgaccgtcgcagatgctgtatattcagcttttccagaacaagctttcgcaatggtaaatttgatccagtaagcacggttttggccttttcgccattctgttggctcggtattagcatcaacagctttgtaatagcgtctgccccgattacgctgaactcacgtgagatcgtcgaaggactgcgattcagcgcagtagctatcgcacaatgctcattttggctgacaaaccagctcgtatctcctcgcgctcagacgtgtcaggaaggagtgtcgttaaactcaggctacctcaggaaaaaccgtcctgaaaaaccagacggcgacgggctgtattacgcagtcagtcccaacatccgggcgaactggcgtgtttcattagcccgtagcatgaaccattatccgtcagccactccactggagacgacggaagatgttgccgaagcggcgttccaccgctcccagcatgacgtcctgtactgttcactgttgaagccgccgcgaactcgaacccgtcagagcaccatcgctgattgctttctttcacggccctctgcctgtatgtgcccgtttcgatggcggtacagcaggttttcgctcagcaacagcgcattctggcgcatgatccgctctccgataacatggtgtatacggagagcacatccgtatcatcagtgtgacgactgcggcggccatccatccagtatcggttcgtctgagaatgacgtgcaactgcgcacgcgacacccggagaaacggctgactaagcttactccccatccccgggcaataagggcgcgtgcctatccacttttttgcccgtccatattcaacggcttctttgaggagttcttttccatcgttttcttgccgagcaggcgctggagttctttaatctgctcatggcggcagcaagttcagaggcaggaacaacctgttctccggcggcgcagcagtaagacttccttcctggctacgcgtcagcccggcggtcatccctgcctgatgaaaaagctgtctgccatcacgaacagatgtttcagcccacgcgtttgcgttgctgtccgcaactgctcaccgagcccggaccgcaaagcgtcaccggtgaacgctaaatgtttttacccgttgcagattcagggtatcgaacgcctgaagagcgcggtctgcaattcattttgcatatag

SEQ ID NO: 115215 - DNA, 4173 bp, Homo sapiens
atggagctggggcgcgggattaaaggactgatcggccatacccagtcgtgtcgtctggcggcaagaacagtggcgaaccgtattgcggaagatctgaaacacggagccgggcggttgcatcggttacaaagtgcgtttcagcgatcaccggaagaagacacaaacgtcgtgagacataacgtccctggggctgcacacagtcggacgcggttcagaacgttctccggtattgctggcggctggattacaacccaactggcgataaagaagcgccagtgtacgcgtgcctgcatcaaacagactgcgtttatggactcgatgaagtcggacatgggcggcgcggcaacggttaccggggcgctggcatttgccattacgcgcggactgaacaagcgcgtgaagctgttcctctgctgtgcggataacctgattagcggcaatgcgttcaagctgggcgatatcatcacctatcgcaacggtaaaaaagttgaagtgatgaacactgatgccgaagggcgtctggtgcttgccgatggtctgattgatgccagtgcgcagaaaccggaaatgatcattgatgcggcgaccctcaccggggcggcgaaaactgcgctgggtatcgcttctatgcactgctccgccaacgttggtgagaaaggcgatgttgcggtgttcttcggcctttccggcaccggtaaaaccaccctttccaccgacccgaaacgtcgcctgattggcgatgacgaacacggctgggacgatgacggcgtgtttaacttcgaaggcggctgctacgcaaaaactatcaagctgtcgaaagaagcggaacctgaaatctacaacgctatccgtcgtgatgcgttgctggaaaacgtcaccgtgcgtgaagatggcactatcgactttgatgatggttcaaaaaccgagaacacccgcgtttcttatccgatctatcacatcgataacattgttaagccggtttccaaagcgggccacgcgactaaggttatcttcctgactgctgatgctttcggcgtgttgccgccggtttctcgcctgactgccgatcaaacccagtatcacttcctctctggcttcaccgccaaactggccggtactgagcgtggcatcaccgaaccgacgccaaccttctccgcttgcttcggcgcggcattcctgtcgctgcacccgactcagtacgcagaagtgctggtgaaacgtatgcaggcggcgggcgcgcagggcttatctgggttaacactggctggaacggcactggcaaacgtatctcgattaaagataccgcgccattatcgacgccatcctcacgagagcgacacgccgcacccaggcgagcagtaccacggggagacaacgacccaagcggagagagaaacacaccgccccaaaccacaaccgacaaagaagccgaaaaaagcaggcggccccacacgacagagcaaggacagaagaccgaagctaaagccgacagcaacaggaaagtgcggcaccagacacgcagcaaagccagcccaagatgacgccacagaggccgagcacaagcagacaacagtcgaacacacgacacggaacccgcgaaatgcgcggcagacaccccccgacaatgccccacataatcatcaggaaggcacgacgtgggctatcgcgttttaccggttcttccggcgtacgcaaatagcgataggtctgaaaacgcggatccagggttggaccaacattcagggtggtttaacatggcccgattctgatcatagtcgagatcaaaggccggaccgacggcctgtaaattttccagtcgagcctgaagcattggacgcccaagcaggaacatttctgaatcaggtaattcctcggcagcgcctgctcaatgctgttcatccggcggtcgtagatggctttcgccacctcttcctgacgcttcacctgagcttcatctggatggtacgcgcggccatgcgcctttcacctcatcatccgatgggtggctggacgctggctggaaaagcaaatactgagttacaggcagatgaccactggcaagactttgcagcgtcatcagcggatcggtcagcggacacgcgtgctcgcaatacacaggctactgtctgtagattgcacgtgcacagatccacacaccaaaccatggaccgctcaaaaacatccccagcacgaagaactgacaaaggcgacgtaacaccagccaacgcacgcatacttcctcgcactaccgcaccggtcaggctcctgatgccgggtcatgtttatcgcgcgctttatccttgcccgctgcacggcataagcgaggatgacgctatcgccagcatccaccggatcttcaaaaatgatgccgcgccggaagatatcgccgccatccccccaccagctggtcaccacggaccatttgcaatggtgaacaatatgaccgacttaaccgcgcaagaacccgcctggcagacccgcgatcatcttgatgatccggtgattggcgaactgcgcaaccgttttgggccggatgcctttactgttcaggcgactcgcaccggggttcccgttgtgtggatcaagcgtgaacaattactggaagttggcgatttcttaaagaaactgccgaaaccttacgtcatgctgtttgacttacacggcatggacgaacgtctgcgcacacaccgcgaagggttacctgccgcggatttttccgttttctaccatctgatttctatcgatcgtaaccgcgacatcatgctgaaggtggcgctggcagaaaacgacctgcacgtaccgaccttcaccaaactgttcccgaacgctaactggtatgagcgtgaaacctgggatctgtttggcattactttcgacggtcacccgaacctgcgacgcatcatgatgccgcaaacctggaaagctgaccaaagccaaacaggatctggagatggaagccctgaccttcaaaccggaagagtgggggatgaagcgcggcaccgaaaacgaggacttcatgttcctcaaactcgggtcgaaacgaccggtggcgcacgggccatccggaatcgggggaactcgaatgggaagacatggcgactggtacaaaaatgggtcacccccggcggccgccacagtggaacaccagcatgcacgacaacccgtctggcggttgaaacccgcgcggccacgcgggttaacagcggaacagaagcagtgttgagatcgacgccaacggcgtttacgcagtcttctactactgcgtccagtttgctgggccagttgcgtctggctgacgtcatgctgatactgacctacgccgatagatttcggatcgattttcaccagctccgccagcggatcctgcaaacggcgggcgatagacaccgcgccacgcagcgaaacgtcgagatccgggaactcctgtgcagccagctcggaagccgagtaaaccgacgcgcctgcttcgctgacgattactttctgcgcggtcactttcgggaactgcttctgcacatcgagatagaaacgctcagtttcgcgggaagctgtaccgttaccgatcgctaccagttcaacgttatgttattcacacagcgcagcaacggtcatcgctgcttttgcggcctgtccggtgtgcgggtaaatggtgtcggtcgccaccagtttgccagtggcatcgaccatcgtcacttttaccccagtacgcagacccggatcgaggcccatcgttgcacgccgtccggcaggggccgccatcagcagatcgtgccgttacgggcacgacgtgatgctctctcacatctgattcagccaacctttattacggaatatccggcagaagtgtccccgctggcacgccgtaatgatgttaacccggaaatcaccgaccgttttgaattcttcatcggtggtcgtgaaatcggtaatggttttagcgaattaaacgacgcagaagatcaggctgaacgtttccaggaacaggttaatgctaaagctgcaggtgacgacgaagccatgttctatgacgaagattacgtgactgcgctggaatatggtctgccgccaaccgctggtctgggtattggtatcgaccgaatgattatgctgtttactaacagccatactattcgcgacgttattctcttcccggcgatgcgcccacagaaataa

SEQ ID NO: 115216 - DNA, 2187 bp, Homo sapiens
atggcctactcgtggggcgggtatgaatcgttgatcctggcaaatcaaccagaacatatcgccgccattcgcccacaaggcgagatcgattttagcgggaccttgattcgcctgcatattggtctggaagatgtcgacgatctgattgccgatctggacgccggtaaagtgccgtcagctatccacgtaacaccagaagcctacgatggcgggctgctggcaaaagtgcgcgacggggacatcattcgtgtgaatggacagacaggcgaactgacgctgctggtagacgaagcggaactggctgctcgcgaaccgcacattcctgacctgagcgcgtcacgcgtgggaacaggacgtgaattattcagcgccttgcgtgaaaaactgtccgacgacaaatttgtaatcaggcgagagaaaactctgatgaaaaactggaaaacaagtgcagaatcaatcctgaccaccggcccggttgtaccggttatcgtggtaaaaaaactggaacacgcggtgccgatggcaaaagcgttggttgctggtggggtgcgcgttctggaagtgactctgcgtaccgagtgtgcagttgacgctatccgtgctatcgccaaagaagtgcctgaagcgattgtgggtgccggtacggtgctgaatccacagcagctggcagaagtcactgaagcgggtgcacagttcgcaattagcccgggtctgaccgaggcgctgctgaaagctgctaccgaagggactattcctctgattccggggatcagcactgtttccgaactgatggtggggtccggtaaatcacaaacacggcaacggtttatcaagctgaattttcaaagtatgggcatcaactgcggtgacgccaagctggtcaggcgtagctttaccatcaataatcgcctgtgcgttgttgattcccgccagcgcggcaaaccatgcaaatggcgacaatgtttttgggtccaccagacgttgccagctgtagacaaaatcttgcgccgttaccggtgtgccatccgcccattttgcgttatcgcgcagggtaaaagtccagatacgaccttcaaacagatcgcgaatgacctgaatctctggcaggcccacggctttagcgggatccagcgacgcaggctcatctttaatgtggcgcaccagctcctgcttctctgccagtactgtgccgctcggaacttctgcagcatacgaaagagaaatgctgctgaccaacagcgcacaacacatggcctgatttatatgggcaataatggcgaagagctgaaagcgttcaatgttcgtgacggttatggcattcgtgtgcgctcacctctgatattgaagtcgctatcattaccgggcgaaaggctaaactgcgatctgctggaaaaactggcgattgccccggaaaatgtggcttatgtcggcgatgatctcatcgactggccggtaatggaaaaagtgggtttaagcgtcgccgtggacgatgcgcatccacaggcgctgaatattgcccgccagttcggctgtagcgacgatgcgtttatccatcgcgccgaaatgttcctcaaagagctatggatgccagaaattcagcccgacggcgttttgccgcaggatgattcgtttatggctaagccggcgattaatctggcgaaatacaaagcggcggcggggaagcaaaccatactgctggattattcacgcgcagaagtgaacgagatgcagatcctcaaacaagctgatgtggtgatgctcaattacatgctgccggagcagttctcagcggcatcgtgtcttgccaatctgcaattttatgaaccgcgcactattcacgactcgtcattaagtaaagcaatccacggcattgttgccgcacgctgtggcctgctgacccaaagttatcagttctggcgcgaggggactgaaatcgatcttggtgctgatccgcatagttgtgatgatggtatccatgctgccgcaactggcgctatctggctgggggcgattcagggttttgccggggtgagcgtgcgtgacggtgaattgcatctcaatccggcgttacctgagcagtggcaacagttgtctttccctctgttctggcagggctgcgaattacaggtcactcttgacgcgcagcgtattgcgattcgaacttctggcgccgtttcactgcgttga

SEQ ID NO: 115217 - DNA, 1418 bp, Homo sapiens
atgattgcagccacccagggggctgaacgtcacgcctgggttacagggccgctgggcgagaaagtgaatgccagttgggggatctccggcgatggcaaaaccgcgtttattgaaatggcggcggccagtgggctggagctggtacctgcggaaaaacgcgatccactcgtgaccacttcacgcggcacaggcgagttaatcctgcaggcgctggagagcggtgcgacaaacattattatcggcattggcggcagcgctacaaatgatggcggcgcaggcatggtacaggcgctgggggcgaaattatgcgacgccaacggcaatgaaattggttttggcggcggtagtcttaatactctgaatgatattgatatttccggcctcgatccgcgcttaaaagattgcgtcattcgcgtcgcttgtgatgtcaccaatccgctggtgggcgataacggcgcatcgcgcatctttggcccacaaaagggagccagtgaagcgatgattgttgagctggacaataacctctctcactatgccgaggtcattaaaaaagcgctgcatgttgatgtgaaagatgtccccggtgcaggagctgcgggtggtatgggcgcggcgctaatggcgtttcttggtgcggaactgaaaagtggtattgaaatcgtcactacggcgctgaatctggaggaacatattcacgattgtacgctggtgatcaccggtgaagggcgtattgacagccagagtattcacgggaaggtaccgattggtgtcgcaaacgtggcgaagaagtaccataaaccggtgattggcattgcgggtagcctgaccgatgatgttggcgttgtacatcagcatggcattgatgcggacttcagcgtattgaccagcataggtacgttggacgaagcattccgcggggcttatgacaatatctgccgtgcttcacgtaatatcgccgcgacactggcgattggaatgcgcaacgcggggtgacaagggcgcgcaaaccctctatactgcgcgccgaagctgaccacacagtcgccgcttcgtcgtcgtcctctttgagggagacttccggaggggaggaaagtccgcccttcttaggacgggttgcctggtgtgcctggccgctaaaacccaccaccagtactctctttcagtcacccgccctgtgccccggcggtgcaggttcgcatccaagcgacgcccccccgtcgtcagtctgcaaatagaccgctcagaggcactcgctcagtcggtcacaaccttgcctctacgccctccttcgcagcgctggcgaggctggccatcacgaatcagttgctccgcacgaccgatgcgctcgtcccagtcacctctgttcccatcttttcgggctcgcccccgcactatgagccccgcgtctcgcttcggcg

SEQ ID NO: 115218 - DNA, 1241 bp, Homo sapiens
atgggcgcgcacgaagttcatccgctgcatgtggaaaactggcccgatacctcgcactacgagtttctcgccgacactatgtggagcgattttgcctacggtcgcaatgccgtatacccggaaggcatcacggcaacgccgtactgtcgcgttatcccattgaacattatgagaatcgcgatgtttcggtcgatgcgcggcgtgctctactgccgcattgtgccgccgatgaccggaaaagcgattcatgtgatgtgcgtacatctgggcctgcgtgaggcgcaccgtcaggcgcagcttgcgatgctcgccgaatgggtgaatgagctaccggacggcgaaccggtattggtggcgggtgatttcaatgactggcggcaaaaagctaatcatccgttaaaagtgcaggccggactggatgagatttttacccgcgcccacggacgcccggcgcgcacgtttccgtgcggagattcatttatgaaatgtagctggcgcgaaggcaataagatccagttgctggaaaacggcgagcaatattatcccgcggtgtttaaggcgattggcgaggcacaagaacgcatcattcttgaaacgtttatctggtttgaggatgacgtcggcaaacaactgcatgcggcactactggcaagcaagccaaacgcgggggttaaaagcggaaagtcttgctggatggctacggttcgccggatctcagcgatgagtttgtcaatgaactgacggcagctggcgtagtgttccgctactacgatccccgccctcgcctttttggtatgcgcaccaatgtgtttcgccggatgcatcgcaaaattgtggtgatcgacgcgcgtatagcctttattggcgggctgaattactccgccgagcatatgtccagctacggtccagaggctaaacaggattacgcggtacgccttgaagggccgattgtcgaagatattctccagtttgagctggaaaacctgcctggacagagcgcggcacgacgctggtggcgacgtcatcacaaagcggaagagaaccgccagccgggagaagcgcaggtattgctggtctggcgcgataacgaagaacatcgcgatgatattgaacgccattatttgaaaatgctcactcaggcgcggcgggaagtgattatcgccaacgcctacttcttccccggctatcgatttttacacgcttgcgtaaagcggcacggcgcgggggtcggatcaaactga

SEQ ID NO: 115219 - DNA, 2170 bp, Homo sapiens
cgccgcaggctggcgtttgatcgagcgaagcatcgccgggcagagatgttagcgcaacgtgcgcgtggcgaagaggaagcgcatcatcacagtagcccggaaggagcaattgaagtcgatgaaagcgaagtcgatctcgatgccatcagtgcgcaatccttgcggctggtgcgctcaattttgatgttgatcgccctgctttctgtcattgtgctgtggtcagaaatccattccgctttcggcttcctcgaaaatatttcgctgtgggatgtcacctccacggtacagggcgtagaaagtctggagccaattaccctcggtgcggtgctgattgccattctggtgtttatcatcaccacgcagctggtgcgcaacttgcccgcgctgctggaactggcgattttgcagcacctggatttaacgccgggtacgggttacgccatcaccaccatcaccaaatatctgctgatgctgattggcgggctggtcggcttctcaatgattggtattgagtggtcgaaattgcagtggctggttgccgcgctcggtgttggtctcggttttggtttgcaggaaattttcgccaactttatctctggtctgattatcctgttcgaaaaaccgattcgcattggcgatacggtgacaattcgcgatctcaccggtagcgtgacgaaaattaacacccgcgccaccaccatcagcgactgggaccgtaaagagataatcgtgccgaacaaggcgtttattaccgagcagtttatcaactggtcgctctctgactcggtcacgcgcgtggtgttgacgataccggcccctgccgatgccaatagcgaagaagtgacggaaatcctgctcaccgcagcgcgtcgctgctcgctggtgatcgacaacccggcaccggaagtcttcctggtggatctgcaacaggggattcagattttcgagctgcgtatttacgccgctgagatgggtcaccgtatgccgctacgccatgagatcccacagctgattctggctggcttccatgcccacggtatcgatatgccatttccgcccttcagatgcgtctggaaagcctcaacggtaaacaaacggggagacggagaacgtcgtccgctctcctgggtggttggcgatcagggcgtttatcgcgccaatatgcaatcagagcgcgaaccaagcgcggtgaacgcattgcctcaccacggaccatttgcaatggtgaacaatatgaccgacttaaccgcgcaagaacccgcctggcagacccgcgatcatcttgatgatccggtgattggcgaactgcgcaaccgttttgggccggatgcctttactgttcaggcgactcgcaccggggttcccgttgtgtggatcaagcgtgaacaattactggaagttggcgatttcttaaagaaactgccgaaaccttacgtcatgctgtttgacttacacggcatggacgaacgtctgcgcacacaccgcgaagggttacctgccgcggatttttccgttttctaccatctgatttctatcgatcgtaaccgcgacatcatgctgaaggtggcgctggcagaaaacgacctgcacgtaccgaccttcaccaaactgttcccgaacgctaactggtatgagcgtgaaacctgggatctgtttggcattactttcgacggtcacccgaacctgcgacgcatcatgatgccgcaaacctggaaaggtcaccgcgctgcgtaaagattatccggcgcgcgctaccgaattctcgccgtttgagctgaccaaagccaaacaggatctggagatggaagccctgaccttcaaaccggaagagtgggggatgaagcgcggcaccgaaaacgaggacttcatgttcctcaacctcggtccgaaccacccgtcggcgcacggggctttccgtatcgttttgcaactcgatggcgaagagattgtcgactgcgtaccagacatcggttaccaccaccgtggtgcggagaaaatgggcgaacgccagtcctggcacagctacattccgtatactgaccgtatcgaatacctcggcggctgcgttaacgaaatgccttacgtgctggcggtagagaaactggccgggatcaccgtgccggatcgcgtaacgtcattcgcgtatgctctcctccaatgctccgcataa

SEQ ID NO: 115220 - DNA, 1903 bp, Homo sapiens
  misc_feature (1)...(1903): n = a,t,c or g
atgcgtactgtcagaatcgatgagtggcacgcaggccacaatctcatcgccatcgagttgcaaacgatacggaaagccccgtgcgccgacgggtggttcggaccgagtagcgttcgggaacagtttggtgaaggtcggtacgtgcaggtcgttttcgccagcgccaccttcagcatgatgtcgcggttacgatcgatagaaatcaatggtagaaaacggaaaaatccgcggcaggaatccttggacaacgccagaattgcagccggatttcggttgctggcgtttgaactcatgcaaacgttgaactggaattatcgaaaatcgcctgtggattgtcctcaataccgtgatttatccaacagagccgccagtgccgggttgcactgtttgacccagcgacgtggggtaataccgttggtgacgttatggaatttgttcggccatagctggtgatattccgggaacagatctttcaccaccagatccgagtgcagcgccgcaacaccgttcaccgcgaaaccgccaaccacacacaggcacactggagtattgctgcatcaggcgcagctttttaccggcagtatggttgtcgtttgatagagaactttggtcagtttttccgcattgatgccctgctgttcggccgcaagaaatcaccgtcgttaaatttactggcaacgtctggtggtaccaaaaacattgtcgccatttgcatgtttgccgcgctggcgggaatcaacaacgcacaggcgattattgatgtcattcatctaggcagcaatcgctcactggctcaagcagcctacccgggttcagtacgggccgaccttatgaacccctatttggccttgctccgggtggagtttaccgtgcccggactgttaccagccgcgcgtgtcgcggcgatattcgtgaagcacggcagatattgtcataagccccgcggaatgcttcgtccacgtacctatgctggtcaatacgctgaagaccgcatcaatgccatgctgagtacaacgccaacatcatcggtcaggctacccgcaatgccaatcaccggttatggtacttcttcgccacgtttgcgacaccaatcggtaccttcccgtaatactctggctgtcaatacgcccttcaccggtgatcaccagcgtacaacgttggccaaccagcgtgtttccggcgcttctggtccagggcaggtttttccaggcttcaaaaccgagggaatatccttggacaaatcgggcccttcaaagcggtaccgggtaacccctgttttagccttctggaacgtaagctggaacatatgcctcggcggagtaattcagcccgccaataaaggctatacgcgcgtcgatcaccacaatttgcgatgcatccggcgaaacacattggtgcgcataccaaaaaggcgaggcggggatcgtagtagcggaacactacgccagctgccgtcagttcattgcaaactcatcgctgagatccggcgaaccgtagccatccagcaagacttcgctttaaccccgcgttgcgctgctgccatcattgaaatcacccgccaccaaatacggtcggcgtcggtagctcattcacccatcgggagcatcgcagctgcgctgacgtgcgctacgcaggccaataccatcaacgacaacacgccgcctggacgcaacactgaccagagggtctgcaatacgctgcggggatcagccacccactcgagcaccgcatggaacaatatcagatcaacgggcgtttccaaatgcgaagcaacatcctgagcggcgcaatgtataaattgcatgttgtcgctcacaccttttgcttctgccgcctgttttgcgcggtcgatcatctgcgcaaaaagatcgcataanatgacctgatgcccacgctcggccat

SEQ ID NO: 115221 - DNA, 684 bp, Homo sapiens
agttagagctgaagaagctggcaacctggaaaaagctaacgcacacaaaggaaaaaaaaaaaagagagaagaaggggtagaagaaggaggaggaggagaaggaagaggaagagagaaaggaagaagaggagaagaagaggagctattctcctatgccactgccctggtgacggggcacatggccgaagggagcgcagcgtccgggccagggaccaagccccgcggcgtccggcccgcgcccttcgccgaccgggcgccccctgaccgtcaccacgaaagcagcgcaggagacaaagcccgggactcgggttcagagtccccggcgcagcgcaaagcccgcgccttcccgccagcccgccgccgcgctccgccgggcagccgagggctccgcacgccgcgcctctggcccgcgctgccccggccgcagccgccgggaacatcctccgcctcctcccgctcctcccctcgcgctctgcgcccgccgccgccggcaccgccgacctccccgcgccgctggcgccggccagcgcagaaatatttccagcaaattcattctgcaatcggcttgcataacgctgaccacgttcataagcacttgttgggcgataatcgttacccaatctggataatgcagccatctgctcatcatccagctcgccaaccagaacacgataatcactttcg

SEQ ID NO: 115222 - DNA, 442 bp, Homo sapiens
attcttgcagccaccctgcgaaccctgccacactgcgatcgcatcatcgcggtattcggttcgctgcgttcccgccgccaccgcctcggcgccctttcttggcccttgttcccccaaatgtctgactctgactctcggactgagaaacgcaagaaaaaaagaccaaatggcaaagcaaccttctgatgtaagttctgagtgtgaccgagaaggtagacaattgcagcctgcggagaggcctccccagctcagacctggggcccctacctccctacagacagagccacaaggtaatcctgaaggcaatcacggaggtgaaggggacagctgcccccacggcagccctcagggcccgctggccccacctgccagccctggcccttttgctaccagatccccgcttttcatctttatgagaagatcctccctgctgtctcgatcc

SEQ ID NO: 115223 - DNA, 1848 bp, Homo sapiens
acagagttcctcggggacaggaactgtcatcctcacacctcagaactgagcgcagcgtccgggccagggaccaagccccgcggcgtccggcccgcgcccttcgccgaccgggcgccccctgaccgtcaccacgaaagcagcgcaggagacaaagcccgggactcgggttcagagtccccggcgcagcgcaaagcccgcgccttcccgccagcccgccgccgcgctccgccgggcagccgagggctccgcacgccgcgcctctggcccgcgctgccccggccgcagccgccgggaacatcctccgcctcctcccgctcctcccctcgcgctctgcgcccgccgccgccggcaccgccgacctccccgcgccgctggcgccgggtgcccgcgttcccaattggtccgcgcgcggtcgctccgcgccgcagccaatcggcagccgcggtgggggcggcgcctacgggtcaggccgccaaaggcgaggcgattgttgacaaactcgcctccgagcgctgctctggccgtggtcgtggcggctgccgcttcgtcggaggatttgagggccggctggcccggccaccctgcccatccctgtgctccttccggacacaagccttagcagctcccgccgtcctggacagccagtcacctggagacaaagcaggacttgcgccgcgcccggacccgcagggccatccccaggcccagtcctcgccacttgtccttgttttggcccgtcgggggcagaccctaacggccgtcaccgccctggctgtggcaactattctcctccaacaacttcctctctctcctggtgcgccgcagacacgagtcaaagccgaagagccacccctggccgcggacgcgcacgtccgcgaccatcgagtaaattcacaccctccgccctggcgtccgtcgggccctccaccagcagcgccaaccctggggcaacaggtcccagagggcacggcgccgccagcctgcaccgcgaaccgggtcgggtggtcaggggaggacctagatttctcgctgccagggaatcgtgcggatggcacaggccgcaggactcctgcagagcaagcaggggccccagggcgccggagccggcggcgagactttccagctgggcgcacagcccgatactacgagcaggtcctcagctcccgggccggcgccgaaaggcacgcgctgcctctcctcctgcccggacctacgacccttcaccaggcccgcgcgcagcatcccgtcccaagccgcacttcggccaagagcctgcaggttccgcgtgaacgacttttctttaaagagaacctgcccgagagggaacccgatccacacggatccccacctcccgccggcgacaagcggcgccgatgcaagcgtctccgctcgcacgtgcacgggaagcgggcagtaggtggtgccgttcgggctccagcgctagtcttccttcggtgccaggcccgcgccccgggatttggaggtatttaccttgcgtttctcagtccgagagtcagagtcagacatttgggggaacaagggccaagaaagggcgccgaggcggtggcggcgggaacgcagcgaaccgaataccgcgatgatgcgatcgcagtgtggcagggttcgcagggtggctgcaagaatcaagtggtggtagtggcggcggcggcggcggcggcggcggcggcggcggcggcggcagcggcagcggcgctggacgcagagctccaacaaactgcagaccaggcggctgcgcggagcgaagtgaaacctgcgcggccctgcagcccagctctggctggcggccccgctcctacgcccaatcactgcggaccccgcccccgctag

SEQ ID NO: 115224 - DNA, 433 bp, Homo sapiens
atgcttttaccgctgttccttctcattcacaccggaatcgggccaagctactcagccagcgaccgcgcagagccgaggccctcgcctgggggcagattgactgctcgaatttggatcaagggtgtgaaggaggatggagggaccatgcaaggggctgtcgactggggagagggggttgaaagatgcgcaggacgcatcactgcgagccataaggttgcagacaaatggcattcgtcacggaattccctgggtggttcgcccgagcctggaacgccagcccctggaccgtgggtgggtttctgccatccttgcctgcccgcctccccgttgtcctggactgcgaccggaacggcggccacgcatgcgcagtgtgcggagagggtccacaacctctgtcgcagggcaaagccaagttgagcaaggaggatgttga

SEQ ID NO: 115225 - DNA, 198 bp, Homo sapiens
atgcaggctggactcgcccgggccatggtcctggctgctggctggtctagggtggcctcggctggggcagctggcgacaccagtcctgttccaagagccttgtctgatcttcgaatcacccagaagtgtggtctccttgtccccaaggctgtttcctggaagagcctctttctgttccccatcaccgtggaactataa

SEQ ID NO: 115226 - DNA, 504 bp, Homo sapiens
caagaattcggcacgaggatttttttttgtttgttttgtttttaaacattcaaaagcaattaatgatcagacataggagaaaccctgaatagaaacaaaacttttgaatgctggattcaaaaaaaaaaaaaagttatctggacagcttctttgagactatttaaaaactggtacaacaggtctctacaacgccaagatctaactaagctttaaaagggatagctgggagtatggccaccctgctccacgatgcggtaatgaatccagcagaagtggtgaagcagcgcttgcagatgtacaactcgcagcaccggtcagcaatcagctgcatccggacggtgtggaggaccgaggggttgggggccttctaccggagctacaccacgcagctgaccatgaacatccccttccagtccatccacttcatcacctatgagttcctgcaggagcaggtcaacccccaccggacctacaacccgcagtcccacatcatctcaggcgggc

SEQ ID NO: 115227 - DNA, 488 bp, Homo sapiens
ggacagcttctttgagactatttaacaactggtacaacaggtctctacaacgccaagatctaactaagctttaaaaggtcaagaagttttatggctgacaaaggactcgcgcaacgcagaaggcctttcccaccttaagcttccggggatctgggaattttacccccattctcttctgtttgtctgagtctcatctctctgcaaggatagctgggagtatggccaccttgctccacgatgcggtaatgaatccagcagaagtggtgaagcagcgcttgcagatgtacaactcgcagcaccggtcagcaatcagctgcatccggacggtgtggaggacgaggggttgggggcttctaccggagctacaccacgagtgaccatgacatcccttcagtccatccacttcatcactatgagttctgcaggagcaggtcaaccccccggactacaacccgcataaaacatcattcagggggtgccgggcctgc

SEQ ID NO: 115228 - DNA, 769 bp, Homo sapiens
gcggccgcggcgagggcccgcggccagcccgcctgagatgatgtgggactgcgggttgtaggtccggagtggggttgatctgctcctgcaggaactcataggtgatgaaagtggatggactggaaggggatgttcatgttcagctgcgtggtgtagctccgggtagaaggccccccaacccctcgggtcctcccacaccgtccggatgcagctgattgctgtaccggtgctgctgagttgtacatctgcaagcgctgcttcaccacttctgctggattcatctaccgcatcgtggagtcagggtgggccatactcccagctattccctggcaaaacaaacttccagaaaatttacccttttgcgattcgggtgttctcaggaagttcctgggaacctaaaatcagacggaacccagggacttagctttctaaggaagcaaaatgtacttaccagctccgcccagggtgaggcactggactctttaaaaccctggaagtgatggtggaaatatggataaaaatgggggatgggttaattttagggcacattcaaccacatttttaatcttgcaaaaacatggttttctttcttgtaagtcaaccctgggaaaaagctaaacctgcaagtgtttggtggttcccagaaaccacacaccatggctttttccactgtctagatgttaactctctcttgtccctcgcctttgtctacacattaactcactttgcccttaagctggggccctgaaaggagatatcatatctacag

SEQ ID NO: 115229 - DNA, 1548 bp, Homo sapiens
cattaaaaccctgagcctaaggtaccacagatagtctcattgggctattggcctgtgaactccacttacaatgtcattgaacttgggcagacataattctagtgtctgttccaaacgcactgtgtcacagaagctagaattaccattagaggcacaaacccctgagaatacacaagggggcacgcttccagtagatgtgttggggaaggaggagagcacgagcgggacagcgggacatggatgtcagcgtttgtaggtgggtccatgagggttcctaccaggggtagccaggatctgggaaacagatcagcgactctagtctgaagtggctgcctggttcgggggctgccttcagcaagattcaggcaggagagacggtaatagccaccttccaggcgtgagtcctggagataaaaatggattttaacctaggaactgccgggagctggccctacgcgggctgctcagactagggctgtgtgtgcctggctctcgcctgtttccggtgtctaactggcttgtttctctttatggcttggcttcattccgacctggggtggggccacatccaacccactgcccactggctgtccgtctggccttgccccgcggttccaaccacagtggtgaagcagcgcttgcagatgtacaactcgcagcaccggtcagcaatcagctgcatccggacgggtgtggaggaccgaggggttgggggccttctaccggagctacaccacgcagctgaccatgaacatccccttccagtccatccacttcatcacctatgagttcctgcaggagcaggtcaaccccccccggaccctacaacccgcagtcccacatcatctcaggcgggctggccggggcctcagccgcgcgccacgacccccctggacgtctagtaagacccttctgaacactcaggagaacgtggccctctcggtggcgcaacatcagcggccggctgtccgggtatggccaatgccttccggacggtgtaccagctcaacggcctggccggcctacttcaaaggcatccaggcgcgtgtcatctaccagatgcccttccaccgcccatttcttggtctgtctatgagttcttcaagtactttcctcacccaagcgcccagctggaaaaatcgagctcccatactaaaaggaaagggatccatagaaatctttttcttaaagtccattctctgccttgcatcccagcccccttgccctcttccttcacacgtaggatcattattttttttttgcaggggtgctgcctaatgggccctctggttcccaattgccttagaaaagaggagggcgacggcacggcgcatacaccggaaggctgtgtgcggggacaaccgaagttgttggttggaaagaaaggactttgggaaggggaccgagaaaatgccttttccccgcctccccggggaaaatgtaggcttttccggttcaatgtggcaagctcctcccactgatccttagatcccagaggagggaagaaaatttgcagtgactgaaaacagtaaaaaaaaaaaaaaaaaa

SEQ ID NO: 115230 - DNA, 540 bp, Homo sapiens
atggcgcggctcgggagcgcgccgcggccaatcaggagcggcgggagcggcgccgggagccggcgggcgcagagcgagctcgagtctggagccggcgtcggcgctgcggccgggagggatcgtggcgagagcagtgcggccggtgatagtttgaccaatccaaatggaacttctgctttggcagaagccacagctatggaaagccagcaacctgaattatgggctgatgtctccatgtgcttccgatgcttggagagggatgcccatgaaagaactctcctcacacagtccacaccaccccgtgctctgtctggtgttcctcccaggaaaactgagcaaaatgaaagccaattcaaagaagaaggaattaagtacataattgtgcagatgatacatggaaatgctcggtacccagactgtacaagaagcatggcagcagcatctgcttttgaccagtccgagagctcctccggggagaaccatgtggtggatggaggctctcaagaaccattccactcggagcaggatgactcctcttga

SEQ ID NO: 115231 - DNA, 472 bp, Homo sapiens
taatcaaaccaggcaccaaaatgctaacactccttcctggagaaagaaaggctaatatttattttactcaaagaagagctccatctacaggcattcaccagagaagcattgcttccttcttcaccttgcagccagatgtgtgagcttttaatctctggctgatcttaacccacatcagcctaagcttgggatgattactcttgacccttttttttcagtgattagcaaatctccccacaacccaggtgtggagagaagagaggtagaatggtgctagtttcctattttatttttgtggtaactgtacagcactttaaagttatatactctatgtttaaatatctcccttaaaaagcctgagctgtacaacaatctggatgtgactctgttacccttttcccacaagataggagggaatcccctttgtaaaactatgaatccaaataaatgtttacaaagtgaaaaaaaaaaa

SEQ ID NO: 115232 - DNA, 1384 bp, Homo sapiens
gttcgagaccctagtcagtgtggggtaattcgcagcctgcgccggcgtcctgccggcttcgtctcctcagcggccatgaggcggacaggccccgaggaggaggcctgcggcgtgtggctggacgcggcggcgctgaagaggcggaaagtgcagacacatttaatcaaaccaggcaccaaaatgctaacactccttcctggagaaagaaaggctaatatttattttactcaaagaagagctccatctacaggcattcaccagagaagcattgcttccttcttcaccttgcagccaggaaagacaaatggcagtgaccagaagagtgtttcatctcatacagaaagtcagatcaacaaagagtccaagaaaaatgcgacccagctagaccatttgatcccaggcttagcacacgattgcatggcatcccctttagccacttcaaccactgcagacatccaggaagctggactctctcctcagtccctccagacttctggccaccacagaatgaaaaccccattttcaactgagctatctttgctccagcctgatactccagactgtgctggagatagtcataccccactggctttttccttcactgaggacttggaaagttcttgtttgctagaccgaaaggaagaaaaaggggattctgccaggaaatgggaatggcttcatgagtctaagaagaactatcagagtatggagaaacacaccaaactacctggggacaaatgctgtcagcccttatgcaagactaaattggaaagaaaggtgtctgccaaagaaaacaggcaggcccctgtcctccttcaaacatacagggaatcctggaatggagaaaacatagaatcagtgaaacaaagccgtagtccagtttttgtgttttcctgggccaatgaaaagaatgacaaggactcctggagtcaacttttcactgaagattctcaaggccagggggtcattgccccccaccatagaggttccttttcaagatgtaaccaataactggaattgggacttagggccgtttcctaacagtccttgggctcagtgccaggaggatgggccaactcaaaatttgaagcctgatttgctttttacccaggactttgaaggtaatcaagttatcagacaccaattctaaatgtttgaagctttgtttctaaaagtaccttgaaatgatagagatgtaggaaaatatagttgtgggtggagagaggagtgagtttgtttaggtgggaaggtggcatgggatgaagttgtcattactgagcatcttctctgtgtaaataaagggcagtaccattgttaagacagtgattagcaaatctccccacaacccaggtgtggagagaagagaggtagaatggtgctagct

SEQ ID NO: 115233 - DNA, 1344 bp, Homo sapiens
atggcccccagtccaaactcctggatcccctccatgagagaggggctccccctggaacagaagctctcatccccaggcccagtgcacaagaccaccagcagagacccaccgcccttcctggcagagcaccacttcctggcagtgcagctccgaggcaccactactgtcctccccttccctccagagcaagacaagaaacaagaaacagcgaagaggcaaacgaaaaacgggaaagagaaagagaagagagaacaaagaagaaaaacaagcagcccgagcacccgaacacaagacacggcagggccaccggcggcagaacaccgggcacagagaaacacacacgaccaagagcagagagcacgcagcagagaccaaacacgacaaccgaaaaaggcgcacggaaagaacgagaaaagcgaccgcggcgcgcaaaggtgcccacgtctggcggttttcaagcagctacctggacagcctggatcggattggggccgcgactaccagcccaccgagcaggacatctccgaaccagggtcaaaaccactggcatccgtagaaacccacttcacattcaagaacctccacttcaggctgtttgacgtcggaggccagcgatctgaacgcaagaagtggatccattgcttcgaggacgtcacggccatcattttctgtgtcgcgctcagcggctatgaccaggtgctccacgaagacgaaaccacgatggtgacaatggtagaatggaccaccgggctaaaagctgtaaaagtgcctgtacacaggaatcatcactcagtgaatagctcctgtggctacaacattcagatgccatggctagagaaccgcatgcacgaatccctgaagctttttgacagcatctgcaacaacaaatggttcacagacacgtccatcatcctgtttcttaacaagaaggacatatttgaagagaagatcaagaagtccccgctcaccatctgctttcctgaatatacaggccctgtgtcctgccacgaggacatgtgctgctggcggctggtcacgagtgtgctggggaagcagcaccctggtgacaatcagtataacagcccatgtgttaacatttgcacggatggtgcaaaagtagcagcagcagatacaatcgtggtctccttagccagaagccaggcgccggcgctggactcggcgccgggctgcagagctgccattgcactccctaccaccatgcatgccaagaaagcaaatgctggctggactgaagaatgtcgttgctcccagagggcttggctggtgcccacccaggggaaccggcattaccgtgttgatgctggtagtgtttacatgcggcag

SEQ ID NO: 115234 - DNA, 1094 bp, Homo sapiens
atgggatgtactctgagcgcagaggagagagccgccctcgagcggagcaaggcgattgagaaaaacctcaaagaggatggcatcagcgccgccaaagacgtgaaattactcctgctcggggctggagaatcaggaaaaagcaccattgtgaagcagatgaagatcatccatgaagatggcttctccggagaagacgtgaaacagtacaagcctgttgtctacagcaacactatccagtccctggcagccatcgtccgggccatggacactttgggcatcgaatatggtgataaggagagaaaggctgacgccaagatggtgtgtgatgtggtgagtcggatggaagacaccgagcccttctctgcagagctgctttctgccatgatgcggctctggggcgactcaggaatccaagagtgcttcaaccggtcccgggagtatcaactcaacgactctgccaaatactacctggacagcctggatcggattggggccgccgactaccagcccactgagcaggacatcctccgaaccagggtcaaaaccactggcatcgtagaaacccacttcacattcaagaacctccacttcaggctgtttgacgtcggaggccagcgatctgaacgcaagaagtggatccattgcttcgaggacgtcacggccatcattttctgtgtcgcgctcagcggctatgaccaggtgctccacgaagacgaaaccacgaaccgcatgcacgagtctctcatgctcttcgactccatctgtaacaacaagttcttcatcgatacctccatcattctcttcctcaacaagaaagatctctttggcgagaagatcaagaagtcacctttgaccatctgctttcctgaatacacaggccccaatacctatgaagacgcagccgcctacatccaagcacaatttgaaagcaaaaaccgctcacccaacaaagaaatatattgtcacatgacttgtgccacagacacgaataacatccaggtggtgttcgacgccgtcaccgacatcatcattgccaacaacctccggggctgcggcttgtactgacctcttgtcctgtatagcaacctattttg

SEQ ID NO: 115235 - DNA, 1499 bp, Homo sapiens
atgggcagaggcaggagggcggcccggggcagcacctgctctgctctcacctactctgcgttggacattaaaggctgtggctgcctcagacggagcacatatcttcctgggcaaggccacttcagctgtggtctagacccctctaccaggccctgtcagccgtccagggagctctcggcacaggctgacgccaagatggtgtgtgatgtggtgagtcggatggaagacaccgagcccttctctgcagagctgctttctgccatgatgcggctctggggcgactcaggaatccaagagtgcttcaaccggtcccgggagtatcagctcaacgactctgccaaatactacctggacagcctggatcggattggggccgccgactaccagcccactgagcaggacatcctccgaaccagggtcaaaaccactggcatcgtagaaacccacttcacattcaagaacctccacttcaggctgtttgacgtcggaggccagcgatctgaacgcaagaagtggatccattgcttcgaggacgtcacggccatcattttctgtgtcgcgctcagcggctatgaccaggtgctccacgaagacgaaaccacggcagtgatgtcagtcaccagcccagtcttgatgctgagtggggcaagggtggatgcgcttcctgggccgtgcttggacccagactcactgaccacccaaagcccagccgccctgtccgctgcatcccgggagcccgagagcctggtcctggcctcgtacctgctctcagcaccgcccagccgggcctgcggctgccacagcttctccactaccacggtcgcctccactgcctgcagggccttatcttgccaaaccaaggccaaaaccagttctgagagaccctccaagcccggaaggcccaggatggccatggcccctaaccgcatgcacgaatccctgaagctttttgacagcatctgcaacaacaaatggttcacagacacgtccatcatcctgtttcttaacaagaaggacatatttgaagagaagatcaagaagtccccgctcaccatctgctttcctgaatatacaggccccagcgccttcacagaagccgtggcttacatccaggcccagtacgagagcaagaacaagtcagcccacaaagagatctacacccacgtcacctgcgccacggacaccaacaacatccagtttgtctttgatgctgtgacggacgtcatcatcgccaaaaacctgcggggctgtggactctactgagcccagccgccctgcccggcacccttgccctgcctggcctgccgcccccccttccttggaaccaggctccaccactctcagaccactctttgcacttgaggaagaagacctcagaggctggcaccaagggagggaggagggagcatcctccacccgcaccccccaacagaacttgtggtaacgcaggggcggggcggggctgctgatgtcatgctgcaaggccaggagactccaaa

SEQ ID NO: 115236 - DNA, 1809 bp, Homo sapiens
atggccgccgggcccggcctgcaatgcctggtctctggctcggcgggtccagctcacgctccctctccattggcctgtgcactcctgccccctgggaccagctggctgctggagagagctttctggaagcagcacccctacctgctgcgcaccatggctgttatactgattgtcaccagggtgctgcttccccagcacactcgtgacagccgccagcagcacatgtcctcgtggcaggacacagggcctaatcaggggagatttagctcaacgcagaccactcgactgggctggagaagggtgcttcacttctgggaactggggctctgctgcgtaaaacaagagaaaaaagccacaaaggcagagagggcagctgcccagagaacaggactgggcagagaggagcgggcaggccttcactgccacctggagcggtcactgctgtctctcctgcagaactgcctgggcgggagcacgcatgagttttctaaagaagtcagctctagccgtctgccccgcgtaaaataccacaggccagacctggtatcttcatccattcaggctaccatagcagaatccataagctgggtggcttatacacaacagaaatttatttctcacagttcggaagctgggaagttcaagatgaaggtgctggcagatcactatcaggtgctccacagatctacagaaaccatgaaggagggcccaaagaaggaagagttggaaaactcttgccaggtccaccaccccattcctcagatgggaaagtaccccaagattgcccgagacggagcacatatcttcctgggcaaggccactcagctgtggtctagacccctctaccaggccctgtcagccgtccagggagtctcggcacaggctgacgccaagatggtgtgtgatgtggacggccccacaacaaagagttacgtggccccaaacatccatagtgccaagattaagaaccctgatctacgcaatgccaatggacagaggctgaggccaatgttcatcctggacatttccacgggccacatggcagccaacagactagggacttggcaaggccgggagcggcttcccatttctgcacacctagattgtccagaggcaaatgccgaagtcctctacctggacagcctggatcggattggggccgccgactaccacccaccgagcaggacatcctccgaaccagggtcaaaaccactggcatcgagaaacccacttcacattcaagaacctccacttcagcgcccaaacatcatcctgccccagggaacctgcggctggggcaggcagctagatactagaaggaacctgtctgtgtttctgcaaggctgtttgacgtcggaggccagcgatctgaacgcaagaagggatccattgcttcgaggacgtcacggccatcattttctgtgtcgcgctagcggctatgaccaggtgctccacgaagacgaaaccacggccttatcttgccaaaccaaggccaaaaccagttctgagagaccctccagcccggaaggccccagcccttcacagaagccgtggcttacatccaggcccagtacgagagcaagaaaagtcagcccacaaagagatctacacccacgtcacctgcgccacggacacaacaacatccagtttgtctttgatgctgtgacggacgtcatcatcgccaaaacctgcggggctgtggactctactgagcccagccgccctgcccggccccttgccctgcctggcctgccgccccccctcccctggaaccaggctccccactctcagaccactctttgcacttga

SEQ ID NO: 115237 - DNA, 442 bp, Homo sapiens
gcgactggcatgacccgcaatctgcacagcagcagcggccctctgtcccgcgaagccgaatccttctcctcccagtcggaggtgtccagggcctcccgcgtcaccaggcatcggacactgtgggtcccgtcagacacaagcagcgtggccccgacgtcggacgtatcaggggcgtgggatgggcccgcgaccgcggcctcggcgtcctgtagtacctcaagcagctgcccggctcgtggactggagggtgtctctgaccccagaatcagctcccgaatccagggccgtaggaccagcctccccgaacctgccatccccacggctacacccagcggatgcaacgggcccgggcccaaaagtccgaacacgcgtccgcccacgcgtccgaccacgcgtccgcggacgcgtgggtcgatccgggaagttccttcacaaacgttaa

SEQ ID NO: 115238 - DNA, 407 bp, Homo sapiens
  misc_feature (1)...(407): n = a,t,c or g
gcacctgtaccactgcagtcgcctcctgctgaaactgggcacatttgggcccctgcgctgccaggaggcatgggccctggagcggctgctgcgggaagcccgagtactggaggcagtatgcgagttcagcaggcggtgggagatcccggccagctctgcccaggaagtggtgcagttctcggcctctcggcctggcttcctgaccttctgggaccagtgcacagagagactcagctgcttcctctgcccggtggagcgggtgcttctcaccttctgcaaccagtatggtgcccgcctctccctgcgccanccaggctttggctgaggctgtgtgtgtgaagttcctgggaggatgccctggggcagaagctgcccagaaggccccagccagggncttgagagcagct

SEQ ID NO: 115239 - DNA, 391 bp, Homo sapiens
gcgcccgcgggaaacccggacccgatgtatccgttgggtgtagccgtggggatggcaggttcggggaggctggtcctacggccctggattcgggagctgattctgggggcagagacaccctccagtccacgagccgggcagctgcttgaggtgagcccccattcagggcccggagaccgaagcggaggcccggaggggtgggaatgactccgctcgccgccgacaggtactacaggacgccgaggccgcggtcgcgggcccatcccacgcccctgatacgtacgacgtcggggccacgctgcttgtgtctgacggcacccacagtgtccgatgcctggtgacgcgggaggccctggacacctctgactgggaggagaaggaagttcggctt

SEQ ID NO: 115240 - DNA, 698 bp, Homo sapiens
aagggctcttgctgcggccagtggcacccctgcgcacccggccacccttgctaatcagcctgccccaagatttccgccaggtttcctcagtcatagacgtggacctactgcctgagacccaccgacgggtgcggctgcacaagcatggttcagaccgccccctgggcttctacatccgagatggcatgagcgtgcgtgtggctccccagggcctggagcgggttccaggaatcttcatctcccgcctggtacgtgggggtctggctgagagtacagggctgctggcggtcagtgatgagatcctcgaggtcaatggcattgaagtagccgggaagaccttggaccaagtgacggacatgatggttgccaacagccataacctcattgtcactgtcaagcccgccaaccagcgcaataacgtggtgcgaggggcatctgggcgtttgacaggtcctccctctgcagggcctgggcctgctgagcctgatagtgacgatgacagcagtgacctggtcattgagaaccgccagcctcccagttccaatgggctgtctcaggggcccccgtgctgggacctgcaccctggctgccgacatcctggtacccgcagctctctgccctccctggatgaccaggagcaggccagttctggctgggggagtcgcattcgaggagatggtagtggcttcagcctctga

SEQ ID NO: 115241 - DNA, 527 bp, Homo sapiens
taggaaagacattttgcttttttattttctgtaaaactctgtaaataaaatacaaaaccaagggatgtggctgggcagcggcagggtggccaagccccagacactgatttgtggcaagggatgtgctgagccgaggctgggaggcacttgactgcaggcactgactctccaaccccaggggcaacagaagaatatattagattttcattgctaggaatctgtgggggaggggtatctggagccagcccttaccctccctgccagtgcctggtgagccctgaaagtggggggaaaggggcaccaggaacccatgggtgaatagtttagaatgctgtgctggccatgctgccaggcccaaagatgcggggcaaggccgtccagggactcctccagccgtcgatgggcagactgtccctcttctccacactgctgtaggctttgccgggcagcttccctcacagcttctgtgtcagtttggcagaggtacaccaggggctcaatgccctcgggagccttgatgcagccta

SEQ ID NO: 115242 - DNA, 1258 bp, Homo sapiens
atggaaggtgatgcagtcgaagccattgtggaggagtccgaaacttttattaaaggaaaggagagaaagacttaccagagacgccgggaagggggccaggaagaagatgcctgccacttaccccagaaccagacggatgggggtgaggtggtccaggatgtcaacagcagtgtacagatggtgatgatggaacagctggaccccacccttcttcagatgaagactgaagtaatggagggcacagtggctccagaagcagaggctgctgtggacgatacccagattataactttacaggttgtaaatatggaggaacagcccataaacataggagaacttcagcttgttcaagtacctgttcctgtgactgtacctgttgctaccacttcagtagaagaacttcagggggcttatgaaaatgaagtgtctaaagagggccttgcggaaagtgaacccatgatatgccacaccctacctttgcctgaagggtttcaggtggttaaagtgggggccaatggagaggtggagacactagaacaaggggaacttccaccccaggaagatcctagttggcaaaaagacccagactatcagccaccagccaaaaaaacaaagaaaaccaaaaagagcaaactgcgttatacagaggagggcaaagatgtagatgtgtctgtctacgattttgaggaagaacagcaggagggtctgctatcagaggttaatgcagagaaagtggttggtaatatgaagcctccaaagccaacaaaaattaaaaagaaaggtactcgtcctcacaagtgcccagactgcgacatggcctttgtgaccagtggagaattggttcggcatcgtcgttacaaacacacccacgagaagccattcaagtgttccatgtgcgattacgccagtgtagaagtgagtgttcagctttttgttgagtcccagaacctgccaaagcagccccctctgatgctcgccctgggccaggcatctgagtgtctccggctcatggcccgagcaggcctgggttcttgctcctttgccagagttgatgactacttgcactagctgactgtgctggctggctctggctggccctccactggccccagggctggagctgccctgccctccatgggcaactggtgcagggactgggaaaccatagacagagtccactcctcctgcctggcctttccccctctccctttccttccttccttcctttctctgcccacgccgagccctatgcagtctc

SEQ ID NO: 115243 - DNA, 535 bp, Homo sapiens
aggtccagggcacggtccactgcttccccatcagtgcccggcttggcgagtggcaggcagtgctgcagaacatggtttcatcttacctcgtgcatcatgggtattgtgccacagccacggcttttgctcgaatgactgaaaccccgattcaggaagaacaggcgtccataaagaacagacaaaagatccagaagctggtgctggagggccgtgtgggcgaggccatcgagaccacccagcgcttctacccagggctgctggagcacaaccccaacctcctcttcatgctcaagtgccggcagtttgtggagatggtgaatgggacggacagtgaggtccgaagtttgagctcccgaagccccaagtcccaggacagctaccctggctcccccagcctcagtccccgacatggccccagtagttcccacatgcacaacgcaggagcagacagtcccagctgtagcaatggcgtcgcgtccaccaagagcaaacagaacccctgtattgcggccgctctggaggatacgagcaaggc

SEQ ID NO: 115244 - DNA, 401 bp, Homo sapiens
tatttttcttttttttttttttttctgtgtacaaaatgtttaattctgacaaagctgttaaaaggctagggtggcccttctgcagccactggtgactgggaagagtgctctagggacactggccacccccctgctcctgtcttcagacctctgctctgggattgggtccaaccctgtcctttgcagccatgtggcgatcctcagaatggagctccttgccactgtcccccaaaggggctcagtcgtccatcttcacgaagactttgggccgagaaaagatcttgatggcctcctctacctgcaccagcttccggtccagctcagcacggtggctctgggctctcagtgagtctgccccagcagagcaggccttggagccatcccagggactaacacagatc

SEQ ID NO: 115245 - DNA, 1006 bp, Homo sapiens
atgccggtcagcctgggtagccgagcctcgggtccaagcctgcgtctgctgcgcgtccggcggctgcgcgtgtggggagatgcgtttgtggtacccccagccttgccgcaggaagggaatgggctcagtgcccgcgtggacgagggcgtggaggaattcttctccaaaaggctgatccagcaggatcgcctctgggcccccgaggaggacccggccactgaggggggcgccactcctgtcccccgtacactgcgaaagaagctgggcaccctctttgccttcaagaagcctcgttcaacgcggggtccacggactgatctagagaccagccctggggcagctccccgaacccgaaaaactacatttggcgacctactgcggccgccaacccgtcccagccgtggtgaggagcttggtggggctgagggggacaccagcagccctgaccctgccggcaggagccgacctcgctacacaagagatagcaaggcctactcgatgatactgctgcctgccgaggaggaggcaacgctgggtgccagacccgacaagcggcggcccctggagcggggagaaacagaactggctccatcctttgaacagcgggtacaagtaatgctgcagaggataggcgtcagccgaggcagcgggggtgccgaaggcaagaggaagcaaagcaaagatggcgagatcaagaaagctggctcagatggtgacattatggacagttccacggaggcccctcccatctcgatcaagtcccgcacccactctgtgtctgctgacccttcctgcagacctggcccagggagccaggggcctgagtctgccacctggaagacactggggcagcagttgaatgcggagctcaggagccgtggttggggccaacaggatggtccaggccctccctcccctggtcaaagcccaagtccctgcagaaccagcccctccccagacagcctgggcctcccagaggacccttgcttgggccccagaaatgaag

SEQ ID NO: 115246 - DNA, 975 bp, Homo sapiens
ttccagcccctccaaacactcagaccccaccctcccaggcactgactcccttccctgtagtcccccagtctccaattcctacactcaggcagaccctatggcccccagaactccccacccaagtcctgcccattccagtaggaaacccctcacaagccctgccccagatccctcagagtctacggttcagagtctaagccccactccctcacccccaacccctgcaccccagcattcagacctttgcctggccatggctgtccagaccccagtcccaacggcagccggagggtctggggacaggagcctgggaggaggcactgggggccctaatggctgccctgggatgactaccgtggccagtttcctgagctgcagggcctgggagcaggaggtgacccgccttagaaagtcttgttcatgcagaggacaaaggtctgacttcgcagccgggcctccagtctcagcatcactgtggagcatgccttggagagcttcagcttcctcaatgaagacgaagatgaagacaatgatgttcctggggacaggcctccaagcagcccggaggctggggctgaggacagcatagactcacccagtgcccgccccctcagcacggggtgtccagctctggatgctgccttggtccggcacctgtaccactgcagtcgcctcctgctgaaactgggcacatttgggcccctgcgctgccaggaggcatgggcccctggagcggctgctgcgggaagcccgagtactggaggcagtatgcgagttcagcaggcggtgggagatcccggccagctctgcccaggaagtggtgcagttctcggcctctcggcctggcttcctgaccttctgggaccagtgcacagagagactcagctgcttcctctgcccggtggagcgggtgcttctcaccttctgcaaccagtatggtgcccgcctctccctgcgccagccaggcttggctga

SEQ ID NO: 115247 - DNA, 3468 bp, Homo sapiens
atgcccagcattcagacctttgcctggccatggctgtccaaccccagtcccaacggcagccggagggtctggggacaggagcctggaggggcactgggggccctaatggctgccctggatgactaccgtggccagtttctgagctgcagggcctggagcaggagcagagacaaggtcgactcgcagccgggcctccagtctcagcatcactgtggagcatgccttgagagcttcagcttcctcaatgaagacgaagatgaagacaatgatgttccggggacagaaactgggcacatttggcccctgcgctgccaggaggcatgggccctggagcggctgctgcgggaacccgagtactggaggcagtatgcgagttcagcaggcggtgggagatcccgccagctctgcccaggaagtgcacgagagactcagctgcttcctctgcccggtggagcgggtgcttctcacctctgcaaccagtatggtgcccgcctctccctgcgccagccaggcttggctaggctggtgagtgggctgcttcctccttccacccttgctcagattcccatgacaggaagctcggggaagccagtgtgtgtgaagttcctggaggatgccctggggcaaagctgcccagaaggccccagccagggcctggagagcagctcacagtctccagttctggagttttgtggaaaccttggacagccccaccatggaggccacgtgactgagaccgctgaggagggccctcctgtgttcctggaccagctggaggatgaggacgctcccgagggcattgagcccttggtgtacctctgccaaactgacacagaagctgtgagggaagctgccggcaaagcctacagcagtgtggtacccccagcttgccgcaggaagggaatgggctcagtgcccgcgtggacgagggcgtggggaattcttctccaaaaggctgatccagcaggatcgcctgagccgacctcctacacaagagatagcaaggcctactcgatgatactgctgcctgccgagaggaggcaacgctgggtgccagacccgacaagacccttcctgcagacctggcccagggagccaggggctgagtctgccacctggaagacactggggcagcagttgaatgcggagctcggagccgtggttggggccaacaggatggtccaggccctccctcccctggcaaagcccaagtccctgcagaaccagcccctccccagacagcctgggcccccagaggacccttgcttgggccccagaaatgaagtacctgacggcggcgagcgcgtcaatcccaccaccccgggcctccgcctcggtctccgggccctgaagggggctcacctcaagcagctgcccggctcgtggactggagggtgtctcgaccccagaatcagctcccgaatccagggccgtaggaccagcctccccgacctgccatccccacggctacacccagcggatgcaacgggcccgggtttccgcgggcgcccaggccccgcctttcctcggaagaggaagctccttcgcgggcggggccggaggaggaggccccgcccacgtacaccccgcgcctgcgacgagggcgtcctgctcgggggcctgtgtgcagactcccgctggtccacccgctgtttgacccgagttccgacgcttcgcgctgcctcgcgcttcggtgagcggcttccagagttctcgcggttgctgcgggcggtgcaccagatcccgggcctggacgtgctacttggctatacggatgctcatggcgacctgctgcccctcaccaacgacgacagcctgcaccgggccctggccagcgggcccccgccactgcgcctactggtgcagaagcgggcagaagctgactccagcggcctggcttttgtctccaactctctgcagcggcgcaagaaagggctcttgctgcggccagtggcacccctgcgcacccggccacccttgctaatcagcctgccccaagatttccgccatgtttcctcagtcatagacgtggacctactgcctgagacccaccgacgggtgcggctgcacaagcatggttcagaccgcccctgggcttctacatccgagatggcatgagcgtgcgtgtggctccccagggctggagcgggttccaggaatcttcatctcccgcctgcctgtggcgatcctcagcatggagctccttgccactgtcccccaaaggggccagtcgtccatcttcacgaagactttgggccgagaaaagatcttgatggctcctctacctgcaccagcttccggtccagctcagcacggtggctctggctctcagtccctgcgctccaacaagctgtggtacacaggctcagagttgatgacccgagggcagagaactcagatcagggtacagttgcctgttggccaacaaatggataatacttctggctccctgaagcaggtacctggagctgggccttacccgggactccaccttgtcgtacttggaaagagctccctgacctctccaactaccttagaccctacacacacttccctcatcaccgtgttcccttcctcatgtagttgggacaaacattcctatggttaccatggtgatgatgggcattcgttctgctcctcggggactggccagccctatggtcccacattcaccacaggagacgtgatcggctgctgtgtcaacctcatcaatggcacctgcttctacaccaagaatggccacagtcttggtatagccttcacagacctcccggccaacctctaccccaccgtaggcctgcagacacctggggagattgtggacgccaactttgggcagcagcccttcctgtttgacattgaggactacatgcgggagtggcgtgccagagatccagaagctggtgctggagggcctgtgggcgaggccatcgagaccacccagcgcttctacccagggctgctgagcacaaccccaacctcctcttcatgctcaagagcagacagtcccagctgtagcaatggcgtccgcgtccaccaagagcaaacagaaccacagtaaataccctgcacccagctcctcatcctccgtcctcctcctcctcctcgtcctcttccccatcctcccgtcaattactcccgagtccaactcaacagactccaccaagtcccagcaccacagcagtaccagtaaccaggagaccagcaacccatggctacagcttgaaaggaggcccaccaggctgctccaaccacaccccctgggccaactcccacctcaacccctcccacagcgacagtgagatggagatggaggcagagcactaccccaacggagtcccagaacctgccaaagcagccccctctgatgctcgcctgggccaggcatctgagtgtctccggctcatggcccgagcaggcctggttcttgctcctttgccagagttgatgactacttgcactagctga

SEQ ID NO: 115248 - DNA, 676 bp, Homo sapiens
  misc_feature (1)...(676): n = a,t,c or g
gagcaaggttcggaaatgaagtcgggagccgggctggaagcagagtctgtgccgatggccgtcatcattggggtggccgtaggagctggtgtggccttcctcgtccttatggcaaccatcgtggcgttctgctgtgcccgttcccagagaaatctcaaaggtgttgtgtcagccaaaaatgatatccgagtggaaattgtccacaaggaaccagcctctggtcgggagggtgaggagcactccaccatcaagcagctgatgatggaccggggtgaattccagcaagactcagtcctgaaacagctggaggtcctcaaagaagaggagaaagagtttcagaacctgaaggaccccaccaatggctactacagcgtcaacaccttcaaagagcaccactcaaccccgaccatctccctctccagctgccagcccgacctgcgtcctgcgggcaagcagcgtgtgcccacaggcatngtccttcaccaacatcttacaggcaccctgagcggccaggggccctncttacggacttacggggcagcggttttgttgttggggcatggggcagcttcgttccatcgagtttttgttgaggcggggagttttccaggaggagggttcccttcaggcggacagaggtttcntttcctgggggacaaggcanttttnaaacagg

SEQ ID NO: 115249 - DNA, 959 bp, Homo sapiens
atggagctgatggaccggggtgaattccagcaagactcagtcctgaaacagctggaggtcctcaaagaagaggagaaagagtttcagaacctgaagctgttcacccctgagtttgctccctaccaggttgctcccttcctcctgttttccctcttccctccccgcataaggggacgggctcagcctggaaaccccagccacgctcagtggagactccaccaggtgacgctcctcttcctctcgcccatccaggaccccaccaatggctactacagcgtcaacaccttcaaagagcaccactcaaccccgaccatctccctctccagctgccagcccgacctgcgtcctgcgggcaagcagcgtgtgcccacaggcatgtccttcaccaacatctacagcaccctgagcggccagggccgcctctacgactacgggcagcggtttgtgctgggcatgggcaagctcgtccatcgagctttgtgagcgggagttccagagaggctccctcagcgacagcagctccttcctggacacgcagtgtgacagcagcgtcagcagcagcggcaagcaggatggctatgtgcagttcgacaaggccagcaaggcttctgcttcctcctcccaccactcccagtcctcgtcccagaactctgaccccagtcgacccctgcagcggcggatgcagactcacgtctaaggatcacacaccgcgggtggggacgggccagggaagaggtcagggcacgttctggttgtccagggacgaggggtactttgcagaggacaccagaattggccacttccaggacagcctcccagcgcctctgccactgccttccttcgaagctctgatcaagcacaaatctgggtccccaggtgctgtgtgccaaaggtgggcgggtggggagacagacagaggctgcggctgagtgcgctgtgcttagtgctggacacccgtg

SEQ ID NO: 115250 - DNA, 145 bp, Homo sapiens
atgaggctctttctgatgaagatgaatgtgtttcccatggaaagaataatggtgaagatgaggacatggattaaagatgaggctctctctgatgaagatgaatgtgtttcccatggaaagattattggtgaagatgaggacatgg

SEQ ID NO: 115251 - DNA, 453 bp, Homo sapiens
ttcgtcgaccctagtccgtgtggtgcaattccatcctgtgggagtgcctcgtgggctgccccagagttcaccccacactcagcagcaccaatggtgaagatgacaagatcgaagactttccaggcatatctgccctcctgccaccggacctacagctgcattcactgcagagctcacttggccaatcatgatgaactaatttccaagtcattccaaggaagtcaaggacgagcatacctctttaactcagtagttaatgtgggctgtgggcctgcagaagagcgagtgttgctaacaggactgcatgcagtcgcagacatttactgtgaaaactgcaaaaccactctgggctggaaatacgaacatgcttttgaaagcagccagaaatataaagaaggcaaatacatcattgaactagcacacatgatcaaggacaatggctgggactgattg

SEQ ID NO: 115252 - DNA, 1050 bp, Homo sapiens
atgaaagaattggattgggaatgtgagagattagaacgggtgaggtgtacattgtattatggaggtgtggttagaggggtacggtcagtgcggaagtggagagcgagacagtatgaggacaaggtcttaattgacaccctggagggcagatatgcctggaaagtcttcgatcttgtcatcttcaccattggtgctgctgagtgtggggtgaactctggggcagcccacgaggcactcccacaggatgggtcgcacgggaaacaccggaagacacagggttgtggcattgtaggaagtaagaaggtgctgggcgaggtgttagagccccggcatcgaaaagtggtcaacccgctgtctgagattctaaaccttggttctcttggtcattcacgcattcaaccaacaaatacttatccagtgtctactccacaccaagcattttcagcagcaagcaagacagagaagctctcaagcttccgtgtcggcaaacagctaagactgaaggcagaggtagcaatcttccggacaagaagtccagaagaacaggtgtcccccacccccgcacgcccccaagaccggagaaaagcccaccactccgggaaagacaccagaggaggtcggcggccaagcagggtgaactggaagtggcgaaagaattcagatattcctatactcttcagtctacaacgtgtcctgctcattcttggccttttcttcactggcctcttgccctttgtgcccattcgagaacagttttttgaaatcccaatgccttctattatactgaacttactaatgaggaaagctttgtttgaccacctaactgctcgaggcattcaagccgtgatacggctgtacaatgatgaacaaattcccaaaagcttggtctggtcctgcttctgtgttgagaacccctggcagctgggggctgaaaattcttccctcagctacttgctagagctcaggacccggtgtctggagttccagaacctccttcaggttcaggaagtgatccacatgacaatcagtggaagaaaagtcattccttaa

SEQ ID NO: 115253 - DNA, 496 bp, Homo sapiens
  misc_feature (1)...(496): n = a,t,c or g
ngatggcccngnnaatcgagacccatcgtagaccactaggccagtgcggtggaattccatcacttacaccccggggacctgcgagctgctcagagtgatgatgaaggaatccaaactgacgaacatccagcagcgccacatcatggacatcatgaaaagggatttggagaaggagaaacaaagactccaaaatatctttgccacggggaaggacatggaggaacggaaaagaaaggcccctcctgcacgacagaaggctccagcccctgagctagaccgatttgaagagctggtgaaggaaatccaggagaggaaagaattcctggctgacatggaggccctgggacagggcaaacagtaccgaggaatcatccttgctgaaatctcccagaaactccgggaaatggaagacattgaccacagaaggagtgaggaacttaggaagggtcttgccaccacttaatctgtctccagagacgggcagggtagcccaagc

SEQ ID NO: 115254 - DNA, 490 bp, Homo sapiens
tttttttttttttttttttaacagagggcagaaattttattaaaccagcaaaaattcttatcatacagctaatatagaaggataacaataaaataaaatatatagaattttaggtggtcgtaagtgctatagaaaaaacgaagcaggaaagatagagaaggcatgctcagtgcagaatggggctaggatgtagggttttaaatttcagtagggtgtcaggtgaaggcattccgcctgcagcccaagaggcctcatagaatgctttgtcgtgcagtgatgatgaaggaatccaaactgacgaacatccagcagcgccacatcatggacatcatgaaaagtaacggggcagtccacagaggcttcctgggacagagggatctggggccacacttttaatgcttctccatgttaagggagagaggacctcatataaaaaaaacaaagacagccgggcacgtggctcatgcctgtaattccaacactgggaggc

SEQ ID NO: 115255 - DNA, 1744 bp, Homo sapiens
ggatccgtgggtgtcaggagccagaggggagggggacagatgtgctgtgtacaggacaaggtgtcaggtgactccttcccagcagggcctcgcagatgcacaagcacggagctggtgggttttgcccaagaaaggtcacgcggcacatgcagggattggaactcccaggccagggctctaggtcgctcccaccttttcatgtttctttctgtggccatgggtatagtggaaagacataaagctaaagccaacttttaatcctgaatgcactgcttgccaggtaaatgcccttggttgtggtatcttgttgagacttagttttcacagagggataatgaacccgttgcagaggtttattgagatcattaacagagtggaattcaagcacccgccacagcagccagccatggggtgcccaagaggttggttcccgttgccacttgaaatatgcaaacaggtagctagaaaccatctgggcttgacaaagtctaatgccttgaacaaaataagcttattcctctgaaaacaaaatggtgcttgtaatgacccacgttaaatatgttttattggccagttaatcattgtggttgaatacttgcctaaggcgggtaaagaaatcaaattaagtaaatcctaaaacaggaagaaaggaatcattattgcattcctgaattcagaaaactaaatgaaacagggcacaggtcagaagtggtgggaagcaggcccagtggatacctttagacacatgtcctagtagggatgctcgggctttgcttctctgcggacggggctgtgagtctcagaggctccatctgcattccgggggcagggggcatggctgctgagtatgccttaaaatactgcagggcagtgctatgccaccacctgacgtggcaaaaggctggtaggatgggctggcctgaggatggccctgcctggcagagtgagtggactccagtgggtcgagcttgggctaccctgcccgtctctggagacagattaagtggtggcaagacccttcctaagttcctcactccttctgtggtcaatgtcttccatttcccggagtttctgggagatttcagcaaggatgattcctcggtactgttctgccctgtcccagggcctccatgtcagccaggaattctttcctctcctggatttccttcaccagctcttcaaatcggtctagctcaggggctggagccttctgtcgtgcaggaggggcctttcttttccgttcctccatgtccttccctgtggcaaagatattttggagtctttgtttctccttctccaaatccctggtggcttgaggcttgaactgctcccggctgtaggccccattggcttgacacatgttggcaggccggaggtggggacgggctgcgaggatgggaggcaggtagatgggcgaggctatttgcttggaaggtaagactctctggctggatgttgggctgcactgtaggggcaaagcatctcctcttttcatgatgtccatgatgtggcgctgctggatgttcgtcagtttggattccttcatcatcactccgtcagtggaaaaattgtcttccacgaaaccggtccctggtgccaaaaaggctgggatcgctgctttaacggactgacctctgagcagctcgcaggtccccggggtgtaagtgatggtcttggggcggcgccggaacccagttcctttggtcactacctccatctgcttctgtgaagccatgggaggact

SEQ ID NO: 115256 - DNA, 346 bp, Homo sapiens
atggagaggaggctccagatgggagccctggagcacctcaatgtcaggggccacgaggagaaggagctgaatacagacatgatggggaatcaccctccatatcaggttttaagggaacaccatggcttccatctggacgctgctcgcagataccgctctggggaagccagctactaccaagctgtgagctgctctgtggaacgggccatgtggcatggaactgaggccttctgtcaatagccacgcgatgaggtctcaagacaattgccagtgtggctggcagtggaaggcagtcaccttgacgaggggaggtggagggagcaaggtgacagctgactgtaagtga

SEQ ID NO: 115257 - DNA, 1053 bp, Homo sapiens
atgtccaccctggcccagctgtgcctcctggggacatgctgggaagggttggcctttttaggcatctttacatcttggtcctgtcctgagctctatacctgccctgaattggattacaggttaacaccctgccatgcacgtctacagacatacccacacccacacctgcacaagcttgtgtctaaaccttgcttcaggaacaagccagaagagttttgggctctaaggtgcacacctcccccagaggctgcagccaagacgggcatcccacatcagagggatgaatggcagaaagcagcagagactcagacggcggagcctggaggagcccacgcagtctgttcccggcacccggtgcgtgtgaagggacttgagggcagcgagatggaatcagcaagagaaaacatcgaccttcaaataaacatagcaaccgttgccaaccttcagccttcactcaacttcatttcctctcttgcacttgagcctagaggagtcagaaacaagctcaaaggcttgttgatcaaggggacctcggctgcaggggaaacctgctcatcagtccttaacacggccactgcgctacgtaaaagcctagtactcagatggtttagagccaaggcctccaatggcctctcagagctctcagagagccctgttcaggtgcagaaaaactggtctcgtgtattctccatgggtccccacaaacaacagattatcagaaaggatgtggccaagatgcttggtgctgcagatagtctcccggaagagaggggcttacacattcttggcttcttagattttggaagaccagatcagcaaaagacagcatgcactcaggtggaatattgcaaaggtagacatcagctcaaggctagcttctctgggcagctggtgcaaggaagactcctcatagagatctcagagtacatacgaaggggaaacatccacacccagttttccctggtggaaaggtgtgacacagaggcctgccagaggctcatggccccttctccacccagagcagcatctcagctcaacctggggatccagtaa

SEQ ID NO: 115258 - DNA, 404 bp, Homo sapiens
cggccgcccctgcgccgcacccggggcctgggtgagaatgccgctgggagtgtccactcgccttccaccagcatggcaacgtcttcacagtaccgccagctgctcagtgactacgggccaccgtccctaggctacacccagggaactgggaacagccaggtgccccaaagcaaatatgcggagctgctggccatcattgaagagctggggaaggagatcagacccacgtacgcagggagcaagagtgccatggagaggctgaagcgcggcatcattcacgctagaggactggttcgggagtgcttggcagaaacggaacggaatgccagatcctagctgccttgttggttttgaaggatttccatctttttacaagatgagaagttacagttcatctcccctgt

SEQ ID NO: 115259 - DNA, 1604 bp, Homo sapiens
gcccccaccatcaaggggaagaaagtgctcttcggattccggttcgccctggcctcccgcagccgccgcgggaccggcccccagcacacccccggggcgccgggcgcggggcagccgcccggacgcgcgcgggcctcaggcgccgccgggaccccagccccccaaactttggcaagttgcgggcgccgagcgcacccggaggcgcggggcgcggccgcaggcggagccgccccctgacgccgggccgccccctcccggccccggccgccccgccggctccgcggaaagtttgcggccgcccctgcgccgcacccggggcctgggtgagactgcggcggcggcagggcgcggacggccatatttgccggcgcggcccgagccgccgacaacaaaaagtgcgcgggcgctcggcgggcgctcggacgggcgcggggctgcagcgctaccgcccggcctcgccgccgccgccgccgccctcgcggcctggccccgccgcgcccggcgcgcccgccgcccggggggatgtcttacaaaccgaacttggccgcgcacatgcccgccgccgccctcaacgccgctgggagtgtccactcgccttccaccagcatggcaacgtcttcacagtaccgccagctgctcagtgactacgggccaccgtccctaggctacacccagggaactgggaacagccaggtgccccaaagcaaatacgcggagctgctggccatcattgaagagctggggaaggagatcagacccacgtacgcagggagcaagagttccattggagaggctttaagcgcggcatcattcacgctagaggactggttcgggagtgcttggcagaaacggaacggaatgccagatcctagctgccttgttggttttgaaggatttccatctttttacaagatgagaagttacagttcatctcccctgttcagatgaaacccttgttttcaaaatggatacagtttcgtttttcctcccatggttcacttggctctgaacctacagtctcaaagattgagaaaagattttgcagttaattaggatttgcattttaagtagttaggaactgcccaggttttttttgttttttaagcattgatttaaaagatgcacggaaagttatcttacagcaaactgtagtttgcctccaagacaccattgtctccctttaatcttctcttttgtatacatttgttacccatggtgttctttgttccttttcataagctaataccactgtagggattttgttttgaacgcatattgacagcacgctttacttagtagccggttcccatttgccatacaatgtaggttctgcttaatgtaacttcttttttgcttaagcatttgcatgactattagtgcttcaaagtcaatttttaaaaatgcacaagttataaatacagaagaaagagcaacccaccaaacctaacaaggacccccgaacactttcatactaagactgtaagtagatctcagttctgcgtttattgtaagttgataaaaacatctgggaggaaatgactaaaactgtttgcatctttgtatgtatttattacttgatgtaataaagcttattttcattaacc

SEQ ID NO: 115260 - DNA, 366 bp, Homo sapiens
ttccgctgcctgtctccattacaacagaattcctgggagctgcacagcaaagatggcaggactccattttgcagtaaggaagaggtgaagtgatttgcccaaactcacagaggtggaatgacagacagctcaagatttctgactcctgtccagtcctgtgactactggagtatgttcatgaagaccctccaggatgatggcgagcagggagtgggcattctggtccccctcccccagactcacaagttcaaatgcctggagagactccccaaccaggtctccggctatatctcagttaaatttgtaacccctcagttcctagctcaatgcctctcacagattaagagaccaacagatgtgcattga

SEQ ID NO: 115261 - DNA, 423 bp, Homo sapiens
atgcctgaagaagtgatatgccatgttgctgcccagtttcacactggaagagatcctgtgcaaagatccagcggcctgctttgggttccagtaaacacaaaagtacgtactggcactctgcggattacagactcactgacaacttcatggattcatagatcaagttttgttacattgatccaagctaataagtcaaatgtagaacaaagagaaggctgcatttgttcaggaaactgtaaatctgtcccatttgatcacaatcctgttgaaaggaagaagccttacgaggacagtgtgtttgctacaatgctgagccgtgacagctgcagcagcggctcctggagcacagggctgctggcatgggctcaccaccctcacagccatttgtctggcggcttgtattcagatgtatttgttcagtaa

SEQ ID NO: 115262 - DNA, 686 bp, Homo sapiens
atgaggagcaccaaagctttacaccccagctatgtgcatttggggctggggctgcctgggaagagctcgtcctcagcccaaagcctgcaacagctgggatcagggcttacctctcacagacggggctcagcaactttctgcgggatgaggacacaagcccacttgacctggaacgtctgaaacctcctggccccgtggaagatgggaagaaacactcctcttcctctcagttttacaaccgagtggtcctcgggctgcttgtgagcaccggacgaccgaccgagcaggctgcagccaatcagctggcacagggctccgaccgaaaatcatcttggctggtgccacagaatcggcctgaaaacaggatactgcctagagcaaggcacccaggggagccaagcaggaaaatgtaatgaattgactttaagtagctgcagctgtgattagagtatttttagccacaggactcaaccagctttcaaaacctgctaataagagccccaccgtagccagcgcaaaaatttagttttcagtttaacaccaggaatctgcttagctaggagctggcttagaaggcacatcaggagagaacatcttctactgaaagttgaagatttttcattaactagctgaattatgacaaagggagattgtattcggccctcggaggatcacgcatcgttgct

SEQ ID NO: 115263 - DNA, 1665 bp, Homo sapiens
atggcggaaggtgaaggggaagccagcacatcttaccaaggtggagcaggagagagagagagagagcaaaggggaatgccctatacctttgaagaaacagatctcatgagaattcaaagctgtgcttcagggtctatggcgtgggacggcgaccccgccctgcccgtgctcccccagcgcctgaagcaggatggagatgccctggtctgcccccggccaggctccctggaccctttgggatctgcggacacagggcctggactggccacatccctgctcccagacagagcacagaccccgctggggcccgccctgggtgtccgcatagggagggggctggagacctcccctccgctgcagcctctctggcctcctgtgaactgcttggctgttcctaagccttggtccctggaaaatcccagttccagctcagcgcccacatccaggcaagtggcaggaagtggcccacaggcttccaagctgcgggagcagactgagcaagcagcaggaagagctgagagtcctgggaacagtggagcctgcatggagggtacaggaaaggggatggagtccggggcagcagtgagagacccagaggacgagagacctggagacacctgcagccctgggagacgccctggcagccagggctcaggaaaagccatcgacagaggagacacaccagcatgggagagagatggtgctgatgaagaggacaacacggggctgtctgcagagcacctgccacgcgccaggctctgtgtccacaagcacggcggctgctcccacatgacagagctcgtgtggcagctccaggactgtctggtgccagagccccagctctccgccagccccaggccactgtgcgaggccctcagtgaagagggggccgtggctttgactgcaggatgcacgggctcgggcttctcagaggagtcagttcacaacgagcagaacagcttcctggagaatcctccacacaggagagctcgaaaaacacgtctaaaacctcgtgaataccatcaaagaggtaacaagccactgtccagccgtcttaaggacacagtcaagaatatgaacaaagatagtgtttgcaatggttttcatggtagaaaagacctgactgccacagggaagactgatagggcctctgaggtggctctgaagtggggggccactcagacgcctgaatgccaactggagggaatgcgccccaggagtgggacgagcccaggtggaggaacatcaggcgtcacctgtccagggcttgcacactggtgccctgggcagttcgtggtgcacacctgtgtgtatgcggagcctgtttgcccccaggtcctgcagcccctcatcctaccctggagctgtgtctttgtggtccctcgtaaacgtggggccccttgtgatacctggggcagcccctcctcactgtcgccagctggcccctgggctcccgccacagtctcctccttcctggactccatcctttcccatacaacaggacaagtgaacattcccgaagtgcagaaaacagggaagttcatctacaagggtcatgaactaagaaggcaggaggtttctgtccccggcaccggcgaatcccggacccgagaaaggagctacgggcgcacggaagcgggcggccccggctctcgcggggcttaa

SEQ ID NO: 115264 - DNA, 816 bp, Homo sapiens
atggaatggcttttcctgggcagcctgctccaggaagtcccagctcaccttgctcttctcaaagctgttccaaatctcccactgtcccagagtgtggtagcgtctggaggtggccaaatcttcgaatctagccaagaggatcaagaattgcttctggccatgcaaatcttggacctgctcctgtttgcacacttctgcctcttctctgaagctctggtgagggaattaagaacaggatgttgttcccttccgggtgatggattttctaactctcagagcaaagtcatcttttcaaatgagaaacctgaccggcttccttccctcgccctgactcacaggtgccagagctggaacttagccagggctccagggctccagagctcgggggctcgccgcggatccaagcactctggcgtctggcacgttcgttgccggcatcagaaacgctcttacccctaccgccgccagcatgggcttttctctggttgggctgcagggcacaagccgagcactccacgctggtccccgccgcgcagacgccccatcacccccgcgctctcccctggggcgcggaccctctacatctgtggggaaccaggagcctctgagatcctctgcaccccaccgcgcaggaagaaggtaggggaaaagacagacggagcccaggagacgcgtccgaaaccacatttcccgcagacctccgctcagcgcctgaaagcgacttcgcagcctttccgcgtttttagaccgcagaagatgtccgtgaccttctctcctgcccagattgtttcagcgccctgggaccttaggggttaa

SEQ ID NO: 115265 - DNA, 660 bp, Homo sapiens
atggaaccaaatgctctgaggagccccagcaccgtgcctcgacctcaccggattctggtcctcactgccgcccgggcctttccgcttcttcaccaaggcggacaggctgacgcactaccacgccgcgcgacagcgaccgcgcgcaaagcgccaggaaccccccctactgcccgccccgcgctggcgaagcgcgacccgtcccgccccgccccgccctcggcacagcgtcagaggcggggacgcgcgctggtctatttttgggcatccggatggcgactgcgggaaatcgagttctcatgctggggcgaaaggaccgtccgcccgctcggaagaggcgaatctcccacggcagacgtctgggtgtgcgaatgccagttgagcggggcctcgaggacgcgtcacacacagcgaggatttgaggagggaagcgccttccaggtagaacggtttctgggttcagagaacggaaagttcagtaaagctgcacaagatctgattgtcaaaaagatcccggcacctcccttctctctctctttcctcgtctttccaagtgaagcctgctacccctcttccccttctgtcatgggtggaagcaacctgagtccctcaccagaagaagatgctggtgccatgcttcttgtacagcctgcagaaccatga

SEQ ID NO: 115266 - DNA, 454 bp, Homo sapiens
gggcatccggatggcgactgcgggaaatcgagttctcatgctggggcgaaaggtgtgtctgcaggagccaaatccaaatgagcagtccaggtacttcagagttttaacctgagcgaaacaggaatgtctcgggtcttaacaggaccgtccgcccgctcggaagaggcgaatctcccacggcagacgtctgggtgtgcgaattccatttgagcggggcctcgaggacgcgtcacacacagcgaggatttgaggagggaagcgccttccagagcttcagagaagaggcagaagtgtgcaaacaggagcaggtccaagatttgcatggccagaagcaattcttgatcctcttggctagattcgaagatttggccacctccagacgctaccacactctgggacagtgggagatttggaacagctttgagaagagcaaggtgagctgggacttcctgga

SEQ ID NO: 115267 - DNA, 567 bp, Homo sapiens
atggctttcgtcaagaggcaaagggtattattggaagcgctggtgtcatttcttgatttctcggataaggaggccaacactgctatgggactgttcacagacttggctctggaagaaagtgagaccccagggatgcccctgtgtgacatgaagctatctggttggttcgtgggccttttgaagacagatcccaaggtaagcagctcctcggctctgtgccagtgcattgccatcatgggaaacctcagtgctgagcccactacccgaagacacatggcggcctgtgaggaatttggggatggctgcttgagcctcctggggaatttcataaacaggtccataggaggctatgatctctctgtgtcccgtggccacatgtctggcagtagacctgaggttgagcttggtcagaaggatgctgacggtcagctgaacttgcgtggaggagagcaaagcatgggacctggaggctacaccacagcagggcagagcaccacagcagggctacaccacaccaatgctggcttatacattgctccctatggagacttcatgactgggttctaa

SEQ ID NO: 115268 - DNA, 801 bp, Homo sapiens
atggctttcgtcaagaggcaaagggtattattggaagcgctggtgtcatttcttgatttctcggataaggaggccaacactgctatgggactgttcacagacttggctctggaagaaagtgagaccccagggatgcccctgtgtgacatgaagctatctggttggttcgtgggccttttgaagacagatcccaaggtaagcagctcctcggctctgtgccagtgcattgccatcatgggaaacctcagtgctgagcccactacccgaagacacatggcggcctcggcatctgctagctcgtctacccctgttccattgtctccaccagatagttacctgaatcaagtagatcttcaggaaaaagcagaccttcaagaaaaggaagcccacgaactgctggattcaggaaagaacacagccgtgaccaccaagaacctcctggagaccctttccaagcctgaccagatccccttgttctatgctggggggattgagatcctgactgaaatgataaatgagtgcacagaacaaactttattcagaatgcacaatggatttagtatcatcagtgacaacgaggtcataagaaggtgtttttccacagcaggaaatgatgcagttgaagaaatggtctgtgtgtctgttctcaagctctggcaagcagtgtgcagcaggaacggaaaaagtttgaccctggacagaaacactgaaaatggggataatgatagctatgtctccttttcacagggctactgtggggagccagcaatagagcttgtgaatgcagtttgcatactctga

SEQ ID NO: 115269 - DNA, 177 bp, Homo sapiens
ctacccttcccagagtaccgcgggagctcgggctcctgagggcgacggtcctctgatggcagatgcgggagaaactctggcgtcaggcggccctcgcgtggagcacacgaagtcgtggcttattctggcttcagtatgtggggtggagaaggcgatccacgcagctgcgtctatttc

SEQ ID NO: 115270 - DNA, 705 bp, Homo sapiens
tgaaaagaagaggggaagtagaaggaaaacagagctgcctccaggctctgctggggaagactgggtgtgtagcagtgccttcctcctggccgagaatgtaggaagagaaataggtaaggaggaaaagatagttttttaactcacagtgtccacattcaaaatggaactctctggtcaaaagttgaatataaatctctgtaggctaagtccatttgtgacatcccaacatatgttttcaaaaataacatacacactaaatcaagccatttaagcgtaaactggggaaatttcctaaaatttacatgctaaaaaatcaccatttttcatttattactttcatggagcaactttgaatctatggttacagcaggtgaggcaccttgtataaaataaagctaatacatgaaataaaaccatttaaaattctattgttctcagagaatggagaaagcaattgaagccatgggtgtggaggtgactgccctgagaagctgtgtatatggaagagaagggggaaggaaagagccacagagacatgtggccacagaagaagggtccatgggatgcaaggttgctaatggtgagagtggagaagagcccaaagccaaaaaatgcaggcagactccagaatgtggaaaaggcgagaaaaaagatcccctagagcctctagagatgaaggtagcctttccaccacctagattttag

SEQ ID NO: 115271 - DNA, 455 bp, Homo sapiens
actacaaaacatattttattacaaagcactaaatacaatgcggataatcccagactcaagacgtaattattccaacacatatcctccagcagaagcagtttccgaggggaaaaccgaagcctatgccttccttcttccaggaatacgaagcggcccttgcccctgtaggcttcgtccttaggttcccgtcatgaaggtaatcagaagggtttctttttcagcccaaagacggtgacgaataaagccatttcagtgacagctggaagggcatgaatgtcctgcttgtcatactcctcgggggtgaacgtgagaggcaggcaggcctgtatgttgctgtcccgggaccagaataaggtgatgacgaccaccagatgcgccaggagcgtcaggaagcgagagggcacaagccctgagacccggcccatggccctcggggacaagggcggcggtctctg

SEQ ID NO: 115272 - DNA, 757 bp, Homo sapiens
ggaattcgaggcgttcgtctagatttgtcggcttgcggggagacttcaggagtcgctgtctctgaacttccagcctcagagaccgccgcccttgtccccgagggccatgggccgggtctcagggcttgtgccctcttacttgctgacagctccttgcgcatctggtggtcgtcatcaccttattctgggccccgggacaacaacatacaggcctgcctgcctctcacgttcacccccgaggagtatgacaagcaggacattcagctggtggccgcgctctctgtcaccctggggcctctttgcagtggagctggccggtttcctctcaggagtctccatgttcaacagcacccagagcctcatctccattgggggttcactgtagtgcatccgtggccctgtccttcttcatattcgagcgttgggagtgcactacgtattggtacatttttgtccttcctgcagtgccccttcccagctgtcacctgaaatggctttattcgtcaccgtctttgggctgaaaaagaaacccttcctgattaccttcatgacgggaaccctaaggacgaagcctacaggggcaagggccgcttcgtattcctggaagaaggaaggcataggcttcggttttcccctcggaaactgcttctgctggaggatatgtgttggaataattacgtcttgagtctgggattatccgcattgtatttagtgctttgtaataaaatatgttttgtagtaacaaaaaaaaaaaaaa

SEQ ID NO: 115273 - DNA, 382 bp, Homo sapiens
gaggacgacgaggaggagaccaccgcgtccacgctgcggggcaagcgccaggccgccgcccgtctcggcgcagtccgccttcagctacatcccgccgcggcgcctggaccccacagagcacagctactactaccgcccggcgcgggaacaggagaggccggctggagtgctgacgtcttctgtctatgggaagcgcatcaatcagcccattgagcccctaaaccgggactttggccgtgccaaccatgtgcaggctgacttctacaggaagaacgacatccccagcctcaaggaacccggctttgggcacattgctccatcctgaagcatacccgtggcccacagggcatgtccgataccctgtggcctggcaagtttgcac

SEQ ID NO: 115274 - DNA, 804 bp, Homo sapiens
tttttttaccaaggggaaacaaagttttcattttattcaggtgctcacaatgaatcgggctccagattcatttgatcaaaaataattccagctgaaaatcatcacatcagagactcttcacatgtactaaaggtgttgttggtcaggctcctaacccagcaacctgagggggggctgctaacgtgttcatgtgtcccactgtagagatgcaacacaggcatagccaagctccttaggcgttatgagaaggggaaaggaggctccagatgccaccttctcgctgtgcaaacttgccaggccacagggtatcggacatgccctgtgggccacggggatgcttcaggatggagcaatgtgcccaaagccgggttccttgaggctggggatgtcgttcttcctgtagaagtcagcctgcacatggttggcacggccaaagtcccggtttaggggctcaatgggctgattgatgcgcttcccatagacagaagacgtcagcactccaaccggcctctcctgttcctcttcgttaacatgaagtcccaggctttttgcatgttctctgtcatctcggtgcaacttctgatcataatctaggcgcctcttaaaaatacaatcatagagggaaataattcctgtccgcgccgggcggtagtagtagctgtgctctttggggtccaggcgccgcggcgggatgtagctgaaggcggactgcgccgagacgggcggcggcctgggcttgccccgcagcgtggacgcggtggtctcctcctcgtcgtcctccatgccgccaccgtccaagcgccc

SEQ ID NO: 115275 - DNA, 588 bp, Homo sapiens
atgaccttaatcaagacatctgaagatactgtagaagtagaaatctctgaagaattcatgaagcccagacaagtgggttttcccctagtgcagcacacccccttcaccaagggacagccaaagagcttcattaaactggtcctgcttcctgtgtcacccaactggaaagcaacaaaatcagcatcaaaaaaagtccccacaaaaacctcactgaagggtcagattgaaactagacaaactcatgaagatgagaaagaatcaacaaaatccactgaaactccaaaaggccagagtgcctcttcttctccaaatcattgcaacacttttccagcaagggtgcagaatgggatggaggatgagatggatgaattgacagaaataggcttcaggaggtgggtaatagcaaactccaccgaggtaaaggagcatgttctgacccaatgcaaagaagctaagaaccttgataaaaggttacaagagctgctaactagaataaccagtttagagaggaacataaatgaccttatgagctgtaaaacacagcacaagaacttcatgaagcatgcacaactatcaatagctgaatag

SEQ ID NO: 115276 - DNA, 532 bp, Homo sapiens
  misc_feature (1)...(532): n = a,t,c or g
gtcggggtaanaactacgggtgtgtcactggcacggttttcactgacactgacgtttccaggaaggcacccagtatataaatctagagtcgctcatgctgtgatttgatcagaacttcaccagaagttgttcgccatgagaacacgacttcctgatgacgaacccgcgcctggcaccgagtatggtgacatccggccgcactctgagctgtcactcacagccaacctgtgcagagatgcaagcaccgcctgcacagcctctcgccacggggccgtcctgctggtgctttgcgaggtgaagccactgacgctgcatgacaaattcccttcctctcactcctgaccaacgttacattcacattcttcactaacatgacatgannnnnnnnnnaaattgtggggcaggttttattatctataatttcagaatccttgaagggcctttacaaagtacagtcatgtacctcatacatacggtcaacaacagaccacatatgatggcggtccagagaattcatcctctctgaactgtg

SEQ ID NO: 115277 - DNA, 488 bp, Homo sapiens
ggcgggagcttctcgctggcaggtttttctgtacctgcgcttatcttttcacttaccttcgccagttcgcggaaacgtgactgaaagcaacgcgttatgggcaaggtggtggggacttattcgttacctcctccaggctcgctctcttccaattcattatctttagctctcgggtcctggaagcgcggagcctctctggccttgagccccgagggcatggccctgtgatgtcacaaggtggcgtgacagccgggacgaaccccgacccccagcgcggcatccttcccgcggccagcgaccaccgcctcccgggaaggtggctgaccacagccgcaagccgctgcgcgcccggcaagccgaatggaaggacggcgcgggcaaacgaacgcccagtgaggtccagagaagagagggaccttccgagggtcttctagtcgatctcggacaggcttttgagtgccttttaagcattccaaaattttcaggag

SEQ ID NO: 115278 - DNA, 1394 bp, Homo sapiens
aatttcgtccctgcgatgcagatctgtggatccagcgtagcatctgtagcagctgggacatcattccaggttttgggcccggtgtgttggcaacaactggatctgaagatggcagtcagggtgctttggggtggtctcagcctgctccgagtgctgtggtgtctccttccgcagacgggctatgtgcacccagatgagttcttccagtcccctgaggtgatggcaggacacactgccacctcatctcccggggaagcccctcctgccctctgcactctgagctcccctgccgctcggtgctcttccccctgacaaatcctcaaaatcctacgagcagctcaaactgcacccgtctgctctgggaggagctggggccgtggcctggcctggtgagcggctatgcgctgctggtggggcctcgactcctcctcactgccctttcctttgctctggacggggccgtgtaccacctggccccgccgatgggggcggatcgctggaacgccctggccctgctgtctggttcctacgtcaccctggtcttctacacaaggaccttctccaacaccattgagggactcctcttcacgtggctgctggtgctggtatcctcccatgtaacgtggggccctacacgcaaggagccggcgccgggtccacggtggcgcagctggcttcttggaggcattgtggctgctggcttcttcaaccggcccacctttctggcctttgctgtggtccccctctacctctggggcactcgtggagccacaaaccctggtttgaagtctctgacccgggaggccctggtgctgctccctggggcagccctcacagcagcggtgtttgtggccacggacagctgtccacagacgcagcctgtgccttggaagggcactgtggtcctcttcaacgccctcggtgccctcctcttcggctgcctgcatcaggggggcctggtgcctggcctggagtacctggagcaggtggtccatgcccctgtgctcccaagcacacccacccactacacactcctcttcactcacacctacatgcccccccggcacctcctacacctcccaggcctgggggcaccagtggaggtggtggacatgggggggactgaggactgggccctgtgccaaaccctgaaaagcttcaccagacaaccagcctgccaagtggctggtgggccatggctctgccgcctctttgtggtaacccctggcaccaccaggcgtgccgtggagaagtgcagcttccccttcaagaatgaaacacttttatttccccatctgaccctggaggatccaccagccctgtcctccttgctgagtggggcttggagggaccacctcagtcttcacattgtggagctgggggaagaaacctga

SEQ ID NO: 115279 - DNA, 702 bp, Homo sapiens
acagaagagaagtttcatgatctcagatcacagccctatggaagctcttgtcaaacactggggaagcctaactctaataaaagtgttcccatgggaagtccaacacagctctcattctgaatgacctgtattgttggtccaagcagggatacatcaaagagactggtggtttattagcattacccagaaggtcagtgtctcctctcgggaaggagatatgaagtccccacttccaagttcttaccccagagagagaggctgctgctctgcttgtggatttactactcatctacccagacatgctactccctccccacaaagtctcccgtcagcttctcaagcagactctgctgccagcttgtcctccagcccacacatgcgggagttttaccctgcccatcaccctcaggggactggaagaactcatctgggtgcaacatagccccgtctgcggaaggagacacccacagcactcggagcaggctgagaccaccccaaagcaccctgactgcccatcttcagatccagttgttgccaacacaccgggcccaaaacctggaatgatgtcccagctgctacagatgctacgctggatccacagatctgcatctgttgaggataacagttgttggttatcacgatgtaaattataatatattcaactgtctgaacaaactgaaaatggatctgtcatttctcgaa

SEQ ID NO: 115280 - DNA, 6429 bp, Homo sapiens
tttttttttttttctttttcatctgttttattagcatcaatatatacaaagtggaaaatgacttaatttcattattctagcttagaaagtttgttttgctttttattttgtttggcgataaaatggaaatgaaaatttcccaggagaatgcctacctttgggggtgctgaacaactcaaataatatctgacctcaaatgactcgtcatgcctagtcaaggacataggaagatcatgcccttcggattcactcgaagggcatttttgcctgaggccccgtgcctcagcctaaagctacccacatatttgccaaatcactacttgttatacaaccctcctgattatgcaggatgctttgcttccttctggggctgtttgggcaggtcttcaaaggctatcagcctgaggggttctgtagggggctctccaaggggtgagcttcaaaggatcatagttaaagcacatctatgaaactaagtaagaatggccatcaggtagcaatcagaatacttatgttagctaaataattctacaaaaaaaaaaaaaaavaaaagcaaaaagctgagctccaagctaaagagggttgagtgtgtgcatttttaaagcacagggtggtagctgacagatacagcttatatgaattagcatgtaatacacaccatcacatgcattctctgaagctcacaatctctgtaaacgtatttccccactgttttaaaaacaaagagtggcttgtaggaaggctcagtccattctcgagtttctcaagagtgtatcctattcaaaaatatttaatcccaatgggttttaatattgatcttataaaaacagacgtacatgagctgtaatgagatgccttgcacatttttggcactatttttttttacctttacgtattacaaatacacattcagatattttaaaaagaaaaatagacaccaacctgtcttttcaatcacactgtacattgttgaactcgtatgatctgtctctaggctaaaacaaacttttaaaacacggttacgggtgtggtactactaagacagaactgagacactggtcttctgaaaaaaacaacaatgacaacaacaacaaaaaaacaaaaaacacaacgccttttctatcttcccaatagtcaataagaacatctggggtgtggcctggctagttttggggatagggttagaataaagatttatattttgtcagtctttataaaaggcaaatgtttagttttcacataaccataacacgttgtaaaatcaaatattattcatagagttcttcattccaggtgacccagggttagggttagaataagcatcaaataaaatggattgagttctgccttttaaggaaaggttacattatttgtgttgttatctttctccaaacatgacattgtccactaatggcctagaacacttctctggttcttgcattaaatggggctttgggtcctggaaagcagcctttagctatttcttgccatggaccacacactcatgccttcaggagtatatgtgcaagattcttttctggcagaaggaaaatattctggtcttagacccccaagattgaagtctgagttcctgctgtcaaggagggtacatgtgtgcctaaaatcaactttccctatcttgcttaagatgtttccaatgtaaccaccaaaacatagactccctgctattctccctatggccagaaaggtcttttcttgtttgaaaaccagcagacttgaaacaattccagagagaatgggagggcaccaaagagggttccaaatgccactgtgcccgtctgtctgtccaagccattgactgtcaccaccatgtcaccggtcccaggaaggtgaatctgcttcacacatagtatttcttccatgcacccgcaccctccaccttctctttatacctgtatttagaaaagaatcttcccaagagttacacactcaccggtttcactgggttgggggaaaacagaccctgataaaataagaggaatgcccgtgtgactagatgtggggctatggaatcctttctgaatgaaattcctctctctgtcttcattgatgttcagatcagatgatacaggattccactggatggtctgctgtgatttaaaatcccctgcccctgttctctgcacctcctcagtcagcattcacaccaccctccaacatccagacagctttggagaatagaaaaatagtttcttctcatgggaccctcccgccccctgaaatacttgatggcaagtatattctgaagatgacaccttttagagaatcagtgcacttgagtctcctctattttgagggctgagatattccagaaccccaggagaaaccagagctcacccctgcatttccaaacatggcacctcctttttcccatcacaaatccttgtcactgtatgagtggggccgctggtgcctcccaagcctgtgtgtttattaccacagcttgagagtggcttgctgaacatggtgatcgattctggcacttgtagcataaattacacgctctttcatcattgaaagagtgtcaaagaaaagaacattttaacccaattcccttacccaatgatccccctcacccaattcttcattggaactctcaaatctctcatttgtctctgaaaaattgcctttggtcgtttatcacctttctagaaagaaaacgttttcttgttttgtcactgtccagcgaggccagagtggtaaaagacaatgtttatataacacctttgctaccttcagaagaaccgtgagagggaggggctgtggaaaaacctttcagaagctggcaaaatgggaagagaggacacagaatttgtttaggagcacagctctccaaatgggtttaagtacccatgctaaattccaacccaaactaagccaacaagaaataccctttccaacctaatcttgggacttagatttgtactgaaaacatcatgggcatggttcccaaagatgcatgcaattcaatgcagccttagcatggcattgctgatgggagaaactccatctgctgttttgtgtttttgctgccgcggtttgccattttgcaagtcttccacctgccttcagaattgaggctgtaacatgaatttggctgaggccgcgaaacatccaaacccacacctatttcacttttaaatataataaatacagggaagaaaacagtaaacctttgataaagagtctaaacaaaagacagtcgacattctggggtttcaatcaagtgccacatggtctctggatgaatgtctcgaggagattgtggttgagttcacaagtccccttctcaagtgtagctctctttagatagaaacctcatactctctggtttcccctgtctcgtaaatggggttgtcaaactcggtttccacggtgatctggctgtaggggtgggagtacatcagaggcaggcggaggttggaatagtagcgacatcttgtgatgtaaatgtaggctcctcccagcagtaaggagatgatgaggaccgggatgaagatagccagggccatgttccccccttccagcgacgtctctgctgccgcttctgctactttacacacgggcaggggcccgttccagtgggatggctgtcccaggatgcagcggatggtcacttcacccatgagctcaaagccttcgtagcacatgaaggtgagggactctcctggcaggtagagtcgcttgtacaggatttggtatccattttcaggcagccctgggttgtcacatgccagggactcctccgaaacgcagtggggcaggcgagacgtccagatgggagtccctgtttcacggctgtagcaggtcagaagagaactcccttcaagcacaaaaccggggttgcaggtgtattggatggtggtccccaccagcagcacaggatccgaaattaagcgggtcgagtgatccacctctccggggtcggtgcagtacataattttctcacaaaatggggggtcgctgctccagctgaggtcccactggcaggtgagggtgtcactccccacgatgtcatagccggggtcacactggtaggtgattctggctccccgcaccaactccgtgtgagaagtggttttccagccattctggatctcgggtaaatccgagcaggagtcattccttgatacctctatgtagttcatgataaatccctggccctttccaaagatgaggccagcagggtccgaatggaactggatggttaagtctggcgtggaggagtacagtttctgggggccactgttcccaaggtactgccccaagatgtggggcatgacctcgtcgccatcgtagatggtcaagatgtcactgttgctcagattcaggaactggatatctaagaagatccgtttctcttctcccacgtggatcttccagatacaatcttcaccttccacgtagggctcgggccagtttggggacaataccaccccagccacagcagagagctccccaccacacatggctctgcacaggggctctgtgtcattccagtatgggtcccgcacattgatgcattcgatgatggccgggccctgctccagggagtggccggggtcgcaggtgaactccactatagtcccaatgttataggtcgggtcggatgtagtgaagttcccattctggatgtagggctcatagcagtggcctttctcaaacgcttcaaatcggatgttgaaggtggaggccgcccgggcctggtcggacgtgaactcgatgcggatggtgttgccttcgctcagcaggccctcaaaagggacactctcggtttgaagggagtcgtagagaagagctgacttgttggtctgcccgctgtgaaccgtcatcctgtccttgtcatgcagcaacagcctctcaaagtgcaggtgcagcttctggccctctggagcttcaatcgtccagatgcagaattggctcccattggtgttttcagggtaacttggggagaggacgcggccgatggtggcattgtgcactgcccctccacaaggagctgagcagatgggctcctggctgctccagtgcggcttggaggcattgatgcatgtcagcatcttagcgccctggagctcatagcccaggtggcagtgaaagtgggccaccccacctgagtgcaggtccatcaccgtgacatccccagagtcaggccggcggggaaagttgcagctcagcatgaaggcctggtagtgaagctggaaggtcccaaggccgtcgtcctggaaggtccggaagtagacggagatggtgttggtggggcttcggattacctgcccctccaccaggagtgtctggttggccaggacggtcagggtagggccgtccaccccgcggatggagagcagttccccatcggacaggttcacactcttcacctggagctccaccccatagccagtgtagactgtcacgttgtatgtgcactccagaaagttgttgaggggcagcagtgggtagtcgctggagtcaatgtacccctcaggattggagaagctcacactgcagagagctggtgcctgctcggtggtgatgaccgtggtggtgataatggtggaggtagtggtctcctggctctcctctgaggctgacccagtcagctcattctcacctttgtccatcagggccatggggctggtgtcctcctggggggcctcctgggccatgtcaggcccaggctccccgggttctggcctctgggggagtgtgtgggccacatagggctgcgaagtgaagggggagatttgcaggggtgcgggtgttgtagggaccgcactctcctttcggtccagccaaaggggcacttctgatgcctcctcggaggccacgatggggtccgggtcccccggtgggccaggcttctccgtggaggaggagaggagatctaggccctgggacgctggctgggaccctgccctttggacagtggctgcggaggtggccttgggcctcagctgcttcctggcagagttcacctgcttgagcgaaggcagtttcttcttggggggcaaggcgtgcttggggcgggcctcctctggaagcagcggtgacagggctgggatgtcgtgatgtgcagagggtgcggtcccatccagcaccagctcgcccagcacttccgccgactgtgaggaactggggggcgctgttaccactctctcttcagggtgctctttgccaggactgcctctctccggggctcctgagggcaggaggtaaggacccaaagggctagcatctccctcgggaagagcatcttggaagaggagaaaagacaccagttagtttggggagatttaggaccttcacctgctgtcagactctgagggtggccctcctaagggcggtgcccaaagctcgtccggctggcctctaaaccaacttctcctttctccctccctcccttccttt

SEQ ID NO: 115281 - DNA, 1306 bp, Homo sapiens
atgaagaaatctaaagaagggtatgaggtggagtgtgactggggtatcgtattccagggagtagtggagactggagcagaatctctatcaggaaatcacagggttggaaaaaaagatgcttggccaaactacatcgcagctgaaccagggtcttcattctgtgacagtggaccagcttcagagaagttccttccaactgattcacgtattttgctggtcctgaaagatgggacgctgtgtggggcaaagggttgtctcatggcccccaggacgacggtcctaattcattctctggcgaaacttttatctgaagtcatctgtgcgtttcttatggcaaagcttatctgcatttctgtctgttatctgcattttaaaccaaacccagttttaaatattctcctgctggactgtgcccaaactgaggggatgagagaggttcggggaagctgctctcacgcgtggcctgctgcccaggtagaattatcacccggtgcagagccaagaagcctcggtcaaatcagctgtccagcagttcatagaaattaaccactcagataaaggacaaagtggccgcagtttacagaaaatccctgcagggtggcatccagtgctccctgactccatgcatgaggtgtcatgtggtcagtggccgcatgggttaaaccccagaaggccagacctggaggagagatccagctccagcccatctgggaagtccctgatcgggggtgatgatggtgacaaaggtcaacatgaggctacttgtttgtttttgcaaaatcgggtatcagtacaaaggcaggaggaggtagaaggagctgttaatacctatggatgcgaggtcgtggatttaaaaacatctcttagcttcatcttagctccaggtaaactcacgagctactgcagaaaacatgccgaatgccggggcactgagacggctacatacagtcacggatgggactctgccacggtcctcagtcacatttacccaaatgacacattgtgggatgatgccgcacacaaccgccagctaccacactacttccacccaaatgcaaggatgctcattctaatgaagtcacaaactctgcttagtagcctgctgatgtgtgttacatgtgcatgcttctctcagaaaaagagaatctcaaagcatctggttaacaatcataggaagaaacttcgctttgtaaaccccctacgcaaagtatcacgggggccacgcatcaaggccagtgctgatctgggtgcctcattaaaaataaaaaccaaaaatgacataaatataattaaaagggatgaatga

SEQ ID NO: 115282 - DNA, 333 bp, Homo sapiens
atgccaatggtgcaggtgctgggcaggggctcctgtgagggacgtccctgtcacaacaatctccttggagcttctcctcctcccactcgcctccctgatgccatcgacctcaggccacattcccacatttccctctcccgtggttccaggaggctctgccacatctccaggcgatggattctgccctgggattcccgccagctcctgagatgtgtgactcccagggagggccttgctctgaaggcaccggagtcttcatggatggccacagaggtggcattaagtgggctgtgggtctacacgttccggacgtgttgctccatccagttgtga

SEQ ID NO: 115283 - DNA, 249 bp, Homo sapiens
atgtggcagagggaaaatgagtgctcaaaggctgaacaaggcaggaaagagcagcaggccagtgtggctggaacacagcgagcacgggccaatgtgatcagagaggaaccaggtaacctagagctgcagggcttgctaccgcccaatcatctaggctctctttggctccacagacaagtttctatgaagaagtcctatgtcaacggttccaaactttcttggctcaaagaatctttagtgtctcagtga

SEQ ID NO: 115284 - DNA, 249 bp, Homo sapiens; identical to SEQ ID NO: 115283

SEQ ID NO: 115285 - DNA, 482 bp, Homo sapiens
gtcactaaaggtttcaggcacagaactgtatatccaataatagtgaaatggatcccactaattatgacagaaatgatgatacatttaaatgacttggatgttttataggttggcactcatgatgagccgctgttctcattctgcaaatggtgaagctctctattgtcctgaccccacagttcctgtcgcatgaccagagccagctcaccaaggagctgcagcagcatgtaaagtcagtgacatgcccatgcgagtacctgaggaaggttatcaatagtctggctgtctatcgtcatcgtgagactgactttggtgtaggagttcgagaccaccctgggccaacatggcaaaaccccatctccacaaaaattggataatttgataattatcattattggggttctgaggacggtacaacatttaacattctcttctgcaacaagttgcctttgtgtgtctttcctgaggacttatcttctggg

SEQ ID NO: 115286 - DNA, 714 bp, Homo sapiens
atggtgaagctctctattgtcctgaccccacggttcctgtcccatgaccagggccagctcaccaaggagctgcagcagcacgtaaagtcagtgacatgcccatgcgagtacctgaggaaggttatcaatactctggctgaccatcgtcatcgtgggactgactttggtggaagtccttggttacttatcattactgtgtttctgagaagttataaatttgccatctccctctgcacaagttacctttgtgtgtctttcctgaagactatcttcccgtctcaaaatggacatgatggatccacggatgtacagcagagagccaggaggtccaaccgccgtagacaggaaggaattaaaattgtcctggaagacatctttactttatggagacaggtggaaaccaaagttcgagctaaaatctgtaagatgaaggtgacaacaaaagtcaaccgtcatgacaaaatcaatggaaagaggaagaccgccaaagaacatctgaggaaactaagcatgaaagaacgtgagcacggagaaaaggagaggcaggtgtcagaggcagaggaaaacgggaaattggatatgaaagaaatacacacctacatatcaccccttctgcaagaaagcctctttgcaaccgggtcagaatggcggcagcggagcatcgtcattcttcaggattgccctactggccctacctcacagctgaaactttaa

SEQ ID NO: 115287 - DNA, 1587 bp, Homo sapiens
atggtgaagctctctattgtcctgaccccacagttcctgtcccatgaccagggccagctcaccaaggagctgcagcagcatgtaaagtcagtgacatgcccatgcgagtacctgaggaaggttatcaatactctggctgaccatcatcatcgtgggactgactttggtggaagtccttggttacatgtcattattgcatttccgacaagttataaagttgtcattaccctctggatagtttacctttgggtgtctctcctgaagactatcttctggtctcgaaatggacatgatggatccacggatgtacagcagagagcctggaggtccaaccgccgtagacaggaagggctgaggtccatttgtatgcacacaaagaaaagagtttcttcctttcgaggaaataaaattgtcctgaaagacgtcattactctacggagacatgtggaaacaaaagttagagctaaaatccgtaagaggaaggtgacaacgaaaatcaaccatcatgacaaaatcaatggaaagaggaagaccgccagaaaacaactctctcaacattcaatttctcatgtgttggctttttcagatccccccttctgcaagaaaggctctttgcaactggctccaccctcagcagatgataatatcaagatacctgctgagcgtctgcggattccgcttccaccatcagccgatgataatctcaagacaccttccgagcgtcagctcactccccttccaccctcagctccaccctcagcagatgataatatcaagacacctgccgagcgtctgcgggggccgcttccaccctcagcggatgataatctcaagacaccttccgagcgtcagctcactccccttccaccctcagctccaccctcagcagatgataatatcaagacacctgccgagcgtctgcgggggccgcttccaccctcagcggatgataatctcaagacaccttccgagcgtcagctcactccccttccaccctcagctccaccctcagcagatgataatatcaagacacctgccgagcgtctgcgggggccgcttccaccctcagcggatgataatctcaagacaccttccgagcgtcagctcactgcccttccaccctcagctccaccctcagcagatgataatatcaagacacctgccgagcgtctgcgggggccgcttccaccctcagccgatgataatctcaagacacctcccttagctactcaggaggctgaggcagaaaaaccacgcaaacccaagaggcagagggcggctgagatggaaccacctcccgaacccaagaggcggagggtcggtgacgtggaaccgtcacgcaaacccaagaggcggagggccgctgacgtggaaccatcatcacccgaacccaagaggcggagggtcggtgatgtggaaccgtcacgcaaacccaagaggcggagggccgctgacgtggaaccatcatcacccgaacccaagaggcggagggtcggtgacgtggaaccgtcacgcaaacccaagaggcggagggccgctgacgtggaaccatcattacccgaacccaagaggcggaggttgagctga

SEQ ID NO: 115288 - DNA, 458 bp, Homo sapiens
  misc_feature (1)...(458): n = a,t,c or g
ggaattccaacgccaagagggaaccctagtgtagcccttccagcgctgtggactctgggtgacagttttgcgttagggtagcttcatggattgccgtactctatgagggatgttgctggtggggaggctgtgcctgtcggggcagggagtacatggcagctgtatnnnnnnnnnnnnnnnnnnnnnnnnnnnnnnnnnnnnnnnnnnnnnnnnnnnnggcttcttgttttagtcacttactaagaaaagaagtcagtgaaagattttgtccttgaattaggatcccaagaggaggagctggtggagaagaagaggacatgacaccacagtggccatagcagaagggtcgagggtttttctaatgagcccgtttaggggccataagctgatggccctactcttaaaaagcccaggtcagttaaccgcagcaggaaagatagcggcccattattgaaagg

SEQ ID NO: 115289 - DNA, 509 bp, Homo sapiens
ccccctgactgtaacgtatgatctcgtgaaaccttgagagaaactgaatgacgaatgaaactattgttcctgtttcacacagaagaaaactgaggttggcactcatgatgagcccctgttctcattctgcaaatggtgaagctctctattgtcctgaccccacagttcctgtcgcatgaccagagccagttcaccaaggagctgcagcagcatgtaaagtcagtgacatgcccatgcgagtacctgaggaaggttatcaatagtctggctgtctatcgtcatcgtgagactgactttggtgtaggagttcgagaccaccctggccaacatggcaaaaccccatctccacaaaaattggataatttgataattatcattattgggtttctgagacgttacacatttaacattctcttctgcacaagttgcctttgtgtgagtatactaactttctgtagaggtatacttgtaatcacaaataagaataaattatataaaacaaaaaaaaa

SEQ ID NO: 115290 - DNA, 1611 bp, Homo sapiens
atggtcctggcctctactgtgaagcccctgagcgtagaggaggccttggcgcccgcagatgaggtcgcaaggaccaaccagtgcctacccgcccatgctcccccgaaactgggaactgacagcccagcccctccaaagccccttcctccagcttcagctgccaggtcagcaagggcactgggctccctctgctccccgtgggccgctccccgcgtggggccactgcccccggcccccgccatggtgcggatttcaaagcccaagacgtttcaggcctacttggatgattgtcaccggaggtatagctgtgcccactgccgcgctcacctggccaaccacgacgacctcatctccaagtccttccagggcagtcaggggcgtgcctacctcttcaactcagtggtgaacgtgggctgcgggccagccgaggagcgggtgctgctgaccggcctccatgctgtcgccgacatccactgcgagaactgcaagaccactttgggctggaaatatgcctctgtggctgctggctctgggccccgcagtttcctcttcacacgggcgtctcgctccctggggaacagtggtggtgatgatgatgatgatggtgatggccatggtgatggtaacagtacttacccggtgccaggcatttcaccctcccagggaccctgtcagatgcagaaactgaagcacacactgccttcagctctggagggcctcatgtccacccacaggacgagggcattggtgaaggacctgaaaactaggctcctgaaggtggcgagcctgacggccctggagagggcaaggtgcaggcagacagtgctgctttcagaggccaagtgggctgcagcaggggaaggggtgggcagccttggggctgccacaaagttcctgtcccatgaccagggccagctcaccaaggagctgcagcagcatgtaaagtcagtgacatgcccatgcgagtacctgaggaaggtgaattgcacaggtgagagtgctcagattagggctggacgttgtaaccattgctcccaactgacagtgcccgtgtcggcatgtttcgggcatttctgggctaaactcttccaaaatcggggccgaatcccccgtgcacaggccggggagaaaggcgccaagaacgaaccaaaggccttaaaatctctgcaaaatcaggaaggaactatttacactgactccaagtattttggagtagtccatacctttggaaagatctggactgaacgaggcctcattaatatcgcaatccccatcttctccgacgcggaccaagaaaagttaaaaagaataggagctaaggaaagctcagagggaagctggactgccgccatggaactcagcgccgaatacctccgcgagaagctgcagcgggacctggaggcggagcatgtggaggtggaggacacgaccctcaaccgttgctcctgtagcttccgagtcctggtggtgtcggccaagttcgaggggaaaccgctgcttcagagacacaggctggtgaacgcgtgcctagcagaagagctcccgcacatccatgcctttgaacagaaaaccctgaccccagaccagtgggcacgtgagcgacagaaatga

SEQ ID NO: 115291 - DNA, 639 bp, Homo sapiens
atgaaacctgaagtggttcctaagcccaaagatgtggagcctcggaacatgcagtcacatacacacagaggaagtgcggaagcccagcagtggccagcgcttccaggagaggccgagagccgggaagcgtgtctaagtacatacctaaaaattcatacatccgttgtcctgaagaagccatgggttatgccagtccttgtctcagaaactgttgccagcacagcttgggggcttggcaatgccattagctcagtactgagccatgaaagcagaaatcagatctccaaagggaccgtgcatgagagaatctccgagatgctctggaagaacaatggccaagcaaaattctcccggaggacagagtctgtggcagtctttctgggtgaccagggacactggctccagtgttcagtcacctgcccaagatgcctaggcctgcaggagggaccagaggcagatgatgtagacaatgatgatgtcacaaagagaatcatttatgctcctgtcttccgtggaggaagtctggtagtatctccccgggacactggctcaaatttccagccacctgcccaagacagatgggaccaggggccagatgatgtggacaatgatgatgtcacaaagagaagtaagaaataa

SEQ ID NO: 115292 - DNA, 948 bp, Homo sapiens
atggcatacgcctataccacctgtgatcaccgggattgtcgactgttcacggcacagtttatgcaaaccagcgccaccacgcgggatcagcatgtcgatgtatttatccatacgcagcatttcactgaccagcgcacggtcaggattatcaatcgcctgcacggcacccgccgcgttagtgcgacacgtttctttgccaccgcgcaggatcaccgcattaccggttttcaggcacagcgaagcgacatcaaccgtcacgttcgggcgcgcttcataaatcacgccaataacccccagcggtacgcgacgacgctcaagacgcaggccgctgtccagtacgccgccatcgattacctgccccaccgggatcggcgagacccgggaatatccacagccaattatccgctgagattgcacataagagcgtctgggaagccttttcgctacgacataggacgtccgaagaccggaaacaatgaattaggtcaaaatgggccagctcaccaaggagctgcagcagcatgtaaagtcagtgacatgcccatgcgagtacctgaggaaggctctgcagcagccgcccccacctgtgaaatgttaagagctcatggccatgatgacctctactttaaatgggaaccttgtgcctcctcccaagctatcactgtgctcccgaaacacagcggaactggtggaagccgacagggccctgccgtggcccaccccgcagccccctttcccaaggtgcgaggtggagagggtacgtactacttgcacctgtccgtcttctccgatctggtggatctgcacctgctgcacgttggccagcgcgtagtgcagggcctgcggctgcggctgtggctgcaggagctctctggcaggaggtggggtgctcatcatcggctctgtgggggcaacaggtgtgaacggggtgaacgagaagtttcttag

SEQ ID NO: 115293 - DNA, 1020 bp, Homo sapiens
gtaggtttcaggcacagaactgtatatccaataatagtgaaatggatcccactaattatgacagaaatgatgatacatttaaatgacttggatgttttataggtatgatctcgtgaaaccttgagagaaactgaatgacgaatgaaactattgttcctgtttcacacagaagaaaactgaggttaaaaggggtaaagtaattttgcatggcatgaagtagaaattcaaagtacaggaatttgaacttggttctgtccttttctgaagcccttgaccactatagactcaaacatcaccttgtttttccactcattcaacactttttttttaaattatctaataggttggcactcatcatgagcccctgttctcattctgcaaatggtgaagctctctattgtcctgaccccacagttcctgtcccatgaccagggccagctcaccaaggagctgcagcagcacgtaaagtcagtgacatgcccatgcgaatacctgaggaaggtctggaaccagacagagcctgaacctgccgccaccagcctgctgagcctgtgcttcctgagaacagcaggggtctgggtgccccccatgtacctctgggtccttggtcccatctacctcctcttcatccaccaccatggccggggctacctccagatgtccccactcttcaaagccaagatggtagctgccatccctgggagcctggaaccaggcaatggtgacaacggcaaaccatccaccctggtgttgactgactttaacaaggttcagttcacagagattgagggcagaaaaaggaaacggcctcaaaaggacacctgtggtgacttgctggtgactctacagtccctgagccgccagggtgagaagcggagcctccagctctccggcaaggtcaacgccatgactttcacctttgacaacgtgctcctggaaaatacaaaactaaacttcccacaggccttctgcccgatcacacagagtgtgcccaaactctctcaggcctctggcagctga

SEQ ID NO: 115294 - DNA, 5471 bp, Homo sapiens
caggacacgaggaaactgttaatgacttgggctttggaagtagctgttgtaatgaagaagtccgaaacatatgcacctttattctgtcttccgtctttccataaattttgcaaaggccttttagccgacactctcgttgaagatgtgaatatctgtctgcaggcatgcagcagtctacatgctctatcctcttccttgccagatgatcttttacagagatgtgttgatgtttgccgtgtccaactagtgcaccgtggaacttgtattcgacaagcatttggaaaactgttgaaatcaattcctttaggtgttttcctaagcgataacaatcacacagaaattcaagaaatttctttagcattaagaagtcacatgagtaaagcaccaagtaatacattccacccccaagatttctctgatgttattagttttattttgtatgggaactctcatagaacagggaaggacaattggttggaaagactgttctatagctgccagagactggataagcgtgaccagtcaacaattccacgcaatctcctgaagacagatgctatcctttggcagtgggccatatgggaagctgcacaattcactgttctttctaagctgagaaccccactgggcagagctcaagacaccttccagacaattgaaggtatcattcgaagtctcgcaggtcacacattaaaccctgatcaggatgttagtcagtggacaactgcagacagtgatgaaggccatggtaacaaccaacttagacttgttcttcttctgcagtatctggaaaatctggagaaattaatgtataatgcatacgagggatgtgctaatgccttaacttcacctcccaaggtcattagaacttttttgtataccaatcgccaaacttgtcaggactggctaacgcggattcgactctccatcatgagggtaggattgttggcaggccagcctgcagtgacagtgagacatggctttgacttgcttacagagatgaaaacaaccagcctatctcaggggaatgaattggaagtaagcattatgatggtggtagaagcactatgtgaacttcattgtcctgaagctatacagggaattgctgtctggtcatcatctattgttggaaaacatcttctgtggattaactcagtggctcaacaggctgaagggaggtttgaaaaggcctctgtggagtaccaggaacacctgtgtgccatgacaggtgttgattgctgcatctccagctttgacaaatcggtgctcaccttagccagtgctgggtgtaagagtgccagcctgaaacattgtctgaatggtgaatccagaaaaagtgtgctgtccaaaccgactgactcttcccctgaggttataaattatttaggaaacaaagcatgtgagtgctacatctcaactgccgattgggctgctgtgcaggaatggcagaacgctatccatgacttgaaaaagagtaccagtagcacttccctcaacctgaaagctgacttcaactatataaaatcattaagcagctttgagtctggaaaatttgtcgaatgtaccgagcaattagaattgttaccaggagaaaatatcaatctacttgctggaggatcaaaagaaaaaatagacatgaaaaaactgcttcgtaacatgtgaagtccagatccaagggaacctcagaaatccattgaagttccattgttaagaagttctgtttgtttggcaactgctttaaacccgatagaacaagatcagaagtggcagtctataactgaaaatgtggtaaagtacttgaagcaaacatcccgcatcgctattggacctctgagactttctactttaacagtttcacagtctttgccagttctaagtaccttgcagctgtattgctcgtctgctttggagaccacagtttctaacagactttcaacagaggactgtcttattccactcttcggcgaagctttacgttcatgtaaacagcatgacgtgaggccgtggatgcaggcattaaggtatactgtgtaccagaatcagttgttggagaaaattaaaggtatgatctcgtgaaatcttgagagaaactgaatgacgaatgaaactattgttcctgtttcacacagaagaaaactgaggttggcactcatcatgagcccctgttctcattctgcaaatggtgaagctctctattgtcctgaccccacagttcctgtcccatgaccagggccagctcaccaaggagctgcagcagcatgtaaagtcagtgacatgcccatgcgagtacctgaggaaggttatcaatactctggctgaccatcatcatcgtgggactgactttggtggaagtccttggttacatgtcattattgcgtttccgacaagttataaagttgtcattaccctctggatagtttacctttgggtgtctctcctgaagactatcttctggtctcgaaatggacatgatggatccacggatgtacagcagagagcctggaggtccaaccgccgtagacaggaagggctgaggtccatttgtatgcacacaaagaaaagagtttcttcctttcgaggaaataaaattggcctgaaagacgtcattactctacggagacatgtggaaacaaaagttagagctaaaatccgtaagaggaaggtgacaacgaaaatcaaccatcatgacaaaatcaatggaaagaggaagaccgccagaaaacagaaaatgtttcaacgtgcgcaagagttgcggcggcgagcagaggactaccacaaatgcaaaatcccccttctgcaagaaaggctctttgcaactgggtcagaatggcggcagcggagcatcgtcattcttcaggattgccctactggccctacctcacagctgaaactttaaaaaacaggatgggccaccagccacctcctccaactcaacaacattctataactgataactccctgagcctcaagacacctcccgagtgtctgctcactccccttccaccctcagcggatgataatctcaagacacctcccgagtgtgtgctcactccccttccaccctcagcggatgataatctcaagacacctcccgagtgtgtgctcactccccttccaccctcagcggatgataatctcaagacacctcctgagtgtctcctcactccccttccaccctcagcggatgataatctcaagacacctcccgagtgtctgctcactccccttccaccctcagctctaccctcagctccaccctcagcagatgataatctcaagacacgtgccgagtgtctgctccatccccttccaccctcagcggatgataatctcaagacaccttccgagcgtcagctcactccccttccaccctcagctccaccctcagcagatgataatatcaagacacctgccgagcgtctgcgggggccgcttccaccctcagcggatgataatctcaagacaccttccgagcgtcagctcactccccttccaccctcagctccaccctcagcagatgataatatcaagacacctgccgagcgtctgcgggggccgcttccaccctcagcggatgataatctcaagacaccttccgagcgtcagctcactccccttccaccctcagctccaccctcagcagatgataatatcaagacacctgccgagcgtctgcgggggccgcttccaccctcagcggatgataatctcaagacaccttccgagcgtcagctcactccccttccaccctcagctccaccctcagcagatgataatatcaagacacctgccgagcgtctgcgggggccgcttccaccctcagcggatgataatctcaagacaccttccgagcgtcagctcactccccttccaccctcagctccaccctcagcagatgataacatcaagacacctgccttccaccctcagcggatgataatctcaagacaccttccgagcgtcagctcactccccttccaccctcagctccaccctcagcagatgataatatcaagatacctgctgagcgtctgcggattccgcttccaccatcagccgatgataatctcaagacaccttccgagcgtcagctcactccccttccaccctcagctccaccctcagcagatgataatatcaagacacctgccgagcgtctgcgggggccgcttccaccctcagcggatgataatctcaagacaccttccgagcatcagctcactccccttccaccctcagctccaccctcagcagatgataatatcaagacacctgccgagcgtctgcgggggccgcttccaccctcagcggatgataatctcaagacaccttccgagcgtcagctcactccccttccaccctcagctccaccctcagcagatgataatatcaagacacctgccgagcgtctgcgggggccgcttccaccctcagcggatgataatctcaagacaccttccgagcgtcagctcactccccttccacactcagctccaccctcagcagatgataatatcaagacacctgccgagcgtctgcggggagcgtctgcgggggccgcttccaccctcagcggatgataatctcaagacaccttccgagcgtcagctcactccccttccaccctcagctccaccctcagcagatgataatatcaagacacctgctgagcgtctgcgggggccgcttccaccctcagcggatgataatctcaagacaccttccgagcgtcagctcactccccttccaccctcagctccaccctcagcagatgataatatcaagacacctgccgagcgtctgcgggggccgcttccaccctcagcggatgataatctcaagacaccttccgagcgtcagctcactccccttccaccctcagctccaccctcagcagatgataatatcaagacacctgccgagcgtctgcgggggccgcttccaccctcagccgatgataatctcaagacacctcccttagctactcaggaggctgaggcagaaaaaccacgcaaacccaagaggcagagggcggctgagatggaaccacctcccgaacccaagaggcggagggtcggtgacgtggaaccgtcacgcaaacccaagaggcggagggccgctgacgtggaaccatcatcacccgaacccaagaggcggagggtcggtgatgtggaaccgtcacgcaaacccaagaggcggagggccgctgacgtggaaccatcatcacccgaacccaagaggcggagggtcggtgacgtggaaccgtcacgcaaacccaagaggcggagggccgctgacgtggaaccatcattacccgaacccaagaggcggaggttgagctgagaagaggccagtgcactcaagcctgagcaataagaataaaaccgagtagaacaaaataaaaaattcaaaaaacaaaacaaaacccacactccaaaaactaacaaagaataaataaataatataaaaat

SEQ ID NO: 115295 - DNA, 1386 bp, Homo sapiens
atgggtctgtgctacagtctgcggccgctgcttttcgggggcccaggggacgacccctgcgcggcctcggagccgccggtggaggacgcgcagcccgccccggccccggccctggccccagtccgggcggccgcaagggacacggcccggaccctgctccctcggggcggcgaagggagcccggcatgcgctcggcccaaagcagacaagccgaaggagaagcggcagcgcaccgagcagctgagtgccgaggagcgcgaggcggccaaggagcgcgaggcggtcaaggaggcgaggaaagtgagccggggcatcgaccgcatgctgcgcgaccagaagcgcgacctgcagcagacgcaccggctcctgctgctcggatcccaagaggaggagctggtggagaagaagaggacagacaccacagtggccatagcagaagggtcgagggttcttctaatgagcccgtttaggggccataagctgatggccctactcttaaaaagcccaggagcccgctctgtgccaggtgcttctctgggtgatgtggagattccacaaggcagagagcacagcctcagccctggaaaagttcactgtgttgttgaagagaaaggacaagaacctaagagaaaaataccagtccgagcctgcacgtgctcggagataaatggcaacagtttcctgtcccatgaccagggccagctcaccaaggagctgcagcagcacataaagtcagtgacatgcccatgcgagtacctgaggaaggaaaagggtgaaaatgacttgatggtcccagtaaattacagtcgaattaaagcatggtcaaggtgtggtggtcaaacgcagaaggcagtctgtggagtggggagttctgcaggctggggcccctctgtctgctgtgctctcgctgtgcagggctctggaagggagacctgggccactgggaccccagaatcttcatttggagcaacagttcttcacaaagctgtctatgaaacagcttctgccccactctcacctgggatgcttgattttggaactcagccagattctgggtgggagccaagcagctgtgtggaggggccttggggatgggtgttccagcccacagctgctgtcagtctccagacagagagaatctccgagatgctctggaagaacaatggccaagcaaaattctcccggaggacagagtctgtggcagtctttctgggtgaccagctctccgctcttccagtcatttatgctcctgtcttccgtggaggaagtctggtagtatctccccgggacactggctcaaatttccagccacctgcccaagacagatgggaccaggggccagatgatgtggacaatgatgatgtcacaaagagaagtaagaaataa

SEQ ID NO: 115296 - DNA, 361 bp, Homo sapiens
ctggtgtccaccttcaagaatactactcattggtgctggacagccctctggaccgcgagagcgtgtcggctatgagctggtgcgtgtccgtggaggtggccgacgtgaacgacaatgcgccgcattctcgcagtccgagtacacaggtgttcgtgaaggagaacaacccgcgggctgccacatcttcacggtgtctgcgcgggacgcggacgcgcaggagacgccctggtgtcctactcgctggtggaacggcgggtgggggagcgcgcctgtcgagctacgtgtcggtacacgcggagagcggcaaggtgtacgcgcgcagccgctggaccacgaggagctagagctgctgcagttccag

SEQ ID NO: 115297 - DNA, 481 bp, Homo sapiens
  misc_feature (1)...(481): n = a,t,c or g
atgcgatgtttggttttcagagaaggggattgggcaccccacgactacagctctggcttctcctcctcgaattctgggaggtggggagcggccagctccactactccgtctcggaggaggccaaacacggcaccttcgtgggccgcatcgcgcaggacctggggctggagctggcggagctggtgcagcgcctgttccgggtggcgtccaaaacacatggggaccttctggaggtaaatctgcagaatggcattttgtttgtgaattctcggatcgaccgcgaggagctgtgcgggcagagcgcggagtgcagcatccacctggaggtgatcgtggacaggccgctgcaggttttccatgtgaacgtggaggtgaaggacattaacgacaacccgccggtgttctcgctcagagaacaaaagctgctgattgcggggnttccccgcacgttactcagtntctcagttnnnnnnnncgcccc

SEQ ID NO: 115298 - DNA, 532 bp, Homo sapiens
  misc_feature (1)...(532): n = a,t,c or g
cccgggtcacccacgcgtccgacaaaatacattgtgtggtgatgcatagaaagctcataattggaacgagattgagatggtatattcccggagaggaagtctgggatcccggctcctgctgctctggcttctcctcgcctactggaaggcagggagcggccagctccactactcgatcccggaggaagccaaacacggaaccttcgttggccgcatcgcgcaggacctagggctggagctggcggagctggtgccgcgcctgttccgggtggcgtccaagggccgcggggaccttctggaggtaaatctgcagaatggcattttgtttgtgaattctcggatcgaccgggaggagctgtgccggcggagggcggagtgcagcatccacctggaggtgatcgtggacaggccgctgcaggttttccatgtggaggtggcagtgaaggacatcaatgacaatccgcccaggttctccagacaagaacaaagattattcattntagaggcaagaatgccagattcgcggtttcgn

SEQ ID NO: 115299 - DNA, 2360 bp, Homo sapiens
cgtgtccgtggaggtggccgacgtgaacgacaatgcgccgcattctcgcagtccgagtacacaggtgttcgtgaaggagaacaacccgcgggctgccacatcttcacggtgtctgcgcgggacgcggacgcgcaggagacgccctggtgtcctactcgctggtggaacggcgggtgggggagcgcgcctgtcgagctacgtgtcggtacacgcggagagcggcaaggtgtacgcgcgcagccgctggaccacgaggagctagagctgctgcagttccagcgccgcttctggacccacagcgcctgccgacgccctcgacgaagcctgtggcgcttggccgctctccaccagcgacaacagcaccgttgccgtggccgtcagcgcgggctcaccgtggtccttcaccagcaccagaaggcggtggtgcggcgcgtccacctcgtccagagggcgcgtcgtgctgatctcgccagtgtacagccccacgcggaacgggatgcgcgcgccgaccgccgccaggctgcaattcatacgaaagccacgcattgtagcccgaatcggcgtccaccgcgcgcaccttcgccaccacgtggcctgcacccaccgaccgcggcatcagctcgctcactgcgccagcagcggtgccacccactcgaggcaccagcagcgccggcgcgttgtcgttctcgtccagcacgaacacctgcagcgtcacgttgctgcccagaggcggcacgcccgcgtcgcgcgcgctcacctggaactgcagcagctccacttcctcgtggtccagcggctgcagcgcgtacaccttgccgctctccgcgtgcaccgaaacgtaactcgacagcgggcgctcgcccacccgccgctccaccagcgagtaggacaccagggcgttctcctgcgcgtccgcgtcccgtgcagacaccgtgaagatgtggcagcctggcgggttgttctccttcacgaacacggtatactggggctgcgcgaacgccggagcgttgtcgttcacgtcggccacttccacagacacgctggcggtggcccacagcgaaggcgagcccccgtcccgcgcggtcaccaccagctcatagaccgacacgctctcgcggtccagggcgctgtccagcaccaacgagtagtaattcttgaaggtggacaccagcttgaagggaacgtggggcattagggagcaggtcacctgcccgttggcacctgagtcacggtcagacacgctgatcagagcaatgaccgtgctgagtggagcgtcctctttgacaggcaggaaaagggtggttatggccatctctggggtattatcattcacatccaggagtttcactactactttacagtgtcctgataatgggaatgtacttttatccatggcatcaatattaatttcatatgagttatagtcttcataatccagttccccgttaacttttatttcaccagtattagaattaattataaatttggactttacatcgtcaagaacaagattactaaagaaatacactatttccttattgatgccctcatctgcatctgaggcgttcagtttaataactaatgtcccacttggtgcattttccaacaatctgacattataaatggatttatcaaattctggggcgttatcattagcatccaatacattgatcaacaactgaactgtacctgttagttcgggttttcctccatcagttgcaatcactaataaacggtgttcttgtgtttcttctctatctaaggatttcctcaaaaccagctctaaaaagttcgtttcttcttcatttgttttaacatctaagtcaaaatattcgtttggatttaacctgtatctcaattgtgcatttgctccaatatccaaatccgacgcgccctctagcggaaaccgcgaatctggcattgcttgactctaaaatgaataatctttgttcttgtctggagaacctgggcggattgtcattgatgtccttcactgccacctccacatggaaaacctgcagcggcctgtccacgatcacctccaggtggatgctgcactccgccctccgccggcacagctcctcccggtcgatccgagaattcacaaacaaaatgccattctgcagatttacctccagaaggtccccgcggcccttggacgccacccggaacaggcgcggcaccagctccgccagctccagccctaggtcctgcgcgatgcggccaacgaaggttccgtgtttggcttcctccgggatcgagtagtggagctggccgctccctgccttccaggctgcgaggagcagaagcaagagtagtagtcgccaggatcccagacttcctctccgggaatataccat

SEQ ID NO: 115300 - DNA, 645 bp, Homo sapiens
atgctcaacatcactaatcatcagggaaatgcaaatcgaaaccacaatgcgataccaccttattcctgcaagaatggccataatcaaaaaacagtagatgttggcagggatgtggtgagcaggaaacacttctacacagctggaagccacagccacgtggaggagctcctcaggtacagccagggagaggcagtttctgcatccccttttgttaaaggcacggatagaaattaccccaccagagtcattggcagttctgaagattccaatggaagggacatggatggagctggaagctgttatcctcagcaaactaacacagaaacagaaaaccaagcactgaatgttatcacttacaagtgggagctgaactatgaaaacacgtggacacatgggggacactggggcctgttgggaaggctgcccatgatggggggagctttcatggactcgcccaacgaggacttcagcaccgagtactccctgtttaactcctctgccaatgtccacgcggctgccaatggccagggccagccggaagatcctcctcggtcctccaacgacgccgtcttgctatggattgccatcatagctacgctggggaacatcgtggtggtgggcgtggtgtatgccttcaccttctga

SEQ ID NO: 115301 - DNA, 690 bp, Homo sapiens
gttggctttggtaggaagacggctgctagcagtttcccatttatagcctatcaggtgcccttgtgcagtgcacaactttcagaatcatacatggaagacttgggtagttccattcattacctgcctgtgatggagccagcttccttgcctgtgacaaagtctgggagtcccaggctgcccctcacagaggctcgtgatgaccatgagtgtaaagtacctggaagagacatcacccaaagggaccagtcgtactcactgagactccttagagtacagctggttccctcccaagatctggagccagaagcccagagacagccgagtgcgccgtgcggtctccggacgctcgctgctcagcccgatccccgccaactgtgcaggcggctgacccgcagcggcagcggcagcagcgaggactcgagcgctggctgcagcgacaccatggatctctcctttatggccgcgcagcttcaagaaatgatgggcccggctaagacacagaggggaatggctaaagggctgggctgggttgaagaaggtgcccagcacgtagtaggtcctcaagtatttattagaggattggatgaggacaagatgtatgttcatgaaaagacattaacaggagaagatggtgaattcaaagtgtcaaatgccaatgccactgaacagctgtcatcatcaggactttga

SEQ ID NO: 115302 - DNA, 969 bp, Homo sapiens
tttcgtgccgagtgcgccgtgcggtctccggacgctcgctgctcagcccgatccccgccaactgtgcaggcggctgacccgcagcggcagcggcagcagcgaggactcgagcgctggctgcagcgacaccatggatctctcctttatggccgcgcagctgcccatgatggggggagctttcatggactcgcccaacgaggacttcagcaccgagtactccctgtttaactcctctgccaatgtccacgcggctgccaatggccagggccagccggaagatcctcctcggtcctccaacgacgccgtcttgctatggattgccatcataactacgctggggaacatcgtggtggtgggcgtggtgtatgccttcaccttctgaggacggcacaccctgcaccaccatggggtgaggcttggcacgtagctctgacttgctgtcggcctttggcttctcctgtgttctagaaccaggagttttgaccaggggcggcggccgtccttctggaatttctccccagcagccctgatttcaaatatcccatgttgtggtcaagctgagtcagaagacatggaagtatgggcctcctgcccctagaggcatgacggggcaaggccttcagagggcagattggggatccttgaaactacattccaggaacatgggaccagatgagacagctagttaagtttaaaacatagacatgatttgatgatcgcttgctggtggtaaataatcactcgtgtgtcttgtttttatgcaaacttatcgaacctagggcgtggggtgctggggcaagagcagccctcagaacttcagtgttcctgacccaattctggtttcacattcagtcccttggccatctagtagggccattggatgttcctagtttgactttgaaatggcacctttgccaccagacacctggtcccttccaagacccaagtgcattgggagacccagggatg

SEQ ID NO: 115303 - DNA, 568 bp, Homo sapiens
  misc_feature (1)...(568): n = a,t,c or g
agcgacgttganacantanaannnncttcgatcactatccgtgggtgaattcgcttttctctgctctcctgaaccttaggcttgtctcggcccatttgaagaccaggaagttgatcaattctgaggctgctgagagacggtggcgcgattgggacagtcgccagggatggctgagcgtgaagatgcagcgggtgtccgggctgctctcctggacgctgagcagagtcctgtggctctccggcctctctgagccgggagctgcccggcagccccggatcatggaagagaaagcgctagaggtttatgatttgattagaactatccgggacccagaaaagcccaatactttagaagaactggaagtggtctcggaaagttgtgtggaagttcaggagataaatgaagaagaatatctggttattatcaggttcacgccaacagtacctcattgctctntggcgactcttattggttggaatctacatttctgaaggaacccactcaacagaagaagacatcaataagcagattaatgacaaagagcgagtggcagcttgcatggaacacn

SEQ ID NO: 115304 - DNA, 730 bp, Homo sapiens
tccttcgagctactccgtctggccccgccttttctctgctctcctgaacctttaggcttgtctcggcccatttgaagaccaggaagttgatcaatcccgaggctgctgagagacggtggcgcgattgggacagtcgccagggatggctgagcgtgaagatgcagcgggtgtccgggctgctctcctggacgctgagcagagtcctgtggctctccggcctctctgagccgggagctgcccggcagccccggatcatggaagagaaagcgctagaggtttatgatttgattagaactatccgggacccagaaaagcccaatactttagaagaactggaagtggtctcggaaagttgtgtggaagttcaggagataaatgaagaagaatatctgggttattatcaggttcacgccagcagtacctcattgctctttggcgactcttattgggctgcgcttaagagtaaaacttcaagcgatgtttaccatttaaacataagttggaaatctacatttctgaaggaacccactcaacagaagaagacatcaataagcagataaatgacaaagagcgagtggcagctgccatggaaaaccccaacttacgggaaattgtggaacagtgtgtccttgaacctgactgatagctgttttaagagccactggcctgtaattgtttgatatatttgcttaaactctttgtataatgccagagactcatgtttaatacg

SEQ ID NO: 115305 - DNA, 792 bp, Homo sapiens
actaaaggaaaaaaactttcggccgcgcttttttttttttttttttttttttttttttttttcaagaacgagtgatttaagaacagccctcccatcttagcaatgtcccggggtggctggagccacggtcacttcttggtcctggtccagaactgtcggtagcagctccacatgcaagtcatcactgagctcctgctcgtactccttcctcagactggagctgagcctcacgcttccgcagcctgggcccggcgctcctcaggagacagggtgtccagatctatggggcatcgcaagcatgcgccagtggctcccctgtagcggaatgtggatggtgggagccattctggctttcaccaagcaagcacggggggtaaaagtccgtgcataagctgcgttgggtgctgctgcgctgcagcccacgacgtcactggcaggcgctgcgtcgcgcggtatgacgtgttccatggcagggagaggcaagagtgggcggtgagacacgaagatatacgccccgggaggaccagggcgggccggcgaggtcgagggggacccgcgggtcagatagtcttcttcatttatctcctgaacttccatataactttccgttaccaattccagttcttctaaagtattgggcttttctgggtcccagatagttcgaatcaaatcataaacctctagcactttctcttccatgatccggggctgccgggcagctccccactcaaagaggcccgagagccacaggattctgctcagtgtccaggaaagcagcctcagctctgccat

SEQ ID NO: 115306 - DNA, 504 bp, Homo sapiens
ggccataggaaaaggcccggcgtccacgcctacctacagccctgcacccacccagccggcccctagaatcgcgtcagccccagagcccagggtcaccctggagggaccttctgccaccgccccagcctcatctccaggcttggctaagccccagatgcccccaggtccctgcagccctggccctctggcccagttgcagagccgccagcgcgactacaagctggctgccctccacgccaagcagcagggagataccactgctgccgctagacacttccgcgtggctaagagctttgatgctgtcttggaggccctgagccggggtgagcccgtggacctctcctgcctgccccctccacccgaccagctgcccccagacccaccgtcaccaccgtcgcagcctccgacccccgctacggcgccctccacaacagaggtgcccccacccccgaggaccctgctggaggcgctggagcagcggatggagcggtaccaggtggccgc

SEQ ID NO: 115307 - DNA, 1416 bp, Homo sapiens
atgcacaagaggaaaggacccccgggacccccgggcagaggcgccgcggccgcccgccagctgggcctgctggttgacctctccccagatggcctgatgatccctgaggacggggctaacgatgaagaactggaggctgagttcttggctttggtcgggggccagcccccagccctggagaagctcaaaggcaaaggtcccttgccgatggaggccattgagaagatggccagcctgtgcatgagagacccggatgaggatgaggaggaggggacggatgaggacgacttggaggctgatgatgacctgctggcggagctaaatgaggtccttggagaggagcagaaggcttcagagaccccacctcctgtggcccagccgaagcctgaggcccctcatccggggctggagaccaccttgcaggagaggctggcgctctatcagacagcaattgaaagcgccagacaagctggagacagcgccaagatgcggcgctacgatcgggggcttaaaacactggaaaacctgctcgcctccatccgtaagggcaatgccattgacgaagcggacatcccgccgccagtggccataggaaaaggcccggcgtccacgcctacctacagccctgcacccacccagccggcccctagaatcgcgtcagccccagagcccagggtcaccctggagggaccttctgccaccgccccagcctcatctccaggcttggctaagccccagatgcccccagcctcccctccaaagacccctcgtccccatcccccgctcatgtgggtcgtggcctcgctgtccctcatctgggcgccaatcccctcgctggctcgagggctctcagatcctgggcagggagggggaccctgcccctcgccccagggacccccaggtcccagcagagtcggggggagacccccacccccaccccaggcccgccctggaaatgccattcttgtgtgtagctgctcagaaggccatgtgaactttgccgagccctcatttaaagtaatagatttaaacagtctccataagcagctgctggctttgaagcggagccggggctgccccgcgggacccgaggagcgcgatgccggggccggggccgcgcgtggccggggccggcccgaggcgctgctggacctcagcgccaagcgggtagccgagagctgggccttcgagcaggtggaggagcggttctcccgggtgcctgagcccgtccagaagcgcatcgtgttttggtcgtttccacgcagtgaacgggaaatatgtatgtactcgtcgctgggttacccgcccccagagggcgagcacgatgcccgggtgccctttacccgcgggctgcacctgctccagagcggggccgtggaccgcgtgttgcaagtggtgctgggattacaggcgtga

SEQ ID NO: 115308 - DNA, 355 bp, Homo sapiens
  misc_feature (1)...(355): n = a,t,c or g
aggtcaccacagttncgatgttgagggatggtctcacaagcaccttttggtggcaatttgagaacatccagacaaatccttccagcagaatcaatgtttggatgatnaattggagtgagaaatcggatctgaggaggttcaaatgggtacgagctcgcaggtcatccatttggtctttatcttgccaacatgtgatgcctgggggtggctctgtggctaacatgtgcagctctctcttcaggacgcgaagctctctgcatgatccccaagtagaaggaaccacacacagttcactgctccacactaagagctgcctgggatgcactgagctgacacccctcacaacgcagcaacg

SEQ ID NO: 115309 - DNA, 1008 bp, Homo sapiens
  misc_feature (1)...(1008): n = a,t,c or g
tttttttttttttttttcaacattaaatgactatttatttttcaggtttaaaagatttcaaaatacatatgtacaagataaataaactccccaaaaattatgtcatcaaatatatttaaaaaaaaaattcagggggggcaccttaaattaaccttggaaaagaacaaattaactaagatgaaccaggacaagtcccctaaacatcaggatgaaatttcttttctattgcctactaactgactggccttccttttttgtggtggggtggggtactctggagtcaccaggcctctggtaagattatcaagcatctcttcctcatcagccttttgtttctgtcttgcatgcttctctggtccactgtctgggcattcttggaggaagggctgggctttattaatattttaaaattctgagggatatgtcaacccatgaacggggtccatccagggtggggtcctgaacatgaagcaagctgaaataagaggtcaaacacagttgccgaatgtttgaagggaagggtctcccaaagccacctttttggtggccaatttgagaaacatcccagacaaatccttcaaccaaaattcaatgttttggattgataaaattgggagtgagaaatcggaatttgaggaggttcaaatggggtacctcctcaggaatgataacttctagcttaaaaaacaccttctctcataagttgtgtggcctcaacctaatatttgagctccgcaggtcatccatttggtctttatcttgccaacatgtgatgcctgggggtggctctgtggctaacatgtgcagctctctcgttcagacgtgaagctctctgcatgatccccaagtagaaggaacgacacacagttcactgctccacactaagagctgcctgggatgcactgagctgacacccctcacaacgcagcaacgcgcggaccaacggggtaccagcgcctgcgcgacctctacgaattccaccacactgactatgactcgaanncccgc

SEQ ID NO: 115310 - DNA, 706 bp, Homo sapiens
atggctgagcgggctgctgggggccagctgccaagccagggtccagtccagctcccatccacacggaaggaaaaggatgaacaaactgaaaatcaacaactcttcttcatccgtcagagaactgagtcaccaggcaaagcacggcccccaaatctggagacacagacaagcgggttccaagaacctcagctgacaggagcagaacctctgcggggccaatgccacggacttgagctgcccctcatgaatttctggagatgccacctggacaaaactaacttacgattaaaagaagagttgaaggcagagaagaaatctggattttgggacaatttggttttaaaacagaatatacagtctaaaaaaccagatgaaattgaaggttgggagcctccaaaacttgctcttgaagacatatcggctgaccctgaggacaccgtgggtggccacccatcctggtcaggctgggaggatgacgccaagggctcgaccaagtacaccagcctggccagctctgccaacagctccaggtggagcctgcgcgcggcagggaaggctggtgagcatccgacggcagagtaaaggccacctgacagatagcccggatgaggccggagtgaggggggctgcgtggcaagtgtgcccccgacatggtggccttttatgagtataccatgtagttgttgagtcttttccgcgttagaaa

SEQ ID NO: 115311 - DNA, 1337 bp, Homo sapiens
atgggcacaacggtagaagcggcagcacagagattcagacccgggtctgcgggacacaccccaggctctgagccttgtggtcttggccaaatcaccgggcctgctgtcttttctgtagagagaagggctgctcggttctcatttggattcaacctttccaatgcagcatttaaacacggaggagggatttttttggttgtcacaaggactgggggaccctgctggctaaatatcctccaatgtgtgagacagttgcaccctaaatgccagtgtgcccctattgagaaacatcctctctataacagtcctttgaacgagccctttacatctctctacacatacatgatgtttgctggtggaggccttatagataggttgttgagtcagatttatgagtttgagaaagagatgctttggatgcaaaggacctttggtgagtttgcagaagccctggactcaaatctaccaccactcagaacagtgaatgccagaaaattcctggaaaagggcatctctttgctgaatgaccctagtaatctactcattccccaggtgtcaagaatctataatgatgatgatgatggcaaagacaatgatagatacctttttaaaacttactatatgccaagcactgtcctaattcatatgttcccaacagcaatgctaagtgggccagcatcagggagggaggaagaggacagggacaacaatcagcagggcccgtgtaagcatacacttcttatggatgactcctctgacaaccacacggggaggctcgtgtggtccctgtttgtcatccagtcaatacggccatcagcttctggccccagacacctttcctctgcactgtggcacagaggagcagactgctttggagggcagcttcctgggagctccagggaccctggccaggcggccactgccactgacttcctcggctcactgagcccgtgcctgcagctctcgtgtttcctctgtgctgcagtggacgcttatcttcccccgatggcacatttctttgtcacagacaggaccctcactggcagtcggagaacatcagccaagcatggtgctatagaaataactcctatcttggctgttcctgagacaggaagctctgaacacttcaagacatgcttagaaggccccccgatgtcagcagaaaaggggctgctaatgtcatctcagaaaccaagttatccccatgcaacaaaatcaatcacgtatcaaaacatgatggagagacagcctgcagaagtcagatggttcccggagcactacaggataaaaaggaccttgaaatacagaagacaaagtacaggctcatgaatgtctga

SEQ ID NO: 115312 - DNA, 330 bp, Homo sapiens
atggctcggcgggctgcggaactggccaacgcaaggggcctgggtctccagggagcttacaaaactgctgtgttcaagatccctgccaggatctcggcgtgttccaccaaggacctcatgtttgttcttttaattcactatcatgaattgccaattcatcctcaaagcatgacaaaagccaggcccaatgcagagttcccagaagctgaaaagctcagtagaagtggaaagcaggaagaacttgcagaggtttctgccacacaaggttggcagtcagaccagctaatcttggcaaggccattaagaattacttcttttgcagatatttag

SEQ ID NO: 115313 - DNA, 5100 bp, Homo sapiens
atgggcaaatttgatgaaggtaaactgcccaccgatccacacctgatgctccgactggccattgaaactgttgctcatgactatgatgtcatagttattgacagcgcgcctaacctgggtatcggcacgattaatgtcgtatgtgctgctgatgtgctgattgttcccacgcctgctgagttgtttgactacacctccgcactgcagtttttcgatatgcttcgtgatctgctcaagaacgttgatcttaaagggttcgagcctgatgtacgtattttgcttaccaaatacagcaatagtaatggctctcagtccccgtggatggaggagcaaattcgggatgcctggggaagcatggttctaaaaaatgttgtacgtgaaacggatgaagttggtaaagctgccccgatggtggattcgttaattgcgcgcgtaggagtaatggctcgcggtaatgccattactttgcctgtatgtggtcgggatgtgaagtttactcttgaagtgctccggggtgatagtgttgagaagacctctcgggtatggtcaggtaatgaacgtgaccaggagctgcttactgaggacgcactggatgatctcatcccttcttttctactgactggtcaacagacaccggcgttcggtcgaagagtatctggtgtcatagaaattgccgatgggagtcgccgtcgtaaagctgctgcacttaccgaaagtgattatcgtgttctggttggcgagctggatgatgagcagatggctgcattatccagattgggtaacgattatcgcccaacaagtgcttatgaacgtggtcagcgttatgcaagccgattgcagaatgaatttgctggaaatatttctgcgctggctgatgcggaaaatatttcacgtaagattattacccgctgtatcaacaccgccaaattgcctaaatcagttgttgctcttttttctcaccccggtgaactatctgcccggtcaggtgatgcacttcaaaaagcctttacagataaagaggaattacttaagcagcaggcatctaaccttcatgagcagaaaaaagctggggtgatatttgaagctgaagaagttatcactcttttaacttctgtgcttaaaacgtcatctgcatcaagaactagtttaagctcacgacatcagtttgctcctggagcgacagtattgtataagggcgataaaatggccaattataggcagagcatcgacaagttgaagtacagctcggtgactgacaccccacagattgttcaagccaaaatcaatgcccagcagctgagtcatgtgaattaccgtgctgactatgagaaaaataagttgaattacacattgccccaggatgttcctcagctggtgaaggccaaaaccaatgccaaactcttcagtgaggttaagtataaagaaggctgggagaagacaaaggggaaaggatttgagatgaagctggatgccatgtctctgctggccgccaaagcctctggggagcttgctagcaatattaaatataaagaagaatatgaaaagacaaaaggcaaagccatgggaacagccgactctaggcttctgcactccctgcagattgctaagatgagcagtgaggttgaatataagaaaggctttgaagagagtaagacccggtttcacctgcccatggatatggtaaacatcaggcatgctaagaaggcccaaactctcgccagtgacctggactacaggaagaaactgcatgaatacactgtgctgcctgaagatatgaagactcagtgggccaagaaggcctatgggctccagagcgagctgcagtacaaggctgacctggcatggatgaagggagttgggtggctgacagaggggagtctcaacttggaacaagccaagaaggctggacagctggtcagcgagaaaaactaccggcagagggtcgatgagctgaagttcaccagcgtgaccgacagctcccagatggagcacgccaagaagagccaggagctacagagcggggtggcctacaaggcaggaaatgagcagtctgtccatcagtataccatcagcaaagacgagcctctcttcctgcaggcccgagccaatgctgcaaatctcagcgagaaactgtataagagcagctgggaaaaccagaaagcaaaagggtttgagctgcgtcttgattccttgaccttcctggcagccaaagccaagagggacctggctagcgaggtgaagtacaaggaggattatgagagatccagagggaagctcattggggcaaaagatgtacagggagattcgcaaatgagccactcactgcaaatgtccaagctgcagagtgagctggagtacaagaagggattcgaggacaccaaatcccaatgccacgtctccctggacatggtccacctcgtgcatgcccgcaaagctcagcatttagccacagacgtaggctacaagacagcggaacatcactttacggctttgcccacagacatgaaggtggaatgggccaagaaggcttatggcttacagagtgataaccaatacagggcagatgtgaagtggatgaaaggcatgggctgggtcgccaccgggtcattaaatgtggagcaggcgaagaaggcaggagaactcattagcgagaagaagtaccgtcagcatccagatgctttgaagtttaccagtattaaagacactccggagatggtccaggccagaattagttatacccaagcagtggatagattatacagggaacaaggagaaaacataaagcatcattacacaccgactgctgacctccctgaagtcctgctggccaagctgaatgccatgaatatcagtgagtacaaatacaaagaggcatttgagaaaatgaaaggacagatgcttggttcccggagcttggaagatgatatcagccttgcacattcagtgtatgcgacctcactgcagagtgatgtgaattacaagaaaggctttgaacactcaaaggcgcagttccatctgccgttggacatggccgccctggtgcatgccaagaaggctcagaccctggccagcaatcaggactacaaacatccactgccccagtacacttccttggcagaagacctgaggctgagctgtgccaagaaagctcacaaattgcagagtgagaatttgtaccggtcagacctgaactttatgcgaggtgttgcatgtgtcattccaggcacgttagagattgaagggaggaagaaagcatcggaactcatcagtgagagtaaatatcggcagcatccccactcattcaagtacacagctgtgacagacactcccaacctccttcatgcgaaattcagcaaccagataacgaatgaggtaaaatctcctgatggctttggaatggtctttttaaaaactgctcgattgttaaaaatacacgtgaatgtgtttgggcgcctctataaagcagctggagaggatgcaagacacgagtatacaatgaccctgggtctgcccgagttcatccgagcaaaaacgaatgcagccaacctgagtgacgcaagatacaaagagtcctggcgtaatcttcgtgctcaaggctacaagctgacaatagaagcgctccccttccaggctgcccgggcctctggagatatagccagtgattttctctacagacatgactttgtgaaggagcgagggaaactcatagggccccagagtgtaagagacgacccccggatccagcactgccggcgcatgggccagctgcagagcgagcttcagtacaggaggggggcgaccagcagccaagcccagttccatctgcccatggacatggtgcacctggtccatgccaagaatgcccaggctctggccagcgaccacgactacaggacacagtatcacaagttcacagcactgcccgaggacctgaagatggcctgggccaagaaagcccatgccctgcagagtgagttgcgctacaagtcagacctgatcggcatgaagggcataggatggctggcgctgagatccccacagatggagagtgcaaagaaggctggagaactcatcagcgagaccaagtaccgtaaaaaaccagacagtatcaagttcaccacagtggttgactccccagacctggttcatgccaagaacagctatatgcactgcaatgagcgcatgtatagatctggagatgcagaatccctgcacagatacaccctgatccccgaccatcccgatttcacccgagctcgcctcaatgcgctgcatctgagtgacaaagtctacagaaactcctgggagcagacccgggctggcagttatgacttcaggccggatgccatccccttccagactgcccgggcatctagggagatcgccagtgatttccggtacaaagaggctttcctgcgggaccgaggcctgcagatcgggtactgcagtgtcgacgatgacccaaggatgaagcatttcctcaacgttggcaggctccagagtgacaatgagtacaagaaggactttgccaagagtcggtcccagtttcacagcagcaccagacccagcccggccttctttcaggccaaagaggaattcagcagctggccagtgatgtgcactacaggcagcccctgccccagcccacctgcgacccggagcagctgggcctcaggcatgctcagaaggcccacccagctgcagagtgatgtccaagtataaatcagacttgaacctgaccagaggtgttggctggacccctcctgggctccttacaaagtggaaatggctcggcgggctgcggaactggccaacgcaaggggcctgggtctccagggagcttaccagcggggggcagaagcagtggaggctggagatcatcagagtggggaggtgaacccagatgccactgagattctgcacgtcaaaaagaagaaggccctgctgttgtgagccatgtccaccctgattcctgagaggccagagaggaagtttgttcaccagagacaggcttacagatggctttgatttcggcaagctggaatggcccaccagcccatcccagatcttcctttattaaaataataactctgaaagcaa

SEQ ID NO: 115314 - DNA, 1574 bp, Homo sapiens
atggggggtacaaagaacaaaaaaaacttggtccctattccccaggagtttacagctcagtggtggagacaaacgtgtacacaaatccttacaataggagcgtccacaggcggcggagcggccacaatcacagctccgggcattgggggaaccgagccggctgcgccgggggaatccgtgcgggcgccttccgtcccggtcccatcctcgccgcgctccagcacctctgaagttttgcagcgcccagaaaggaggcgaggaaggagggagtgtgtgagaggagggagcaaaaagctcacccctaaaacatttatttcaaggagaaaagaaaaagggggggcgcaaaaatggcctggggcaattatagaaaacatgagcaccaagaagctgtgcattgttggtgggattctgctcgtgttccaaatcatcgcctttctggtgggaggcttgattgctccagggcccacaacggcagtgtcctacatgtcggtgaaatgtgtggatgcccgtaagaaccatcacaagacaaaatggttcgtgccttggggacccaatcattgtgacaagatccgagacattgaagaggcaattccaagggaaattgaagccaatgacatcgtgttttctgttcacattcccctcccccacatgggagatgagtccttggttccaattcatgatgtttatcctggcagctgggacattgcctttcaagctaaacaaccaaatcaggggaaaatgcaggaagtctccatgggacgtttccctggcttaccgtgatgacgcgtttgctgagtggactgaaatggcccatgaaagagtaccacggaaactcaaatgcaccttcacatctcccaagactccagagcatggagggccggttactatgaatgtgatgtccttcctttcatggaaatttgggtctgttggccataagttttaccttttaaacatccggctgcctgtgaatgagaagaagaaaattcaatgtggggaatttggggaggataaggatatccgggttggtggggatccaccaaaatggaggcttcaccaaggtgtggtttgccatgaagaccttccttacgcccagcatcttcatcattatggtgtggtattggaggaggatcaccatgatgtcccgacccccagtgcttctggaaaaagtcatctttgcccttgggatttccatgacctttatcaatatcccagtggaatggttttccatcgggtttgactggacctggatgctgctgtttggtgacatccgacagggcatcttctatgcgatgcttctgtccttctggatcatcttctgtggcgagcacatgatggaatacaggttaaccatcagagaatgtgggcctggctctttccagctggcaatgtgtccaggtggcctagtaacccctattactctgaaatacagaccttcccggtctcctcagtttgcacagacaccaaatcatatttcaagagggattgaaggatcagcacgagcggaaccacatcgcagggtattggaagcaagtcggacccattgccgttggctccttctgcctcttcatatttga

SEQ ID NO: 115315 - DNA, 426 bp, Homo sapiens
ggcttgtgggtctttgagacccgaaaattgagagcgttttcgcactctaggggctgctcctggcggctctgcggccgtcaccatgccacagaatgaatatattgaattacaccgtaaacgctatggataccgtttggattaccatgagaaaaagagaaagaaggaaagtcgagaggctcatgaacgttcaaagaaggcaaagaaaatgattagccttcagaccaatcaaaagaatgatgaaaagacaccacagggagcagtacctgcctatctgctggacagagagggacaatctcgagctaaagtactttccaatatgattaaacagaaaagaaaagagaaggcgggaaaatgggaagtccctctgcctaaagtacgtgcccagggagaaacagaagtattaaaagttattcgaacaggaaagag

SEQ ID NO: 115316 - DNA, 1256 bp, Homo sapiens
ctcgacgccagcctaggcaaaaggcaatgtatctaaacgaaaagaaaataggctttctccgctctaccgcctcgggcagccacacctccacacttccggcggtgtaccggccaaatgccgcctgccagcaacttccgtcctcctagctaaaagcggaaaacagaggctcggaaccgctgcgtggttcttgctcttcactcggccgttttaaagggtgactctttcctgtcccggcctgcgtggtgtgggcttgtgggtctttgagacccgaaaattgagagcgttttcgcactccagcggctgctcctggcggctctgcggccgtcaccatgccacagaatgaatatattgaattacaccgtaaacgctatggataccgtttggattaccatgagaaaaagagaaagaaggaaagtcgagaggctcatgaacgttcaaagaaggcaaagaaaatgattggtctgaaggctaagctttaccataaacagcgtcatgctgaggaaaatacaaatgaaaaagactatcaagatgcattgaaaagaggaaacacccaaacaaaaaggattggttgaaaagacaccacagggagcagtacctgcctatctgctggacagagagggacaatctcgagctaaagtactttccaatatgattaaacagaaaagaaaagagaaggcgggaaaatgggaagtccctctgcctaaagtacgtgcccagggagaaacagaagtattaaaagttattcgaacaggaaagagaaagaagaaggcatggaagagaatggttactaaagtgtgctttgttggagatggctttacaagaaaaccacctaaatatgaaagattcatcaggccaatgggcttgcgtttcaagaaagcccatgtaacacatcctgaactgaaagccaccttttgcctaccaatacttggtgtaaagaagaatccctcatccccactgtatacaactttgggtgttattaccaaaggtactgtcattgaagtaaatgtgagcgaattgggccttgtgacacaaggaggcaaagttatttggggaaaatatgcccaggttaccaacaatcctgaaaatgatggatgtataaatgcagtcttactggtttgacagcaatttcatatataattattgaggactacacaccaattgaagaaactgccattactgtgatgtttctgaatactaccaaacagccatacatgtctgcaatgaagagatttattaaattgtaaacattaaagtgg

SEQ ID NO: 115317 - DNA, 453 bp, Homo sapiens
tccattaaagagcagaaagttagtacattattctgtccttctgttcatcgtctggatgtaattgtctgtgtactcacctgactgctctgtaatctttaataagatttttaaaagtatgtggaagcgtaggccgtgactctcatgagcatgacgggtgacaatggtcctcatggagacatttgccaaagctcaattaacaagacatttggtagagaactgaggtcccccaacaggcgtggtttgatgttcatggagacttttaggggctcggctcaagaacttcacacatatactcttactgtgcaatggagggttgatttcaattgactgtctttgccttgttcactgctgagttgcaatggcttttctttaactactttcaaccttgcccatccaaatccatttctggtccttttgcaaagctccactttcatgctgaggcggactgccaca

SEQ ID NO: 115318 - DNA, 237 bp, Homo sapiens
atggccagagtgagactggccttggtggctgcctgggagctagcggtgaagagaagaactaccactcccgaagtggagcgcaggccgccgccgggcggctgcgggaagctgggccaggcggccgcagatccccacaacatccgggagccggcgaccacttccagttgctatggttacgagttgcaacctccagaaagaattcgtggtttcacccgggaaaacagctccccggattaa

SEQ ID NO: 115319 - DNA, 330 bp, Homo sapiens
atgcagttgagttcagctgttgaaagtttggttaacatgtcagttgagccaccaaatggaataacagttgtaactctcttatgttttctctactgtcctcaaaggaatagcatgagaacaaagcaattagcatacattcaggagttgcataatgatgttttggacaatgacagactgcagataggacgagggtaccataagattataatggagctgaaaaatctctatggcctagtgacatacagctgtagtaacactgtagcacaatgcatttctcacatgtttttggtggtgctggtgtacaaacctactgtgttgccagttgtataa

SEQ ID NO: 115320 - DNA, 450 bp, Homo sapiens
gctagaagctcattctgaaatggggagcactgaaattttggaaaaggagaccccagaaaatctcagtaatggtaccagcagcaatgtggaagcagccaaaaggttggccaaacgcctttatcagctggacagattcaaaagatcagatgttgcaaaacaccttggcaagaacaacgaatttagcaaactagttgcagaagaatatctgaagttttttgattttacaggaatgacgctggatcagtcactcagagtctcgctctgtcacccaggctggagtgcagtagcaccatcttggctcactgcaacctccaccttccaggttcaagcagttctcctgaatcagcctcccgaataactgggactacaggaaaatgaatctacattgtcaagtgagggtcatctggattcatctcaaataaacagtgctcttagtgactccgagtaaaa

SEQ ID NO: 115321 - DNA, 605 bp, Homo sapiens
  misc_feature (1)...(605): n = a,t,c or g
accccagaaaatctcagtaatggtaccagcagcaatgtgnaagcagccaaaaggttggccaaacgcctttatcagctggacagattcaaaagatcagatgttgcaaaacaccttggcaagaacaacgaatttagcaaactagttgcagaagaatatctgaagttttttgattttacaggaatgacgctggatcagtcactcaggtatttctttaaagcattctctcttgtgggagaaactcaagaacgagagagagttttaatacacttctcccaatagatatttttattgtaacccagataccattgcttcacaagatggagtccattgccttacctgtgcaataatgcttcttaataccgatctacatggccacaatattggaaagaagatgacctgtcaggagttcattgcaaatctgcaaggggtaaatgagggtgttgatttctccaaggatctgctgaaagtgttgtgggattggagaagatgctgaaaccaaatgggcacctgtcctcagagatcacagactactgagaaatattggaggtgtctttctccataaaataaacagttattccatgttgaaataaaagtataagccaaaa

SEQ ID NO: 115322 - DNA, 1314 bp, Homo sapiens
aagaggagcaaactagttgcagaagaatatctgaagttttttgattttacaggaatgacgctggatcagtcactcaggtatttctttaaagcattctctcttgtgggagaaactcaagaacgagagagagttttaatacacttctccaatagatatttttattgtaacccagataccattgcttcacaagatggagtccattgccttacctgtgcaataatgcttcttaataccgatctacatggccacgtgaatattggaaagaagatgacctgtcaggagttcattgcaaatctgcaaggggtaaatgagggtgttgatttctccaaggatctgctgaaagctctgtacaactcaatcaagaatgagaagcttgaatgggcagtagatgatgaagagaaaaaaaagtctccctcagaaagtactgaggagaaagctaacggaacacatccaaagaccatcagtcgtattggaagtactactaacccatttttggacattcctcatgatccaaatgctgctgtgtacaaaagtggattcttggctcggaaaattcatgcagatatggatggaaagaagactccaagaggaaaacgaggatggaaaaccttttatgctgtactgaagggaacagttctttacttgcaaaaggatgaatacaagccagaaaaggccttgtctgaagaggacttgaaaaacgctgtgagtgtgcaccacgcattggcatccaaggccacggactatgagaagaaaccaaacgtgtttaaacttaaaactgccgactggagggtcttgctttttcaaactcagagcccagaggaaatgcaagggtggataaacaaaatcaattgtgtggcagctgtattttctgcaccaccatttccagcagcaatcggctctcagaagaagtttagccgcccacttctgcctgccactacaacaaaactgtctcaggaggagcaactgaagtcacatgaaagtaagctgaagcagatcaccaccgagctggccgagcaccgctcatatccccccgacaagaaggtcaaagccaaggacgtcgatgagtacaaactgaaagaccactatctggagtttgagaaaacccgctatgaaatgtatgtcagcattctcaaggaaggaggcaaagagctactgagtaacgatgaaagcgaggctgcaggactgaagaagtcgcactcgagtccttcgctgaacccggatacttctccaatcactgccaaagtcaagcgtaacgtgtcagagaggaaggatcaccgacctgaaacaccaagcattaagcaaaaagttacttag

SEQ ID NO: 115323 - DNA, 1341 bp, Homo sapiens
atggggagcactgaaattttggaaaaggagaccccagaaaatctcagtaatggtaccagcagcaatgtggaagcagccaaaaggttggccaaacgcctttatcagctggacagattcaaaagatcagatgttgcaaaacaccttggcaagaatgtgagaagtgtcataagatgtttcacggtgcaactggagggagaccatagatgggaaggcatccatgaaggcttcatgaaggaggtagcaactcaagtgggctttgaaggacagaaaatacttcaacagaaagagaccacactccacataggtgtcactggatggaaaaatatcaagtggaaacattggggtatgaaggaattctggctggacaggcccaacctatttcttgctaaagagaggccaaggtgtttggacgtcatctatgggatagtggatgaggaacctgatcagatatcgagggcgaagggttcacgttacaatgacttagcaggatccttactaaaattggataacgcagaaacaaacacagaaacccaaaagttagagcctaggtgcatagcacggcattcggaagacagttctgcatctactatcaagtgcttcatcaaaaaggacatgaacagccttaacgttacgtgttctcagctcctcgagggctccaaggttgctttcagctgttcctgggctgctccccagagattgcaccaggcagcttacatctcatctgtgaacgttttccgtgctctgggagtcatttcccaggaggacacagaacacaggcacaatgcaacttgtttaaaagaacaacagaaattatcttctgtcattcaaagcagaggagcagatatcaggatcagcgaacaagaggagcacgttaagggggaagatgaagacatccttgggcctggatatacggaggactccaccgacgtgtacagctcccagtttgaaaccattttggacaacacttctttatactacagtgcagagtccctggagacattatactcagagcctgatagctattttagctttgaaatgcccctcactccaatgatacaacagcgcattaaagaaggtggtcagttcttggagaggacatcagggggaggacatcaggatatcctgagtgtgtctgcagatggtggcatcgtgatgggctattctagtggcgtcaccaatgggctgaatgatgccagcgactccatctacacgaaaggcaccccggagattgctttctggggaaggtactcgtcccattctcattcatttcatgctggtggtttttgtaggatttcttttctgggaaatctgagtgtggaatatatatttaaatcatttggg

SEQ ID NO: 115324 - DNA, 653 bp, Homo sapiens
tttttttttttttttttaaaagatttttttttattcacctgccatgggaaccatgtaaagaatgggaaacggggaggcaaaaaataaatgtgtttgaacataaaagcaaaaataagcccgacatgttttggatctaagtttcacaaatccacacttacgtggccattgtagatcggtattaagaagcattattgcacaggtaaggcaatggactccatcttgtgaagcaatggtatctgggttacaataaaaatatctattggaggaagtgtattaaaactctctctcgttcttgagtttctcccacaagagagaatgctttaaagaaatacctgagtgactgatcccagcgtcatttcctgtaaaatcaaaaaacttcagatattcttctgcaactagtttgtaaattcccttgttctgccaaagggggttttgcaacatctgatcttttgaatctgtccagctgataaaggcgtttggccaaccttttggctgcttccacattgctgctggtaccattactgagattttctggggtctccttttccaaaatttcagtgctccccatttcagaatgagcttctagccgtgttgttttcactccagcattgcttccccagaaagcaatctccggggtgcctttcgtgtagatg

SEQ ID NO: 115325 - DNA, 444 bp, Homo sapiens
caactctataaaaaataacattaaatgctctttatgaactaacatttccaaagtgttgagtagacattttttgaatgtcagagttaaattattattttgtggccatatttcatccttgtagtctccctgcctatcatattaatcatgtttcgatcaacgtatgttgaaatgtttaacacccttcccttcactctgcaacattatggttttgctattgctcgagcttttaggtatgagatagtcaggaataagattgaagaggcgatgatgagaatcctgtatattgctaataagttggaactttgttctgaaatcagtggctggagagtaggagcaaggacttgggatgagaggcaaagactgtgttccagaaaaacagattctgactcggttattgacacagaagtcagagacatgtatggaaaattaaagtatgaagactag

SEQ ID NO: 115326 - DNA, 657 bp, Homo sapiens
atgagaacgaaaagaaaacctcgcctcaccccaagttcccgagccggggctgaggacttttcgaaggaaagggtccgcctagccctgagtcaagcggtcttactgtaccgccgtgtgcattccctcatacgagctccacacagtcctacagcgttccaccatgtaaaatcaggccttcattttgaacttggaaatctccccactcgcaggcagtggcaatgccagcaagccacaggccacggacccgtgaggaaccaggccacacagcaggagatggaccatttagttgcaagaataccagctcagggtcccactgattctacattacgaaaggcctatcctcttactcaaatttccttgacaccaattttccagtcatgtttcttccacatccctgaccatccagcaaaatcattgtctatggcccgtaaattggtatatcattgtggtctggctgtatctccttctaagcaaaatgcacaaccaggaaatttcaaaattcatgcctttgtggatgttgctatatgtagtaaatggtctgtaagctcgttgcctgatgaccacacaccccataaaagtgagttatgcactggtgcccgtgaggtagcagtggaacaaagggagctgctgctggcagtcaatgaccatgttggttaa

SEQ ID NO: 115327 - DNA, 401 bp, Homo sapiens
  misc_feature (1)...(401): n = a,t,c or g
accacctntncncgcgtctaggccttctgtcctggagaagaagctatagtcgttctccctcgctgcctcccggcgacccgcagctcatcgctctcatcgtggagcagctcaagagccggggcctttttgacagcttccgccgggactgcctggccgacgtggacaccaagccagcttaccaaaacctgaggcagaaagtggataattttgtgtcaacacatctggacaagcaggaatggaatcctacgatgaacaaaaaccagttgcgaaatggtctgaggcagagtgtggttcagtcagggatgttggaagctggagtagacaggattatttctcaggtggtggatccaaaacttaaccacatcttcaggccacaaatagaacgagcaattcatgagttc

SEQ ID NO: 115328 - DNA, 418 bp, Homo sapiens
tctccaactgccgaacttgctcccctttcaaatctggtcactgcccatggtcaaggttgaaatcttgagatcagtgacgaccttggcctatcttcagtctgaagttgcactcttatgtaaccgaatccatttcttcaccaaaaattagctttcaaaaggtgtctggcgtatttgaaccacactctgcctcagaccatttcgcaactggtttttgttcatcgtaggattccattcctgcttgtccagatgtgttgacacaaaattatccactttctgcctcagggttttggtaagctggcttggtgtccacgtcggccaggcagtcccggcggaagctgtcaaaaaggccccggctcttgagctgctccacgatgagagcgatgagctgcgggtcgccgggaggcagcgaggccgggtt

SEQ ID NO: 115329 - DNA, 528 bp, Homo sapiens
atggcggacgcggcggcggcgggggaactggcgcggtgggcggcggcggaactagccagcctctgccggggcagcgactggcgctactggggccagcgggggcggtgccccatcaacccggcctcgctgcctcccggcgacccgcagctcatcgcttcatcgtggagcagctcaagagccggggcctttttgacagcttccgccggactgcctggccgacgtggacaccaaggccttccccgcccactctctgctcacttcccattcatcaacacgtcccagcagtgcccgattataacagtcatctgtggagctgataaaagtatagattaccagaattatttcttaaagatttttatccagtattacgggtcgagacctagcaatctgtgcttcagcatgcactcccacgtcctcttgaacaacatgttccgggaaattccggaaacagtggaacagtcaaattctattgttcagaaatttaggtcaggtcgcaaggaagcactggttaccaagtcgcagacctga

SEQ ID NO: 115330 - DNA, 1706 bp, Homo sapiens
  misc_feature (1)...(1706): n = a,t,c or g
ttttttcggagtaaaagtatcaaataattttattatgaaagataagccatttattgaccattcacttttctaaaaaaaacacaaatgtgagaataaaataaacatacctaagactcactggcccctccaggacaggaagcagccctgggacagagagcctgcaaactgagtttccttatgcctaatgtctgaacttctcatacattctaggatttcatgttttcgttacaaagggaaagggaaactgggctaggaagattcatgtacaagaagggccacaactttaaaggctttctgacggctaatgacttgtacacatctggtttgcaaactctgagagaccagtttccaaattaagccactggcaaagactactcccgagctaatcctttactgtcaatttttctttggaaattgggctttcgggactgggctaatgttccccccggtagcttccggttaatcccacagcacaaaccctaaagtcccatggtgcagtctccatgttcaaagtataaaaagtctgtttcaaggacaaacccgggttgctgtaagtgtttctctctctgtaagtgtcttacttggtgtccatgccctttggacaggctggccaaatggcagcacaaatgcagggggtgacacggtcaaactctcccactgccgaacttgctcccctttcaatctggtcactgcccatggtcaaaggttgaaatcttgagactcagtgacgaccttggcctatcttccagtctgaaagttgcaactcttatgtaacccgaatccatttcttcaccaaaaaacnanaatttagctttcaaaaggtgtctggcgtattccttaggaaagtgtcctgagattggagcttggagggtcctggccttcgggcttcttggagggggtgctggcacagctgcttttttctgggcccgccaaggaactcatgaattgctccgttctatttgtggcctgaagatgtggttaagttttggatccaccacctgagaaataatcctgtctactccagcttccaacatccctgactgaaccacactctgcctcagaccatttcgcaactggtttttgttcatcgtaggattccattcctgcttgtccagatgtgttgacacaaaattatccactttctgcctcaggttttggtaagctggcttggtgtccacgtcggccaggcagtcccggcggaagctgtcaaaaaggccccggctcttgagcatgctccactgatgagagcgatgagctgcgggtcgccgggaggcagcgaggccgggttgatggggccaccgcccccgctggccccagtagcgccagtcgctgccccggcagaggcctggctagttccgccgccgcccaccgcgccagttcccccgccgccgccgccgtccgccatggctgcgccccgggcccacaagggagaacgactatagcttcttctccaggacagaaggcctagaacgtgtagaggtggggggttgaagggggcggtgaaggaggagggccccaaggcggcagcggcggaggtggcgatggcggcaggggcggtggtggggggcggcggcggcgaaggccccctctgatacagcagaggttgtggtggacgcggcagaaacggcctgctcgattccaggcgcaccccagatggcgtcaacgttgacctttgcattgtggggcgggaagttttctgtggccat

SEQ ID NO: 115331 - DNA, 478 bp, Homo sapiens
  misc_feature (1)...(478): n = a,t,c or g
gggctgaccgcctgaggaanncgctgatgaccctataggaatgccgctcgagaggcaatccacagcagctgcccctgcaaatgtcagcgccagcccagtcaaaagagcttgaaacctaccaagccggaggactgtgctgtgcctctctcgcccacattttccccaagcactctcaggaacctggcaacagactgagagaaaggaatgaaaggatggaagaattacaagatcaggcactgctgtctgtctgttccacggatgtaaccacagcacacgcgtggctcacggtactagtgtgataaatgcttgttacatgaaggcgtgaacagggatgagaagagacttcctggagaaacaaaaggactaacaatcaggaaggggaggtgatcggggcaggagtaaagtggacacctcagcnnnnnnnnnnnnnnnnnnnnnncctnnnnnnnnnnccgggccccaaattccccttataggg

SEQ ID NO: 115332 - DNA, 403 bp, Homo sapiens
ccacagcagctgcccctgcaaatgtcagcgccagcccagtcaaaagagcttgaaacctaccaagccggaggactgtgctgtgcctctctcgcccacattttccccaagcactctcaggaacctggcaacagtgtccccttgtggccaagcctggaacatcacatctgtacgttgcaatctgtggatcagctacgagactgagagaaaggaatgaaaggatggaagaattacaagatcaggcactgctgtctgtctgttccacggatgtaaccacagcacacgcgtggctcacggtactagtgtgataaatgcttgttacatgaaggcgtgaacagggatgagaagagacttcctggagaaacaaaaggactaacaatcaggaaggggaggtgatcggggcagg

SEQ ID NO: 115333 - DNA, 757 bp, Homo sapiens
atgtctggcctagagatctattcaactgatagcagccgcctcttctggggagagcagatctttcagaaagcactggctgcgctgctaatcaaacgcaacattgttctcagcaaggaggaagaatggaaagaactacagccaaacaatgcgcaggcaatccacagcagctgcccctgcaaatgtcagcgccagcccagtcaaaagagcttgaaacctaccaagccggaggactgtgctgtgcctctctcgcccacattttccccaagcactctcaggaacctggcaacaggacacagacaagaccctttcaataaatccagctcagaaacacctattgttcaaaatcttcaactcgccacaggctaccaccactccctatggctttgcaaaattaaagatttagaagaaggatggggcggtggaagctatgaaaagaggcaggaaaaaagttcctttgacccgatgctgtcagagagcgtgcatgaagaagaaagttaatggtatttccatttatataagaaagcgcctaagaaatgcctgtgacgttcgtgaactagtgattgtgaattccaaatttgatgccaactttatgtgtaaagaagctaactcctgccaacatcgtggctgaatgaacagctgggactatgcttaacccattcccagcttataaaagccccatggcagctgcagtgaagcatcagaaaagtatagtaagaagaaactgaatttgaagtggattcttacaaaggaaaaagaa

SEQ ID NO: 115334 - DNA, 753 bp, Homo sapiens
atgggggaacccccacatggcatagaaacatctgtggttgtatccacacgcacagtgcactggggtctcacagctaataacacaaaatttcaaccccaatctacagaaattcaaagctcgtctgcgctttctaatccaccaacaactgtacatgctcaaggatcaaccaacaaaaccacctactggcattttgaaatgcatattgccagtgccgtggggcatcgcatttacaagaaggaggaggcccacttactcctgaaagcttttcaaattaaaggccaggcagatatttttgtaagcaagttcgaaaatgacaactggggactagatggttatgtgtcatctggacttgaaagaggaggatttacttttcaaggtgacattcatggaaaagactttggaaaatttaagctagaaaggcaaggatgggtcacaatattcttgagcctatttcttcatcttaaatctcagtatagaagttcccaaggttgttacgagattgagaggccacaaatagtcaatggcattttaaagaaagatgaagggatcaaggctgaggaactgcacaggaggaagctgtctccaccaggagctggatcagatgctgcttgctgtctacctattgttgacgtcctccttcccacgtggatgcaacgtgagcagtcagaaagtcaaacttcacggaacgacagaggtgccaaaacggcaactccaccacctgtccgaagatctaagagaacaccagctgtctga

SEQ ID NO: 115335 - DNA, 227 bp, Homo sapiens
accaggagagctgatgtttcagttccagtccaaaggccagcaggctcaagacagaggaagagccagtgtttctctttgaagtctgaaggcaagaaaaattctccctcagtcaagggagggtcagcctttttgttttatgttggcctagccgcagtttgcccaactgcaaaatggaaagagatgaagcaggaattaagatactctaggagctcgcccacagctgattc

SEQ ID NO: 115336 - DNA, 227 bp, Homo sapiens
ttgggcaaactgcggctcagaaagataaagaacttctccggagcgaaaaagctgctaagaatgtatccaaaactccgcacgacttcaaagagaaacactggctcttcctctgtcttgagcctgctggcctttggactggaactgaaacatcagctctcctggttctcaggccttcaggcttggactggagctacaccattggctctcctgggtctccagctcagtga

SEQ ID NO: 115337 - DNA, 2550 bp, Homo sapiens
tcgtgccgcctttgcccgcttctgtggactgttcgaacgcccaggggtgggccaaacccgtttcttaggaaaccaggaatccagggaaggcagaatggcttcctttgggtggaagaggaaaattggtgagaaggtctcaaaggtcacttcccagcagtttgaagctgaagctgctgatgagaaggatgtagttgacaacgatgaagggaactggcttcatgccattaaacgtaggaaagaaattcttcttgaaggctgtgctgagaaaagtaaacagctgaaggatgaaggagccagtttggctgaaaataaaagatatcgggaggcaattcagaagtgggatgaagcactacagttaactccaaatgatgctaccctatacgagatgaaatcacaggtgctaatgtctcttcatgaaatgttcccagcagtacatgcagcagaaatggccgtccagcaaaatccacattcatgggagtcttggcagactttgggacgtgctcaacttggtttaggagagataatcctggcaattcgaagttttcaagtagcccttcacatctatccaatgaaccctgaaatatggaaagaagacctctcttgggcaagaacgctccaggagcagcagaaggtagcacagaggattaaaaaaagtgaagcaccagctgaagtaacacacttttcaccaaagtcaattccagactatgactttgaaagtgatgagattgttgctgtttgtgcagctattgctgagaaagagaagacagtttcagcaaataaaacaatggttattgtgtctgcttctggggccatagagactgtaactgaaaaggaggatggtgctacaccaccagatggctctgtttttatcaaagcccgatgaagcagtatgcataggattatttgaatctgtctttttgattgcctcttgaagttttgacatagagacatttactctggagatagataggagaactcctggttgtaaaatatgtttttcagatgaggcatataaaaactaaaatggcaggattattgtatagtgtttggaatatgctttgataagttatgatttatatttctcaaggttaaaattctgagtaaaatggtctttgattaataaacttagtttaatctgaatatgtaaatgaatacattttaaagacaaaacttgaaaaatgtattcttgaatagtgaataatttgatcaatgttactgaaatgctgtctcaacttttgttttatgataaaggaagtgtgtgatttccctccctctgagaaatatactgcgcttaatatttgctgtctttttcttgcttcattagagtaagtctgtcagaaagcttgaatatttttgacattcattttgattcaaagttgtcatttggttatatgtggaatctttgaaagtttggctgaaaatgcacacaaatgtgtacattctgaacattttctgaagtttctcttaattctgatttgtgtttctgttttgactttgaagttgtaacaatgatagttgtctccttcagtatttggtaaaagtgtaaagtattgataaatatgagaatgatggttttattttttaattgttacagtaagtaatccttaccacaaatgagctatttttaaaatatgcatttttaaatgaatggcttttacagataggttaatgacaattgtactgctatattatcccagtcaaaaccaatactttcttttctttattttacaaagctttaaaaaccctggaaacaacttacttcttgcttgtgtctttccatttgatgactgggaattacttttctagataactttttttgaaactactcagtgaaatgaaaaataattacaattttaaatagctaattatatctttctaaaaataaaaaagtagggctgttattagagtgccaatgaataaataacttaagcacaaaatacatagaaattggaatgtgatttatagtacaatctcatgagtatgaaaaggctatattaaaaaaaattttattgaaagtccacagtcatattcacaaaccaatactgtcattgctaatctgaactattatttttatactatatattgtagtacaataatatagaactgttgggttctgttacttctgacactcaggaagatactattggtgtattaattttatctttcttagagatgaaagtagcccgctttatgttaaagatcttactactgttggagcttataagtaatgatctacattttttatgaagatggtttttaaaacttttgttttattggaatgcatatctcttttcagggttggagaaattagcacttgccttgaaaagatattatttccttaagttatatcatcagaaaattagctctggttagagaggttagtttcagagtgctccaaaaaatatgttaattattttattttgtttaataaagaacattctcaaaacgtaaataggtatctagagaagtgagtactcaacatttggtatattgttttgagtaatggatgtttgttttttgtgtaatttgtgaataaatagtttttttctg

SEQ ID NO: 115338 - DNA, 891 bp, Homo sapiens
atgtttactatatggacctttactatgccaccccttgctctagagaccaaagaccttcagccccttcctcaaaagctgtcaaagactcctgaaacctcaaacatccaggttcttaaggtccctctgctaaacgtagaattccgcggatcctctccctatacgacctctcgcagggaaagtcagcgtcggccaaaagcctccgggatcggaatgaggaggctgctggagaagttgctttctcctaaaagggattatcccaggcgcacacggtcattacacgccggggacgctcagtcggaagtgcttccctgggcggaagcttctgagcgtgatatagcggaagtgccttctcttccggtctttctggtctcggccgcagagcgaagagaagttttaaaacatgagaatacagtacctcctcaatctatgggggcaagcagtaattcagaagatgctttttctcctggaataaaacagcctgaagcccctgagatcacagtgttcttcagtgagaaggaacacttggatttggaaacctctgagtttttcagggacaagaaaactagttatagggaaacagctttgtctgccaggaagaatgagaaggaatatgacacaccagaagtcacattatcatattcagttgagaaagttggatgtgaagttccagcaactattacatatataaaagatggacagagatatgaggagctagatgattctttatacttaggaaaagaggaatatctaggatctgttgacacccctgaagatgcagaaaccactgtggaagaggaggtttatgatgacccagagcacgttggatatgatggtgaagaggacttcgagaattcaaaaacccagagttctctggtgaagaaccagttatga

SEQ ID NO: 115339 - DNA, 1323 bp, Homo sapiens
atgacatcagagaagagacacttgaggctttctggaggacttaagcttgaagaaaacttagccaggcttaaaaagcttccaccgccgaccgggcagccccagttacccgataacgctcccaaggccccgtgtttacattctttcccactggaagcagaaattatacgcccaaattcctacctgccttccctggattcctggtttcctaagaaagggtttggcccacccctgggcgttcgaacagtccacagaagcgggcaaagaaagacgactcagtctttcccctccgccaatctcttctccgggaccacaatcccagaatcagggccacgcggctgggcgcgccctctagcagcagccctggtgaccgcagcgcacgagcgcgggaaaatgaggctgcgcgggctgaagacgcaccgagaggagccgcccccgcggtaccgcgcagcctcgcgtcccgtagtggggaacaagggctgccgtaacaatgtcacagactcaatgacttacagcaaagaaaattattctttgccagtactggagataggatctagatgcaacagcactccagaaacaatgagaaacctagcactgaatcttggtttctattaccattctccaataaaagcatcgggactccttggagaaatggctgattctaaaactagggcaggggataacaaaatgggtctggagcatcttgtagtggcagaaaggaaagtagcgtcggccaaaagcctccgggatcggaatgaggaggctgctggagaattgctttctcctaaaagggattatcccaggcgcacacggtcattacacgcggggacgctcagtcggtgcgggcccgacgaagactcgcccatccggtcgccagaaaactgggagtccgcccgcctttccggcactgaaacgcgatcggccctgcctgacgaagggaacgtcatctttggaaagcgtcgcaataagacgcacacgttgtgccgccgctgtggcttaaggcctaccaccttcagaagtcgacctgtggcaaatgtggctaccctccaagcgcaagagaaagtgcatggattccgtgaaggaacaacacctaaacccagagggcagctgttgcagcatccagttcatcttaagaatgtcaacgattgtcatgcaataaatgttctggttttaaaaaatacatatctggttttgcctcaaagcacagcagtcaatgctcaagtcaaacatgtcacattccaagatgcattggtccagtcacaagggtggtccttatccactggcaacactttcctgccttcatcaacattctgtcatcaagggtaa

SEQ ID NO: 115340 - DNA, 618 bp, Homo sapiens
cagaagcgagatgcacgaagggaacgtcatcgttctggaaagcgtcgcaactgaagatcgcacacgttgttgccgtcgctgtggctctaaggcctaccacccttcagagagtcgacctgtggcaaatgtmmgctacccttgccaagcgcaagagaaagttataaacttggagtgccaaggctaaaagaccgaaataccaccgggaactggtcggaatgagggcaccttaaaatttttttaccagcagattcaggcattggtttccgttgaaggaacaacaccttaaacccaaggagggcagttttttgcagcattccagtttcatctttaagaatgttcaacgattagtcatgcaataaatgttctggttttaaaaaatacatatctggttttggagtttggattcataatacaagagaagcacagggcaaagacactgcattaacctccaagaactaaggaatgggaggactgggccaggcctgggtgggtgcacacctggtaattcccagctacttcaggaggctgaggcgagagaatcgcttgagccttggggggcagaggttgcagtgagctgagagaacggcgggcggcagagcgagactccatctcaaaaaa

SEQ ID NO: 115341 - DNA, 449 bp, Homo sapiens
  misc_feature (1)...(449): n = a,t,c or g
acgacgggagctgcatgaaagccgaagttatggaccgctagcatctgtcactggccaccggtttccgggagtaaagaaaccaagtggaagagtgtttcctcctctggccgtaaagcagctgtccccgccctactccggaccgccccaaagactccatgggatggacctgagtcagccgaatcctagccccttcccttgggcctgctgtggtgctcgacatcagtgacagacggaagcagcagaccatcaaggctacgggaggcccggggcgcttgcgaagatgaagtttggctgcctctccttccggcagccttatgctggctttgtcttaaatggaatcaagactgtggagacgcgctggcgtcctctgctgagcagccagcggaactgtaccatcgccgtccacattgctcacagggactgggaaggcgatgcctgtcnggagctgt

SEQ ID NO: 115342 - DNA, 402 bp, Homo sapiens
tttcatctacaacacatttatttgtacaatccagaaactagcaggaccaaaattagcagcaatgctgagacatttactggcagctttgccttctaccctaaggtcaaagtacttgagacattgcctgtgtgcctaaggaggcatcacacaaggaaagccccaccccctacttccttcatctgagcaaaggaacctgtttacatgcacagtgcttagtgggtgggactctccaaagcagtggaaattcagatttaacctaatgtatacaggtctgcgtcatgatggcaaattgaaggtgtcatgatttagctggtttctctggaacattcctaggtatacatccttgcctcctttcctaggtatgggctccagtaaccaccctgggtttgaaatcacagtcag

SEQ ID NO: 115343 - DNA, 884 bp, Homo sapiens
ggtaaagaagctaagtggaagagtgtttcctcctctggccgtaaagcaggtactctctgcagcaccagctgtccccgccctactccggaccgccccaaagactccatgggatggacctgagtcagccgaatcccagccccttcccttgggcctgctgtggtgctggacatcagtgacagacggaagcaggagaccatcaagggactgggaaggcgatgcctggcgggagctgctggtggagagactcgggatgactcctgctcagattcaggccttgctcaggaaaggggaaaagtttggtcgaggagtgatagcgggactcgttgacattggggaaactttgcaatgccccgaagacttaactcccgatgaggttgtggaactagaaaatcaagctgtactgaccaacctgaagcagaagtacctgactgtgatttcaaaccccaggtggttactggagcccatacctaggaaaggaggcaaggatgtattccaggtagacatcccagagcacctgatccctttggggcatgaagtgtgacaagtgtgggctcctgaaaggaatgttccagagaaaccagctaaatcatgacaccttcaatttgscatcatgacgcagacctgtatacattaggttaaatctgaatttccactgctttggagagtcccacccactaagcactgtgcatgtaaacaggttcctttgctcagatgaaggaagtagggggtggggctttccttgtgtgatgcctccttaggcacacaggcaatgtctcaagtactttgaccttagggtagaaggcaaagctgccagtaaatgtctcagcattgctgctaattttggtcctgctagtttctggattgtacaaataaatgtgttgtag

SEQ ID NO: 115344 - DNA, 400 bp, Homo sapiens
ggcacgagatcaacgatgtgggctcagcagccctggagtaggagctgggaaggtcagtgccttggtggcggcagggccagggcactgagagtattggcagggcacagcaggggaaagggaagagaagcagagggtgggactctccctctgtgctggaagagggctaacaccagcccggactctccactctggctaggccaagggggccctctgtcctctgtgttgccctagggctcggtgacctctgtcatagcactgaccacatggtatcctgcctgtgccttcctctagctgtacccgccctactccggaccgccccaaagactccatgggatggacctgagtcagccgaatcctagccccttcccttgggcctgctgtggtgctcgacatcagtgac

SEQ ID NO: 115345 - DNA, 445 bp, Homo sapiens
ttcatctacaacacatttatttgtacaatccagaaactagcaggaccaaaattagcagcaatgctgagacatttactggcagctttgccttctaccctaaggtcaaagtacttgagacattgcctgtgtgcctaaggaggcatcacacaaggaaattcatctttaacctaatttatcacaggtctgcgtcacgatggcaaattgaaggtgccatgatttagctggtttctctggaacattcctttcaggagcccacacttgtcacacttcatgccccaaagggatcaggtgctctgggatgtctacctggaatacatccttgcctcctttcctaggtatgggctccagtaaccacctggggtttgaaatcacagtcaggtacttctgcttcaggttggtcagtgcagcttgattttctagttccacaacctcatcgggagttaag

SEQ ID NO: 115346 - DNA, 1045 bp, Homo sapiens
ggagctgtatgaaagcggaagagttatagaccgctaacacctgtcactggccactggtttcccggagttagcggcaacgaccttgcagcctggacactagccaggcgctccctcttctcacagcggcccacgtctccttgcttgggagcccatcgtcctggctccggtggcctcgctgggtctcggggaagcagaggactgttcattcctgtggcgaaaagccggagtcggccctagacacccacgactcgcagggtccatggttccggaggccgtgagacctgccggggctgacaggtgccagggcccatgctgcgggagcctgtgtgctcagccttcttgcggacggtaaagaagctaagtggaagagtgtttcctcctctggccgtaaagcaggtactctctgcagcaccagctgtccccgccctactccggaccgccccaaagactccatgggatggacctgagtcagccgaatcccaacccccttcccttgggcctgctgtggtgctggacatcagtgacagacggaagcaggagaccatcaaggctacgggaggcccggggcgcttgcgaagatgaagtttggctgcctctccttccggcagccttatgctggctttgtcttaaatggaatcaagactgtggagacgcgctggcgtcccctgctgagcagccagcggaactgtaccatcgccgtccacattgctcacagggactgcgaaggcgatgcctggcgggagctgctggtggagagactcgggatgactcctgctcagattcaggccttgctcaggaaaggggaaaagtttggtcgaggagtgatagcgggactcgttgacattggggaaactttgcaatgccccgaagacttaactcccgatgaggttgtggtgctggacatcagtgacagacggaagcaggagaccatcaaggctacgggaggcccggggcgcttgcgaagatgaagtttggctgcctctccttccggcagccttatgctggctttgtcttaaatggaatcaagactgtggagacgcgctgg

SEQ ID NO: 115347 - DNA, 2431 bp, Homo sapiens
  misc_feature (1)...(2431): n = a,t,c or g
tgaagtcacaggccactaatggccattaaaagttgccattttttaatgagaaacacatttttggtcttaataaagaaaaacaaaattccatggaaataaataataaacaatttaaatgagaactgttgtctgtgttttttttaaccttgtatattatatacatctcattggcagaaaccaggggaggctggaaatcctgtccaagacaggctttggtccccattgtccttgtttatttggagaagcagcattttcacacactcagcaaaggatgttgctaggaagtgtcgaggccaagcccaggaagacctggtcccctgagattggcctgctggtcaggagaaagaatagacgcctgattccggcaatatcttcctgtatcttcaaacaggagattgtttcctcatgggtccctcccaatgttgccaggaagtgtctggtcagcagctcagcatccctagcctagcatccaggggcctccaaagaggcccacttgaaagtcaggccaccccatctgccatgggatgtacaaccaccataacatcctggctcagaagagaagggccactgcagtcaatacctggggggaaatgcccatcatcctcatggataacaactagaaactttgctaaatcaccaaaaaaaaaaaaawattactacaaaataaaacaacactactgatcacatttccaagttaacctcactctactagagctgtattttggatgtattgctaggataggaagtagctgtgtgatgcaggtaacacacatgcttcagaaactgacagacactttcagaagagtgagagtaacctgaaaggacagacagctgctctaagtctgacgtcctcttcatcctggatgagtcggttgattaacggctagtcactaccaggcaaacattcagtgccaggtcccagactttctgtattgtcgcctggatgctagttacacatttgatgagttttgaccagaacaaatcaggggaaaacatagaacaaagcctcaaacactaaccagtcatctacaacacatttatttgtacaatccagaaactagcaggaccaaaattagcagcaatgctgagacaatttactgggcaggtttgcccttctacccctaaggtccaaaagtacttgagacattgcctgtgtgccttaaggaggcatcacacaagggaaagccccaccccctacttccttcatctgagcaaaggaacctgtttacatgcacagtgctttagtgggtggggactctccaaagcagtgggaaattcagatttaacctaatttatacaaggtctgcgtcaacgatgggcaaaattgaagggtgccatgatttagctgggtttctctgggaacattcctttcagggagcccacactttgttcacactttcatggccccaaagggattcaggtgctctgggattgtctacctgggaatacatccttgcctcctttcctaaggtattgggctccaggtaaccacctgggggtttgaaatcacagtcaggtacttctggctttcaaggttggtcaagtgcaagcttggattttctaagttccacaacctcatcggggagttaagtcctcnggggcattgcaaagtttccccaatgtcaacgagtcccgctatcactcctcgaccaaacttttcccctttcctgaagcaaggcctgaaatctgaacaggaattcatcccgagtctctccaccagcagctccccgaacagccatcgcccttcccagtccctgtgaagcaatgtggaacggcgaatggtaacagttccgctggctgctcaagccagaaggacccagcgcgtctccacagtcttgattccatttaagacaaagccagcataaggctgccggaaggagaggcagccaaacttcatcttcgcaagcgccccgggcctcccgtagccttgatggtctgctgcttccgtctgtcactgatgtcgagcaccacagcaggcccaagggaaggggctaggattcggctgactcaggtccatcccatggagtctttggggcggtccggagttagggcggggacagctggtgctgcagagagtacctgctttacggccagaggaggaaacactcttccacttagcttctttacctgtcagccccggcaggtctcacggcctccggaaccatggaccctgcgagtcgtgggtgtctagggccgactccggcttttcgccacaggaatgaacagtcctctgcttccccgagacccagcgaggccaccggagccagcgaggagacgtgggccgcggtgagaagagagagcacccggctcgtgtcagggctgtaaggccgctgccgcttactcccggaaaccggtggccagtgacagatgctagcggtccataacttcggctttcatgcagctcccgtcgtccctttcatgaggaacgtac

SEQ ID NO: 115348 - DNA, 1143 bp, Homo sapiens
atggtttcctgggccaggcccagagccccacttccctgcacagccttgggacactgttcccccacatcacagtcactccagctccagcttcaggtcagatacagctcagatacagatacagctctggtcactgcttcagagggtgcaagctgtaagtcttggcagcttccatgtgatgctaagcctgtgagtatgcagcggataagagttgaggcttgggagcctcttcctagattttggaggatgtatggaaaagtctggatgtccaggcagaagcctgctgcagggggagattcctcatggagaacctctattagagcagtacagaggggaaatatggggttgaagcccccacaaagattccactggggcactgtgatggttaatactgagtgtcaacttgattggattgaaggatgcaaagtattaatcctgggtatatctagtggtagatccactgacagctcagaccctgctcctggaaaagccacagacactcaacaccagcccatgagagcagttgtgggggctgaaccttgcaaagccacagggatggagctgcccaaagccttgggagcccatccctcacaccagtgtgcgctggatgtgggacatgaagtccaagaagatcagtttggagctttaagagcgattaaaaaaaagaagccagccttcctggtcccgattgttccattaagctttatcctcacctaccagtatgacttgggctatggaacccttttagaaagaatgaaagaattcatcactgtgtttcctctgggaagtatattacttctcctgaggaaaatgtttaagtgtgagattggggacatggctcatacggtgttagagcctgtcaaggaatatagcaatcaggctttgtcacaaattgctgatgacccctttgtcaccttgtgtatttctgtactttatttaaggaatcattttataaatgtggaaactgaagcacagataagcagcttgaacaaaggcagaagcacgcaagccaaatccaagaagttgctgcaggtcatccaatttggctgggccaaagccatacttggccagggcttggatttgaacaagtgtggctccagtggctgtgctctaaaaggccttgacaaggccttaactgatgcttaa

SEQ ID NO: 115349 - DNA, 540 bp, Homo sapiens
  misc_feature (1)...(540): n = a,t,c or g
cacaataggccatctgcaggctgaggagcaaggagagccagtccaagctccaaacttgaagaattcagagtccgatgttcaagggcaggaagcattcagcatgggagaaagatgtaggctgggaggctaggccagtctcgtcgttttcacatttttctgcttgctttatattctagccgcactggcagcgtgattagattgtgcccattcgggttaagggcgggtcttcctttcccagcccactgactcaaatgttaatctcctttggcagcaccctcacagacacacccaggatcaatactttgtatccttcagtccaatcaagttgacactcagtattaaccatcacagtaacgtacaaaaagcaacatatattagtaagatatctggatggcttttttaaaaatttcttaaaactttgtttttaatattactatggggacctttcattaaaaaggaatgggcaacatctggtttcacccttattcctaaatgtgccnttggggggtccttacttcagaccttggttttttttgaggg

SEQ ID NO: 115350 - DNA, 928 bp, Homo sapiens
ttcgacctacgcgtccgggtttgcgtaccggtcgcctggtcccggcaccagcgccgcccagtgtggtttcccataaggaagctcttcttcctgcttggcttccacctttaacccttccacctgggagcgtcctctaacacattcagactacaagtccagacccaggagagcaaggcccagaaagaggtcaaaatggggtttatattttcaaaatctatgaatgaaagcatgaaaaatcaaaaggagttcatgcttatgaatgctcgacttcagctggaaaggcagctcatcatgcagagtgaaatgagggaaagacaaatggccatgcagattgcgtggtctcgggaattcctcaaatattttggaacttttttttgccttgcagccatctctttaaacagctggagcgattaaaaaaaagaagccagccttcctggggcccgaatgttccattaagctttatcctcacctaccagtatgacttggggctatggaaccctttttagaaagaatggaaaggtggaagctggagggacatactggaaacagaaaagagtaaattgcagctgccaagaggaatgatcacttttgaaagcattgaaaaagccagaaaggaacagagtagattcttcatagacaaatgaaatcatgcttaccaatcaaatctcaaagcacagaattattgacttgaatcatggtttttacagttttttaaatgctcaagattttgatattatagattttattttaaaatattaaaatgcaagatagttttgagctattttaaaataaaatttataacattcaacacaaaatcatggaggtgctttaaataacttttagatttcctctctctgtgtgcattaccaatatctaagtgtaaaattaataaattgttttgaattcctggaaaaaaaaaaaaaaaaaa

SEQ ID NO: 115351 - DNA, 694 bp, Homo sapiens
ccagagcgtgctccactcccctcaccagcctcccgcgcctcttcaaggaagtcttcctgcctctaggacctaagagcttatttggttaggggcaaggatgcttgaagccgccaggtttgttggcaggatcctcatatgcagtagtaaaaacgaaggttcacactcatggatccttacaatgcactccgctgggctctgccttaattctcatgggccccctccatcctgccccgaccccgggcagcaagtcctactatcttccagttttacaaacgagcaattgaggctttcagactttgccaagattatattccaaatgaggggattcaaacccaggctgtcagcctccgcagtgcaggctttcttcaccagcatcatcacacatggtgataactcccaaggttcacagcttgtctgttcactatgcatcgtgctgaggggtttccatgcacttcctccattcccgctcacaacagtatcgtcaggttacaggtatgggcctgtggaggcacggcccctcctcacaacgacaagcaagtggcaatggccaatggaagcccagcaacttgtttcagtccacccccaaagtagcacttctgttccactggaatgggccctaattgtatttctggaagactgccagctttccagacagacacttgatctgagtattcattgacaggccttgcgtctt

SEQ ID NO: 115352 - DNA, 486 bp, Homo sapiens
  misc_feature (1)...(486): n = a,t,c or g
tagactgggagctctttgaaggaaggactgtatctggtcaccattgtatctacaaccaccagcatggccttactcacagcagtnnnnnnnnnnnnnnnnnnnnnnnnnnngaaaatcgatatatttcaggtttctgtaactggtgctttagtttcccaactagagggggaagatacgaatccatcatgaccccagcagatgaaagcctccttgtgggctactcactgaatgcctgcggctctctgtctactgggcctaaggtaggactgcacatcctggcctccttgtaggtggctgggacttctggttagctcaagccagtgagttgtgagctgaagtaatgtgtgtctctctctggctaagaatttatttgttaatgctagccacttgaggactcgcttttctctctggtacagcggctggcaatgtcgtgctcgtgcggaattcctcagcgcggagtcagcaggcgggcaaaggggcccaccc

SEQ ID NO: 115353 - DNA, 732 bp, Homo sapiens
atgaccccagcagatgaaagcctccttgtgggctactcactgaatgcctgcggctctctgtctactgggcctaagtcgcaatgggcagaggtacaaggggagaagctgcagacggcattgttgccatatgatggagtcactgtttgcatatttgtgctgggtagtcttgaggcctctggaggacctcctttttcttatattaattcccaatgcacccacttgccgagcccagccttaccgcctcgcttttcagcacagttcccacacatgtcaaagctttacagactgcccggtagccaggcaggagcagctggcaaggctccccagaatggagcctggaccacccagctagaactcagagttgagcatgggaatgatctggaaaataaacacaatgtgaaaagtgctctgacagagtacactaaatgtatggaattatcctctctcacagtcagcacacctttgttgctgtcacgagatagaactcgcagactacagaaagctgttctgtgtcaggtctctgagaaatgtagaggtctcagttatattgcagattatgagctgccagggatttgggaaattaccttcatcctcctacttgaagatgccagaagatgggaatatgatgggaaagaacacatgatcaccattcctgactcagagcccctggaacaggtctggtcaccaccacaatcacagttgcagtggacggtgaaaaagcacttggtgtga

SEQ ID NO: 115354 - DNA, 287 bp, Homo sapiens
tcaattttcatttgccaaagtttcagacccaaagtttacgcctatcagacctacacagaaaatcgcatctttggagaggaatagtcagcatcaccttgattgaagggagagacctcaaggccatggattccaacgggttgagcgatccctacgtgaagttccggcttgggcatcagaagtacaagagcaagagctctcatgttttagatggccacaaggttgctcagcttcggctgacatttatcagccatccttgcaagggctataggtcggaaggcataaattga

SEQ ID NO: 115355 - DNA, 420 bp, Homo sapiens
atgctggctgaacttagggctctacccctaaaggaaggatcatcaccaacctgggctctagcattaacagggtgtggacaagacattctggtaacaagcacggaaacccacccaaacacattcaaaactgaatacacaaaaacactaacacagctggggggacaatggtttattgatcaagagaaattatttctagcaatatctcacttccgcgagttcacaaatatgacaactgcagatgaggataaagaatccacccgtgaatcaggtaccagttcaactcccttattggttcagaatcccctcacgaatcctaggaacaacggtgctgataacataagggacaagcaccctctccaggcctttatcctgtccttagctgccctgacacctcatcagacaaccagcagaacaccctga

SEQ ID NO: 115356 - DNA, 648 bp, Homo sapiens
cattgcgacccctcgcaccgccctgcaggaattcggcacgagctacactgaaggctccagatacatttgctctttgagttctaccatggtttttagagtttttcttttccctcacttttatctgtcatttatctctcccattactgtgcctacctctaggaagctttctctaatttgccctggggttgggaaattgtgtaactgcatactatatgttgaataagagtagagaggatttgaatgaggttttgagaggctgttctagcaataaaaatgaatgtactttgctacattgacttggtgacattatttcagtggctcaactctcttcccctaacttacttctttatcctcatctgcagttgtcatatttgtgaactcggcggcaagtgagatattgctagaaataatttctcttgatcaataaaccattgtctcccccagctgtgttagtgtttttgtgtattcagttctataatgtgaaacttaagaggattaaaactcaaaaaatgatcaggccaaatttttatgtgggatgaagtgtttctgattcagtgttattgtgatataaagctataaattagttgtttacctatgaaattccttccggcagtcattctgaaataaagttgttacagctgaaaaaaa

SEQ ID NO: 115357 - DNA, 594 bp, Homo sapiens
atgaagcagtttcttcctgcaaaagcagtggaccatgaggaaaccccagttcgctatagcagcagcgaagttaatcacctgagtccaagagaagtcaccacagtgctgcaggctgactctgcagagtatgctcagccactggtaggaggaattgttggtacacttcatcaaagatctacctttaaaccagaagaaggaaaagaagcaggctatgcagacctagatccttacaactcaccagggcaggaagtttatcatgcctatgctgaaccactcccaattacggggcctgagtatgcaaccccaatcatcatggacatgtcagggcaccccacaacttcagttggtcagccctccacatccactttcaaggctacggggaaccaacctcccccactagtgggaacttacaatacacttctctccaggactgacagctgctcctcagcccaggcccagtatgataccccgaaagctgggaagccaggtctacctgccccagacgaattggtgtaccaggtgccacagagcacacaagaagtatcaggagcaggaagggatggggaatgtgatgtttttaaagaaatcctttga

SEQ ID NO: 115358 - DNA, 4617 bp, Homo sapiens
atgaacgtgaaactgaaaagcaaagtaataccatcaacacttggcaaaatagaacctctccgctgtcagcgccagaaatacttacctgctgagaaaaggaaaagcacaacactgactttaccccgcgacgcttttaaaaaatccaaaatacccagcgcgatggggatgggattgcatcaaagctctcagagcacagctgcaaagggtaaagcaaagctagagctctactctggacctatcactctagacagtttctctgtgaggggcagttttatacacatttcaggtggcagaataaattcaatccttgtttctccatcttatcgagtagtagaagttagttacattctctttgaactcatcatgaattccatgaagactgaagaaaacaagtcatttagcgctatggaagatgaccagaggactagacctgaagtttcaaaggatactgtcatgaagcagacacatgctgacacacctgttgatcattgtctatctggcataagaaagtgtagcagcacctttaagcttaaaagtgaagtcaacaagcatgaaacagcccttgaaatgcagaatccaaatttgaacaataaagaatgttgtttcacctttacgttgaatggaaactccagaaaattagaccgtagtgtgtttacagcatatggtaaacccagcgagagtatctactcagccctgagtgctaatgactatttcagtgaaaggataaagaatcagtttaataagaacattattgtttatgaagaaaagacaatagatggacatataaatttaggaatgcctctcaagtgcctgcctagtgattctcattttaaaattacatttggtcaaagaaagagtagcaaagaagatggacacatattacgccaatgtgaaaatccaaacatggaatgcattctttttcatgttgttgctataggaaggacaagaaagaagattgttaagatcaacgaacttcatgaaaaaggaagtaaactttgtatttatgccttgaagggtgagactattgaaggagccttatgcaaggatggccgttttcggtctgacataggtgaatttgaatggaaactaaaggaaggtcataagaaaatttatggaaaacagtccatggtggatgaagtatctggaaaagtcttagaaatggacatttcaaaaaaaaaagcattacaacagaaagatatccataaaaaaattaaacagaatgaaagtgccactgatgaaattaatcaccagagtctgatacagtctaagaaaaaagtccacaaaccaaagaaagatggagagaccaaagatgtagaacacagcagagagcaaattctcccacctcaggatctaagccattatattaaagataaaactcgccagacaattcccaggattagaaattattacttttgtagtttgccccgaaaatataggcaaataaactcacaagttagacggaggccgcatctgggtaggcggtatgctattaatctggatgtccaaaaggaggcaattaatctcttaaagaattatcaaacgttgaatgaagccataatgcatcagtatccgaattttaaagaggaggcacagtgggtaagaaaatattttcgggaagaacaaaagagaatgaatctttcaccagctaagcaattcaacatatataaaaaggacttcggaaaaatgactgcaaattctgtttcagttgcaacctgcgaacagcttacatattatagcaagtcagttgggttcatgcaatgggacaataatggaaacacaggtaatgctacttgctttgtcttcaatggtggttatattttcacctgtcgacatgttgtacatcttatggtgggtaaaaacacacatccaagtttgtggccagatataattagcaaatgtgcgaaggtaaccttcacttatacagagttctgccctactcctgacaattggttttccattgagccatggcttaaagtgtccaatgaaaatctagattatgccattttaaaactaaaagaaaatggaaatgcgtttcctccaggactatggcgacagatttctcctcaaccatctactggtttgatttatttaattggtcatcctgaaggccagatcaagaaaatagatggttgtactgtgattcctctaaacgaacgattgaaaaaatatccaaacgattgtcaagatgggttggtagatctctatgataccaccagtaatgtatactgtatgtttacccaaagaagtttcctatcagaggtttggaacacacacacgcttagttatgatacttgtttctctgatgggtcctcaggctccccagtgtttaatgcatctggcaaattggttgctttgcatacctttgggcttttttatcaacgaggatttaatgtgcatgcccttattgaatttggttattctatggattctattctttgtgatattaaaaagacaaatgagagcttgtataaatcattaaatgatgagaaacttgagacctacgatgaagagaaagcccggcccaggccagcctaccggcgactaggatgctttcgctttcgctctcgctttccaatactcgggactggggaaaccgggagaatagaagcaggcaaggaccgccgtgggcacggggtcagtgagacagggtcctgctcgcggcgtcaaggaggagcgctgtgggtgtccccagcgcagccaatcggcttccgaagtagctggagctctggagcctttgcttcctcaaatacgagcgggaactgcgttgagcgctggattccaggccgagtgctggcgaggcgcgcagctgtcagaaaagagatagaaactcaccaaggccaagaaatgcttgtgcgtggcacagaaggaatcaaagagtacataaaccttggaatgcccctcagttgtttccctgaaggtggccaggtggtcattacattttcccaaagtaaaagtaagcagaaggaagataaccacatatttggcaggcaggacaaagcatcgactgaatgtgtcaaattttacattcatgcaattggaattgggaagtgtaaaagaaggattgttaaatgtgggaagcttcacaaaaaggggcgcaaactctgtgtttatgctttcaaaggagaaaccatcaaggatgcactgtgcaaggatggcagatttctttcctttctggagaatgatgattggaaactcattgaaaacaatgacaccattttagaaagcacccagccagttgatgaattaaaaaggcagatactttcaggttgaggttgagaaaagaatggtccccagtgcagcagcttttcagaatcctgagtcagagaaaagaaacacctgtgtgttgagagaacaaatcgtggctcagtaccccagtttgaaaagagaaagtgaaaaaatcattgaaaacttcaagaaaaaaatgaaagtaaataaatggggaagcataatttgactcgcatagaacaacgtttgggaaagtaacaaaaaattcttcttcgattaaagtagtgaaacttcttgtacgtctcagtgactcagttgggtacttattctgggacagtgcaactacgggttacgccacctgctttgtttttaaaggattgttcattttaacttgtcggcatgtaatagatagcattgtgggagacggaatagagccaagtaagtgggcaaccataattggtcaatgtgtaagggtgacatttggttatgaagagctaaaagacaaggaaacaaactacttttttgttgaaccttggtttgagatacataatgaagagcttgactatgctgtcctgaaactgaaggaaaatggacaacaagtacctatggaactatataatggaattactcctgtgccacttagtgggttgatacatattattggccatccatatggagaaaaaaagcagattgatgcttgtgctgtgatccctcagggtcagcgagcaaagaaatgtcaggaacgtgttcagtcttaaaaaagcagaaagtccagagtatgtccctatgtatactcaaagaagtttccagaaaatagttcacaaccctgatgtgattacctatgacactgaatttttctttggggcttccggctcccctgtgtttgattcaaaaggttcattggtggccatgcatgctgctggctttgcttatacttaccaaaatgagactcgtagtatcattgagtttggctctaccatggaatccatcctccttgatattaagcaaagacataaaccatggtatgaagaagtatttgtaaatcagcaggatgtagaaatgatgagtgatgaggacttgtgagaattcagtctactggatttaagggaatggcttatggagttgttatttcataggcattgaaaatggttttctaaactccaaaatggtcatcttatcaataataataatattgaccatttcctatctgccaggcatttttctaagcacatgaagaaattagtcctaacaacactatgagatggactataacttgcccaaattttttttttttttttttgagactgagtctcactctgtcgcctggggctggagtacagtggtgcgatctcagctcactgcaacttccacctcccagggttcaagcgatta

SEQ ID NO: 115359 - DNA, 531 bp, Homo sapiens
atggcaaggaatgagtgtgttgatgggcagcccggtcacctagttgattttacttgcttagtcacatacagagtttcaggagaatctagggcaccccatcccatggcagagcttttcctggtcatttatcacatggaagagaagttggagacacacataccccgcaagcaagagagagtggaggagaaggggccatgcatctgtaaggcactgtccccaaattctgttaatcagagagatgcaagagagaaagagatgttgcagcagctgcaaaacagagatacaaagcaggtgctgccttccaaagcttctgctcatactccactggacaaagcacatcacacagctaagcctgatggcagtggtggtgaaaaggattttcttcacacaaggactacccccccgcccctgctccagggaagagcagggaatatttttaacaataaaacagtctaccgtagcaacactatcatcactataggcagatgggtattgagggccattgaactcaggcccaaagacaacaactga

SEQ ID NO: 115360 - DNA, 1923 bp, Homo sapiens
atgacgacctccgcactccggcgccaggtgaagaacatcgtgcacaactactccgaggcagaaatcaaggtgcgcgaggccaccagcaatgacccctggggcccccctagttcgctcatgtccgagatcgctgacctgaccttcaacacagtggccttcaccgaagtcatgggcatgctgtggcggcggctcaatgacagcggcaagaactggcggcacgtgtacaaggctctaacattgctggactacctgctcaagacgggctccgagcgggtggcccaccagtgccgcgagaacctctacaccatccagacactcaaggacttccagtacatcgaccgcgacggcaaggaccagggcgtcaacgtgcgcgagaaggtcaagcaggtgatggccctgctcaaggatgaggagcggctgcggcaggagcgaacccacgccctcaagaccaaggagcgcatggcactggagggcatcggcattggcagtgggcagctgggcttcagccgccgctacggcgaggactacagccgctcccggggctccccgtcctcctacaactgtgaagacatgatggtcattgcagcctcctcttcgtcaccccgctatacctccgacctggagcaggcccggcctcagacgtcaggggaagaggaactgcagctgcagctggccctcgccatgagccgtgaggaggcagagaagcctgtccccccagcctcccacagggacgaggacctgcagctgcagctggctctgcgcctgagccggcaggagcacgagaaggaggtgaggtcctggcagggtgatggctcccccatggccaatggtgcaggggccgtggtccaccatcagcgggacagagagcctgagagagaagagagaaaggaggaggagaagctaaaaaccagccagtcctccatcctggacttggctgacatcttcgtacctgccctggccccgccctccacacactgctctgctgacccatgggacatcccaggttttaggccgaacacagaggccagtggatcctcctgggggccttctgcagacccctggtctccgatcccctcaggaaccgtcctgtcccgaagccagccctgggatctgactcccatgctctcctcctctgagccctggggcaggaccccagtgctgcctgctgggccccccaccacagacccctgggccctgaactctccccaccacaaactccccagcactggggctgacccttggggagcctccctggagacctccgacacacctggtggtgcctcgacctttgacccatttgccaaacctccagaatccacagagaccaaggaggggctggagcaggccctgccctctgggaagcccagcagccctgtggagctggacctgtttggagaccccagccccagttccaagcaaaatggcacgaaggagccagatgccctggacctgggcatactaggggaagcactaacccagccaagcaaagaggcccgagcttgccggactcccgagtccttcctgggtccctcagcttcctccttggtcaaccttgactcgttggtcaaggcaccccaggttgcaaagacccggaaccccttcctgacaggtctcagcgctccgtcccccaccaacccgttcggcgcgggcgagccgggcaggccgacgctaaaccagatgcgcaccggctcgccggcgctgggcctggcaggcgggcctgtgggggcgcccctgggctccatgacctacagcgcctctctgcccctcccgctcagcagcgtgccagctggcttgaccctccccgcctcggttagcgtcttcccgcaggccggagccttcgcaccgcagccgctgctgcccacgccgagctcagccgggccgcggcccccgcccccgcagaccggcaccaaccccttcctctga

SEQ ID NO: 115361 - DNA, 780 bp, Homo sapiens
atgagcaacaaaagaaaaatagacaaattggacatcaaaattaaaaacttttgtgcttcaaagtacgccatcaagaaggtgcttaaagaagtaactattctgaagtgttctagttctttgaggaatgctgatgtatggataaagtatggtggagcaaagaacactggaccagaagttggggaggtcgccttagctccaccactgtgtctcaccgttaaattcatctacagaccagggtcgtgtctgtttacttcatttccagtgtcaaatctgtcatctggaaagggtgtgaaattcatcctgaagaattcctatcagttggatgttggacctgctagaacaggagtaagcaagttttttggtaaagggccagagagtaaacgtttcaggcttgtgaacactaaggcggtcaagacgctgacaggaaacatccattcttctgcaccaatgttgaaaagccacgaatcacacagaaaaattaactttgataatatccttgaggctatgaggctcactggtctccagaaatgtacctctgtgtgcgggaatgttccagaaggccacactgtctacagggccattgcttcactgcagattagatgtcctcccagaaccttccagggcactaattgcctaaacagctctggtaagaagatcagcaagtattttagactagaaaccaagttcagtgtcaacaacctagaacaccaacagtgccttagcttctttgtcaaggatggatttgggtctgaaaatatctatatcctgcccaaagcatga

SEQ ID NO: 115362 - DNA, 249 bp, Homo sapiens
atggccaggaaccgaggttttttatcagcagtgttttgtttcactgccccaagtggaaccgatgagcggggtgctactgtgtggttgcccccacatctgactcacctcagtgcccaggatgggagcaaagcacaggaaacccactggacaagggaggaggtgttgatctgtgaggggcagccagcaaccactctcactgtggggaacttggcagaggacagccccaggtattcaccagatcgactgtaa

SEQ ID NO: 115363 - DNA, 239 bp, Homo sapiens
atggataccctgctgaggctgagctctggggctggccttggagacttcggcagggcgggcgaggtcgtcttcaaaggatggcggggacaactcatggagcccacggcgggcagcccgggcagcccggaggagagtgtgggtcagcacagccaccagaaccagggtgcccgagccgaggatggaagcagctgctgcgcctgtctcgatctcgaaaagtagcaaggcatagatggacagtg

SEQ ID NO: 115364 - DNA, 156 bp, Homo sapiens
atgagcggcggttggatggcgcaggttggagcgtggcgaacaggggctctgggcctggcgctgctgctgctgctcggcctcggactaggcttgctctcgcagagactggggtcacaagttgaatatacccccgtggacgtgttcgccctggcctaa

SEQ ID NO: 115365 - DNA, 463 bp, Homo sapiens
cgggacagcgcgtggccggcgccgctgtggggacaacatgagcggcggttggatggcgcgggttggagcgtggcgaacaggggctctgggcctggcgctgctgctgctgctcggcctcggactaggcctggaggccgccgcgagcccgctttccaccccgacctctgcccaggccgcaggaaccaatgagatcctccctgaaggggatgccacaaccatggggccccctgtgaccctggagagtgtcacctctctcaggaatgccacaaccatggggccccctgtgaccctggagagtgtcccctctgtcgggaatgccacatcctcctctgccagagaccagtctggaagcccaactgcctatggggttattgcagctgctgcggtgctcagtgcaagcctggtcaccgccaccctcctccttttgtcctggctccgagcccaggagcgcctccgcccactg

SEQ ID NO: 115366 - DNA, 1089 bp, Homo sapiens
ctagaattcagcggccgctgaattctagcagggataagagagcggtctggacagcgcgtggccggcgccgctgtggggacagcatgagcggcggttggatggcgcaggtttgatgcgtggcgtacaggggctctgggcctggcgctgctgctgctgctcggcctcggactaggcctggaggccgccgcgagcccgctttccaccccgacctctgcccaggccgcagagaacgcgaggtctctcccccccatgctactgcaggctctcgcagaactggggtcacaagttgaatatacccccgtggacgtgttcgccctggccaagaggggctcagtacaagcagccgccagtgtggttcctatatcccgggacttcgcctgtctctgcggatcacagccagtgactactgtgctcttggagaaaggtccagcctcagcttcccaggcttcatttgcatccatctcgcaggccccagctcaggccgtgcccacccaccaagttccagtgccgcaccagtggcttatgcgtgccctcacctggcgctgcgacagggacttggactgcagcgatggcagcgatgggaggagtgcacggtgctcagtgcagcctggtcaccgccaccctcctccttttgtcctggctccgagcccagggcgcctccgcccactggggttactggtggccatgaaggagtccctgctgtgtcagaacagaagacctcgctgccctgaggacaagcacttgccaccacgtcactcagccctgggcgtagccggacaggaggagagcagtgatgcggagggtccccgcgtccccgagaaggctgtggccaagggatcgagcccagcctcccgcccgggtgccgagctccggcctcgaacccggggccggcccgcggctggcgtcctccggccctacctgcaggcccgtgcctacctgatccgcggcgggccgggcggccgcacaggcccctcggttcgcctcggcccgggtcccgcccggcccggcccgtcggcgccactagctccgctccggccggcacctggtccgggcaccgcccgccgagccgacagcgccgcggaccaatag

SEQ ID NO: 115367 - DNA, 454 bp, Homo sapiens
cccctttactgagatcactatccgtgtggtggaattcagaggctgctttttttcattgtgcatctttctgtaagacgtgaatttataccatgtacaccaattacttaaataataagagcatgtttggacttccagtttctggtgatggctggttatgaaaacttgaagaaacaaaataatggctttttttaagtgaagaactaaaaaaacattgaacttccaggccagtttttggataaaagtctataaccagggagggaaatggaatactggaacaaaaagctgcctgtgctgagacagcagttgctgataccacaaacacttgtctgctgtttctgtggcctggctgagccaagaaaacatgttaaagcacagagcccacgcaagacagtgtgcttgcaggagaccctaccaacaggaatcggataacaaggagctaaaggggtgataatga

SEQ ID NO: 115368 - DNA, 1016 bp, Homo sapiens
ttttttttttttttatgttgttcttacttttattagaacattgactcctagagctggaattgtatcttggatttttggttccgctggtagcacaccgtgctcaataaaaattaatccatcaatcaacaggacagaaaatcccatcctgccagaagcaatacttcctgtttgtcccatacaaagccaattagagtgttaggatgttgtaatggagacagaaactaaggaaagcggcaaaaataaaaaaattcccccaaaacatcaaatagaaaatgtaggggtagggggattgggggcacaagatgggttgaaccagatagggaagattcccccagtgttgtcctgctcccagtccaggtttgggacaatgccggcagcgtttccctgtgtctttcccccacaaagtctccaagtctctcctcaaatgagctccaaggcttgggagaaacaatctcttcctctgcccgggttgcgtggatctccagtggaaaggaagaaccggaactatgatttgtgccttccttattgcctccgaaatatttttaactgcagaggaaagcctgtattattttggagaaaggcgaacagataaaacgcacagcagtaaatttcagggactagaaactccttctcagtagagacaaggtttcaccctgttggcgaggctggtctcaaactcctgacgcccagtgatctgcccacctcggcctcccaaagtgctgggattacaggcgggagccaccatgatggccaacttttgaattctgaaccagttgattgagtaccagagctcttcaataccttgaagaaagattcaggggagagccgttgtgaacagcttgccccagggaaaggacaaggctgagagaattccagggcttccttgagaaaacagaattgaggaaatgcaaagtgaagaattctagcatcaggaacaagagaagaatgatggaaaacctgctactgagatatgttggatattttgcacaagtgaaacatctctacaactggaatct

SEQ ID NO: 115369 - DNA, 1278 bp, Homo sapiens
atgttggcagttcacacagaagacaaactgagaagggagagcaggcacgaattactcatctgtccagagatgtgctgtgtctggaatttgtgggttcttggtctcactgacttcaaaaacgaagctgcctggaccctcgtggtgagtgctacagttcttaaaggcggcgcgtccgaagtttgttccttccttggtctcactgacatcaagtatgaagccgcagaccctcgcagtgagcgttacagttctttaaggcggcgcatccagagtttgtccggagttgtttactcctaccggtgggttcgtggtgtcgctggcttcaggagtgaagctgcagacctccgcgatttaaaggcagtgcggacccaaacacccttgggtggtcgatgggaccgggcgccggccgcgctcctgcgggacgctcgtgctgcgcaggagccaactgaggcgggagagctcagacatggcgggctgcagtgctgggattacaggcatgagccaccgcacctggccaaggaagacactttagatggtgccagagttgaggatttggcctgcgacttattgcagttgccgcactgcagtttccacactgtggccttagaagagtcttatccagacctgaaatcccagtgccttggaaacatcaggactggtcagaaggacatctatatgtctccacaggtgagtgcctttagggctttttctttgacagtgaccttggacagtctggggtgtggctgtagagcatgctgggtagggtcttttggctttgcttctgtagccctaatgcacttctgccagcaggttttatattgggtgtgtggtttgacctacaagccagtagatggcgccatggtccaggtttgggacaatgccggcagcgtttccctgtgtctttcccccacaaagtctccaagtctctcctcaaatgagctccaaggcttgggagaaacaatctcttcctctgcccgggttgcgtggatctccagtggaaaggaaagcctgtattattttggagaaaggcgaacagataaaacgcacagcagtaaatttcagggactagaaactccttctcagaaacattttgttatggaaaattttaatcatatacaaaagtccagagcatcatacaatatatccacatatagtcgtcacattgctgcaacagtcatttcagccggcagccagccacatttcatccgttctttcccactccactcacacccctcaaccccactctccactcttgctttccctaaatctgagttattttaa

SEQ ID NO: 115370 - DNA, 339 bp, Homo sapiens
atggacacaaaccttgatgttattgaatgtgggatgtgttggaaaagggcatgtgtgtcagaagccagtggcagccaagcagtgagtgttaggagtgaagtcttatcagttgttagcaattgccatgcaaacgtacaaggtgctctatccaagggagatgagagttctatctgtaagcccctgaatggagctgctggatttcctgcagagatgccttgcccagtactttgtagacctagtaaagaggagaaaacaaggagagtatgtatgagcttgcaaatagaggaagccaaggtgcttcagcaacatcgaaacaagtttgagaaccgctcaacttga

SEQ ID NO: 115371 - DNA, 541 bp, Homo sapiens
tcctgaagaaatccagtggtttgcagacaaattttcattccacttaaaaggccgaaaacttgaacaaccaatgaatttaatcccttttgtggaaactgcaatgggtttgctcaattttaaggcagtgtgtgaagaaaccctgaaggtcgggcctcaagtaggtctctttctagatgcagtcgtttttggaggagaagactttcgagccagcataggtgtcaaagacatctctctctctctttttctgtgtgtgtgtgtatatgtgtgtatatattttttctttgcccctcaaggatggacatttacataacaatgtatatttgccaaccatgacaatggtttttcatgacaatggaatggacactacttcctgataatttagggctcctcatagctgccctgcttctagagcactgcattattacttctgttcatttataaaagacacgagcaatagaaagcctgttgcagccccaggcatgctcaggaatatatggcatctcctttgctcctaataaatatattatgtgaacagcctcaa

SEQ ID NO: 115372 - DNA, 888 bp, Homo sapiens
atggctccctgtgctggcagccatgattgggctgcttcactggagacatgctgcatgccatcagccttcaactttgagggccacaggctggggcttcatggaagtggtggggagcctgaacgtgcgctgcggatagggttttacttcctgctacccatcaaccatgggataatgcctgacaaagatgcgaatgaccccggaaatgcagtgtgtgaagaaaccctgaaggtcgggcctcaagtaggtctctttctagatgcagtcgtttttggaggagaagactttcgagccagcataggtgcaacaagtagtaaagaaaccctgggatattctctacgcccggcaaaagattgttgtcatagcgaaagcctttggtctccaagccgtagatctgggtgtacattgactttcgagatgggagctggggcttgcttaggacagttcacggaggaagggagccgccatgggcttcactggtaagcaggtgattcagcctagaccaaattgccgtggtccaggagcagttttctccttcccctgaaaaaattaagtgggctgaagaactgattgctgcctttaaagaacatcaacaagtaggaaaggaagtttgtattctctgttttccagggggcctttactttccaagggagtatgatcgaccatgccattactgaagcaggcccagaacactggttacgcttgccacctccatcaaggaaaaatgatctgttaaatgaagctgtcatcaggctaaagggtattgaagctgcagagggatcaacttgtgcttgccagaggacgccaatgaagtttgaaacaccaacaatcagcagattctgtttctgttcctcattaaatcatgagcttttgtgccgaaaaaaaaaaaaa

SEQ ID NO: 115373 - DNA, 701 bp, Homo sapiens
aaataattgctcatctgttaatgctgatctgaggcgagtgagaggcgcagctgcaggatcagtgggtcctagggcttcctgaaacgcagtcttgaggctcctgtaggaaattttctccctctccccgcaggcatggcttttgtacgagacggaatgaatgtcaagctcaggttcaactcgcgctttggaacccaggaggtatcctcagcgaggcctgatggaggacaggaggggctggccgagggtggagagcgaagggatcgccggagcggagcgagggtctcatcccccctgcaggaccctggcagacccacacgttccctcctttcgcacaagtcggttgctgccctctaccctttggcagggcataagaatgacttccgccgcggagatccagcgcttccttccattttgcctcctggcccctcctggagaccgcagccggtttcttggcagcttcgcgccccagagcaggaagggaccgggacgcggtcacatttcagctttggtggctgcgcccgcgcccccgtactccgggcaggagatctgggctgcgggcgccaggcagagctggcatcttccgggacctggatggttgttgcggaggggctcccaagctaagctggtgtaggagctctcaaaactccctttctggcatcccacggaaaaacacatgaatcagaaacgaaatcgtcgacccg

SEQ ID NO: 115374 - DNA, 273 bp, Homo sapiens
atggatcggattctggtgcagagaggaaggttgagagaaatggaggaaggtgaaaccaacaagaagtgtccggacacgctagcaggatttcagcatacagagctaacaagatgcgggggtgagatacacatacaagctggagagaatgggggcatgggcaaagatgacagtctcctggaacaagccaacaatgccattggagactactttgctgatcgacaaaagtggtatgtaacttacctggagctcctcaagcattcatgcaacacttag

SEQ ID NO: 115375 - DNA, 977 bp, Homo sapiens
cctgctgcaagtctgacggtaccaaattacatatatatctgtcaaaatgatgtaggacctaaagtctctctgtaagttgatccttttgaccccatgattaggagcttcacaatgtggtaccacacctggaaacctccagaacaagatctcaaggaaacacaggaaattcctgaaacagcaaaaccccctatgtgaagacgtctgttattcctttgtgtatcaggagcatcactgttaattaactgttgatacacttaaaacagcttggttggcaatgtcctttttgaataaagaagagccaggtgtgtttttcaggatgaactagacaatgctgtcacaagtttgcctctacatcttattgccttggaaaaatttcctgcatatcgtggcacaagatggttggctctccaggcagcagttggcgttgtgaatcagtcatctcagcatgtgtctccaagatcccacagcagggggaaaaagaggtggagggtcacatgcctggtgttacatactttgaggcagaggtggtaggtgccatttctgctcacagctcatggaccagaacaaagccatgcatacctgagagaggaccataaaatattctgaagcagatggctatttggaaacacattgtagcacacagctacgtaaggacagtgagaaccagagctatcaggatggacacaggcaatgattttgccaaaactaccactggtagacgtatagaatgccttatccactgtcatgatatgccatacagcattgcttctgataaagaaattcacttcacagcaaaaaaggaaaagaagagatggaaggaaactgttgcttcattttctgttcatggaaggggagagagaatatctgagtttggtgggagcaggcacagacagcagaagagttcatctgttccacagtatcagcttactgagcaacgttatccagggagccctatacctctggccattgctgattag

SEQ ID NO: 115376 - DNA, 1424 bp, Homo sapiens
  misc_feature (1)...(1424): n = a,t,c or g
acagagcaagactccgtctcacacacaaaaaaatgaaagattggaatgccacccctttcctagcatgcacaacatatggcaggatcctgctcttctgtcccctgtagcgggttgtcccgtgttccccttaaggaagaaatcacagtttttgtcctcctggtgcttccggctggaggttcacctgctagtccctgatcctctttgcttagtgatgcacatgagtctactcatccccccaccactcccagcccccacttttttaagaataagaggtgataggcagttcggcggtcccgcgggtctgtctcttgcttcaacagtgtttggacggaacagatccggggactctcttccagcctccgaccgccataagatatcctctccgcttgcaacctccgggaccatcttctcggccatctcctgcttctgggacctgccagcaccgtttttgtggttagctctttcttgccaacccaaccatgagtctccaggattcgtcagaattatttccacccgacgttgaaggcaagcctgtctaacagccctggtcaaatttgtacctgcagggcctcccaccacctacctctctctggggtttctatttccgaccgcgatgatgtggctttggaaaggcgtgagccaatttctttcggcgaaattgcccgaggagaacgcgcgaggagctacgaggcgttcttcctgcaagatgcaaaaaaccagccgtgggcggaccgcgctccttttccaggacatcaaagaagccgagctgaaagatgagttggggtaaaaaccccagacgccatgaaaagctgccatggccctggaggaaaaagctgaacgcaggccctttttgggatcttcatgccctggggttctgcccgcacggacccccatgctcctgtgacttcctggagactcacttcctagatgagggaagtgaagcttatcaagaagatggngtgaccacctgaccaacctccacagggctgggtggccccgagggctgggctgggcgatgtatctcttcgaaaggctcactctcaagcacgactaagagccttctgaagcccagcgacttctgaagggccccttgcaaagtaatagcggcttgctgcctaagcctctccctccagccaataggcagctttcttaactattcctaacaagcctttggaccaaatggaaataaagctttttaggatagttaagaaagctgcctatgggctggaggcagaggctgcagtgacccaagattgtgccactgcactccaccctgggcaacagagcaagaccccatctcaaaaataaataaatatatataaaaaataaaaagctatttctagtttatttcactataaagttttgctttattaaaaagctaataaacagctattaatcacaaaaaaaaaaaaaaaaaaaaaaaa

SEQ ID NO: 115377 - DNA, 126 bp, Homo sapiens
ctttttctgtcacctctgggctacgagcctcgggatgcctgggtcatccctcctttcctcctccccagtagccctgccaagacacagagctgcacctttggcacaggatcccctggcctgacctga

SEQ ID NO: 115378 - DNA, 551 bp, Homo sapiens
tagcgacatgggtgagctggcagtcaccgctgttattagcaagaagcaacctgagaatggtgtcaggctggccaaagacacagaagttgccagaaacccaggtcctggacactttctggtgctgtgggccagccccacaaacgtcctggagccactcttcccttccctggctcctgaaaacatccacctcctctatgatgcgcagaaagttgccctaccacagaccacacagtctccttctggctccaagttgtgtgttcaccaaaaagtacacaagacatttataggattaagtaaatttaagtatgcaaagcacagaattagggctggcacgcacaaagtgctcaaacgcgagctgctgtcttaccggacacacgccaaaactagaccaaccgtttctctccctggagagttgtgggtggaaccgtgagggatgcccagccacagggcaggccccgtacaccacctgcagcccagcaggtcagccttaggaccctctcccctggacctgttcagaaacaagttaaacttttggccaaagcacactcgct

SEQ ID NO: 115379 - DNA, 438 bp, Homo sapiens
atggaacaggaattaaaagaaattaaagaatgcataagcaaaaactcaattgtatgtagggaaaacccgaattccgtccatgaaggcacagagaaacgaggtggcagtcgccttttgaaagattcgacgtgccgtggtattttcgcgtcatgggcctcccaggtctcctcttggggccactcgtgtaaagtcctggtacgttgggtggcttgcggtcgccacgcgttccgtcttatagtaagattaccagtcgcggtcgctccagagcgctcccaagagattttaatcacccagctaaagccacactggttaacctccacgcacgcatttcattcatttcgtgtcccagaacgccaggagagcacgtccacatttaaagcccaacacggaatacgcgggcacgtacccaagtccgacccgctgttgcacggcgactag

SEQ ID NO: 115380 - DNA, 3312 bp, Homo sapiens
ttggctggtgcacctaaataatacatatatcctcctcaaccccatcggtctctctgattcctaaatcatccccaaacatttctggtggcccatatggggattggagataacagatttactgtctcctttgcccatgggactagggccctggggctgtggaagacctggcatccaaggcatgccatgggggagtttcacccggacggagactggctctccccgcatcctgcccagcagtgcaactgaacctgagatggggctgcaggatgacaccagcacttcaggaaccgcgttgcaggtgtcacaccttggattcaccatagctggctgaaactagcagcagcagtgactcccgactatgaccagtggattaaccaacaagaccctgattgccccacccgaatagacctacggcgaatcccaaccaccagtaagaaggacaactgccctgctctgaccacactggaggctggtcagtctacacatggctgaagcttgaagatcttgcaagctcttgctcttagtcacatctggaagctgactagtctacacacagccgaagctaagaggaccactctagataagtaaatgtagataaaatttataagcctagttataattgttctgttgttacattattactgcaaatgctgcaaatgtccatgcccagaggaaggtttgccattcctgtgtgtagtgtaagcatgtttctattacatacactaatgttgttaccatttctgcctatactagaaggggagaaatctctagaaggatgcccacactgtgtacatactacctgggtaaggaataccatagttaaaactctactgtaccatacctacagtacaggaaccaagttaggaacctgcacatacaaccagaccacctattcggtctgtgacccaggaaataatcagctatatgtatgttatgaccctaagctcttaccctatgaattctggtttgaaatacatattaaatcagagggagaaaaagaaggagagttatagctcgaacaaaagaagcccctccctcctgtaaagggcctatttccttgtactttgatgcctgctatgctgcatatgttcacaatcctaaaaaaaaaccagaagccagtctgcaatggtgtaacacaagagaggcttagcaggagcagccctaagcatctgtacaaagaaccacaaatcggatgcccagactgtaacattcagtggtccacactaacacaactccaatatttatattcaggaaggagtgctctgctaagtagtatgttaaccaaaccaaactgtaagacaagaacatgcaatcctttacattttactatcttaaagccagagatacctttctggtctacaggacagacagcactataacgacttgatagactaggagcaggccttggagttccactactaattgtcaaaaagactaaaaggactcaaatgcatccaaccccgcaattctgggtccataatcattctataagcatttggataagccagtgcctgagcttcccccaccaaccaaaaacttatttgctcaactagctgaaaacatagctggcagcttaggaatttcctcatgctatgtacgtggaggaactaatatggggaaccagtggccatgggaggcaaaggaattaatgccacaagataacttcacttcgcttaaccctgccagtgaaccaacagcctcagccagtgtttggttgttaaaaacctccataattggaaagtaccgtatcgccgttgggaaaggctttcacagaggcagtaggagaaataacctgcctaggcaacagtattatgatgagactaaaaacaaaactctatggagaagcacccagaattactcctacttaccagatccaaatcctttatctccattctctaccctaagccacacttggcatcaactagaggttccaaatgcttcgaaagcaccctctggcctatattggatctgtggagcatgggcatattggcaactgccagctaaatggacaggagcatgtgtgtagtaacaatcaagccattcttctttctaattcctctaaagcaaggggaactcttatggtatccagttgatgatgaaaataaaagaagaactagaagagcataatcacaaaaatagacacaaatgtcaaaaaggatgtggacataggagactggaaagataatgaatggcctcctgaaagaataattaaatattattggccagctacctgggtgcaagatgggtcatggggttaccacaccccaatctatatgctcaactgcatcataaggttgcaggcagtctttgaaattataaccaatgaaacatcaagggcactagatttattggcaatacaagcaacacaaatgagaaatgctatatattgaaatagattggcattagattatcacttagcctctgaaggaagagtatgtggaaaatttaatttaaccaactgttgcctagaaattgctaataatggccgggttgtcatggaaatcagagctagaatgcacaagttggcccatgttccaattcagacttggtcctaatggtccctggattctttgtttggaggatggttctcaacctttggaggattcaaaaccctcactggtgggtttttgtttattcttggcatctgcctcatcctcccttaccttttacccctgtttattaggaggattcagtcaactatagaggcagtaataactcaacacactaccgcacagttgatggcattaaccaaatatcagccactgccagtagaagaagctcagctctgtgaagaggtggcaaatagtggtgctttctattaacacctttgttataaaaagcaacaaaggggggaaatggaacaggaattaaaagaaattaaagaatgcataagcaaaaactcaattgtatgtagggaaacccaattcctcctgaggaagagaaagaggtggagtcctttaaaaattcactgcctgtttttccgtctgtagctagtgagccttatctctccctttcccaggcattgtgaagaccctgtttctccagctgtgcagctgcatggtcactagacagataaactcaagttgtaaaacatgtttttccttgaaaagtaagaaatgatgtaatacatgtctcaactgaataactgtctttgtttctcacttctgtagtaagcttccccctgcacagatctcccctctcaccccatgaaatgcttaaaaggtaacctgactctttgttcagggctcagtcctttggatgttaatctgactgggctggtgcacctaaataataaatacatcctcctcaaaa

SEQ ID NO: 115381 - DNA, 864 bp, Homo sapiens
atgttggtcaggctggtcgccagaaggacaagacagagtcatgcagagaagaaagaccacagggggaagacggccgtctataaaccaaggagagaggcctcagaaaacaaccctgccgacaccttgatctcagccttccagcctccggaaggtgagaagatacatttctgtgatgacacccaacccatggtggcagagatgcatggcgagctgattgagttcaacgagcgcctgcacagggccctggtagccaaggaagccctcgtgtcccagatgaggcaggagctcatcgatctccggggaccggctgcagactgtgtgagtccaggggacagtgaccaaggcctgctctctgcatccctgatgcctagaacttcattatctcatggagaagccacaggatacatccatgaaactagcaatgagaatattgtgagcaaaccatgtcgattgataccaccattcccgctgcctaacaggcccatcttcctgatcaacttcaactcatccttaaaaactcaagtcaaacgtctcctctttgaaaccttccatgacataccccagcagccccagtccatggaaaaattgtcttccacgaaattggtccctggtgccaaaatggttgggaactgctgctttattttctttgtctgcacagtgggggcaatgccacccaacttggagggtggttgtgaagtgaaggataatgactctaaccaggcaaccagtgaacccacgaacaaagacttacggggaaccttctgtgcaggcctcttctgtgccctggggatatactcaggaggccagagagataagatggctgctcccaaggagtgcaggcttaataaacagttcagcaaatag

SEQ ID NO: 115382 - DNA, 708 bp, Homo sapiens
atggggcctgaaatctgcacatccgacaagctctcagatgaggctgatgtcactgtgttggaagttctggccagggcaatcaggcaggagaaggaaataaagggtattcaattaggaaaagaagaagtcaaattgtccctgtttgcagatgacatgattgtatatctagaaaaccccatcgtctcagcccaaaatctccttaagctgataagcaacttcagcaaagtctcaggatacaaaatcaatgtgcaaaaatcacaagcattcttatataccaataacagacaaacagagagccaaatcatgagtgaactcccattcacaattgcttcaaagagaataaaatacctaggaatccaacttacaagggatgtgaaggacctcttcaaggagaactacaaaccactgctcaaggaaataaaagaggaacattccatcaaatggaagaacattccatcctcatgggtaggaagaatcagtatcatgaaaacggccatactgcccaaggtctacatccggataaaagacgatgaatggaatatttatcgccggtatacagagttcaggagtttgcaccacaagttacaaaacaagtaccctcaagtgagggcctacaacttcccacccaaaaaggccattggaaacaaggaagcagttctctgtcatggccgtgctttggatcccctggggagctttgaaaaccactga

SEQ ID NO: 115383 - DNA, 792 bp, Homo sapiens
atgctgcaacaacacgctcctgccgagacgcatattcttccgcaacaggcgatacgcgatccctttgtgctcgaatttctggaattgaaagatgaatattcagaatccgattttgaggaggcgctgatcaaccacctgatggatttcatgctggaacttggggatgattttgcctttgttggtcggcagcgaaggttacgcattgatgacaactggtttcgtgtcgatctgctgtttttccaccgccgtttacgctgcctgctaatcgtcgatctaaaagtgggcaaattcagctatagcgatgccggacagatgaatatgtatctcaactacgccaaagagcactggacgctaccggatgaaaatccgcccatcggtctggttctctgtgcagagaaaggagccggagaagcgcattatgctctggcaggtttgcctaacaccgttctggcaagcgaatataagatgcaactacctgatgagaaacgactcgcagatgaactcgttcgaacacaggcggtgctagaggaaggaattatttccctgaggaacatcttctctaagaagatggtcatggagctattttccgacgagtgcatctgggaaagagccagaccacacaccaccaacaccagccacacacaacacacaagagaagcaaaccaaacaccaccccacgacgacaaccaaacaacccgaagtcgaaaacgcacaataccagcgcccacagcgaaggggagcatcaacacacgaggcaaacaggacacagacgcggaattctcacatttgtga

SEQ ID NO: 115384 - DNA, 824 bp, Homo sapiens
gaagaactcgcaagctcctacgaaagaaagctcatcgaggtggcagagatgcatggcgagctgattgagttcaacgagcgcctgcacagggccctggtagccaaggaagccctcgtgtcccagatgaggcaggagctcatcgatctccggggaccggtgcctggagatttgagtcaaacgtccgaagaccagagtttgtcggattttgaaatatcaaaccgggcgctgatcaacgtctggatcccctcagtgtttctccggggcaaagcagcaaatgcattccaccgtgtatcaggtctacatccggataaaagaccgatgaatggaatatttatcgccggtatacagagttcaggagtttgcaccacaagttacaaaacaagtaccctcaagtgagggcctacaacttcccacccaaaaaggccattggaaacaaggatgccaagtttgtggaggaacggagaaagcagctccagaattacctgcgcagcgtcatgaacaaagtcatccagatggtccccgagttcgctgccagccccaagaaggagaccctcatccagctgatgcccttcttcgtcgacatcaccccgcccggagagcctgtgaacagccggcccaaagcagcttcccgcttccccaaactgtcccggggtcagccccgggagacccgcaacgtggagccccagagcggtgacctctgacctcgacaaaaccgcagccacgggccctgtgcgtggcaccagctgcgtccaccccagccactgccgctggcccctcacctcagcgtgacaaccacgtccacctggtgatcctgagagcacacg

SEQ ID NO: 115385 - DNA, 1963 bp, Homo sapiens
atggagctgttcctctggttgaaggagaaagacaacaaacaggtctacctagcatgccagatggtggtcgtgctggggtcagcactgacagttgagccagaaacctcacggattctctccgagacacaggggctgctcttcagctacagttacggtaccacggttccagctgaaaagggagtgttcgtaccatctgccttgcagattaacttgcggctgggcagtgaggtctacatccggataaaagacgatgaatggaatatttatcgccggtatacagagttcaggagtttgcaccacaagttacaaaacaagtaccctcaagtgagggcctacaacttcccacccaaaaaggccattggaaacaagtgtcatgggccacttgcatctttagaaaccatgcaacacagggaaagagcttgggctgtggattcagatcctgccccctcccacactggctgtgtgaccctggacaagtcctcagcctttgtggcactcagctgtcacatggtggtgagcacactgacagcatgggctgtggtgaagagtgaacaagcttatgccagtcaagtatttcccatggtgcggaccaatgacttcagaggactgaacaacaagggctctggggaggacagccacctggctgcaaccaagatcctaaggcatcttaagagttcttggcagaaaggccctgaagtaaaaaaaggtgatgagaccgaaatgctttctgaggctgtagacctggctgcagactgtgtgagtccaggggacagtgaccaaggcctgctctctgcatccctgatgcctagaacttcattatctcatggagaagccacaggatacatccatgaaactagcaatgagaatattgtgagcaaaccatgtcgattgataccaccattcccgctgcctaacaggcccatcttcctgatcaacttcaactcatccttaaaaactcaagtcaaacgtctcctctttgaaaccttccatgacataccccagcagatgcactcgtcggaaaatagctccatgaccatcttcttagagaagatgttcctcagggaaataattctggaacataatgactgcaatagtgttccttggggaaataattttgggaaatgctgctgtacctagcccatccctttggagaagcacggagcacccccatggtaattccaccaaggcaggcaccttatctgtctggttcatccctttatcgccggagcctatcacagtgcctggagatcccaagaggctccatacacatttgttgagagaacaaatacctgttgggataaaattagggaaggccaggcagaccataggaagaatggcctggaggatgttgcgaaagtccagagagagagaacaaagatccctggtggtggagtggacagactggcctggaagccagctccctgattccaaagagagccgaacaccagggagcaatgggagagaaaggcagctccagggcagggaggagcctgaagatgccaaagacagtagcttagggggaccacaagattcaggagcagaggggctgaggcttaattgcttatcacaagtcaagtggttatcagatcacaaaggtaacattcacagagtagctatggcccaagcatttcatatgtcatcacacacggtcacatccatgctgcaaggagcccacactggctgggatgaaactcacaaatcaaacagcaaacggctgcctcagtccacggccggctctcctgtctacctggtatacaacaggtgtgacaggaaggaccagccttctgcacaaataaagactttgcaaagcctactggatgaagttaccgacactcatagcagcgaaaactgggaagtcagaaaagtctcacctaagacagaggaagaaacaggtagatgtgtcagaattgaatcagaggacacccagctggtgtccgctgcagaactgattgtttggtggtag

SEQ ID NO: 115386 - DNA, 469 bp, Homo sapiens
  misc_feature (1)...(469): n = a,t,c or g
atctgaaatcatanggacntgcganacngcnaaggaattccagtgtcgacccacgcgttcgcccacgcgttcgaaaaaaaagaagacagattaagatttactcaatgatgcacaaagtaatttgaaccaaggctcaaaagtttttggagccgtgagggatacagcagtttggtcaatattgtcttaacatgcttcaaataaatcaggtatcattgcccagtgcctaagatcttttatgttcagctcactgtaggaaataatgaattttttggggaaggaaagactcgacaagctgctaaacacaatgctgcaatgaaagccctccaagcactgcagaatgaacctattccagaaagatctcctcagaatggtgaatcaggaaaggatatggatgatgacaaagatgcaaataagtctgagatcagcttaatgtttgaaattgctctgaagcgaaatatgcctgtcagtt

SEQ ID NO: 115387 - DNA, 2998 bp, Homo sapiens
ggcacgagccaaaaacaaaaatcatatgatcagctcaatagatgcaaaaaaaaaaaaaaagctttggaggcaggcggggccgctctttgcgcactagctcgccggcgttcccaaggcccgcaggaatggccctcgcctgggggcccagctcgccaccgctagccccgcagagccagctgctgttggggcccccgcagccgccagggggcgggagaggcgtcgcgaacaatggccgcgctgggtcgcgggccggcgggaggcgtagtggagagacaagggctttagcttactttttaaagattgaagaaaaataaagaagaagaagacagaaaaagaagaactcaaagatacacaaagtaatttgaccaaggctcagaagtttttggagccgtgagggacacagcagtttggtcaatattgtcttaacatgcttcaaataaatcagcttctctccaagataaaattggcaaacccaaaagagaaaactgcaatgtatctggtaaatgagttagcccgtttcaatagagtccaaccccagtataaacttctggattaaagagggcctgctcattcaaagatgttctcagtgcaactgagtcttggtgagcagacatgggaatccgaaggcagcagtataaagaaggctcaacaggctgtcggtaataaagctttgactgaatctacgcttcccaaacctatttagaagccacccaaaagtaatgttaacaataacccaggctgtataacaccaactgtggaactgaatgggcttgctatgaaaaggggcagagcctgccatccacaggccattagatccaaagccattcccaaataatagagctaattacaactttcaagtcatgtataatcagaggtatcattgcccaatacctaagatcttttatgttcagctcactgtaggaaataatgaattttttggggaaggaaagactcgacaagctgctagacacaatgctgcaatgaaagccctccaagcactgcagaatgaacctattccagaaagatctcctcaggaatggtgaatcaggaaaggatatggatgatgacaaagatgcaaataagtctgagatcagcttagtgtttgaaattgctctgaagcgaaatatgcctgtcagttttgaggttattaaagaaagtggaccaccacatatgaaaagctttgttactcgagtgtcagtaggagagttctctgcagaaggagaaggaaatagcaaaaaactctccaagaagcgcgctgcgaccaccgtcttacaggagcttaaaaaacttccacctcttcctgtggtggaaaagccaaaactatttttttaaaaaacgccctaaaacaatagtaaaggccggaccagaatatggccaagggatgaaccctattagccgcctggcgcaaattcaacaggccaaaaaggaaaaggagccggattatgttttgctttcagaaagaggaatgccctgacgtcgagaatttgtgatgcaggtgaaggtaggcaatgaagttgctacaggaacaggacctaataaaaaggccaaaaaaaaaaaaaagtgttgcagtagcaatgctattacaacttggttataaagcatccattaatcttcaggatcaacttgagaagacaggggaaaacaaaggatggagtgatccaacgcctgggtttcctgaaccaacaaataatactccaaaaggaattcttcatttgtctcctgatgtttatcaagagatggaagccagccaccacaaagtaacctctggcactactctaggctatttgtcacccagagatatgaaccaaccttcaagctcttttcttcagtatatctcccacatcgtatagttcagtctacattcgccaggcatctccttatgaatggaacatcttctacagctgaagccataggtttaaaaggaagttctcctactcccccttgttcctccagtacaaccttcaaaacaacttggaatatttagcaagggattcaaggctttcagggcaggccttaagtgccttggaaacaatttttcttggaacaaggactgggatccaattcgatgggagcaatggattttcgaaaaaggttctcttgaaaaacaagccaagcatctgagagagaaagcggacaataaccaggcacccccgggctccatcgctcaggactgcaagaaatcaaactcggccgtctagcagctcccagaacccgcggctgccaccgcatccttataaacctgtcagcacgcatgagggtgtctgtgttcagggaaatgaatgactaataccattatttgagtcttatgtgaagacaacactattctaacacgagagataatatacatggtactgtttattcaactggggaaaaataaaactttgagcatttcccttggaactcgagatcagatcataactcatttgcctagaggcagcagaaatctgatcctgctactggagcttaaaataacaagtaaagaaaagtgttagaaacaaagctaaaattttaacatgattaataatagagaagttgggtttggttctgttgttatgattgttttgtcgtggtgcttgtgttcagttatattctctctctctctcatttcaaatactgcttgacaattcgaaaatgaaccaatgatgtgctgtggaatgtgatggttgtcttcatatagagtcacatggtttctctttttatgcagatatttataatcttcatcctatatcagtaggaataactataaggtgcactacaaaaagatgtatgcaaacaaacatgttttaaatcaggtcagatatctgatgaaaaatacgaactaatgttaagagcaagtagtttcaacatactccaggaactgagaaacaaaacaaagcaattgtgggttttgagctccatatactcttagcaagtaagggggcgtcttgcccctatatatcatcttcccggattccactccctgttgtgggaatcgcgcccacccccatccgtgtgttgg

SEQ ID NO: 115388 - DNA, 339 bp, Homo sapiens
gtgcgattcatctttctgtctctagttcttagcatgtgcacggcacagagcaggcgctcagagtgccttcagtgaaggaataaatgaccataccaccaggcacagagtgaggcctttagaaaccctgagcatcatcgggtgcgcccaccacttctgtatgtgactcaaagtaagtgtaaggaaatccagttctgttttgtttctgaaatactagatgtcaggaagggtgtttaggtgtcaggctttggtggcctacactgtgctttcggaattattcactgaggcgaaagaacagagattagctactgatgaaggacaaaaagaattttctgctgaatc

SEQ ID NO: 115389 - DNA, 1813 bp, Homo sapiens
ttcttagcatgtgcacggcacagagcaggcgctcagagtgccttcagtgaaggaataaatgaccataccaccaggcacagagtgaggcctttagaaaccctgagcatcatcggcattttgctgggtatgcctcctaaactgtgtgaacagaaaactttgattgcatcagaaactttaaaaacacagtctaccatgaaatatgtacagacgtgtgctgaaagcagctttagcataactgtgttacattcctcttctaaaggaaggcctaagccgcccctttggggaggaattcgcagctgtcttcatacagatgagaaaattgtctttaatgcacaaggtacagtagcagttttagaaagcatgattggtgagctcattagtcattctgagtgctttttttctctttccctgaatgtcacttcaagcatgctgctttcaaatgtttctgagacatttcataccacaactacagcagctgaagccataaccctactaagaaaccaaaagggagatagtgttttaggtgctggtgcctgtggtggtgttcctatcattttttctagaaacagtggactggtgtctattacttcaagggaaaatgtgtctatattggcagaagacttggaagggtctttagcatcttcagttgctggaccaaacagtgagggaggaagttttattttgtcttcatcaggaagccaactaattcggttgatacctgagagctcaggaaagattcatcagcatatcctgcctcaggggcaaggcatgctttcaggaattggtcgaaaagtttcttctctttttggaattttatctcctagtagtgatctcacactttcaagtgttctctgggatagagagagatcaagcttttatagcctgacgagttcaaacatcagtaaatgggaattagatgattcttcagaaaagcatgcatacagttgggatataaatagagccctgaaggaaaacattaccgatgctatttggggatctgaaagtaactatgaagctattaaagaaggagtcaacattcgatatttggacttgaagcaaaactgtgatgggctggtgattttggcagcagcatggcactcagcagacaatccatgtctcatctattactctctgataacaatagaagataatggttgccaaatgtcagatgcagttactgtagaagtcactcaatataatccaccttttcaggtctgaagaccctgattttgtgtcagttgacggtcccaaacttttcaaaccagactgcctatctgtataacgaaagtgctgtctatgtgtgctccacaggaactgggaaattttctcttccccagggagaaaattgtctttaatgcacaaggtacagtagcagttttagaaagcatgattggagatagtgttttagggtgctgggtgcctgtgggtgggtgttcctattcattttttctaggaaacagtgggactggtgttctatttacttcaaggggaaaatgtgtctatattgggcagaaggacttgggaaggggtcttttagcatcttcagttgctggaccaaacagtgagagtatgatttttgagaccactacaaagaatgaaactatagcccaggaagataaaatcaagttgctgaaagctgcctttctgcaatactgcagaaaagatttaggtcatgctcaaatggtggttgatgagctcttttcctctcactctgatttggattctgattctgaagtagacagggcagttacccaaatcagtgtagacctgatggatgactacacagcatctgacccacggtggggctgagtct

SEQ ID NO: 115390 - DNA, 495 bp, Homo sapiens
atgcccatctatgaacaagaggtaggaactgaaaactttctgctgactttcttaaagttgcccaacaatctcagcacacgctgctgttatccccacatcagagctgccccagccattgatttcatcagggcctcccacactgtcgctgaagcctctctagtatctacttcccctctctgctctctgtatcgttctcctgtcctcttcccctactccctagactcctcagcgctcaagattgaggagtactcagagacagagacaagaaggcttgagaaccttgctctagaggacttcttagtctccagtttagagagcagcctagcagtgactcagggaagcaatcactgggggcaaggcaaggctccgaaagctgtgaaggacccaggaccatttcatcgagtgagtgctggtgcaagtaatgaaaatcccaactcagattggcttaagcaatggaaactttttggttcagataatggaagagttcaggagtag

SEQ ID NO: 115391 - DNA, 567 bp, Homo sapiens
atgaatgtgaaacacaccctggaatgtgaagagcaccctggtgttgtggtgttggctggggatccctcaacagtggtttcaggatctggatggggaaaagagccctttaagtgttccagccagcaggcaacagatgaggaaactgaggttcgaagaagttgtgacttgctcaaggtcacaaagccagggcccggggcgctgtcagacggggcagcaaccaggagattccctgggcctgcaggaagcccttccgcggaccgaaagactaaacccaagagaataataaacactcaacaaactaagttattgatttcaccaaagagggagatgcatccattccatacattcattcaacatttgccaaacctaccgtgtgcaggccagtataccagggccttggagtccaaagataatgagatggtttctgtttttgaggagcttcagtctggagtaactttagcgcagaaagcatctcactggggaagtggaaaactagagccctgtgtgccattggccactaaccagctttacaattttgaacaaatttggaacaaacttttactatga

SEQ ID NO: 115392 - DNA, 361 bp, Homo sapiens
tcattttgctttggggctgagatctggctttcttctcttcttcctccccttcatccatttcatccccttgaggctgctccatgtctttgtcttacttttccctttggcactcttcagatggacccattccttcttcacggatggtttatagtttctgtgagttcacagaccacagcctgctagcaaccttccatgacccgattcaaaggacagtctttccttgagacatctgcctctgtgggtgatgatctttttgagaccttgcagaagctgacggatgttcctgtcagtccctcgctcctttccttgtgtgccccaggtgtgaggagtgatctttggtagggtctaacatggccttgcc

SEQ ID NO: 115393 - DNA, 792 bp, Homo sapiens
atgaaacatcagggactaagggtcaaagaagatgtcaagagaaagctcttcctgaagtgcaggaccctaaatcacaaggacttcgcaggctgtgactcactgcaattccaaggatggcctaacagagacggcggatggtcagactcacttctcacataaaggaggccttgcacagcacaggatttccccaaaccttgtctggacatggacttgcatggtccatgtctagacaaggtggggaaatcctgctgctaagcacctggagatgtccacagtgtgcatgggctctcactgtggtccactcactcctcgccaaaaccctgggagcccctcggattctttccatcatcaccgctgcaaaacactgccagtctcccaaggctcagctcagatggagcctttatgacactgtagccagtcactgctcccactcctgcatctccgtgatattggacacttacagcatttcccacattttgctccaagagatagccatgtttgctccaagaggtttattggagtgtcctcatgacatggtggatgactcttcttagagtgagtgatccaagggaacataaggtggaagcctcagatgtccctatgatcaagctttgcttgatctccattgctgttgtcaccagaaggccagacatggccctgctggagaggaggctttcgggctaccctctggctttgttggacagcaggcttgaggaaatgggcaaaagcattgatcagtttgcatccttgggctccttcactcactgtccttcaggtgttgggaatgtttaa

SEQ ID NO: 115394 - DNA, 552 bp, Homo sapiens
atggacagatttggaaagtcactttaccaaagaagatatacagatggcaaattaagcacagagaaagctgctcaatatcatcagagaggaaatctggacacacaaagagacacaaggaatgcgcacacagaagaaaagaccacacgaggacacagcaagaaggcaaccatctgcaagagaaggcgagaggcctcagaagaaatgaaacttgctaacaccttgatcttggacttcaagcctccagaactgtgtccggcagccaaaccattttgctctgtgctccgctggcaaggacttgcggcatcgattgctcaggatgcaggcagcctgcagcaagtctctgacctcacaatctggaacctgagccaaaatagctcaactgcgcgcacaccccgtggccgaaaagaaaaatgcaagcagaataggaaaaacgggaaattcttgggaaggatttttgcagtttttcttgctaaaagaaatgcaaacacacacacaggagagtgccgtatcttcccatctaatagatctaaaagaagaaatcactggctctaa

SEQ ID NO: 115395 - DNA, 318 bp, Homo sapiens
ggagatatacttcccaattcatcagattataagtcctcactcatagcactgactgctcataattggctacttcgtatatcagcaactacgggaaaaatccttgagaaaatatatcttgcaccttattgcaaattcagatacttgagctgggacactcctcaagaagtcattgcagttaagtcagctcagaacagaggctcagcagtggcccggcagatttgttatgaaaaatctaatgatcttttatttctgaagcatgctgtaaaagataggattcacggcaacctggatgggatcggagaccattattctaagtga

SEQ ID NO: 115396 - DNA, 501 bp, Homo sapiens
tcagtgcttgtagacacaggctttcagtctcctgaagtgctgtggacactttgatcagagagggtcatggcttgtgaggatcaccacacaagaggaagtggcagctcaggtctgatgatgaagtttgtctgactccagacctttctggctcctaacccctaatagtctgtatccccgatccttagcacagggcttggcactgagttatgctcagtaaagatctatgaaatgcagctgaactgcatggcacactggagtcaggcccatcgtctgtggggacatctttttgaaattccaaaagctctggatgcaaaccccaaagcctctctgagtaaaaaagttgaagcagaaggtcagggacttgcccaaggtcatcagcagtcagtggccgaggtggagcttgaacccaggcagctggcctctggacgctatgctccgaaatccctcctctctttggagacagaagcctctgaaagtcttgctccccagccaggccgctga

SEQ ID NO: 115397 - DNA, 228 bp, Homo sapiens
atgcattacaaggagatcatttctattctaacaagcagacagaaagagcagacagtaaaacaaagatgcactaagatagggaagctaaaagcagacttgggggatatgcctgcagctgcagaaagatttatgggaacagacacacaactctccctctcagataagcacaacaaagagacacagaagaagtccaagcctctaataaacttccctaccctaaatccttaa

SEQ ID NO: 115398 - DNA, 729 bp, Homo sapiens
  misc_feature (1)...(729): n = a,t,c or g
ggaattcggagcgcagaggccactatggggtctgggctgccccttgtcctcctcttgaccctccttggcagctcacatggaacaggaccgggtatgactttgcaactgaagctgaaggagggtcaagagaaggacacaggcttcaatggctggcatttcaaggaagtcacttctcttctaactacaagcagccagaaagagcagacagtaaaacacagacaagacagctgggacacagagggaggtggggggaaagtctcttgggtgactgccaaacttcaccctcatacaatgggccccagtaaaactgtgggccttaataagcacattcctttcccttcaggtgtactaagatagggaagctaaaagcagtcttggggggatatgcctgcagctgcagaaagatgtatggaaacagacacacaactctccctcccagataagcacaacaaagagacacagaagcagtccaagcctctgataaactctcccacccagaatccttaaaaactctcagtctgtaagagagtgtggctctgacctaattcagccagctgcccctctcaagtttatttaaaataaacctgtccctgttgactgagaagccaccattcgtgtctctctcctctttctttaattcttacannnnnnnnnnnnnnnnnnnnnnnnnnnnnnnnnnnnnnnnnnnnnnnnnnnnnnnnnnnnnnnnnnnnnnnnnnngcagttgtc

SEQ ID NO: 115399 - DNA, 456 bp, Homo sapiens
ctgagctcgatccccgaagcatctgaatatgactggcgaaactatcagccaagccagatgagtgaatccgagttacagatgctagcaagcctacggtggcaacaaaatgaagaactggaggatgctgggacctcccatggcctgagtgcctcccaggtggacaactgtaatgtcagcataagtaccagcagtgacgacacaacgcacctggaactcctgcctgccaccccctgtcaaccagggtcgccactatcagaaagaaatgaacccaccttctccttctaatccccgggactggttaaatatgttgagcccaccaatcgttcctcccagtcaacagccggctgagcagcgtccagattcctgtgaaagtttgagtgttcaaggtgggactatgaaaaacgatatgcataagaaaataaaaataatttactataaatagagagaatccaaaaa

SEQ ID NO: 115400 - DNA, 987 bp, Homo sapiens
gtccttctatatgatccactctttgactggaccatgaatcctttgaaagctttgtatttacagcagaggccggaagatgaaactgagcttcaccctactctgaatgcagatgaccaagaatgcaaacgaaatctcagtgatattgaccagagtttcaacaaagtagctgaacgtgtcttaatgagactacaagagaaactgaaaggagtggaagaaggcactgtgctcagtgttggtggacaagtgaatttgctcatacagcaggccatagaccccaaaaatctcagccgacttttcccaggatggaaagcttggtgtaaagcatcatggacaagtggacttcacaggcatttcaaagatgaaaaggacaaaaacacagaaaataattgtgacaaaacttccagaggaacgatcagacagcagcattcgcggttcatgaaaatccgtggttctgcagacaccgctgctgatacccagttgataagcaacttcagcaaagtctcaggatccaaaatcaatgtccaaaattcagaagcattcttatacaccaataccagacaaacagagagccaaatcatgagtgaactcccattcacaattgcttcaaagagaataaaatacctgggaatccaacttacaagggatgtgaaggacctcttcaaggagaactacaaaccactgctcaacgaaataaaagaggatacaaacaaatggaagaacattccatgctcatggataggaagaatcaatatcgtgaaaatggccatactgcccaagagagcatccactacagaagagacattaaacaaccagatgtataaggtgactttggcactgagggccagccaacatgctcttggccaccctagtgcttgtgcaattagctcatctacagaagagtctttatggcatggatggaagccaagcgcgcgaaatcatgggccttttctcagaaaaactaatctagctgcttccactgctgaatga

SEQ ID NO: 115401 - DNA, 1563 bp, Homo sapiens
atgaaactcatggacacacttaaccagtgcataaacgctggtcatgaaatgacgaaggctatcgccattgcacagtttaatgatgacagcccgaaagcgaggaaaataacccggcgctggagaataggtgaagcagcggatttagttggggtttcttctcaggctatcagagatgccgagaaagcagggcgactaccgcacccggatatggaaattcgaggacgggttgagcaacgtgttggttatacaattgaacaaattaatcatatgcgtgatgtgtttggtacgcgattgcgacgtgctgaagacgtatttccaccggtgatcggggttgctgcccataaaggtggcgtttacaaaacctcagtttctgttcatcttgctcaggatctggctctgaaggggctacgtgttttgctcgtggaagatacttcgttatcgacaccagctgccccgatggtggattcgttaattgcgcgcgtaggagtaatggctcgcggtaatgccattactttgcctgtatgtggtcgggatgtgaagtttactcttgaagtgctccggggtgatagtgttgagaagacctctcgggtatggtcaggtaatgaacgtgaccaggagctgcttactgaggacgcactggatgatctcatcccttcttttctactgactggtcaacagacaccggcgttcggtcgaagagtatctggtgtcatagaaattgccgatgggagtcgccgtcgtaaagctgctgcacttaccgaaagtgattatcgtgttctggttggcgagctggatgatgagcagatggctgcattatccagattgggtaacgattatcgcccaacaagtgcttatgaacgtggtcagcgttatgcaagccgattgcagaatgaatttgctggaaatatttctgcgctggctgatgcggaaaatatttcacgtaagattattacccgctgtatcaacaccgccaaattgcctaaggggtatcctctagaccaaacggcggacagaaccctcagctgcaggtctgttggagtttgctggaggtccactccagaccctgtttgcctgggtaccagcaggggtggctgcagaacagcagattttcatgaaccgcgaatgctgctgtctgatcgttcctctgggagttttgtctcagaggagtacctggccgttcaggcaccgtgtatgaaatctaacaatgcgctcatcgtcatcctcggcaccgtcaccctggatgctgtaggcataggcttggttatgccggtactgccgggcctcttgcgggatatcgtccattccgacagcatcgccagtcactatggcgtgctgctagcgctatatgcgttgatgcaatttctatgcgcacccgttctcggagcactgtccgaccgctttggccgccgcccagtctgctggggttcctctagactcaacgggattctgccacgaaaagaaaaggtccatcagtctattcaacctgtatataggtcagttcagcgaacatatccagaaaacctgtcaagaatggctatttatgtgaggcaaaagattggttga

SEQ ID NO: 115402 - DNA, 1185 bp, Homo sapiens
atggctcttactgagctaaaagcaaggggtcatcaggcctgcattttttctagtggctctgtggaagaatttgtgttcttgcctttcccatcttttgggggcacaccacagtccttgcgtttccatcttccaagccataaatggaaaatgaacttaaatacaggtcaattgagattatccagtattgtgtccggagttggtgggttcttggtcttgctgacttcaagaatgaagccgcagaccttcatgatgagtgttacagttcttaaagatggagtgaagctgcagaccttcgcggtgagtgttacagctcttaaaggtagcgcgtctggagttgttcgttcattccggtgggttcgtggtctcgctggcttcaggagtgaagctgcagacctttacggaccctcagctgcaggtctgttggagtttgctagaggtccaatccagaccctgtttgcctgggtaccagcagcagtggctgcagaacagcggattttcgtgaaccgcgaatgctgctgtctcatggttcccctggaagttttgtctcagaggagtacccggccgtgtgagcccacttgctggccggggcttgacattattccttcctgtctggctctgcaccgtattgaaactgagttaatgggcaaatttgatgaaggtaaactgcccaccgatccacacctgatgctccgactggccattgaaactgttgctcatgactatgatgtcatagttattgacagcgcgcctaacctgggtatcggcacgattaatgtcgtatgtgctgctgatgtgctgattgttcccacgcctgctgagttgtttgactacacctccgcactgcagtttttcgatatgcttcgtgatctgctcaagaacgttgatcttaaagggttcgagcctgatgtacgtattttgcttaccaaatacagcaatagtaatggctctcagtccccgtggatggaggagcaaattcgggatgcctggggaagcatggttctaaaaaatgttgtacgtgaaacggatgaagttggtaaaggtcagatccggatgagaactgtttttgaacaggccattgatcaacgctcttcaactggtgcctggagaaatgctctttctatttgggaacctgtctgcaatgaaattttcgatcgtctgattaaaccacgctgggagattagataa

SEQ ID NO: 115403 - DNA, 819 bp, Homo sapiens
ctgtggttctttaagcacttctctacaaagtttctgaatgcagatctccatcttacagtctgtttcctggagaactggacctatgagaatagagaagggaaaggaagagaagggaaaataggaccctcagctgcagtactgttggagtttgctagaggtccactccagaccctgtttgcctgggtaccagcagtggtggctgcagaacagcggattttcgtgaaccgcgaatgctgctgtcggattgttcctctggaagttttgtctcagaggagtacccggccgtacaaaggccataaataccttgtattcgaagccaacacgggaacagaaaacggataccaaggcgaagaatctttatttaacaaagcgtactacggcggcggcacgaacttcttccgtaaagaaagccagaagcttcagcagagcgctaaaaaacgcgatgctgagttagcgaacggcgccctcggtatcatagagttaaataatgattacacattgaaaaaagtaatgaagccgctgatcacttcaaacacggtaactgatgaaatcgagcgcgcgaatgttttcaaaatgaacggcaaatggtacttgttcactgattcacgcggttcaaaaatgacgatcgatggtattaactcaaacgatatttacatgcttggttatgtatcaaactctttaaccggcccttacaagccgctgaacaaaacagggcttgtgctgcaaatgggtcttgatccaaacgatgtgacattcacttactctcacttcgcagtgccgcaaccaaaggcaacaatgtggttatcacaagctacatga

SEQ ID NO: 115404 - DNA, 5955 bp, Homo sapiens
atggaaaaaagaaaatcagcattaaacaaagttttggaatctttgtgcatacatcaccagcaacaagttttggctatgttgaaatttctagtccaagagcagaatgctgcttctctttgctgttgtaatacatcatgtgttgtgtcttcagaatctcaaaagcccttaatcgaagatgatttatgtggtctgttctgtagttgtgaatataggctggcagaaagaggttgtttacaaaacgaaaaacaaagccctggtttagaacctctgccagtctgtattaaagatttacattgtttatcttgccaaactgtaactgttgaacacgttaagccagtagtgaatagaggaattgcagacagttataattctcacaggtgctgttctggactgttaccaaacattcactctacaaaatcagcctttcgtagtcctcttttgtcaaaggaagtatgtgatctttcagtcactcttaaagatgcctgtagatctcgaagtccctcacccccaccattatcacctatagaaactgaaggatttgaaaaattgaaagacgtcatctcagagatttcagccttagaaaataacaaacttgaagcaaacattaaccagcctccatctctcacaccagcagaaatcagcagcaataagagtgatcatcaagataaaatacttaaaactaaaaaatccagtaactcttattctttactctcaaatgacagcaataattctactacaaatcatgaaaaaggtgaaactgctgtaatttttcaagatttaatggatcgcattaatgaaaaactaaaatcaatagaaaccacggatatgacaagccttgtaaaattatctagcagtgattataatacatataatgatttaaaattgggagatttcataacatctctcttgcataatgcaaaagccagtgattatagttttatggaattattgagtcaacatgataaaaaggtagaaaataaaattattcagacaagatttcgaaagcgtcaagaaactttatttgcaatgcgcaactcctctgattcacccatgtttagaaggcagtctttacagataaaaagagaacttgctagtcttgatgaaaattttacaagaaaaaaatacaccgaaaaaagttcaaggaaattgacacaaaacaatgagatatcttcatcagacaaaggagaattctatcatgaccaagggccttctttacaaaattctaaaagacttcaaggtaaaaatcatgctgaaacatcattttcaccaaattatgcattacagtcactgcaactacctcttcatagttcagaaactaacttgtcttttaatgaattttcagaaagctttaaaacaacttcccctgagaaaatgagcataagaaagccacaggagaaatctgcagatggaaaacaatttttgcaaaatgataggaaaaatccaaagttaggtaatactcaaactcttttgagaaatgatgtttctggacttttgagcagaactaaacgaaatattgtgcctccagggtggtattctgtatatgtaacaaataattatgtttttaaaaaatcccctaaagccaaaaaagtatccgaatccacaacaaaaaacgatccagtgaaaaatattcacattgaaagctcacacaatatagacctaaacaaaattgcaatgaattctaatttacaagtggttgtgaagcgtttggaagatacaataagtatagccaaaaaatcctggaataatcagccattatcagaaggatataaagcatccaagaaattgatagaaattgatggtaaagaccaacatgctgacagaaatatgactcttactctaaatagaatgacatgcaaagaacagagcttatcaaaatctgtggtagcatccggcaatattatcaatagtcactgcatgcctacagtggatttgaataacaaaagacttgaaaatctgaaaaagtcatctattttagatatgggtcgcttgatttccagtgttgaaaatgtaccagcaaaatatgaaggtactgaaagttcatctgtttccaactattctagtcctatcaaactcatgtttttatctgaggttaaaagtagtgaaggggtcaaatatactttaacttcagttggcacttcccattcaaatgttgttctcccttctgaaaaacctacaacccatcacgtaactgaagaaaaaacagaaacaaatgaggatatctcaaatgcgaactctgaaaattatcactccagtcattatgatactgatacttttcaaagagaactaaacaaattcagtcatgcaaaagaaactgcaggatcctctacaatgtttataggtgatataaatagtgataagccacaagaagaacctaaggacaattcaagcagtgctactgatccatcttttaaaagaaaaccaggtagaccaaaaaaaataggtccccaagttgtgaaacagattaagcgaccaattggaagaccaccaaagcctaaaattgatcaaacaaacatcactgtttgccagaatgagccctttagtgctggaaggaaaagcccagaatgtctcatatcagaagtaaaagaaggtatttataaaaagagtattacagtaactgttatttacggaaggtcaagaagaactaaaaggcatgtttctgaaggaagggtaaacataagcaaccttatgtctttaaacaataatgctggtgattttccaactgaatataatagtcccagaaatattagtgaagacaaaattgacttgggtgaaagaataagtgctgtagcaagcttgactactgaaagtgagatcttggggtctggctttgaatatgtgagacccatcaagaacaaatctgtgatacctcagccttccaagaacattattcgaccaaatcagaagcctttggcaataagtaggaagcctggtagaccggcaaaagtgaaaatctctggcatatctgtgactattaatagaacttcacctcaggaaagagaagtaagtattagcagctgcttgcctcctttagaacaggataatacgtcaggaaaaaatctgcctgaagaaaagtatgaccaacagtgcactcaaatggataaaataaggcacactgaagctgatatatttaaaaatggatcaaaacgtatgattgctactgtacctttgagacattctattagggatagaaaaccatctctgcatttcttacattcattagcatcttctagctcacttatttatagaaacgctctgctccataaatcatataaactgcatttgcagaaaaataaaagtcagaaggaaaaacataggcactcaaagatgaaaatagcttacaaagataccccaagaaacagactttcgcggaatgcaaaaaagtgtttggaagataataaattagtacctatttctgaagtatccttggatcctataatttcatcaaaccctttgctcaggtggtgggctacttctgcttcaaatgattccttattagaggaattaaacaatagatttgagcaaataacaaatgcttgggtgcaagtaagtggagatgaagctgaaaattgtattcataaaaaaagagaacacattgaaaatgatcatttcaaagtagcaagccctttggaaacttgtcttttagaacttgaagtttcacctgtaaaaatgctttttcagaaaaagtatgatttgaatgaactctgtacttggtttatgcaaacaacagaaacacagtctctttcactagttagaaaagcaaatgcccgaaaccctttggaagtaataaataccaggggaatcaaattagggaccaaatattctgactttaatgccagccccttcagaaagcactttaaaaaatttgcactctcttctccttcaaaatcagcagagaaattgcatatactgcataaagtggctaactctccactcttaaatgtgaaaagtaatttagcaatagctagattaaaaaggactgagtttaagaggttgcatcatgaaaggtggaaaagagagggaaagctgcacaaccatggaacagttgactggaactctaaaaggagaaacttaagatttttctgccagaaccaatttttaaataagactgagggagaaacaaatgctgacatcccactccaaggaaaaagcatagtagataatcagtgtgttttgccacctgagatcaggggtgacttgcagcagagggtagtaatgcctgacttcaaaatacatgctagttttgagaataaatttaagtcagaagcaaaagagaatggaacaaattgcagccaaaaagactttcaaaagggaccaagactagaaaatgtatgtcctaatagttggaggtcaaaaaccttaaaagactgtagaatatttttgaggaagctcaactgtcttgaacacagaaatacttttaagctaaatacaatcatttactctcctgaatctactgacagtggaaatactcatcagactcatatggaagaatcaaagcgctttactttaagatctcattctgctaggcaaaattcttttaaaaagcaatctaaagaaatagaaaatgctaacacaaataatccttcagctgatgaatttgctgaccatcttggcaatagtaaattaagcaaatgtgttaactttgacaagaatcctgatagttttgaagttcttagcaatttgaacaaaagaaaaagaccaccatggaagatcacagaaatgtcaacaaaaagacataaacgacagtcttgcaacagtggacaaatggcaaactatttttccaaatccctagatttatggaactttgaacttgagaaagatgatttagggtatatggcggaagaaatttctaagcagcaaagcattcaagaggaaacttgggtgctgttaaaggcatttagttttataaaggaagcagagcataaaagttcggaaaatttgcagcctgacaatttgatagaaaagaaagacccattttctgaggagaaattcaagctggctacagaaatttgcataactaatgaggagccacacgttaatctccaagccaacagggaaaatgtctcaaaggcatggctgttgattcagagggtggaagccccagtgccttggcggcttccacatgctgttgagcctgtgggtgcacagaagtcaagaattgaggattgggaacctctgcctagatttcagaagatgtgtggaaacgcctggatgcccaggcaaaagattgctgcaggggcagggccctcatggagaacctctgctagggcagtgcagaagggaaatgtggagtcacagcccccacacagagtccctactggggcactgcctagcggaactgtgagaagagggccatcgtcctccagaccccagaatggtagatccaccaaaagcttgcaccatacacctggaaaagcctcagacactcaaagccatcccatgaaagcagccaggacaggaccctcagctgcaggtctgttggagtttgctagaggtccactccagaccctgtttgcctgggtaacagcagcggtggctgcagaacagcagattttcgtgaaccgcgaatgctgctgtctgattgttcctctggaagttttgtctcagaggagtacccggccgtgtgagaaaaaacaaccagagtatcctgtggatgccgcatgctcctctgatgagctggccataagtttaattcctgatgtttttccagcctcatcagagagcttagtagacaagcataaggaaaagagaaagggctgtattccagttccaggcagcatgctacaagtgaaaactgatgagaaactgaatgtgtctgatgagaatacagcaagttgccctttgagccccattaagatgtgccttaatcgtcccattgaatggaatctgaatttgacaacagcatctctaacgagctgtacagttcataaccaaaatctcaaaagcgaagagaaatag

SEQ ID NO: 115405 - DNA, 654 bp, Homo sapiens
atggggcaccagcgtggacacagtaagtcacacagtaaggctttgtcatcatccaggaggaagaggatgtcagtgctggtggaggagatggaaggaagtggacatggatgggatatggagagatcaggggaagatcagttcattaacagaggaacaagtattacacggaacagtaaaaatcaagatgtttgtcatatcgcatttggatccaaagttcttgggccacctccactctctggcagaaggaataacatgaagatatccagcgaggaatatgactggcgaaactatcagccaagccagatgagtgaatccgagttacagatgctagcaagcctacggtggcaacaaaatgaagaactggaggatgctgggacctcccatggcctgagtgcctcccaggtggacaactgtaatgtcagcataagtaccagcagtgacgacacaaccacctggaactcctgcctgccacccttaaagcacttcagtatggcccattgccctcactatggcccagcagaggagttggaacaggtcttagtcttcctgtttttcagcggtggctgcagaacagcggattttcatgaaccacgaatgctgctgtctgatcgttcctctggaagttttatctcagaggagtacccgcccgtgtga

SEQ ID NO: 115406 - DNA, 1299 bp, Homo sapiens
atggccgaacaggaacagctccggtctacagctcccagcgtgactgaagcagaagacaggggcagactgacacctcacacggccgggtactcctctgagacaaaacttccagaggaacgatcagacagcagcattcgcggttcacgaaaatctgctggtctgcagccaccgctgctccaggcaaacagggtctggagtggacctctggcaaactccaacagacctgcagctgaggcaccacaccacacctattccaaaattgaccacatacttggaagtaaagctctcctcagcaaatgtaaaagaacagaaattacaacaaactgtctctcagagcacagtgcaatcaaactagaactcaggattaagaaactcactcaaaaccactcaactacatggaaactgaacaacctgctcctgaatgactactgggtacataatgaaatgaaggcagaaataaagatgttctttgaaaccaacgagaacaaagatacaacataccagaatctctgggacacattcaaagcagtgtgtagagggaaatttatagcactaaatgcccacaagagaaagcaggaaagatccaaaattgacaccctaacatcacaattaaaagaactagaaaagctagagcaaacacattcaaaagctagcagaaggcaagaaataactaaaatcagagcagaactgaagaaaatagagacacaaaaaacccttcaaaaaattaatgaatccaggagctggttttttgaaaggatcaacaaaattgatagaccgctagcaagactaataaagaagaaaagagagaagaatcaaatagacgcaataaaaaatgataaaggggatatcaccaccgatcccacagaaatacaaactaccatgagagaatactacaaacacctctacgcaaataaactagaaaatctagaagaaatggataaattcctggacacatacaccctcccaagactaaaccaggaagaagttgaaactccaaatagaccaataacaggctctgaaattgtggcaataatcaatagcttaccaaccaaaaagagtccaggaccagatggattcacagccgaattctaccagaggtacaaggaggaactggtaccattccttctgaaactattccaatcaacagaaaaagagggaatcctccctaactcattttatgaggccagcatcatcctgataccaaagactggcagagacacaaccaaaaaagagaattttagaccaatatccttgatgaacattgatgcaaaaatcctcaataaaatactggcaaactga

SEQ ID NO: 115407 - DNA, 1872 bp, Homo sapiens
ctagcggtctatcaattttgttgatcctttcaaaaaaccagctcctggattaattttttgaagggttttttgtgtctctatttccttcagttctgctctgattttagttatttcttgccttctgctagcttttgaatgtgtttgctcttgcttttctagttcttttaattgtgatgttagggtgtcaattttggatctttcctgctttgtcttgtgggcatttagtgctataaatttccctctacacactgctttgaatgtgtcccagagattctggtatgttgtgtctttgttctcgttggtttcaaagaacatctttatttctgccttcatttcattatgtacacagtagtaattcaggagcaggttgttcagtttccatgtagttgagcggttttgagtgagtttcttaatcctgagttctagtttgattgcactgtggtctgagagacagtttgttataatttctgatcttttacatttgctgatgagagctttacttccaactaagcggtcaattttggaataggtgtggttgttcttatttttggcaagcaccacccagtaggggcagactgacacctcacacagccgggtactcctctgagacaaaacttccagaggaacgatcagacagcagcattcgcggttcatgaaaaaccactgttctgcagacaccgctgctgatacccaggcaaacagggtctggagtggacctctagcaaactccaacagacctgcagctgagggtcctgtgtgttagaaggaaactaacaaacagaaaggacatccacaccaaaaacccatctgtacatcaccatcatcaaagaccaaaagtagataaaaccaccaagatggggaaaaaacacgaccggaaaaactggaaactctaaaaagtagagcacctgtcctcctccaaaggaatgcagttcctcaacagcaatggaacaaagctggacggagaatgactttgacgagctgagagaagcaggcttcagacgatcaaactactccgagctacaggaagaaattcaaatcaaaggcaaagaagttaaaaactttgaaaaaaatttagacgaatgtataactagaataaccaatacagagaagtgcttaaaggagctgatggagctgaaagccaaggctcgagaactacgtgaggaatgcagaagcctcaggagccgatgcgatcaactgaaagaaagggtatcagtgatggaagatgaaatgaatgaaatgaagcgagaagggaagtttagagaaaaaagaataaaaagaaatgaacaaagcctccaagaaatatgggactatgtgaaaagaccaaatctacatctgattggtgtacctgaaagtgatggggagaatggaaccaagttggaaaacactccgcaggatattatccagcagaacttccccaacctagcaaggcaggccaacattcaaattcaggaaatacagagaatgccacaaagatactcctcgagaagagcaactccaagacacataactgtcagattcaccaaagttgaaatgaaggaaaaaatgttaagggcagccagagagaaaggtcgggttacccacaaagggaagcccatcagactaacagtggatctcttggcagaaactctacaagccagaagagagtgggggccgatattcaacattcttaaagaaaagaattatcaacccagaacttcatatccagccaaactaaacttcataagtgaaggagaaataaaatcctttacagacaagcaaatgctgagagattttgtcacaaccaggcctgccctaaaagagctcctgaaggaagcactaaacatggaaaggaacaactggtaccagccactgcaaaatcatgccaaattgtaa

SEQ ID NO: 115408 - DNA, 942 bp, Homo sapiens
atgagaagtattggcaaggatgtggagaaaagggaacccgtgtacactgttggtgagaatggagactggtacagccatttcggaaaacaactgtttcgctggcggaatgtcggttacctaggtgacagctccacagccatggcgactgctccaggccccacagacgctcagggccgagccccggcctgtggatgccgatccctggccactctacccaccagagaagttccagggagaaaggaacgctgccaaccaaagaggggagactctgtgttgtctgggatgggcctgcgaggctctgcctattgctccatgcaacttaatgtaggctcaatggcgggtcacgctcgcgaagctcttgggactggccagcagtttgtgctctggcggaatgatgactcctcactgcctgagtatgtccattatgacaaaagttcccatggaaacagacctcagatcgccaaaaaccggtgtccccaggtaacaaagatgggacttgaaacctatcagagtgccaaagtgtatggaagaaggaattcaggaagagtgcaaattaagctagtcatcaaacagcctacacaaagttcaggctggctgcttcctttcctccatgaggaactactgaaagacttctgcacacatgagtataataccactcacagcatcgccagcctcagacctcgatgggtgacaatcacaagtgtacgctcctatcaaaccttcatacactcaaaattcgcctcctatgtcaagtacgctcctattaaaccttcatacagtcaaaactcgcctcctatgtcaattttctctgaagtgaaataccatcgcagcaagctgttactcccctgcacagagctgctgaaaactaatcatcgagcttcaaacgccaggtttggcaaactctggctacagaaaaccactaatcttgtgatggcattttag

SEQ ID NO: 115409 - DNA, 892 bp, Homo sapiens
tcaagggtcaggaagtgggacctgtgtgtgtaccaggagccctcctgagccaatgtctagacaggcttgtgtaccctgagaggctcctgcagtagggactagagccagggaaaccaggtctgccttctccttgagaacgtctttgaagttgagtccacatgtttagggttgactgcctgtacttcagcagagcttccttctgtccattccttcccaaggcctcagttttcactggtccagcgtggaagccacatctccactggggaaagtcagaaatgtacccacttgaccaggtcttcaagcttcacaatcaccttttcggaaacagcaatgacttcatcctcgccatggtcgctatttctgccctggggagtgtcttctgggaggaaataaagtttagagctggataaaagttgccggctggtcctctcttcccacaacagctggagctccgttatgcaaatcggatcctttggcgtacatcttacaaagataaagtcgccaaggcacaaaagtcttggtttgccttcaaggtggaattgaaaagccttgtagaaaatgtaaggtccgtgcaagccacacggtgaccctacccactggagtgagttgggctccatctcgacgttctcaagtgattgaacactcctatctctccaaacttgttggcttgaatggaatgcatcaggtcctggcagggaaacgcattctctgccttcagccggcgtaatgtctcaatataaagctgagctcttacgtcccttcgggcaccgaaatgattgaaaatatgtcttaatatttcgatagagcttcgattcacagttcctgaaaaaatatacctcggaatgtttgtgcgcctggacgcgtcggtcaactcgggaggtcgataccaata

SEQ ID NO: 115410 - DNA, 1605 bp, Homo sapiens
atgtgcagggatctaagtggtgtccttatgagcaatctcaagccaatgtctgaggtggaacagtttcatccaaaaacatcacccaatcttcgtggaaaacatgtttccacaaatctggtccctcagtgcaaaaagatctttgctgtgcaagatgataaactggtagcattgctgaccaagacttcgatcttctcagatgcaacaaagtccaggagacaagtcgataaagtagaaggggcagaaaggaaggcagtagcctacaccaaggcccgaaacataagactgaatggggtccctcagagctgcatttcattagtgagaggggcaccacaggaagggggatggctggaagccagtgagtggaaaaagaaggggacaaagacgacaaagaagaggaggccccaagggctttctacggactctaactctgcagggcgtgggggcagattatcaacttcaggcaatggaccacgcacaggattccacctctttctagcacctatcagtgttgcgcacatcataggcctcaacaaacagtgcacttcaactctaaagacgaaatcacggccagggcgacagtcattctctaccgaagccccagaaggtcggcactttgccacgacagagtactgggttcatgtttctttccgaggcggccaagagctctcagcccactggcagtggcgagatgacggacacccagcagtccaatgggcgtcgaacgcgtctaggcttggtggacttccaggggttccccgcctgccgctagggctcgggccgaagcgccgctcagcgccagctgccgctccccgggctccactttcactttcggtcctgggggagctaggcggcggcagtggtggtggcggcggcgcaagggtgagggcggccccagaacccaggtacagcgcgctcgagccgcggatattagggccaccctcaggaagggagctggagagaggctatcggaagaaccctgcaggtcctggaacacccccgtcaggagcaaattgcactgctggctccgagcccctccttgtcgggctcccgtacacagttgtcattcactatgctgcaatctttcggagactttccacggattttacaaaagcacctacagaaccaggaaggggaactgaggccccacctccaacactggggattcaatttgacatgagagttggtggggatgcacatccaaatcatatcactgcaaatactgtattttccatccacgcacaggaggacttgtgtccttcagccatgatgttcaagggccaactgtatagcttagggtggggtcctcgcagcgaacctgccctcttctgcccagaatttcctcctcctgtccctatcattaataatatctccaaatgcctgggttgtcgaagggttaccaaggctgccaatgtgcaggtcccagtccagccagagcttcagctgggtacctctgaggtggaacagattcctgagatggaccaggaatatatcgacacggtccacagggccccgcatgatcattttccagccattttacctgtctcatttcctccttcactccctgctcagagggaaggagcaacagatacactggacttctgttag

SEQ ID NO: 115411 - DNA, 831 bp, Homo sapiens
atggaacttgtgttttgctttccatatggaattactggcagcaacagcttaatgagcatcgcccctgccccaagacgggatccagaggactctgtgaaggtggcaggttcaagcatccccagagaagatctagaaattccaactcgttatgagctgacagaaaggctgatgtgctgcggaaggggttggtaccgggaccttggatcagaggctttgcagggttgggtccatgaggggtccaaagagaaacagttatgtctcaacgaggatgcagtgcatgagtggggcttgtcccctacccgcggctcgagcgcgctgtacctggggttctggggccgccctcacccttgcgccgccgccaccaccactgccgccggcctagctcccccaggaccgaaagtgaaagtggagcccggggagcggcaggctggcgctgagcggcgcttcggcccgagccctagcggcaggcggggaagcccctggctaaggcgggagctggggaaaggcgttgcgagggttaggggcatgcaggaaagggccggtgctcaagttggggaccgaagccaggcaggcgctgacaagtccaccaagcctagacgcgttcgacgcccattggactcgctgggtgtccgtcatctcgccactgccaaacaattaaagctgaataaaatggccaaaaagaccatctttaaacagttgaggctaaatgaggtaacaagtcaagaaaacacaaacattaaaacaccaaatgctacaagtttattaccgaaaatgggtcccgatccagaccccaagagagggttcttggattttgcgcaagaaagaatttga

SEQ ID NO: 115412 - DNA, 992 bp, Homo sapiens
ccgcggagacagccagcagttctgtggagcagcggtggccggctaggatgggcttctctggggtctggctctgccccttttcttcttctgctgggaggttgggtctctgggagctcgtggctggtctgcgctgcacgtgtcccgttagctccaccttacaggtgcggaaagcaggcttggagctgagagacttggccagggtcacagggcagagagcagttctccaactcagggtcccaagtccacacgctttcctctccaccagattgaagattgtaccaggagagccgcagtgttccagagctactgagggggctggctgggatttgctgtattcgagaagacccccttggacccgagaggctggggcttggggagcatgaggaggtttcacagcagaaaggacaccccggggtccttgtgggctttggaatataaccctttcatcttctccgctggtcctcaccacgttggcaaggcaggtattgtgaccctgttttctcaggtgaggacatggaggtgttctccatttgcaggtgaaaatggaggtttcctcctcctgcggctgagtgtggcttgcccggaagacctcactgaccccagagtggcagaaaggctgatgcagcagctgaagtgggcactttccgggccaggggagtagaggaaggggcgaggttcgcaggggctgcagggaagacccgcaggacacagaagagcagctaccgcacttgcaagggagtctcgtttcttacggagaaatgggaactagaatctaaggatctctgcctggctttgcttctgcctgccttctccgagttcttcatttccttctctgcaatgtaaacatgtgactcctagagcccccagtttcttctggtccttggaagcttggccttctggcctctgaggcaaaggtcagtgatactgatgggagggtaggtcggactcttggttgcaagtggcagaaacccaagtcagggcagtttatgcaa

SEQ ID NO: 115413 - DNA, 318 bp, Homo sapiens
atgcatacagaagaatgttcactgacagagcaggagcatcgccatcttggacaagcccctcattctaaagttcaccttaataaaaaaccatctaaatccaaagagcatcagcttagtggacagtgtcttactctgtctccccggctggagtacagtagcataatcatagctctctgcagcctcaaactgctggccttaagtgattctcccattgcagtccccagagtagctagaccttcagagggctttcctgatggtctaaaaagccctctgaaagaattacataaggaatatggagaaggaggagtaacaatatga

SEQ ID NO: 115414 - DNA, 484 bp, Homo sapiens
  misc_feature (1)...(484): n = a,t,c or g
ggagcgggccgngnaaaatgatgccatgcancatacgaagngcggnggaantccgatgatgtctgaggatgggagaagcccaagcaaacaaacaatttggatagaagaatgaggataagggtggaaaggctgagcagaaaggtactctgaaacatggtggcctgagagaagaagagctggagaaaatgaaagaagagcgtgaaaggattggagcaaaacatcaggagctaagggaaaagcaggcaagaggtcttcttgattatgctactggtgcaattggatcagtgtatgatatggatgatgatgaaatggaccccaattatgccagagtgaaccactttcgggaaccatgcacatcagcaaatgtctttagatctccatctccccctcgagctggaccatttggttaccctcgggatggccatccactgtctccagaaagagaccacttagagggtctctatgccaaggtcaacaagccatt

SEQ ID NO: 115415 - DNA, 321 bp, Homo sapiens
atgcctagtttatttggaaagaagaaagaggataagggtggaaaggctgagcagaaaggtactctgaaacatggtggcctgagagaagaagagctggagaaaatgaaagaagagcgtgaaaggctagagccttccttgcaagatcaatccagcccccttaacctttcactgaaacacagaaatttttctgaatctgctctgcatttagcagttgtaggcaccctgcagatggggcctcctctggaagctggccttctccgggaacccccagtggaggcctttattgtgtcccacccactttgtgtgcacttgaaaatctaa

SEQ ID NO: 115416 - DNA, 720 bp, Homo sapiens
atgcctagtttatttggaaagaagaaagaggataagggtggaaaggctgagcagaaaggtactctgaaacatggtggcctgagagaagaagagctggagaaaatgaaagaagagcgtgaaagatttacctcaccaattatttcaaaggatggacagagaagtaaagccttgccgagaaaggtagaagtttatgtagcttacaataccccagacattcaacagaaggggttgatcctcattcttttccagataatgataagcaccgagggcctgtcgtttagttttcagaaatgcccacttcactctgttctcaacaaagcagtcagagagccctttaccatgattggagcaaaacatcaggagctaagggaaaagcaggcaagaggtcttcttgattatgctactggtgcaattggatcagtgtatgatatggatgatgatgaaatggaccccaattatgccagagtgaaccactttcgggaaccatgcacatcagcaaatgtctttagatctccatctccccctcgagctggaccatttggttaccctcgggatggccatccactgtctccagaaagagaccacttagagggtctctatgccaaggtcaacaagccataccatccactggttccagctgacagggagaaaggagaaaggggcaaatggccaatggaatgtgctagtcaagttcatccctttgaaaagattccccagtag

SEQ ID NO: 115417 - DNA, 939 bp, Homo sapiens
atggcgctcaggcttgtaatcccagcactttgggaggctgagctggtgggggcactgatgctggccgccctctcccacctgcaccgatttctgctctctatgtgggttctaccacctggcaccttcacagacgccttccccgggctgctgtttcattttcccagaagaagccaaaaagactgcctccttggcctttccaagtctgaccagcgggccatggcttgttactttgggatccttttaatagtctctgccacactgtgttttggaatgaattactacttggatgaatttgcaaatctgttagacgaacttctgatgaagattaatggtttgtccgacagcctacaactcccccttctggaaaaaacatccaacaacacaggggaggcaaggacagaagagagtcccttagtggacatttctagttaccaagctgctgagatggtgatgatggccaggacactggccacctgcctgcagcatgcccagggcctgggctttgaggcttgtcttcccatcctgagtgctccacatgctttatctcactggaccctcacaacatgcctttggcagctaggctttatgagtgcggttctcatcctcaagtacacccgggcactccttgctcaaggccagttctcggggccatttgtgattgacaaaggagtgaggcttgagctcatcggtctcatatccagagtctgggaagtctctgagcaagaaaactcgaaggaggaagtctatcgacatgaagaaggaattacagtcatctcagatttattgttgggcagacagtggcaacagggacacaagggcatctgccttcagctcatgttgcccttctctcgtgggaaacacagaaccagcggagcctttttaatgttcagtcttgagctgttcacagtggcccagcttgttccaatttccgggtcctga

SEQ ID NO: 115418 - DNA, 576 bp, Homo sapiens
atggagccagcgtctgcttcctgtgagggcttcaggctgcctccactcatggtggaagaggaagaggagccgcccctgggaagcctggcacccccgacggacagcaaagccacggagaaggagaagaagccacccatggccaccaccaagggaggaagaggaaaagggaaaggcaagaagaaagggaaagtgaaagaggaagtggaggaagaaactgacccccggaagatagagctgctgaactgggtgaatgctttggagcaagcgatgctagatgctttagtcttagatcgtgtcgactttgtgaagctcctgattgaaaacggagtgaacatgcaacactttctgaccattccgaggctggaggagctttataacacaagcaaccttccgcctgattaccacatcagcctcatagacatcgggctcgtgctggagtacctcatgggaggagcctaccgctgcaactacactcggaaaaactttcggaccctttacaacaacttgtttggaccaaagagggcatatgacaaccttcccgatgtccgtgtcatcagcttgggctgctgtgactaa

SEQ ID NO: 115419 - DNA, 268 bp, Homo sapiens
atggagccagcgtctgcttcctgtgagggcttcaggctgcctccactcatggtggaagaggaagaggagccggaagcccatattggctatggtggtattacagaacactggacagtgagtgaaagcccactgtggaccaatggccatgggttccggcgctctggagatgtcggagatccaggcttttcctaaagagtcaggattggaaggcggactcccaccgtttgctgagctccacatgacaacagcagacgacaggccgcactga

SEQ ID NO: 115420 - DNA, 623 bp, Homo sapiens
ttttgaacctcgagatccgtagtgcagtgtggcggaattccgctggcgccggccgaatccggcccgggaaccacctccagggacatgacctttggctctaaaaagaagactccatttttcatgataaaatggcagtggtgaaaacccccagcagaggactaaagaatgctaaagaaccctttaataatgcatcaccccatctcttgaagaacctagtggaggagccgaaaaaaagaaaagtagtacctaatcacctcctagaatcaaaggtttatgcaaaacttgtgaataataaggtcatacaggcaagacctggcataatacattttggaggctatcaagtagaaaaacaacaccaacagattctgcatctggtcaatgtttccaatgaagacacacgtgttcatattttacccccgcaaaccaaatactttgagatcaattatgtaagaaagtccggggcttgtcccaacaagatgccacctgtcttccaggaacaccacctggtccctggcttgtccctcacggtcaccgttacattttctccagatgagtggcgatactattatgactgcatccgtgttcactgtaaggggcagtttgtcattggattatgggcctag

SEQ ID NO: 115421 - DNA, 825 bp, Homo sapiens
  misc_feature (1)...(825): n = a,t,c or g
tgtctgacagctccagcacctcaatgaatgtgtactcgctgagtgtggaccctaacacctggcagactctgctccatgagaggcacctgcggcagccagaacacaaagtcctgcagcagctgcgcagccgcggggacaacgtgtacgtggtgactgaggtgctgcagacacagaaggaggtggaagtcacgcgcacccacaagcgggagggctcgggccggttttccctgcccggagccacgtgcttgcagggtgagggccagggccatctgagccagaagaagacggtcaccatcccctcaggcagcaccctcgcattccgggtggcccagctggttattgactctgacttggacgtccttctcttcccggataagaagcagaggaccttccagccacccgcgacaggccacaagcgttccacgagcagaaggcgcncttggccacagctgccctctggcctctccatgatgaggtgcctccacaacttcctgacagatggggtccctgcggagggggcgttcactgaagacttccagggcctacgggcagtaggtggagaccatctccaaggaactggagcttttggacagagagctgtgccagctgctgctggagggcctggagggggtgctgcgggaccagctggccctgcgagccttggaggaggcgctggagcagggccagagccttgggccggtggagcccctggacggtccagcaggtgctgtcctggagtgcctggtgttgtctccggaatgctggtgccggaactcgctatccctgttgtctacctgctgggggcactgaccagtgagcggccgc

SEQ ID NO: 115422 - DNA, 1840 bp, Homo sapiens
atggcgaaggatcgtgtcgctatggcgaaggactgcgctttggcgaaggattgcgctttggcgaaggactgcgctatggcgaaggatgatgccgctgtgacgacagatcgtgcgctgtggcgaaggactggccgctgtgacgacggacttgccgctatgatgaaggatgctgccgtgaactttggtgcacaggcatctgtttgcgtctttgctttcaattcctctctgggcacctccagctcctgctcgccggacggctcccagggagagcagacgcgccagacgcgccaccctcggggcgccgacggtcacggtgagctgcgccccgccccctcccccggcctggctggagctcccgagtggggccggccgctggctcccgggagcatggggtcggcctttgagcgggtagtccggagagtggtccaggagctggaccatggtggggagttcatccctgtgaccagcctgcagagctccactggcttccagccctactgcctggtggttaggaagccctcaagctcatggttctggaaaccccgttataagtgtgtcaacctgtctatcaaggacatcctgggagccggatgccgcggaaccaggactggatcctaaggaccggactgagccccaggctgctgtgaggacaaggggtggtgtgaacacgggggcccaggtgagggggccgcacctcgagtctggacttggagtccccgagtccacctttcctcatggggtcccgtccccgtggggagcgcacggagaggctgccggtgccccgcacccacagacctctggagggcccctctgcaccacctcccccggtggcgtggggctgtcaggggagggaagacgccttcaggggctgcggccagcgagctttgctgctcctcggacacaggcacctgcggcaccagaacacaaagtcctgcagcagctgcgcaccgtcggggacaacgtgtacgtggtgactgaggtgctgcagacacagaaggaggtggaagtcacgcgcacccacaagcgggagggctcgggccggttttccctgcccggagccacgtgcttgcaggtgtgtagccagccccgggccacgcctggcccccacgtgggcacgcggcggcgggtgacggaggcggcgggctgggctccgcaaggcccctcggagcagctcccagccctgcgcttggctgcggagcgaagtcacctggcggcgggctgccccggcacccggcccgcacccgcaccccacggcccggtgccagggcccagcccgaggcccatctccatgcctcagggtgagggccaggggcatctgagccagaagaagacggtcaccatcccctcaggcagcaccctcgcattccgggtggcccagctggttattgactctgacttggacgtccttctcttcccggataagaagcagaggaccttccagccacccgcgacaggccacaagcgttccacgagcgaaggcgcctggccacagctgccctctggcctctccatgatgaggtgcctccacaacttcctgacagtgattgcaagctgttcagattttgtcaagcttagtgttataagaaactttaaaaagaagtgcaatcctcgcaaagttggtggaccaaagcatttcggaaagcagctggtaaagatcttacagtggataattcatttgaatttgcaagacgtagaatctgaaaaacctatcaaataccagcgagagctatggaataaatctatggatgcaatgaagagagttgaagagatcaaacagaaaagccaagctaaatttataatgaacagatggaagaaaaataaagagctacagaaagtttag

SEQ ID NO: 115423 - DNA, 1312 bp, Homo sapiens
cgtctctatttaataaataaaaaggatatttaaaaaaataataagcataatggtgtagacctggtaaatcttttgactatgtaacgtttataacccacatgccatgtattttactacattcataaaggggcttggggatttatccagaatgacataccattcatttcaaaataacatacatcttttctctagacagctaagaatatttatagttgttaaagcaaaaagaaattcttggtaacaagttcttggtgtatggattgctttggctttgatggaaatatctactttctccaaagattggtccctgggcctcaaagcatttaccccaagaaataactgctatgacttaggtcttcaaggcagcttccagtgctcgagctttctctgtgatgttcttctgaaaaggcatcataaaatcgtcgaagtccacctcatgtgtaaacctctctcgccgtagttccctcttcctgatcagctctgctgttgtggcttcaggactccaaatccttctgtactttctttccctctgatgtggttggtacaccataaattgatgacagcagttccgggagggagaaaacaaggaacataaattcagctcctttggtgaaagggtgacattgcatatggtttcaaatcgcctggagacgcaagaaatctgctctgagtttgcaaatttgattctgaggactccaggcacgggagctgtgtcagattcaatgtatctgtcatcatgggggggctccttcttcaggaagcagggcctggcctcccattgttgggtggtttttctttgtgagaaagtgcctccttctaccgaacctatatcccacctgccccgaacagctccctcaccagccagtggtactcccttccctttgcctgtcccaaaacctctgccattagagccatcctttgatgtctggcgcctgtgggggtggtgtgggggaggctgtacattttcttggagtcttcccataccggtacacaggcaggcagagccctgggggtatttttcagcctcctccagctggatttgaaaggaggccatggaatctagtttcactgatctgaaccatgagccgtgctgagcccgtcttcctggctgtgggaccgtcgtggggctcagggtcaatggggagcctccagacatcttcagggtaggcagagcaactctgcaacctggagctgcttcctggaggggggtgcagaaacagatggtaaaaacccagggtcctcggaccctgcaggtgtgcaagggcatggagctacacccatctcgggttactgcagtatgagctacacccat

SEQ ID NO: 115424 - DNA, 3213 bp, Homo sapiens
atggcgaagaagttaaaaactttgaaaaaaaaaatagatgaatggataactagaataatcaatgcagagaagtccttaaaggacctgatggagctgaaaaccatggcacgaggactacatgatgaatgcacaagcctcagtaaccgatgcaatcaactggaagaaagggtatcagcgatggaagacgaaatgaatgaaatgaagcgtgaagagaagtttagagaaaaaagaataaaaagaaacaaacaaagcctccaagaaatgtgggactatgtgaaaagaccaaatctacgtctcattggtgtacctgaaagtgacggggaggctggaaccaagttggaaaacattctgcaggatattatccaggagaagttctccaatctaggaaggcaggccaacattcaaattcaggaaatacagagaacaccacaaagatactcctcgagaagagcaactccaagacacataattgtcagattcaccaaagttgaaatgaaggaaaaaatgttaagggcagccagagagaaaggtggggttacccacaaagggaagcccatcagactaacagctgatctcttggcagaaactctacaagccagaagagagtgggggccaatattcaacattcttaaagaaaagaattttcaatacagaatttcatatccagccaaactaagcttcataagtgaaggagaaataaaatactttacagacaagcaaatgctgagagattttgtcaccaccaggcctgccctaaaagagctcctgaaggaagcactaaacatggaaaggaacaactgtgcaatcaaactagaactcaggattaagaaactcactcaaaggcgctcaactacatggaaactgaacaacctgctcctgaatgactactgggtacataacgaaatgaaggcagaaataaagacgttctttgaaacaaacgagaacaaagacacaacataccagaatctgtgggacacattcaaagcagtgtgtagaggaatggccatactgcccaaggactggttttttgaaaagatcaacaaaattgatagaccactagcaagcctaataaagaagaaaagagagaagaatcaaatagatgcaataagaaatgacaaaggggatatcaccaccgatcccacagaaatacaaactaccatcagagaatgctataaacacctctacacaaataaactagaaaatctagaagaaatggataaattcctcgacacgtacactctcccaagtctaaaccaggaagaagttgaatctctgaatagaccaataacaggctctgaaattgaggcaataattaatagcttaccaaccagaaaaagtccagaaccagatggattcacagccgaattctaccagaggtacaatgaggagctggtaccattccttctgaaattattccaatcaacagaaaaagagggaatcctccctaactcattttatgaggccagcatcatcctgacaccaaagcctggcagagacataacaaaaaaagggaattttagaccaatatccttgatgaacattgatgcaaaaatcctcaataaaatactgacaaaccgaatccagcaacacatcaaaaagcttatccaccatgatcaagtgggcttcatccctgggatgcaaggctggttcaacgtacaaaaatcaataaacataatccagcatataaacagaaccaaagacaaaaaccacatgattatctcaatagatgcagaaaaggcctttgacaaaattcaacaacccttcatgctaaaaactctcaaccaattaggtattgatgggacatatctcaaaataataagagctatctgtgacaaacccacagccaatatcatactgaatggacaaaaactggaagcattccttttcaaaacgggcataagacagggatgccctctctcaccactcctattcaacatagtgttggaagttctggccagggcaatcaggcagaagaagggaataaagggcattcaattaggaaaagaggaagtcaaattgtccctgtttgcagatgacatgattgtatgtctagaaaaccccaaagtctcagcccaaaatctccttaaactgataagcaacttcagcaaagtctcaggatacaaaatcaatgtgcaaaaatcacaagcattcttttacaccaataacagacaaacagagagccaaatcatgagtgaactcccattcacaattgcttcaaagagaataaaatacctaggaatccaacttacaagggatgtgaaggacctcttcaaggagaactacaaaccactgctcaatgaaataaaagaggatacaaacaaatggaagaacattccatgctcatgggtaggaagaatcaatatcgtgaaaatggccatactgcccaaggtaatttatagattcaatgccatccccatcaagctaccaatgactttcttcacagaattggaaaaaactactttaaagttcatatggaaccaaaaaagagcccatattgccaagtcaattctaagccaaaagaacaaagctggaggaatcacgctacctgacttcaaactatactaccaggctacagtaaccaaaacagcacgggacatggatgaagctggaaaccatcattctcagcaaactatcacaaggacagaaaaccaaacaccacatgttctcactcacaggaagggaattggtgacatctgtctcagtgagcatctggtgacagccccagaacacacaggcactgagagggaccacatccttctgaatccctttggattgaagagcttgcctctgaaggccttgggagtcagaatcagcttggaagatttttatgaggtcagtgcatccctgggatggagcttccagaggaaggagcaggctgccatctttgctgttttgcaggcttcactgacgatacctccagaagtaggctttgaaaggtgggtagtgatgaacttagctgagctaaaggagcatgttgtaacccaatgcaaagaaaccaaaaatcatgataaaacaatacaggagctgatagccagaatagccaggttagagaagaacataaccaacctgatggtgctgaaaaacacagcaaaagaacttcacaatggaatcacagacataggaatccaacgagaaaataaagttacctctgaccggattcatggaagacagttatgccatgaatggggtggggtctggaaggatgttaactga

SEQ ID NO: 115425 - DNA, 525 bp, Homo sapiens
atgggagatttaagtaggcccatgctcaatgttgatgacatcaaagacatccctcctgaggaaatctcaactgcagacccctattatgcccccattcagcagaaagaagttagtacagttgttgccaacctccccaacagcacttgggttttcctgttgagaggggtctccttggactcgcggtacctgcagggtggtgtggggctggtttccccaacatctggcacccaacgtggggctccccataatctctacaaataatccagtgaataaacgccagagcgtggaaagtggaggacgactgacaaaggttgcccgagtacgttttcacttcaggctctacggaagagaatcagcttcctgtctgggtgcccacatgacatcttaagctgtgccatgagccataatccaaggaagaggaaaagacctcggtacatccctgcacccccagttcatcagatggctcagatgaacatctctgttgagcagatggaaaccagtataactcgccaagcaactccactg

SEQ ID NO: 115426 - DNA, 890 bp, Homo sapiens
ttgacacatgcacacatatgtttattgcagcactattcacaatagcaaagacttggaaccaactcaaatgtacaacaatgatagactggattaagaaaatgtggcacatatataccatggaatactatgcagccataaaaaatgatgagttcatgtcctttgtagggacatggatgaagctggaaaccatcattctcagcaaactatcacaaggacaaaaaaccaaacaccacatgttctcactcataggccttgcagtattaaaacatgtgctaacaccacgaataaaggcaactcacgttgcttttgattgcatgaagaattatttagatgcaatttatgatgttacggtggtttatgaagggaaagacgatggagggcagcgaagagagtcaccgaccatgacggttgactggattgttgctgacatcttggccatcaggcagaatgcgctaggacatgtgcgctacgtgctgaaagaagggttaaaatggctgccattgtatgggtgttactttgctcagcatggaggaatctatgtaaagcgcagtgccaaatttaacgagaaagagatgcgaaacaagttgcagagctacgtggacgcaggaactccatgctatagacagcccaggaataagaagctggagcctgcttctaagtccatactcacctctctgaaaggacccgcaaatgcctaccaccaccagccccatcctaatgggtcacctgtcaccatggtgactgctgcctccccaccagactgcgagctccacaggggccctaaaggaaacctggtctggctcaacgaaggcacctcccctgacctggcacaaaagctgggcaactcaccaaggcgcctgaaaattcctaaactttgcttggtcgcctga

SEQ ID NO: 115427 - DNA, 907 bp, Homo sapiens
atggatgaagatggaaaccctcattctcagcaaacttcacaaggacagaaaacgaaacaccacaagttctcactcatagagtgtgcccctcaggccttggacctgagaaatagtgacgagtgctgtgatggaaaagaaaaagtgagaagccaaatagtccgcacagctgctgtcagccccctcccctcttgtgttattttaaaggcacataaacattctaaagaccctgagaagtcctgcgatctacggcagacccctggactgcctcctagcccatgctccaatgttgatgacatcaaagacatccctctgaggaaatctcaactgcatgacccctattatgcccccattcagcagaagaactacaaggtgacacaccaggagattaccaccatcatagctaccattagattactggtggtcagcggcttgttctgagacctcaggttctcttctgcaatgtgagctagtctcttcattgcccccaggtcagtggagttgcttgagatgttcatctgagccatctgatgaactgggggtgcagagcattccgaggtcttttcctcttccttgggttctggctcatggcacaactaagatgtcttgtgggtacccagacaggaagctgattctctcctgctcctgtgacatcacatcagccacacttcttcaccctggtagcagcaagtccaggtttcgttctctaacacatcaaagagtcagcctgatggtgccccttagagatgtagcaccagctggtagcactcagagaatggcccagggcttggatatctcaaaatatcagcgacaacaggtcagtaaatattctgagaaaatgaaaaatggacaacctgaccccaagccttgcttccgcctgaacgctgacccagacctcggtcacatttga

SEQ ID NO: 115428 - DNA, 306 bp, Homo sapiens
atggggcaggccagactgtctgcaaaggggcacagggagcttttcggagttgggaaaatctacatcttgatcaagcctctgatctcccaccaggacctcatggtggtggaaaccatgcagaaagcgaagggaagagaacctgctgatgcagtacatacaggaaagttgggaattgtaatttctgtgtgcccaagaaggaaacaagcagctattgccggtgtgttgactgtcatatttgcaatacagaccttcagagctattcgcacaggagatagcaagaggaatgcctgctggggggctcagtga

SEQ ID NO: 115429 - DNA, 368 bp, Homo sapiens
atggggcaggccagactgtctgcaaaggggcacagggagcttttcggagttgggaaaatctacatcttgatcaagcctctgatctcccaccaggaccttatggtggtggaacccatgcagaaagcgaagggaagagaacctgctgatgcagtacatacaggtctggctccagatacccaaaccagggttagcacagctggagaacagaaggctggagggccactcaggggattttgctccaccgtggaggggattttcatctctagtcagagtccccaggctggaattactcacatggctctatccaactgcaggaaagttgggaattgtaatttctgtgtgcccaagaaggaaacaagcagctattg

SEQ ID NO: 115430 - DNA, 606 bp, Homo sapiens
ggactatggaaagactacatttctcaaccttcctagtagatgtgatgtcaccagtcggaattgggcagaagaatgtatcacttcagtccaaggcaattaagtggtcaaaccgtaagagactggcagctttcatactgttggatgcatgttttgggatgcctccctctcagaatctagccaccatgttctgagaaacctaagccatgtgaaggggccacatgtaggtgctttggtttgcagctccgaccctctagccaatagatggcatctcctgccagccaaatgagtgagccatcaacagtaacctgcccagctgagtcttcagcaacagcaatttatttacggattacctactcagttggtgccaagcctggttctagatgctgaagacagagcctagatcaagattgacttggtcctggctttcctgaagttcccagcctggtagaagagacataataaacaactagcaaacacagaaatgtgattctttctgggagtattaggtgctctgaaaggaagaacaagggtgatgtgatagacgctgattgggatgggagctttttcagattggatgacaggaaaggtcttctgaaatctgcctgg

SEQ ID NO: 115431 - DNA, 759 bp, Homo sapiens
atggcgatcttctcagtatatgacacaccaaatgagataggatcagcatgtctactcgagcttcctaccagccgtggttttgcagccttagtgacatctggatatgagtttggagcagataaatgcaagaatctggattgtggggccttcatcagtctgaggcagcagaggatgcagatcctgtgggagcacattcctggaggaggggagcaaagcaggctcagaggagtgagtcacggagcccaagccctaaatttagaaggtgctgaaagaggcagtcttcccccgggaagcctgtggagatacctgctgacccagaacaccagggactcacggcagggagcagtggttggcaggagtccccagatagcagtgcccatggaagctgagcctgctgcaggcctgttccagaattctccagatcctcctcagttttttggctctggtgctcatctaaacacagcagggtcttcctccatcaggccaagtggttgtggccgctctgtcaccacggctcccggggcctctgtcggctccactttggttgagacgtctccacagcccaacaacggcggcgatctgaggagaggcaggagaaaatacggcgcgctcggcatcgtccttctgaccggggactccagcatctcagtcatcgcgtcaccaagccccacgtgcaggttctggcatccatcatggcaaactggagaccgcggtgaattccaccggaatggcgcgcgcattgccacatgggaactgtag

SEQ ID NO: 115432 - DNA, 519 bp, Homo sapiens
agcttctccatggggagtgtggggaggcccatggccctggtcctagtccggctctcctgggtcctccgcggaggctccgacaacgtcgacgcggctgcagatgctgacgccaccttcctgggacctgagaagcagggtctgtacagctccagcaacactctcctcttcctccagaattctccagatcctcctcagcttcttggctctggtgctcatctcaacacagcagggtcttcctccatcaggccaaggtgggggtaggagaagaattgggaacagggactcccctaggttctcagggtacagtcagtcaatctaagcctgtatccaacaaagacactgaccgctggggtacaaggaagggctccaggcccaaaggcaggaggattaggctttagctcttgctcacagcctgctgagacctgaggcaagcccctgtccctctttgggccctcaggtttgcaatttgcagaatgaggaaatgggttcctcaatctacaatcacctgactataataat

SEQ ID NO: 115433 - DNA, 738 bp, Homo sapiens
atggtgtgcctaggtgccacctcgcttcacctggctggggagtggctcctagacctcagctcaatgcgcatcacttccccttctcatcagccaggccagcccagaattctccagatcctcctcagcttcttggctctggtgctcatctcaacacagcagggtcttcctccatcaggccaaggcgcccccacgtgtcgatcccgagactctcggcttgcgcaggcgctctttggtgtttacagcggccgcgaagccccgcgtttgcgcgtgcgcttcccgcccgggaccgcccagagtggttgtggccgctctgtcaccacggctcccggggcctctgtcggctccactttggttgagacgtctccacagcccaacaacggcggcgatctgaggagaggcaggagaaaatacggcgcgctcggcatcgtccttctgaccggggactccagcatctcagtcatcgcgtcaccaagccccagggactatggaaagactacatttctcaaccttcctagtagatgtgatgtcaccagtcggaattgggcagaagaatgtatcacttcagtccaaggcaattaagtcaacagcaatttatttacggattacctactcagttggtgccaagcctggttctagatgctgaagacagagcctagatcaagattgacttggtcctggctttcctgaagttcccagcctggtagaagagacataataaacaactagcaaacacaaaaa

SEQ ID NO: 115434 - DNA, 1152 bp, Homo sapiens
  misc_feature (1)...(1152): n = a,t,c or g
ggctctgcacgacgcctgaaaggccgcggggcccgcatttctctgtgctgccctcctggagaaccgggacacggggacgggagggccagcatcggctacggcccggttttcccgtttctttcctctgtcgcgtctgggccctcctgcagcgtccatgatgaaggccaggggctgttgctttcctctcgcccagtagccaacccaagcaagggaagtaattatctgaagaaatggatacttctccctccagaaaatatccagttaaaaaacgggtgaaaatacatcccatcacagagatggcgaaatatacttcttcattatccccagcctgggcgatgatgggatattgaaggaaatcaattgaaggctatgggggatttttattgggaaggaaaattccnaaaggaaaggtctgctgagtgaaatgaaaaaaaaagggagagctttctttgggaaccatgggataccctacctccaccaacaggaagacccaatgatcaatgagattggacaattccagagctttgcagaaaaaaacatttttcaatcccgaaaaatgtggatagtgctgtttggatctgctttggctcatggatgtgtagctcttatcactaggcttgtttctgatcggtctaaagttccatctctagaactgatttttatccggttctgtttttcaggtcttatctgtgttagttgtgtgttactatcaggaggccccctttggacccagtggatacagattacgactcttcttttatggtgtatgcaatgtcatttctatcacttgtgcttatacatcattttcaatagttcctcccagcaatgggaccactatgtggaggagccacaactacagtcttcagtgccattttggcttttttaactcgtagatgagaaaatgggcttatgttgacatgggctacagttgtttgcagcatcttagggtgtttgtcttgttcatggatcccaaacattgttgatgaaggacaattctttgttaaatgccgggggaaggaagcctttggggtacaaccatggactgtgnagggctgggacttgaccactgctctntccaatggtaggtatacaggtcccatcaagggngaagatccagccattgggacttgcactgtttacctttgggtgggg

SEQ ID NO: 115435 - DNA, 216 bp, Homo sapiens
atgaaaaaagagtattttattgttaaactctataatgaagcaactgtctttgactacacaatgtgggaacttgccagtgaatgtagaagtactgcggggccatgcgtcagagccctagtggacacgcctatgcaggtgatcagcagtgccgtggcagccacagagacaggccaccaccactcctcaggccactcaaagccaccagcccctccctaa

SEQ ID NO: 115436 - DNA, 480 bp, Homo sapiens
atccttgcatgcagcttttgcagaactgataaaagcaatggtcggtcatgcttgccacaagctgcttctgttgagatcatcattctacgatcttgaccaatgggtgaagtttggttgcacttttggcatcttgcattcacagacctacagaaaccagattagggagcatgttggaggtggctctgtaagtgccaatgctaagattgagaacatagtgatgacatggtaagtgtgtactgagtgaattaatgaaagaatactgaatttcaggactaaggggaaacatagaggtgattataaaggaagtgaaaacagaactcccagctgaccacaatgaacctgggggtttatgaaggccttattagggcaattgaagtcttaatttggggattgaaggaggtagcaatggagtcttaaacttttctacccaaattacaagagcccctcgtgccaagctgggcgtaatgatgtcatcgatgt

SEQ ID NO: 115437 - DNA, 672 bp, Homo sapiens
atggaggagaagaatttcactccaccattcagacacaatggagaagtgtgtaagtgtttgttgagccagtgtgatgtgtcctgtgttggctgcccaggtatatacgaccgtttctatcctcaggtcacctttactggggggaagactgaagacacttgtgaacaagctcctccagaatccttgcatgcagcttttgcagaactgataaaagcaatggtcggtcatgcttgccacaagctgcttctgttgagatcatcattctacgatcttgaccaatgggtgaagtttggttgcacttttggcatcttgcattcacagacctacagaaaccagattagggagcatgttggaggtggctctgtaagtgacaatgctaagattgagaacatagtgatgacatgctttggcgctgaccacaatgctgagcaggaagcagcagctgcaggcccagtgactggtagctcagtgaccagcagcccagtgaccggcagccaggtcctcacctgggtcctctcagtgaagccagggtggccgccccagcagacagtgctacagagccaactcctgacaggcggcctgttttcagcagagaagctggggtcccatggagctgccctgctccatgcttgcatgccatttctctcagcgttggagcagagccctcaacagtga

SEQ ID NO: 115438 - DNA, 1845 bp, Homo sapiens
atggcacagagaatcctgaaatgtgagaagaaatctcctagtggattctggcatgaggcaagggaggagaatgtcccctttgtgcccttggacacagttatcaggggaactgacgcctggaactgcatctgcattgtgatcttgacactaccggggcaagcattaggcaaagccatggccctgagaatgacgtggacagaaatcctggacaaggctggccaaagggggaatgcgtgggccctgctcccacccccgatgctgacatcaaaggagcagagacacgcaggagactccaggcagcacccgagccctggccgccagcacccacctgtgtgccggctccgcagacgaggtccccccagcaccctggcagggactgtaccatcaacagacaaatggcagccgaccaaggaggcgactggcgtgtggaacagcactggccaccttgggaaccaagatattgggaagggacctgaagggcataagggaatccagagactcttgagaagggatcgtagctcacctcagaacgcctggagcagttggctaaacacagcaattttaggagcccctgacccctttgtccagagtgtgcccccccgcctgatgggcaaggacgcgcacactggccactctgacgatgccgaaagccctccatgtctacccgctacgccgcattcgcagacaggcgggggacatcgcggccgcggcaagctagagatgccgcctgctcgagcaaccttccacctgcagggccggccagttctactcttccaggatcactctcgtctcacccttctccccaaaatgtcagagcaagaaccaggaagggagaggctctttctggaagccacaggcataacgttactgaacaacgaggacaaaacatacacacgagcctgcaatgatggaagcaaaacagaacgtttggagatattcactgccgtttacaaggccacagtaagcagtaagcagattttctactcccctctagcagagaacatgttagcaggccctgtgatcaccaggagcatggacaaaagcctccagaagacaaaagtgcaggaaagctcatttctcagagatcagttcagaagtggtccagctgtcctaataggtgttacatcgtttggctgtgtcccaaatctcatcttgaattgtagctcccataatttccacatgctatgggagggacctggtgggagaaaactccgctgtgcattcgcgacggaatgcaagggacaaggacacatcgtatcttactatcttgaagataattttggctttaccactcctggaggtcttgccatagggtgtttgttgagccagtgtgatgtgtcctgtgttggctgcccaggtatatacgaccgtttctatcctcaggtcacctttactggggggaagactgaagacacttgtgaacaagctcctccagaatccttgcatgcagcttttgcagaactgataaaagcaatggtcggtcatgcttgccacaagctgcttctgttgagatcatcattctacgatcttgaccaatgggtgaagtttggttgcacttttggcatcttgcattcacagacctacagaaaccagattagggagcatgttggaggtggctctgtaagtgacaatgctaagattgagaacatagtgatgacatgtgaccaatctccaaagacacactgtgaggctccctcgcccaacggctggcgtggtctggagaggtctagggtaggagcaccctatgaagacatagtaatagaaactatccagaatggcacacagagagaaaaggaagatggaaaagattacgataaactacctccaaatgatgaggccagatga

SEQ ID NO: 115439 - DNA, 5211 bp, Homo sapiens
atgcacacacagctccctctgccaagcggggctctcgcacagaggcggccactgaggcatgggaagtgggtatcacgtggctgtgtcctcagcctgccctgtgcacaatattttcagaacctggagaacggcacagaaggcacacttaataactccactaagttctgggtaccaggtacggtgctagacagttacacacattcccacttaaatcctgtctctaatgggtactgttgctacctcatctttacagatgaggaaaaaggaggacagcagcttgcccagcgaatcacatctcgtaagcgtggctttggcgctgaccacaatgctgagcaggaagcagcagctgcaggcccagtgactggtagctcagtgaccagcagcccagtgaccggcagccaggtcctcacctgggtcctctcagtgaagccagggtggccgccccagcagacagtgctacagagccaactcctgacaggttctgaaaatattgtgcacagggcaggctgaggacacagccacgtgatacccactgtagagagagggagagagagacctcctatgcaagctgccggccctctgttccgtagtaaggacaaggtggagcagacacctcgcagtcaacaagacccggcaggaccaggactccccgcacagtctgaccgacttgcgaatcaccaggaggatgatgtggacctggaagccctggtgaacgatatgaatgcatccctggagagcctgtactcggcctgcagcatgcagtcagacacggtgcccctcctgcagaatggccagcatgcccgcagccagcctcgggcttcaggccctcctcggtccatccagccacaggtgtccccgaggcagagggtgcagcgctcccagcctgtgcacatcctcgctgtcaggcgccttcaggaggaagaccagcagtttagaacctcatctctgccggccatccccaatccttttcctgaactctgtggccctgggagccccgctgtgctcacgccgggttctttacctccgagccaggccgccgcaaagcaggatgttaaagtctttagtgaagatgggacaagcaaagtggtggagattctagcagacatgacagccagagacctgtgccaattgctggtttacaaaagtcactgtgtggatgacaacagctggacactagtggagcaccacccgcacctaggattagagaggtgcttggaagaccatgagctggtggtccaggtggagagtaccatggccagtgagagtaaatttctattcaggaagaattacgcaaaatacgagttctttaaaaatcccatgaatttcttcccagaacagatggttacttggtgccagcagtcaaatggcagtcaaacccagcttttgcagaattttctgaactccagtagttgtcctgaaattcaagggtttttgcatgtgaaagagctgggaaagaaatcatggaaaaagctgtatgtgtgtttgcggagatctggcctttattgctccaccaagggaacttcaaaggaacccagacacctgcagctgctggccgacctggaggacagcaacatcttctccctgatcgctggcaggaagcagtacaacgcccctacagaccacgggctctgcataaagccaaacaaagtcaggaatgaaactaaagagctgaggttgctctgtgcagaggacgagcaaaccaggacgtgctggatgacagcgttcagactcctcaagtatggaatgctcctttaccagaattaccgaatccctcagcagaggaaggccttgctgtccccgttctcgacgccagtgcgcagtgtctccgagaactccctcgtggcaatggatttttctgggcaaacaggacgcgtgatagagaatccggcggaggcccagagcgcagccctggaggagggccacgcctggaggaagcgaagcacacggatgaacatcctaggtagccaaagtcccctccacccttctaccctaagtacagtgattcacaggacacagcactggtttcacgggaggatctccagggaggaatcccacaggatcattaaacagcaagggctcgtggatgggctttttctcctccgtgacagccagagtaatccaaaggcatttgtactcacactgtgtcatcaccagaaaattaaaaatttccagatcttaccttgcgaggacgacgggcagacgttcttcagcctagatgacgggaacaccaaattctctgacctgatccagctggttgacttttaccagctgaacaaaggagtcctgccttgcaaactcaagcaccactgcatccgagtggccttatgaccgcagatgtcctctcggctgaagactggaggaagtgaacactggagtgaagaagcggtctgtgcgttggtgaagaacacacatcgattctgcacctggggacccagagcgagatgggtttgttcggtgccagccgaccaagattgactagtttgttggacttaaacgacgatttgctgctgtgaacccagcagggtcgcctccctctgcgtcagccaaattggggagggcatggaagatccagcggaaagttgaaaataaactggaatgatcatcttggcttgggccgcttaggaacaagaaccggagagaagtgattggaaatgaactcttgccctggaataatcttgacaattaaaactgatatgtttactttttttgtattgatcacttttttgcactccttctttgttttcaatattgtattcagcctattgtaggagggggatgtggcgtttcaactcatataatacagaaagagttttgaatgggcagatttcaaactgaatatgggtccccaaatgttcccagagggtcctccacaccctctgccgactaccacggtgtggattcagctcccaaatgacaaacccagcccttcccagtatacttgaaaagctttcttgttaaaataaaaggtgtcactgtggtaggcatttggcatattttgtggactcagtcaagcaaccacagtctgttaatcatttctctatgctcagatgtcagatcctcttgttattagtgtgtcttgttctgcacagtgcaggagactttattcctttggaaaattcactgttccacaaacagcaggctgaatggcctcgcctctagattgacgtgggccagcctccttgagacacacctggcacccgtcatcggccagcggtggatgctgcataatccacctgggtacttcagccttgcgtttccacagccttcagcctgttctagaacgatcactgccttacccctgctgctgcagtggtgtgagtcgtttcacggctgatgtccctcgggggattaaaggatctaaagagaaaatggcacctggttgtcttcgtgctgtgtctcatgggtttccatagtgataaagacaaggaaacgctgcaggggccacaggcacaggctgatatttaaagatctttgcttgcagccctccgtcctgctgaaaacccccataagccagtgaacacagagcagctagaggctcctcctctgctggcttagggtcagaagtacctcacagtggttgtggacatggaagagttttgtcaacacaacactttgtccccgctccgggagatgagtcagatggtggcttgagttgtcacttggtcccctccgcccctcgggtggccccctttgccacgtccccttagcttagtgatcaggtgtgagagtggccatttccttacctttgatccctgtaaagcagaaaggactcctttgacaggcgacaaactactgtggtgagcagaatgatttcctttttcaagacaacacctgcctggcttctattaatgtgtgctggccatgatattgccccaaatccgccccactgaagtgttccctaaggaacagcatttctctgctcctcagtcaacccccgtagcctagagcagtgtcacaagcttcagtaaggccagtcagctggaagtcagtctaccgtatagtaacactgtatttcagtctacagaccacactctagttgttttccatgaaaggtatacaaatgaagaattttctagcaaaacatgtttttaaccatcagtgctcaattgcattttcttcctttcgcagccagtcagtctttcaaactattgacagtaagataattctcacgttcacacctggtggcaggcttcactgtagggacggacattgcagttacaccacgattccttcctcttcactggctcgaggtaaacccttttcaaggaaaaacaactctaggatttcttttttctgtgtacgtagaccagtcccatcagtgtataatctctctctcacacgcctctctccaatagacagcttgtatttgcagtatttcatatttataaatatgcgtttatttaaaaggagaacaaaagcttgactctgattcacagttttgtatgtagctggtttgacgtagtcttttgtattttccctgccgaagtgaattgttggagaatgtaaaccgcctccacgtggcggcagacttcctaaggccccagctcgctggcctcgcgctgggcggctgggaattccacctgagaacaagtcccgcaaaccggggacggaaggacatttgacttttatttttgtatttaattgacatgaatgtaaaggggacagctcagggttgttttggagcctgttgactttgtatctctgcctgtgattttcttttctaaatgaaactccatgtagcaaccaggacgaagttgagaaggaaaacgccaaatgctttggttattagagtttaataggtaagctctgttacactaggtgttagagttccagaatgttcttttgtttgctaaaccttgaagaaacatgtgcctcagcctagatgttttgtcttctcttttctgcacttaatacctgacagtatgaccgatctctgcgcctttctgggggcgggcaagctggcggtagatttgtgatgtcacagtgcaaactgcagtgactgtaaattggcctggcgtgtataaacgttttcagggaatgcagaaggtattaatgaagagacaaaacctttattccatgtgctttgcttcattctgtacatagctctttggctcgtgaacctaattgtaaactttcaggtatttttgtacaaataagggactgatgttctgtttcttgtaattagaaataaacattaatacagtgttcttc

SEQ ID NO: 115440 - DNA, 151 bp, Homo sapiens
atggcccttatctctgacagttgctgccgcaatggcccccaaactatctcttgggccttctgcagaaaaggatcgagcacaggagcacaagctccccatcacctgctggtgtgacactttgggttctcgactggaccgggttggtgcctga

SEQ ID NO: 115441 - DNA, 460 bp, Homo sapiens
attggtgcatatatcaataattaatttccttttattggctgagtagtatttactatatggatgtaccacattttgtttatcctttcaactgttgctggacatttgggttgtttccagttttgaggctatataaacaaagacacaaagatttgtatgtaaagcatcgtatggacagccaccttatttctcttggaggcagaaagggaccttaaagatgacagaccaaacatcaacttcacagatgatgacacagaaggtgaatctactgaaaagagctaaaggaaaggacaaatctcttgagggcaggatgaaggggaatgcaaatatttcaaaggaccctggcaggaaaatcagttcaacaagatgctgtttgtcttggggtcttagtgtttgctatctgttggggccccgtttccacattggaccgacttttctttcagctttgtggaggagtggagtg

SEQ ID NO: 115442 - DNA, 1008 bp, Homo sapiens
atgaagggagtccagttagaaggttattgtgatcattccagaaaaagagcagaaagggaccttaaagatgacagaccaaacatcaacttcacagatgatgacacagaaggtgaatctactgaaaagagggcctgcgaccttgctgttctctcatcttggtatgatgttccttcacctctgcacagagctggctccttttcatcctttggttctagaatttcccttagagaacttctgtgtgacattacctcagtggggtaccatgagcacacaggattggaaaatttcaaattaagtgaggaaccccttgcatactccaaagtttggaccaaatattgttgtaggactttctccttagttcagctaaaggctgggttcttgtcacacagccatgaaagattaggcttgcagacacttggaaggagtaagagttacgccccacaagatccaagagaatcttcagtattaggagaaagctcttctaatgagcacggggaaataatttattacaccacacacccagaccccaaggctgtgctcacctgtttcagtaaaggatggcacggcgagaaggctctctcaccagatgccagcccctcagccttggacttcctaaccaccagaactgaaaaacaaaattcagcatctcaagtcaccagatctgattatgatttcccggtcctcactgaccttgtggaccatggccgtgtctccaaaatctcagctgaacactcagatcagatgaacttggacaatctgcggcgtcatggcagttgtaatagatggaagccttctgatatcccctctattttcggggattatgatgctatcaaactgaggaattctggaggaactgcaggagtcatgtactggtataaaaatcccaagagcctctggggagaacctaacctcaccagacagacacacttggcccaggaacaaagcctcagtcctggacaagaggttacttataatcggttgactgaaaatataaaaagccagtcctaa

SEQ ID NO: 115443 - DNA, 473 bp, Homo sapiens
  misc_feature (1)...(473): n = a,t,c or g
atggaagaaagtccccgtgaagatgaagctgggcctaaaaggaaattagtcttgacaagaagacccagagacttggttgaagaggcccatgtctctgacaaaagagaagcaactgtggagggcttagatgacggcttcatcgagaaaatggaagccatcagaaaggctggctttggcctgactcacagatccaaaagcccctacctccactcggcaaacaatgccagaacaacatctgctacccctaacctacttcccaaaagaaatgattaaaaagttaaagaaacacttccatatggaagaatccaatcccaacaggtcaccccaaagatacttcaaacccaattaaacaggaagagctaaaaaaagcagagaagttcacagaacccacacaatcttttatataagnnnnnnnnnngcgactctggtaaccctacacagttcagaacaccatttggcagttaagtatgtcc

SEQ ID NO: 115444 - DNA, 2410 bp, Homo sapiens
ctgatcccagcccttttcctacagcactcctcacattccacagcacatcaaatctacttctcggtgtattgtttgtcttctcccaccaaaatgtgaggtccacgagggcggaatgttcgtccaagggcttggaacgctgtttgccccacaacggaacctcagtccttcctcgctgagtgcaagagtgatcacgacgtgcagagatcctgtcagacccaaaggtggccacagccctgagactcagggagaaactcagcctctctcctccaacgcaggccctccaacgccccaggccagctcgacgcctgcagtccctgtgcacaggaaggaggcgctgatgggcggtgcggtgggacttactgagaggagcttccacgtcattggacgcactggcttagggattccggaccagctcaacctccgtaattcctctgttgatgaaaaaagagacgaaaaaggctgtgtttcttctcaggtgaaaatagggggcaagagaaaaccaccaatccaaaagatgattgttatcgtttatctactgaattgtgtgctcctcaccaatctgtttgtgatcaaaaaaggattctggtcccaggaaggggcacggcactgcgcggacctctatggaaaaggattctggtcccgggaaggggcacagcactgcgcggacctctatggaaaaggattctggccccgggaaggggcacagcactgcgcggacctctatggaaaaggattctggtcccgggaaggggcacggcactgcgcggacctctatcaaaaaaggattctggtcccgggaaggggcacagcactgcacggacctctatggaaaaggattctggtcccgggaaggggcacagcactgcgcggacctctatcaaaaaaggattctggtcccgggaaggggcacagcactgcgcggacctctatggaaaaggattctggccccgggaaggggcacagcactgcgcggacctctatggaaaaggattctggtcccgggaaggggcacggcactgcgcggacctctatcaaaaaaggattctggtcccgggaaggggcacagcactgcgcggacctctatggaaaaggattctggtcccaggaaggggcacggcactgcgcggacctctatggaaaaggattctggtcccgggaaggggcacagcactgcgcggacctctatggaaaaggattctggtcccgggaaggggcacagcactgcgcggacctctatcaaaaaaggattctggtcccgggaaggggcacagcactgcgcggacttttatggaaaaggattctggccccgggaaggggcacagcactgcgcggacctctatggaaaaggattctggtcccgggaaggggcacggcactgcgcggacctctatcaaaaaaggattctggtcccgggaaggggcacagcactgcgcggacctctatggaaaaggattctggccccgggaaggggcacagcactgcgcggacctctatggaaaaggattctggtcccgggaaggggcacggcactgcgcggacctctatcaaaaaaggattctggtcccgggaaggggcacagcactgcgcggacctctatggaaaaggattctggccccgggaaggggcacagcactgcgcggacctctatggaaaaggattctggtcccgggaaggggcacggcactgcgcggacctctatcaaaaaaggattctggtcccgggaaggggcacggcactgcgcggacctctatggaaaaggattctggtcccgggaaggggcacggcactgcgcggacctctatggaaaaggattctggtcccgggaaggggcacggcactgcgcggacctctatcaaaaaaggattctggtcccgggaaggggcacggcactgcgcggacctctatggaaaaggattctggtcccgggaaggggcacggcactgcgcggacctctatcaaaaaaggattctggtcccgggaaggggcacggcactgcgcggacctctatggaaaaggattctggtcccgggaaggggcacagcactgcgcggacctctatcgaaaaggattctggtcccgggaaggggcacagcactgcgcggacctctatcgaaaaggattctggtcccgggaaggggcacagcactacacagacctctggtgggtgtcctccctctccttagcccttccatctggaatggttgaggccgcctctcccaagaagcgctcgaagcacacccgccagcgtatcgctcagcgctccccctcggtccacctgctcttctgcaggagagatgtctcctcccacaatcggtggggaagcatcagaaatgcctgcaggcgcctctgcaggaacacggatggcatgcgttcccgcgactacttcatcataaacatgaaacgtagctct

SEQ ID NO: 115445 - DNA, 1671 bp, Homo sapiens
gcagacccgccctcaccccccagcggcgacctccggctggtgaagtcggtcagtgagagccacacgtcctgtcctgcagaaagtgccagcgatgccgcccctctgcagaggtcccagtctctcccacactcggccaccgtcacgctgggtggcacatctgaccccagcactctcagcagctcagcgctgagcgaaagagaggcctcccggctcgacaagttcaagcagctgcttgccggccccaacacggaccttgaggaattacggaggttgagctggtccggaatccctaagccagtgcgtccaatgacgtggaagctcctctcaggttaccttcccgccaatgtagaccggagaccagccactctccagagaaaacaaaaagaatattttgcatttattgagcactattacgattctaggaacgacgaagttcaccaggacacatacaggcagatccacatagacatccctcgcatgagccctgaagcgttgatcctgcagcccaaggtgacggagatttttgaaaggatcttgttcatatgggcgatccgccacccagccagtggatacgttcagggtataaatgatctcgtcactcctttctttgtggtcttcatttgtgaatacatagaggcagaggaggtggacacggtggacgtctccggcgtgcccgcagaggtgctgtgcaacatcgaggccgacacctactggtgcatgagcaagctgctggatggcattcaggacaactacacctttgcccaacctgggattcaaatgaaagtgaaaatgttagaagaactcgtgagccggattgatgagcaagtgcaccggcacctggaccaacacgaagtgagatacctgcagtttgccttccgctggatgaacaacctgctgatgagggaggtgcccctgcgttgtaccatccgcctgtgggacacctaccagtctgaaccggacggcttttctcatttccacttgtacgtgtgcgctgcttttctcgtgagatggaggaaggaaatactagaagaaaaagattttcaagagctgctgctcttcctccagaacctgcccacagcccactgggatgatgaggacatcagcctgttgctggccgaggcctaccgcctcaagtttgcttttgccgacgcccccaatcactacaagaaatgagcccaggcccacccgcagctggcctcactgtcccgggtggcgcgccccacctgcctggctggtggtaggcccctgtgagctggtccgggctgctaaaaggccttgtgaggtggccccaccctccaggggagctggtgaagatgggccacagacctggtctagggctgacaaagacagggacagcctttgttttttgagataccaaaaagagccaggggagggccccgggttcggcggccagaggcaggtcaggggtcccctctccctctccctgcaatgtccttgccaaatgactgcctcctgctgcccctagtccggggcagcctaggaggccgaccctctttggagtcctgctgtttgggtgccagggccggaacgaggtagtggccatctcatacctactctgaaatgcaaaacttctattctgttgagtgaaagaataaaatgtagccaaaatctaaaaaaaaagaattccaccacactggcggccgcaaggag

SEQ ID NO: 115446 - DNA, 531 bp, Homo sapiens
tcaacgactggctttacaaggctcataggaaaggtgcgtgtattcagacggacacgattccagctgtggctcctccactttcagggtcgctgtttccacagttgacaagcaggagaaccatacttgttgcacttccctcactgggctgccgccagcatcatatagaaaaacgctgtcccaacataagccaaagccaccatgactgggatagtcgccaaacagaactcagcttcggttcccctcccggcaaggctggttcgacctacagtcaacaggaagctcctgggggcagggacaggatccctgcctcggaaggaggcaagacgtgaacgttttttggacggcgatcaggatggtgatgagggtcccagacaaccttctatgggactgccacataagcaagtccaaaaccgagcaatggcaaaagtggtaattacttttgcaccaactaatgcaatgcaactagccaggtcgcctaaaacacttaatttcatgaaaataattggggagatggagtctgttctagaataa

SEQ ID NO: 115447 - DNA, 465 bp, Homo sapiens
atgctatggcttgggactcagagaaagcgctgtgactcagaactgaccctgaaggcccacagtggggagagtggaaaagagctcctgaagatgaaaagcatcagacaaaatcaaaagctcaaagataacaaaccaggaaaagaaaaaggttacgaggacactccaggtctgacatctgagtttgaaagtcacgagtttccaagacggaaagaggccatcaagcgcacagcacggtggataaaagaaaccctaggatgtggaagagaaaaggacaatctcacaagaaaaaaatacatcccaacagaaatggctaagaaaaatcatggaagaactgccctcagaattctgaagggactagctaaacagaattcttcattagaggaaatagcagttctgttcaaaatctccgcaaaagctggtcagaaaactcgctatgaaatcacaaagactgatccaaagagctga

SEQ ID NO: 115448 - DNA, 1318 bp, Homo sapiens
gacaagccttcttaaagccttatttttcaaaagcgccccccccattcttgttcagattaagagttgccaaaataccttctgaactacactgcattgttgtgccgagaacaccgagcactgaactttgcaaagaccttcgtcatttgagaagacggtagcttctgcagttaggaggtgcagacactttgctctcctatgtagttctcagatgcgtaaagcagaacagcctcccgaatgaagcgttgccattgaactcaccagtgagttacgcagcacgtgttcccgacataacattgtactgtaatggagtgagcgtagcagcctcagctctttggatcagtctttgtgatttcatagcgagttttctgaccagcttttgcgggagattttgaacagaactggctatttcctctaatgaaggaattctggtttagctgtggggtgtgccgggtggggggtgtggtggtggatcaaaggacaaagacagtaattttggaacaaaatacggagtgggaggatttaccactaccattggtacaagggaatgaaagtggtcacggggtaaaaactcctaaaagggttaatttctggtccaatgcagtagatgaatgaaagaaaggtttggtattatcaaggaaatgttttcttaagccttttcctttctcttacaccctgccatgcctcccccaaattggggcatttaattcatgctttaaactggttgttctgttagtcgcttaacttagtaaaggtgcctttccctaaaagaaccccttctgactgagcaatatgcctccttgtattataaaatctttctgataatgcattagaaggtttttttgtcgattagtaaaagtgctttccatgttactttattcagagctaataagtgctttccttagttttctagtaactaggtgtaaaaatcatgtgttgcagctttatagtttttaaaatattttagataattcttaaactatgaaccttcttaacatcactgtcttgccagattaccgacactgtcacttgaccaatactgaccctctttacctcgcccacgcggacacacgcctcctgtagtcgctttgcctattgatgttcctttgggtctgtgaggttctgtaaactgtgctagtgctgacgatgttctgtacaacttaactcactggcgagaatacagcgtgggacccttcagccactacaacagaattttttaaattgacagttgcagaattgtggagtgtttttacattgatcttttgctaatgcaattagcattatgttttgcatgtatgacttaataaatccttggawtcat

SEQ ID NO: 115449 - DNA, 476 bp, Homo sapiens
attccaggccttttttgttctcttccactttccattactatcccatagccttttggatttaagttcttatagaaaagttcttcctttctcagctcttatttttcagcttccgttgtctctgaaaaaaatattacgagtggtcgactttatcttggaaagaagatccagaatgtgttggcttcctgttttgttgcttctagtcccacgctgatggcgcccccagagcctccacaagtgggtctagtgccatctggtggtaggatgcgctgatgctttgctgcctgatggacagacaacaccgtgcttaatgaagaaaaccttgtgagtgaaatacacgcagaaacttaaacaacggactggtgacatttgcagcagatgacttagtagtcccaaaattcaaatttgttattaaacatgcaaatctgtgaaagttacagagtctttgggaccatgcaaagctaagattgataggtgtg

SEQ ID NO: 115450 - DNA, 1314 bp, Homo sapiens
atgatcctaacacgtaagctagacttgcgtcttgccgtcgggctggtcgcgggagcgggctgcggaggggacccgccgcgagaaagtgtcaccccgccttgtcaagtcggtgcctgttctgtgctctttaaacgctttctgcagagtctccggattttcttggaggtgctggacgacatcctctaccacgtgaaggggatgcagcgaatagtcaatcagtggtcggagaagttttctgatgaggcagattcggactcagccctggactcggtctctccctgcccgtcctctccaaaacagatacacctggatgtggacaacgaccgaaccacacccagcgacctggacagcacaggcaactccctgaatgaaccggaagagccctccgagatcccggaaagaagggattctggggttggggcttccctaaccaggtccaacagagagcctctgctgatttctaagcagcgtgttatgcctgcgatcaaccacgtgctaaaagataatgctgaaaatgaccagacagtagactgtgagcacgtccacgcccaggattcatttgaagggattgttgcaaccaaattaattctcttcactgctcctagctccttctctcagagggattttgccgatttcggaaccaccatcaaacaggattttcgcctgctggggcaaaccagcgtggaccgcttgctgcaactctctcagggccaggcggtgaagggcaatcagctgttgcccgtctcactgagaaaccaatactacgcgccgtctaccgggaatgacacgcggtggttgtgctgcctcaccgccggtgaacataacactcgtggaggccgtaggaccgcatgttccgatgtcttacctgcccatccgaggaggttcgacgactgcactggtcgagctctaaaatgtatacacggattttgccgattgcggaaccaccatcaaacaagattgtcgcctgctgggacaaaccagcgtggaacccatatgctgcaactctctcagggccaggcggtgaaggccaatcacatgttgccggtctcactggtgcagcgagaatccaccctggcgcgtaatacgcaaaccgcctctcgccgcgcgttggccgattcattaatgcagctggcacgacaggtttcccgactggaagagcgcgacagtgagcgcaacgcaattaatgcagcaaagcatcagcgcatcctaccaccagatggcactagacccacttgtggaggctctgggggcgccatcagcgtgggactagaagctgatgaaaaacgagaagtttcatttcccggttccatttaa

SEQ ID NO: 115451 - DNA, 465 bp, Homo sapiens; identical to SEQ ID NO: 115447

SEQ ID NO: 115452 - DNA, 1569 bp, Homo sapiens
atgaacagtttgctaactgggcagatcccagaatcacagcagattcacagagactccagtgcagccacgtggtggaagaagatttatagacaaaaaatgggaaatgacatagagaaatcggaagtgaggggtggactgacacctcacacagctggatactcctctgagacaaaacttccagagaaacgatcaggcagcagcatttgcggttcaccaatatccgctgttctgcagccaccgctgctgataccgaggcaaacagggtctggagtggacctccagcaaactccaacagacctgaagctgagggtcctgactgttagaaggaaaagtaacaaacagaaaggacatccacaccaaaaacccatctgtacatcaccattgtcaaagaccaaagacagatcaaccagacagaaagttaacaaggatatccaggacttgaactcagctctgcaccaagcggacctaatagacatctacagaactctccaccccaaatcaacagaatatacatttttttcagcaccacaccacacctgttccaaaattgaccacatagttggaagtaaagcactgctcagcaaatgtaaaagaacagaaattatcagaaactatctctcagaccacagtgcaatcaaactagaactcaggattaagaaactcactcaaaaccactcaactacatggaaactgaacaacctgctcctgaatgactactggatgcagaaaaggcctttgaaaattcaacaatgcttcatgctaaaaactctcaataaattaggtattgatgggacgtatctcaaaataataagagctatctatgacaaacctacagccaatatcatactgaatgggcaaaaactggaagcattccttttgaaaactggcacaagacagggatgccctctctcaccactcctattgaacgtagtgttggaagttctggccagggcaatcaggcaggagaaggaaataaagggcattcaattaggaaaagaggaagtcaaactgtccctgtttgcagatgacatgattgtatatctagaaaaccccatcgtctcagcccaaaatctccctaagttgataagcaacttcagcaaagtctcaggatacaaaatcaatgtgcaaaaatcacaaacattcttatacaccaataacagacaaacagagagccaaatcatgagtgaactcccattcacaattgcttcaaagagaataaagtacctaggaatccaacttacaagggatgtgaaggacctcttcaaggagaactacaaaccactgctcaaggaaataaaagaggatacaaacaaatggaagaacattccatgctcatgggtaggaagaatcaatatcgtgaaaatggccatactgcccaaggtaatttacagattcaatgccatccccatcaagctaccaatgactttcttcacagaattggaaaaaactactttaaagttcatatggaaccaaaaaagagcctgcatcgccaagtcaatcctaagccaaaagaacaaagctggaggcatcacactacctgagttcagactatatacaaggctacagtaa

SEQ ID NO: 115453 - DNA, 615 bp, Homo sapiens
atgtgcactgctgaccctgatttcctgggtatcagcagcagtggctgcagaacagcagtggctgtagaacagcggatattggtgaaccgcaaatgctgctgcctgatcgttccttttgaagttgtgtctcagaggagtacccggccgtgtgcctctcccccagccttgctgctgcctttcagtttgatctcagactgctgtgctagcaatgagcgaggctccatgggcttaggaccttctgagccagtatacatagttgagaaattaaaagcactgctaaggatggataaggagaaatggatactggagtggcacctaacaaatatccaagagaaaaccccaagttccaagcctgaagatgaggaaactgaagctcagagcagtttagaaagcacacagggtcctgccagcattcatcatctgctaactgaagagcccttgagccctgaattaccagcggcggtacccaggtactacatcgagggctttggtgagccccgaagacttgttggcttcaggttagattcagccacattaccagctgtggtggctatggggcaaaactcctcctgcttaagaaaagcagagggaaaagtaaacgggactttgtcttag

SEQ ID NO: 115454 - DNA, 720 bp, Homo sapiens
ccagtagtcattcaggagcaggttgttcagtttccatgtagttgagtggttttgagtgagtttcttaatcctgagttctagtttgattgcactgtggtctgagagatagtttctgataatttctgttcttttacatttgctgagcagtgctttacttccaactatgtggtcaattttggaacaggtgtggtgtggtgctgaaaaaaatgtatattctgttgatttggggtggagagttctgtagatgtctattaggtccgcttggtgcagagctgagttcaagtcctggatatccttgttaactttctgtctggttgatctgtctttggtctttgacaatggtgatgtacagatgggtttttggtgtggatgtcctttctgtttgttacttttccttctaacagtcaggaccctcagcttcaggtctgttggagtttgctggaggtccactccagaccctgtttgcctcggtatcagcagcggtggctgcagaacagcggatattggtgaaccgcaaatgctgctgcctgatcgtttctctggaagttttgtctcagaggagtatccagctgtgtgaggtgtcagtccacccctcacttccgatttctctatgtcatttcccattttttgtctataaatcttcttccaccacgtggctgcactggagtctctgtgaatctgctgtgattctgggatctgcccagttagcaaactgttcat

SEQ ID NO: 115455 - DNA, 2106 bp, Homo sapiens
atgcacgtggctgtaggtcgatcacacagggccaagacatgtttctccaatatctctcgttctcgtctgttggccttctctgactcctcagccccatttgaggaatgttttgagtgccgagagcctgggagaggcatgtcctccacgggaccaaacagtcagtggctactccttatttccagacaagatgttcttggcttggaacttattactcaagaaacaacttggatgtggtcaagttcccacccaccccgacccggtgcctgtctgagaacacctcagagacccccgcatcagtcggagcagggccaagccgacagtggtgtcatgggccctactgcgattttgctttcttggaccaaaattttacaggtgtcatgggacagagctcaccaggtaaaacttccttttcctgtagatcaaatcacagatcttccaaggaacgatttccagatgatgattaaaatgcacaagctaacctcagaacagttagagtttattcatgatgtccgacggcgcagcaagaaccgcatcgcggcccagcgctgccgcaaaaggaaactggactgtattcagaatttagaatgtgaaatccgcaaattggtgtgtgagaaagagaaactgttgtcagagaggaatcaactgaaagcatgcatgggggaactgttggacaacttctcctgcctttcccaggaagtttgccgagacatccagagccccgagcagatccaggccctgcatcggtattgccctgtcctcagacccatggacttgcccacggcctccagtattaaccctgcgcccttgggtgctgagcagaacattgcggcctcccaatgcgcagtgggggaaaaccatgttgtgcaggctggaacccatgagagtgagtccttcaggaaagaaacgacatcaacagatgtacacaacacgtttcaaattaataaaggtggggggaagatcacaaatacaacatctgtaacactgtacgtgcaacttgtcatctctattgaagaaacaggcagccaggttcctttccggttgctggtgagaatccaatgtcagctagagttatactggcacgtccatggtcctggaaaggccttggaaaggctgaggcaggcaaatgcttctccacagatgccctaccccacctcgttcattctcttggatgtcagtgctcttctgctaacagaacctatacttcatgccccatttccccgaatcacttctttcctctactcatacagtatccttgatgaagctgagcaccttcgagtgtccgcagtttttgaaagccgtggctgtcttataataacccatcctgacgttcctaggagtatttatattctgaggggcacagacaaacaaaaagacagcagtaacctctgcagacttaaatgtccctctctgacagctttgaagagagtagtggttctcccagcacacagcttgagatctgagaacgggcatactgcctccttaagtgggtccctgacccccgaggagcctaactgggaggcaccccccagtagaggcgggctgacacctcacacagccgggtactcctctgagacaaaacttccagaggaaccatcaggcagcagcatctgtggttcaccaatatctgctgttctgcagccaccgctgctgatacccaggcaaacaagaataatcaatgcagagaagtccgtaaaggacccgatggagctgaaaaccaaggcacgagagctacatgtcgaatgcagaagcctcagtagccgattcgatcaactggaagaaagggtatcagtgatggaagacaaaatgaatgaaatgaagcaagaagagaagttcagagaaaaaagaataaaaagaaacgaacaaagccttcaagaaatatgggactatgtgaaaagaccaaatgtacatctgactggtatacctgaaagtgacggggagaatggaaccaagttggaaaacactctgcaggatattatccaggagaacttccccaatgtagcaaggcaggccaacattcagattcaggaaatacagagaacgccacaaagacactcctcgagaagagcaactccaagacacgtaattgtcaagattcaccaaagttga

SEQ ID NO: 115456 - DNA, 1593 bp, Homo sapiens
atgtggaagcgactttggaaccgggtaacaggcggaggttggaacagtttggagggctcagaagaagacaggaaaatgtgggaaagtttggaacttcatagagacttgttgaatggctttgcccaaaattctgatagtgttatggacaataatgtccaggctgaggtgttctcagatagaaatgagaaacttgttgggaaatggagcaagggtgacccttgttatgttttagcaaagagactggtggcattttgctcctgccctacagatttgtggaactttgaacttgaaaggggtgatttagggtatcaggcagaagaaatttctaagcagcaaagcattcaagagcctagggacttggtgcactgtgatccagccactccagctatggctgaatggggccaacatagagcatgggctgtggcttcagagggtggaaggcccaagccttggcagcttccatctggtgttgagcctgcctacgagctcttcagtcagcttgtgatgaatgatgccaggcttgggtctctcctttcagggaagtgggctcccatctggcccagagcaggtccagaaatattgtccagcaaccaaggactgaaaccagggaccccaggagcctgcttggtgctctaccctactattgacaagttttattcttccctttccttttctgaagcaaaagagaaaatgattgttcattatctcagtgacctaagatgctggcatcttctgcagagcgggtcactgaggaccatggtggttcctgctattaatgccaataatcatcaacttctttttttgtccctagccatctcctggcatctcagggatggactgacacctcacacggccgggtactcctctgagacaaaacttccagaggaacaatcaggcagcagcatttgcggttcaccaatatccactgttcttcagccaccgctgctgatacccaggcaaacagggtctggagtggacctccagcaaactccaacagacctgctgctgagggtcctgactgttagaaggaaaacgaacaaacagaaaggacatcaataccaaaaacccatctgtacgtcaccatcatcaaagaccaaagatgggggaaaaaacagagcagaaaaaccggaaactaaaaatcagagcacctctcctcctccaaaggaacacagctcctcaccagcaatggaacaaagctggatggagaatgactttgacgagttgagagaagaaggcttcagaagatcaaactactccgagctaaaggaggaagttcgaaccaatgccaaagaagttaaaaactttgaaaaaaaattagacgaatggataactagaataaccaatgcagagaagtccttaaaggacctgatggagctgaaaaccacagcacgagaactacgtgacgaatgcacaagccccagtagccaatgcaaccaattagaagaaaggatatcagcgatggaagacaaaatgaatgaaatgaagcgagaagagaagtttagagaaaaaagaataaaaagaaaagaaacaaagcctccaagaaatatgggactatgtgaaaagaccaaatctatgtctgattggtgtacctga

SEQ ID NO: 115457 - DNA, 666 bp, Homo sapiens
atggagaaaaaaatcactggatataccaccgttgatatatcccaatggcatcgtaaagaacattttgaggcatttcagtcagttgctcaatgtacctataaccagaccgttcagctggatattacggcctttttaaagaccgtaaagaaaaataagcacaagttttatccggcctttattcacattcttgcccgcctgatgaatgctcatccggagttccgtatggcaatgaaagacgtcaggaccctcagctgcaggtctgttggagtttgccggaggtccactccagaccctgtttgcctgggtatcagcagtggtggctgcagaacagtggatattggtgaactgcaaatgctgctgcctgatcattcctctggaagttttgtctcagaggagtacccagtgtgtgacaatctaaaaacttgtcacacttcacatggatctgtcatggcggaaacagcggttatcaatcacaagaaacgtaaaaatagcccgcgaatcgtccagtcaaacgacctcactgaggcggcatatagtctctcccgggatcaaaaacgtatgctgtatcagttcgttgaccagatcagaaaatctgatggcaccctacaggaacatgacggtatctgcgagatccatgttgctaaatatgctaaatattcggattga

SEQ ID NO: 115458 - DNA, 678 bp, Homo sapiens
atgcacgttttccgcgaattggtgctcaacctatggaattccgggaaaatctctgtagcaaaacgtttaacgaccgtttacgctgtttatttaatactagttaatggaattgctttctcatatgtttgtaatgtgacaaggcccggtgcggaggcactcgccagattaccctgctcaaagacaggaccctcagctgcaggtctgttggagtttactggaggtcctctccagaccctgggtatcagcagcagtggctgtagaacagcagatattggtgaactgcaaatgctgctgcctgatcgttcctctggaagttttgtctcagaggagtacccggttgttttgatctcagactgctgtgctagcaatgagcgaggctctgtgggcttaggaccctccaagccagtctacaaagaacgacaaactgcacagcacgagcaccacgacacacaacgactgacgatgacgccagtgctcgaaacaacacgtgggggtgtgtggggccccgttgtgagtgaccgctgtctgcgggtgtttcactcgagtgcttctcgtgagtactggtgtgagtggcaaacaggtgttagtggacagtctgctctttatggattggcccgattgagtaacgaagaaaaggaggctatcaagtcccgtaagtcggaggactgtttgctctag

SEQ ID NO: 115459 - DNA, 1239 bp, Homo sapiens
atgatcataattgtgccactgtactccagcctgggtgacagagtgaaatcttgtgaaaagaagagagagagagagagagagagaagaaagaaagaaagaaagaaagaaagaaagaaagaaagaaagaaagaaagaaagaaggcaagcagtaaagaaagggaggaaggaagaaagaaagaaaggagaaagaaattaagaaagaaagaagaaaaggaaagaaagaaaagaaagaagaagagaagagaaggaaggaaagaaagaaagaaagagaaagaaagaaaagaaggaaagaaggaagaaagaaagaatataccaggaaagcgaagagaatccacagaccctttgaaggaaatggatcaccgctgcctgctccctgagatgctgaaaggaacctggtggacaacacctgctagagcttccggcccagcagtcccacttctgtgtgaattcaggcagtggacagtggacacaacctctgttgtcccagaaagcacccacatgccagggcagatgacccaacccatccctgcccctgatagccacaacatggatgaagctggaggccattatcctaagcagactaacacaagaccagaaaaccaaatactgcatgttttcactgataagtgggagctaaacactgagtacaaggacccaaagaagagaacaacagacaccagggcctacttgagggtggaggccacgctggcagctgattggatggtgcccacccagattgagggtaggtcttcctttgttctagccacgctggcagctgattggatggtgcccacccagattgagggtagatcttcctttgttctagccacgctggcagctgattggatggtgcccacccagactgagggtagatcttcctttgttctagccacgctggcagccgattggatggtgcccacccagattgagggtaggggcagaatgacacctcacatggccgggtactcctctgagacaaaacttccagaggaacgatcaggcagcagcatttgcggttcaccaatatccgctgttctgcagccaccactgctgatacccaggcaaacagggtctggagtggacctccagcaaactccaacagacctgcagcttagggtcctgatggaacgcagctcctcaccagcaacggaacaaagctggatggagaatgactttgacgagatgagagacgaaggcttcagaagatcaaactactccgagctaaaggaggaagtttga

SEQ ID NO: 115460 - DNA, 3321 bp, Homo sapiens
atgaatctgagcagacacctgaatgaagtgaagggtgagcttctctggtcacttgaatggagagatccagatggtggtagcatcaggatggaggttggactcggaggttggactcaaaggttggaggaggagaaaaagggcaatgtctgttcccatgggaacctagagaaggactttccctatattccccacctctttgggcttcagcaaaagaaaatggacctcaagggagtcttcaagagctgcttcaaaatttactgttcatcaaagcacttgctgaagactggcttcatttcagaggctgtgctgtgttatggagaaggaggtgaaggagatacggtgcttaccatgaaggagaggtggccacatgaatgcatcgttttaatacagtgcaataagggcagactgacacctcacacggccagatactcctctgagacaaaacttccagaggaacgatcaggcagcagcatctgcggttcaccaatatccgctgttctgcagccaccgctgctgattcccaggcaaacagggtctggagtggacctccagcaaactccaacaaacctgcagctgagggtcctgactgttagaaggaaaactaacaaacagaaaggacatccacaccaaaaacccatctgtatgtcaccatcatcaaagaccaaagactttaaaccaacaaagatcaaaagagacaaagaaggccattacatcatggtaaagggatcaattcaacaggaagaactaactatcctaaatatatatgcacccaatacagaagcaccaagattcataaaacaagtccttagtgacctacaaagagacttagactcccacataataataatgggagactttaacaccccaatatcaacattagacagatcaatgagacagaaagttaacaaggatatccaggaattgaagtcagctctgcagcaagcagacctaatagacatctacagaactctccaccccaaatcaacagaatatacattcttttcagcaccacaccacacctattccaaaattgaccacatagttggaagtaaagcactcctcagcaaatgtaaaagaatggaaattataacaaactgtctctcagaccacagtgcaatcaaactagaactcaggattaaaaaactcactcaaaaccgctcaactacatggaaactgaacaacgtgctcctgaatgactactgggtacataacaaaatgaaggcagaaataaagatgttctttgaaaccaatgggaacaaagacacaacataccagaatttgtgggacacattcaaaggagtgtgtagagggaaatttatagcactaaatgcccacaagagaaagcaggaaggatctaaaattgacaccctaacatcacaattaaaagaactagagaagcaagagcaaacacattcaaaagttagcagaaggcaagaaataactaagatcagagcagaactgaaggaaatagagacacaaaaaacccttcaaaaaatcaatgaatccaggagctggttttttgaaaagttcaacaaaattgatagacggctagcaagactaataaagaagaaaagagagaagaatcaaatagacgcaataaaaaatgacaaacgggatatcaccactgatcccacagaaatacaaactaccatcagagaacactataaacacctctacgcaaataaactagaaaatctagaagaaatggataaattcctcgacacatacaccctcccaagactaaaccaggaagaagttgaatctctgaatagaccaataacaggctctgaaattgaggcaataattaatagcttaccaaccaaaaaaagtccaggaccagatggattaacagccaaattctaccagaggtacaaggaggagctggtaccattccttctgaaactattccaatcaatagaaaaagagggaatcctccctaactcattttatgaggtctgcatcatcctgataccaaagcctggcagaggcactacaaaaaaagagaattttagaccaatatccttgatgaacattgatgcaaaaatccttaataaaatactggcaaaccgaatccaacaactcatcaaaaagcttatccaccatgatcaacatataaacagaaccaaatacaaaaaccacatgattatctcaataaatgcagaaaaggcctttgacaaaattcaacagcgcttcatgctaaaaactctcaataaattaggtattgatgggacgtatctcaaaataataagagctatctatgacaaacccacagccaatatcatactgaatggacaaaaactggaagcattccctttggaaactggcacaagacagggatgccctctctcaccacccctattcaacatagtgttggaagttctggccagggcaatcaggcaggagaaggaaataaagggcattcaattaggaaaagaggaagtcaaattgtccttgtttgcagacgacatgattgtagatctagaaaatcccatcgtctccgcccaaaatctccttaagctgataagcaacttcagcaatgtctcaggatacaaaatcaatgtgcaaaaatcacaagcattcttatacaccaataacagacaaacagagagccaaatcatgagtgaactcccattcacaattgcttcaaagagtataaaatacctaggaatccaacttacaagggatgtgaaggacctcttcaaggagaactacaaaccactgctcaatgaaataaaagaggatacaaacaaatggaagaacattctatgctcatgggtaggaagaatcaatatcgtgaaaatggccatactgcccaagacaggacccccagctgcaggtctgttggagtttgctagaggtccactccagaccctgtttgcctgggtatcagcagcggaggctgcagaacagcggatattggtgaaccgcaaatgctgctccctgattgttcctctggaagttttgtctcagaggagtacctggctgtgtgagttttctgtgagcactcacaaagccaccactagctttcaggaagtgaccacacaccatcaagaggatcagctgctcaggaaggcaggaccagataaggacactgcttcttgcatcctagctgctctggctgaagcagccatgtctccagtggccccaagtgtgacccaggcttccactttggagcagtcaggtggtaagctttggcagcttctacaaggtgttagggctgcaggtgcccagaatgcaaaagccacagaggcttggcagcctccacctagatttcagaggttgtatcagaaaacttgggatactaggccaaaacctgcctga

SEQ ID NO: 115461 - DNA, 1493 bp, Homo sapiens
ttatgcagtttttgcccaaatatcttcaaaaatcagcttaaattttctaaatgcaacttcactattctgcaaatcagcaggactcacttcaaacatgtgacccttgaggccatcagatgcagttttggttccttgggtcctggtgactagggtctttccaatatttcttatattgaacacagcaggggctttcacatcatgccaatctttcttagaaaatggatcaactggggtggagccaagatggccaaataggaaaagctccagtctacagctcccagtgtgagcgacacagaagacgggtgatttctgcatttccaactgaggtaccaggttcatctcagtggggagtgccagacagtgggtgtaggacagtgggtgcagcacaccgtgcatgagccgaagcagggcgaggcattgccacacccgggaagcgcaagggtcagggaattccctttccccccagtaggggcggactgacacctcacacggccgggtactcctctgagacgaagcttccggaggaaccatcaggcagcaacatttgctgttcagcaatattcactgttctgcagcatctgctgctgacacccaggcaaacagggtctggagtggtcttccagcaaactccaacagacctgcagctgagggtcctgactgttggaaggaaaactaacaaacagaaaggacatccacaccaaaaccccaactgtacgtcaccatcatcaaagaccaaagacaaaacttccagaggaatgatcaggcagcagcatttgcaggtcaccaatatccgctgttctacagccactgctgctgatacccaggcaaacagggtctggagtggacctctagcaaactccaacagacctgcagctgagggtcctgaggaaattcaaatcaatggcaaagaagttaaaaagtttgaaaaaaaattagacgaatggataactagaataaccaatgcagagaagtccttaaaggagctgatggagctgaaagccaaggctcgagaactatgtgaagaatgcagaagcctcaggagccgatgtgatcaactggaagaaagggtatcagtgatggaagatgaaatgaatgaaatgaagcgagaagggaagtttagagaaaaaagaataaaaagaaatgaacaaagcctccaagaaatatgggactatgtaaaaagaccaaatctacgtctgattggtgtacctgaaagtgacagagagaatggaaccaagttggaaaacactctgcaggatattatccaggagaacttccccaatctagcaaggcaggccaacattcagattcaggaaatacagagaacgccacaaagatactcctcgagaagagcaactccaagacacataattgttagattcaccaaagttgaaatgaaggaaaaaatgttaagggcagccagaaagaaaggtcaggtaacccacaaagggaagcccatcagactaacagcggatctctcagtagaaactctataa

SEQ ID NO: 115462 - DNA, 876 bp, Homo sapiens
gtcaaaaaaaaaaaaaatctcaagtgaccatggcatgttttaggttcatgtatgtagttgaattgtttatatatttgtctgtattacgttccagaaactgttcaggttccattatcaaaacgagcaaaatttgttggacctggtggctataacttaaaaaaacttcaggctgaaacaggtgtaactattagtcaggtggatgaagaaacgttttctgtatttgcaccaacacccagtgctatgcatgaggcaagagacttcattactgaaatctgcaaggatgatcaggagcagcaattagaatttggagcagtatataccgccacaataactggaaatcagagatactggttgtaatggtaaaattatatccaaatatgactgcggtactgcttcataacacacaacttgatcaacgaaagattaaacatcctactgccctaggattagaagttggccaagaaattcaggtgaaatactttggacgtgacccagccgatggaagaatgaggctttctcgaaaagtgcttcagtcgccagctacaaccgtggtcagaactttgaatgacagaagtagtattgtaatgggagaacctatttcacagtcatcatctaattctcagtgattttttttttttaaagagaattctagaattctattttgtctagggtgatgtgctgtagagcaacattttagtagtatcttccattgtgtagatttctatataatataaatacattttaattatttgtactaaaatgctcatttacatgtgccatttttttaattcgagtaacccatatttgtttaattgtatttacattataaatcaagaaatatttattattaaaagtaagtcatttatacatcttaga

SEQ ID NO: 115463 - DNA, 404 bp, Homo sapiens; identical to SEQ ID NO: 114867
  misc_feature (1)...(404): n = a,t,c or g

SEQ ID NO: 115464 - DNA, 511 bp, Homo sapiens
actgctcctcgccaggccaagctaggtcccaattcttcctcagcctccgctcctccaccctataatccttttatcacctcccctccttacacccagtccggcttacagtttcgttccatgactagccctccccaacctgaccagcaatttactcttaaaaaggtggctagagctaaaggcatagtcaaggatttaattaacctcgccttcaaggtgtacaataatagaaaaaagttgcaattccttgcctccactgtgagacgaaccccagccacatctccagcacacaagaacttccaaatgcctgaactgcagcggccaggccttcctccagaacctcctcctccaggagcttgctacaagtgccagaaatctggccaccaggccagggaattcctgcagcccaggattcctcctaagccacgtcccatctgtgccggaccccactggaaatcggactgttcagctcacctggcagccactcccagagcccctggaactctggcccaag

SEQ ID NO: 115465 - DNA, 466 bp, Homo sapiens
  misc_feature (1)...(466): n = a,t,c or g
ngagcattaaccttgactatgcctttagctccagccacctttttaagaataaattgctgggcaggtgggggagtgctagtcacggaatgaaactgtaagccggaacaggtgtgaggaggggaggcgataaaaagattatagggtggaggagtggaggctgaggaagaattgggacctagctcagcctgtcgaggaggggagaggtcagatgggtctgtagaaaaggaagattagaaagactcagcgacacttggggttggtactgaggggacaggcgggagggaaagaaagaagatttgggaggagttgcactgggcacagagactaggaggggactgatgtgtaaaagaatgcctggacgtcaggcacctcagaccatttgcccattttacaacaagaattatttagatcttgcaggatggaaaaattgaaagtgccgttntctggctattctcgtgccgaattc

SEQ ID NO: 115466 - DNA, 396 bp, Homo sapiens
atggacacatatagaggaacaacagacactggggcctacctgaagacacgcatgaaatttggtgccgtgactcagatcgggggacctcccttgggagatcaacccctgtcctcctgttctttgctccgtgaaaaagatccacctacaacctcaggtcctcagacccaccagcccaaggaacatctcaccaattttaaatccggagcttgctacaagtgccagaaatctggccaccaggccaaggaatgcctgcagcccaggattcctcctaagccgcgtcccatctgtgcgggaccccactggaaatcggacttttcaactcacctggcagccactcccagagcccctggaattctggcccaaggctctctgactccttcccagatcttggcttag

SEQ ID NO: 115467 - DNA, 663 bp, Homo sapiens
atgcgggcaccacctaaaagtggacagctgcagcactgcaggccctcaaggggcgccctaagatcgggggacctcccttgggagatcaatcccctgtcctcctgttctttgctccatgagaaagatccacctatgacctcaggtcctcagaccaaccagcccaaggaacatctcaccaattttaaatcgggtgtcagaccacgcagggacgcctgccttggtccttcacccttagcggcaagtcccgcttttctggggaaggggcaagtaccccaaccccttatatctctgtgccccgatcccttatttccgcaccccaacctcatatctctgcgccccaatcccttatgtccgcaccccgacctcgtatctctgtgccctgacccctttcccgcttttctggaggcacataagaacttccaaacgcctgaaccgcagcagcccggcattccaccagaacctcctcccccaggagcttgctacaagtgccagaaatctgaccaccaggccaaggaatgcctgcagcccaggattcctcctaagccatgtcccatctgtgcgggaccccactggaaatcagactgttcaactcacctggcagccactcccagagcccctggaactctggccgaaggctctctgactgactccttctcggcttag

SEQ ID NO: 115468 - DNA, 864 bp, Homo sapiens
atgaaactcatggaaacacttaaccagtgcataaacgctggtcatgaaatgacgaaggctatcgccattgcacagtttaatgatgacagcccggaagcgaggaaaataacccggcgctggagaataggtgaagcagcggatttagttggggtttctctcaggctatcagagatgccgagaaagcagggcgactaccgcacccggatatggaaattcgaggacgggttgagcaacgtgttggttatacaattgaacaaattaatcatatgcgtgatgtgtttggatctggctctgaaggggctacgtgttttgctcgtggaaggtaacgacccccagggaacagcctcaatgtatcacggatgggtaccagatcttcatattcatgcagaagacactctcctgcctttctatcttggggaaaaggacgatgtcacttatgcaatatatttcacttgctggccggggcttgacattattccttcctgtctggctctgcaccgtattgaaactgagttaatgggcaaatttgatgaaggtaaactgcccaccgatccacacctgatgctccgactggccattgaaactgttgctcatgactatgatgtcatagttattgacagcgcgcctaacctgggtatcggcacgattaatgtcgtatgtgctgctgatgtgctgattgttcccacgcctgctgagttgtttgactacacctccgcactgcagtttttcgatatgcttcgtgatctgctcaagaacgttgatcttaaagggttcgagcctgatgaccccactggaaatcggactgttcaactcacctggcagccactcccagagcccctggaactctggctgaaggctctctga

SEQ ID NO: 115469 - DNA, 471 bp, Homo sapiens
atgagcagccagaggctgtttctgaccattgacctgcccaagactcagtgtgcccaagagaagctcagggtcataagaggatgtagggaccaagcaatggaagctttacaaatgacaaaaccatgcttcttcaaatccacctggagccaaaatcatgttgaaaaatgtgttccacatttctccccacccttatatgtggctctcaatcatttaatggctctgaagggctcacagaagtctccaaagaactataacacagtttttacaaaaatcaggaatggagcttgctacaagtgccagaaatctgaccaccaggccaaggaatgcctgcagcccaggattcctcctaagccgtgtcccatctgtgcgggaccccactggaaatcggactgttcagctcacctggcagccactcccagagcccctggaactctggcccaaggctctctgactgactccttttgggcttag

SEQ ID NO: 115470 - DNA, 642 bp, Homo sapiens
atgtgggaaagtttggaactcaatagatacttgttgaatgactttgatcaaaagcccgatagtgatatggacaataaggtccaggctgaagtggtctcagatggagatgaggaacttgttgggaaccggagcaaagagacaaaggagacacgttttatccgtggacccaaaactccggcgctggtcacggactgggaaggcagccttcccttggtgtttaatcattgcagggaggcctgccttggtccttcacccttagcagcaagtcctgctttcctggggcaggggcaagatttaattaacctcgccttcaaggtgtacaataatagaaaaaagttgcaattcctggcctccactgtgagacaaaccccagccacatctccagcacacaagaacttccaaacgcctgaaccgcagcggccaggcgttcctccagaacctcctcccacaggagcttgctacaagtaccagaaatctgaccaccaggccaaggaatgcctgcagcccaggattcctcctaagccgtgtcccatctgtgcgggaccccactggaaattggactgttcaactcacctggcagccactcccagagcccctggaactctggcccaaggctctctgactgactccttctcggcttag

SEQ ID NO: 115471 - DNA, 1764 bp, Homo sapiens
atgggctgcctggggacccagagagctcccagggcctttctgctgcttcctctacccctgcactttgctcagctctctaacctgactcagctccaggcagcggcttccctttccatggtgacccaccggagctctggaggtggtggggagcgaggagcgacagcagcaggaaccgaacagggcggcgcctgcctggcagcgtcactcttgcggggcctgtgggacgcaggtgaagttactcccattagggttagggttaggccatatgatcctttcaccctggctccgcttcacgagcacagtgaagcccagtgtgtcgcatcaccctctctgactgtgactaaggagaaatcgctgcttcccaagagcctgctggcgggttctcgggaagtagcgcgcagccgtgccctttgccatggacaggcccgcccaccacccaggccccaggtcacgcaacagcgcacccagctccagggacaacgcatcctccaatggaggccggcgacagagggtccccacagtcccaggagggggtctgattctgcaaagggaacacatcctcctaccactgggacctgccctccgcgccgcaggcaaggagccggctacagccgctacaattccggagagtcccggaggcgactcggacgacagcaggacctagtagcgcgcagcgacgagcagcgagatccagcgcctgcgacaaggagagaagacaaaatgatagaagagctgcagccctttggggagcacagacctaggagatccccaagccagggctgtgacaccctctttcaggctctgtggttcctggcatctccaagcttccagcggggagggcagctccaggtgctggccctctgcaaggctgcggctggaccaggtgcaccacaggcagcttctacagctggcaccagggaacatgggtatgcctggaagcttggagacaccaggaaccacagagctctgaagaggaagtcacagacctggctcagacggttcccagctggttgtcctgatgtctgctctgctctggctgatctcagggcttttatgggcctcagaggggaggaagtgtgtgccgattggtccatgggtggccatgggagtggggagtgcaggagggggactggtgggcagagggctgtggttcctaaatctccagttcaagaaaaaggcaaagagcccttgagtcttctacagtatttcatggtggatgaaaaagaaagatttctcagaattacctcagaacatgaagacaatgataatagcaacaatagtagtaatcatagcagtatcaatgagacaaaagagacatgttttatccatgaacccaaaactccggcgccggtcacggactgggaaggcagccttcccttggtgtttaatcattgcagggatgcctctctgattatacactcatgtttcaagggtgtcagaccacacagggacgcctgccttggtccttcacccttagtggcaagtcccgctttcctggggcaggggcaagtacccctcaaccccttctccttcacccttagcggcaagtcccactttcctgggacaggggcaagaacttgttacaagtgccagaaatctgaccaccaggccaaggaatgcctgcggcccaggattcctcctaagccatgtcccatctgtgcgggaccccactggaaatcggactgttcaactcacctggcagccactcccagagcccctggaactctggcccaaggctctctgactgactccttctccgcttag

SEQ ID NO: 115472 - DNA, 771 bp, Homo sapiens; identical to SEQ ID NO: 114661

SEQ ID NO: 115473 - DNA, 5131 bp, Homo sapiens
atgctgttttgggcctttgacaaaattcaacagcccttcatgctaaaaactctcaataaattaggtattgatgggacgtatctcaaaataataagagctgtttatgacaaacccacagccaatatcatactgaatgggcaaaaactggaagcattccctttgaaaactggcacaagacagggatgccctctctcaccactcctattcaacatagtgttggaagttctggccagggcaatcaggcaggagaaggaaataaagggcattcaattaggaaaagaggaagtcaaattgtccctgtttgcagatgacatgattgtatatctagaaaaccccatcatctcaacccaaaatctccataagctgataagcaacttcagcaaagtctcaggatacaaaaacaatgtgcaaaaattacaagctttcttatacaccaataacagacaaacagagagccaaatcatgagtgaactcccattcacaattgcttcaaagagaataaaatacctaggaatccagcttacaagggatgtgaaggacctcttcaaggagaactacaaaccactgctcaaggaaataaaagaggatacaaacaaatggaagaacattccatgctcatggataagaagaatcaatattgtgaaaatggccatactccccaagaggactccattattatcgctgcctagtacattatatgaggagctgtggagacttaggtcctacttcccattgtgccctcaactttacaacatggagcagaataccacagactgggtaatttataaagaacagtgcatttggctcacagctctggagactggggagtccaagagcactgcaccagcatttggcaagggttatcccatggcagaatacatcatatggggcagattgacacctcacatggctggctactcctctgagacaaaacttccagaggaacgatcaggcagcaacatctgctgttcaccaatatccgctgttctgcagcctctgctgctgatacccaggcaaacagggtctggagtggacctccagcaaactccaacagacctgcagctgagggtcctgactgttagaaggaaaactaacaaacagaaaggacatccacaccaaaaccccatctgtacgtcaccatcatcaaagaccaaaggatcaaattcacacataacaatattaaccttaaatgtaaatgggctaaatgctccaattaaaagacacagactggcaaattggataaagagtcaagacccatcagtgtgctgtattcaggagacccatctcacgtgcagagacacacacaggatcaaaataaagggatggagggagatctaccaagcaaatggaaaacaaaaaaaggcaggggttgcaatcctagtctctgataaaacggactttaaaccaacaaagatcaaaagagacaaagaaggccattacatgatggtaaagggatcaattcaacaagaagagctaactaccctaaatatatatgcacccaatacaggagcacccagattcataaagcaagtccttagagacctacaaagagacttagactcccacacattaataatgggagactttaacaccccactgtcaacattagacagatcaacgagacagaaagttaacaaggatatccaggatttgaactcagctctgcaccaagtggacctaatagacatctacagaactctccaccccaaatcaacagaatatacattcttctcagcactacaccacatttattccaaaattgaccacatagttggaagtaaagcactcctcagcaaatataaaacaacagaaattataacaaactgtctctcagaccacagtgcaatcaaactcgaactcaggattaagaaactcactcaaaaaccggacaactacatggaaactgaacaatctgctcctgaatgattactggataaatagcgaaaagaaggcagaaataaagatattctttgaaaccaatgagaacaaagacacaacataccagaatctctgggacacatttaaagcagtgtgtagagggaaatttatagcactaaatgcccacaagagaaagcaggaaagatctaaaattgacaccctaacatcacaattaaaagaactggagaagcaagagcaaacacatttaaaagttagcagaaggcaagaaataactaagatcagagcagaactgaaggacttagagacacacaaaaacattcaaaaaatcaatgaatcgaggagctggttttttgaaaagatcaacaaaattgatagaatgctagcaagattaacaaagaagaaaagagagaagaatcaaatagatgcaataaaaaatgataaaagggatatcaccactgatcccacagaaatacgaactaacatcagagaatactataaacacctctatgcaaataaactagaaaatctagaagaaatggataaattcctggatgcatacatcctcccaagactaaaccaggaagaagttgaatctctgaatagaccaataacaggctctgaaattgaggcaataattaatagcttaccaatcaaaaaaagtccaggaccagatggattcatagccaaattccaccagaggtacaaggaggagctggaggccagcatcatcctgataccaaagcctggcagagacacaaccaaaaaagagaattttagaccaatacccctgatgaatattgatgcaaaaatcctcaataaaatactggcaaaccgaatccagcagcacatcaagaagcttatccaccatgatcaagtgggcttcatccctgggatgcaaggctcgttcaacatatgcaaatcaataaacgtaatccaggatataaacagaacgaatgacaaaaaccatatgattatctcaatagatgcagaaaaggcctttgacaaaattcaacaacccttcattctaaaaactctcaataaattaggtattgatgggacgtatctcaaaataataagagctatctatgacaaacccacagccaatatcatactgaatgggcaaaaactggaagcattccctttgaaaactggcacaagacaggggtgccctctctcaccactcctattcaacatagtgttggaagttctggccagggcaatcaggcaggagaaggaaataaagggcattcaattaggacaagaggaagtcaaattgtccctgtttgcagatgacatgattgtatatcgagaaaaccccatcgtctcaacccaaaatctccataagctgataagcaacttcagcaaagtctcaggatacaaaatcaatgtgcaaaaatcacaagcatttttatacaccaataacagacaaacagagagccaaatcatgagtgaactcccattcacaattgcttcaaagagaataaaatacctaggaatccaacttacaagggatgtgaaggatctcttcaaggagaactacaaaccactgctcaaggaaataaaagaggatacaaacaaatggaagaacattccatgctcatgggtaggaagaatcaatatcgtgaaaatggccatactgcccaaggtaatttatagatttaatgccatccccatcaagctaccaatgactttcttcacagaattggaaaaaactactttaaagttcatatggaaccaaaaaagagcccgcattgccaagtcaatcctaagccaaaggaacaaagctggaggcatcacactacctgacttcaaactatactacaaggctacagtaaccaaaacagcatggtactggtaccaaaacagagatatagaccaatggaacagaacggagccctcagaaataatgccacatatctacaaccatctgatctttgacaaacctgacaaaaacaagaaatggggaaatgattccctatttaataaatggtgctgggaaaactggctagccatatgtaggagaaagctgaaactggatcccttccttacaccttatacaaaaattaattcaagatggattaaagacttaaatgttagacctaaaaccataaaaaccctagaagaaaacctaggcaataccattcaggacataggcatgggcaaggacttcatgtctacaacaccaaaagcaatggcaacaaaagccaaaattgacaaatgggatctaattaaactaaagagcttctgcacagcaaaagaaactaccatcacagtgaacaggcaacctacagaatgggagaaaatttttacaatctacccatctgacaaagggctaatatccagaatctacaaagaactcaaacaaatttacaagaaaagaacaaacaaccccatcaacaagtgggtgaaggatatgaacagacacttctcaaaagaagacatttatacagccaaaaggcacatgaaaaaatgctcatcatcactggccatcagagaaatgcaaatcaaaaccacattgagataccatctcataccagttagaatggcgatcattaaaaagtcaggaaacaacagaccaagctccaatgtcttctctgtgaaactttctgagatccaatccttggctctcatagagactaggtgcttaatgaatgctgatgaacagggtgtgccactgattcaagaaatgctggaatcttgggcaagtatttgcaaagttcccaagtatccaaatgccgaagcagtgcggccagaagagcaaacaccccacctgcacccaggtgaaataaacagccatgttgctcacacaaagcttgtttggtggtctcttcacacggacacgcatgaaatttggtgccgtgactcggatcgggggacctcccttgggagatcaatcccctgtcctcctgctctttgctccgtgagaaagatccacctacgacctcaggtcctcagaccgaccagcccaagaaacatctcaccaatttcaaatccgcacacaagaacttccaaacgcctgaaccgcagcggccaggcgttcctccagaacctccttccccaggagcttgctacaagtgccagaaatctgaccaccaggccaaggaatgcctgcagcccaggattcctcctaagccgtgtcccatctgtgcgggaccccactggaaattggactgttcagctcacctggcagccactctcagagcccctggaactctggcccaaggctctctga

SEQ ID NO: 115474 - DNA, 782 bp, Homo sapiens
atgcgtaagggctgtaggcgtggacgggagggcgcagatgcggcgctgcgtgcgcggagatggtggcgcgccagtgcatcgtcgcgtatgataatggcgatgccgtccaggtctggtagaggacagaagaggcatgttttagccatgaacccaaaactccggcaccggtcacggactggggaggcagccttccagtggtgtttaatcattgcagggacgcctctctgatgatacactcacgtttcaagggtgtcagaccacgcagggacgcctgccttggtccttcacccttagcggcaagtcccgctttcctggggcaggggcaagtacccctcaaccccttctcctttacccttagcgcacataagaacttccaaacacctgaaccgcagcagccaggtgttcctccagaacctcctcccccaggagcttgctacaagtgccagaaatctgaccaccaggccaaggaatgcctgcagcccaggattcctcctaagccgtgtcccatctgtgcgggaccccactggaaactggactgttcaactcacctggcagccactcccagagcccctggaactctggcccaaggctctctgactgactccttctcggcttagcggctgaagactgatgctgcccgatcgcctcggaagccccgtagaccatcacggacgccgagcttccggtaactctcacagtggaaggtaagcccgtccccttcttaatcaatacggaggctacccgctccacattaccttcttttcaagggcctgtctcgtgcc

SEQ ID NO: 115475 - DNA, 1202 bp, Homo sapiens
  misc_feature (1)...(1202): n = a,t,c or g
caactcccttgtccttnaaaacaggttttgtttttttaaatccatctggaaaggtggtgggtgcccacacaanttaagctgtcttcccctctggcaggcaggcttcctgggaactacacattgggtaatcttgtcccataaaatgccgattggacacttattgtagaaatgccgagggcactgtagattcagatagtccccatcacaggcataggtggtgtggttttacaggagtttggttaggtaacctccactgtgagacaaaccccagccacatctccagcacacaagaacttccaaatgcctgaaccgcagcggccaggcgttactccagaaccttctcccccaggagcttgctacaagtgccagaaatctgactaccaggccaaggaatgcctgcagcccaggattcctcctaagccgcgtcccatctgtgcgggaccccactggaaatcggactgtctaactcacctggcagccactcccagcgcccctggaattctggcccaaggctctctgactgactccttcccagatcttctcggcttaacggctgaagactgaaactgcccgattgccttggaagccccctacaagaccatcacggatgccgagcttcgggtaactctcacagtggaagactcagcccgcctgcacccaggtgaaataaacggccatgttgctcacacaaagcctgtttggtggtctcttcacacggacgcgtgtgaaatttggtgccgtgactcagatcaggggacctcccttgggagataaatcccctgtcctcctgctctttgctctagagagacaaaggagacacgttttatccatggacccaaaactccggtgctggtcacggactgggaaggcagccttcccttggtgtttaatcattgcagggacgcctctctgattatacacccacgtttcaagggtgtcagaccacgcagggacgcctgccttggtccttcacccttagcggcaagtcccgcttttctggggaaggggcaagagcttgctacaagtgccagaaatctgaccaccaaggcaaggaacgcctgcagcccaggattcctcttaagccgtatcccatctgtgcgggaccccactggaaatcggactgttcaactcacctggcagccactcccagagcccctggaactctggcccaaggctctctgactgactccttcttggcttag

SEQ ID NO: 115476 - DNA, 984 bp, Homo sapiens
cgcccattctgtgcttttgtggagggcaagaacccccccaccccttctccatgtctctactcttttctctgggcttgcctccttcactatgggcaagcttccaccttccattcctccttcttctcccttagcctgtgttctcaaaaacttaaaacctcttcaactcacacctgacctaaaatctaaatgacttattttcttctgcaatgccgcttgaccccaatacaaactcgacagtagttccaaatagccggaaaatggcactttcaatttttccatcctacaagatctaaataattcttgtcctaaaattgacaaatggtctgaggtgcctgatgtccaggcattcttttacacatcggtccctgtgcccagtctctgtgcccagtgcaactcatcccaaatcttccttctttccctcctgcctgttccctcagtcccaaccccaagcatcgctgagtctttctaatcttccttttctacaggcccatctgaactcttcccctcctccccaggcatgctccttgccaggccgagctaggtcccaattcttccatcagcctctgctcctccaccctataatctttttatcacctcccctcctcacacctggtctggcttaccgtttcgttccgtgactagccctccccctcctgcccagcaatttactcttaaaaaggtggctggagctaaaggcacagtcaaggttaatgctcctttttctttatccgaaatcagatagcatttaggctctttttcatcaaatataaaaatccagcccagttcatgacttgtttggcagcaaccctgagacactttacagccctagaccctaaaaggtcaaaaggcagtcttattctcaaaatacattttattacccaatctgctcccgacattaaataaaactccaaaaattaaattctggccctcaaccccacaacaggatttaattaacctcgccttcaaggtgtacaataatagaaa

SEQ ID NO: 115477 - DNA, 517 bp, Homo sapiens
tttagcaaaaatgcaactacatcccctccatgtgcatttcatacactaaaggccattttgtggtggtgtggtgggttttcccagggttttctaaaatccttttcaggtacatttcctgccccgccccctgcaggtcttccaggatgcaaagccagtgtgctcactcttctcaaagtgaggtgccaggccaccgagcgtagggtccttcagcagtgcacaggatgtgggctctggcttcttcaagtaccgtggaccacggcccttgggtcaacagcaccggcggctggcttgcatggttggcttctcaactttgattgttccattgtttccattttcatgggggtccaagggtgggatctggcggcccgttcctgaccagcagtgtcccagatgaggaacttgtgaagtcatttccacaaagcacagttttggtcataaaagatgccccaatagtagggctgatgttgtggtcaaagtgatcctggacaaatcgacacacgatgcttgatttcccaac

SEQ ID NO: 115478 - DNA, 1845 bp, Homo sapiens
atgtgggaaagtttggaacttcctagagacttgttgaacggctttgcccaaaatgctgatagcaatatggacaataaagtccaggcggaggtggtcttagatggagatggggaacttgttggcaactggagcaaaggtcttccaggatgcaaagccagtgtgctcactcttctcaaagtgaggtgccaggccaccgagcgtagggtccttcagcagtgcacaggatgtgggctctggcttcttcaagtaccgtggaccacggcccttgggtcaacagcaccggcggctggcttgcatggttggcttctcaactttgattgttccattgtttccattttcatgggggtccaagggtgggatctggcggcctgcaacaaaaaggaggccaaggttctgctgcatgaagcccaattcatgggcttaggaagttcagtaatgctacagccctttgactatgatccgaatgaaaagagtaaacacaagtttatggtacagacaatttttgctccaccaaacacttcagatatggaagctgtgaggtgcccctcacagagcccagccaagctccacgggtggtcccacagagccagagcaagacgatcactcactccctctaaacactgcacttttattaacacggccacagctcgtattcttggcagccacaatacaccagtgctgaatattaactttattctcaaccaaactttaacccgttttactcctgctcccgctaaatctcagggccacacctcagacatctgcagttcgttttctgaacccaagagctgggccttttgtttgccagctctgtggagcacaacgggggggcgggataagtgtaggggccacggcacacacggtgggggctcacagacagaggccaagtacatctgtgatctcctcacaccacccaatgcatctgtaagctccctgccagtgagggcaccccccacccccaccacagattccaccagccaagagtgtccgcaccggcactggcttctctcgccgcaagaagtactgagcttccttcttttccctcttgattttgagagtctctacaccgccatggtaggaagtgagaaggaaacgggggaaggcacaccttctgtaggaaagcatgcttatgaaagagcccatgccgacggacctcctggcttgggagagggaatcaactctccccttccaacatgcactggcgtacgtgggctgacccaggacatccaagacactggccaggaatcagacaccctgagcacattagggagtgaagatgatgagaagactgctaagcctcagggtgacacctcagaggtcctgccagctgtaaagaactcaccacggactttccaagaggatggtgacattcccagactaccactgggagctgccaaaaactcagctcaaaaaccccagcgactagggcggtcgttgtgtgtgtggctagccaagtcacacagaggagacttagatggccccacattttattttttgaggaagggaggagccccagccgccccctttgcccctggagttcagcccacatggatctctcctttccagagcccctgctctcttgagctcagccctgcacagcctgatttctctcataactatgccctgagtgttcacttcactgttcccaaacagactttcgattctttgaagaatgatatggaacctagcaaagctgttccactgaatgcatctaagcaagatggacctatgccaaaaccacacagtgtttcacttaatgataccgaaacaaggaaactaatggaagagtgtaaaagacttcagggagaaatgatgaagctatcagaagaaaatcggcacctgaga

SEQ ID NO: 115479 - DNA, 1113 bp, Homo sapiens
atgtgggaaagtttggaacttcctagagacttgttgaacggctttgcccaaaatgctgatagcaatatggacaataaagtccaggcggaggtggtcttagatggagatggggaacttgttggcaactggagcaaaggtgactcttgttatgttttagcaaagagactggcagcattttgcccttgccctagagatttctggaattttcaacttgagagagatgatttagggtacctggcggaagaaatttctaagcagagaagcattcaagaggtgacttgggtgctgttaaaggcatttggttttataagggaagcagagcataaaagtttagaaaatttgcagtctggcaatgtgatagaaaagaaaatcccattttctgaggagaaatccaagctggctgcagaaatttgcataagtaatgtggagccaaatgttcacactcccacccagtatctcccaggtcttccaggatgcaaagccagtgtgctcactcttctcaaagtgaggtgccaggccaccgagcgtagggtccttcagcagtgcacaggatgtgggctctggcttcttcaagtaccgtggaccacggcccttgggtcaacagcaccggcggctggcttgcatggttggcttctcaactttgattgttccattgtttccattttcatgggggtccaagggtgggatctggcggcctgcaacaaaaaggaggccaaggttctgctgcatgaagcccaattcatgggcttaggaagttcagagacccatcctggtttaatgagcggctttcatggtaccgtgacttcaacagtaacacctgggataagtcacacacatgccaaccttaaacacagggagaaggaaatgcttccacgcagagaaagagaaaagccagatcataacaatgaggccggcacctttaaaaggagaagggagcctgcaccaggaaaccagaacgcaaaacaagaaagcaaacgccgaacgcaaaccccgatcttagggcctaaggtattcagaatttaccggaaggttcaaggcacttacacaaaggcatggttttggaaaatggccatggctttctgtaccaaggtgatcaccttggaactctgttga

SEQ ID NO: 115480 - DNA, 1101 bp, Homo sapiens
atggaaccaattgctgggcatgagtacgtctctgatatcgactatacaaatgattatacaatgaaacactatctggcccacagtgtgtatggagttggatccttccagtgggttcgtggtctcgctgccttcgagaatgaagccgtggaccttcgcgtgtccctggggagacaagaggccttccatgcgaaggccctggacataggtgaagtacccattacccagatgtctcaccaaatcccaggactaaggatcctggctgtgggcaatctgcagggtggaagaacaatcctgtttcgcctaacatgtcttgtcacagttcccaaggcccccgctaaggacgcgtggaatggggaggacactggggttgggaaatcaagcatcgtgtgtcgatttgtccaggatcactttgaccacaacatcagccctactattggacaccacacgctctccctggtcaccccaaactccaccagccctcaccttctgaacatctggcaactaagcatctggcgatatcccactgggatgtctggtgtttatggctataagtttccctctgagcactgctctgaagttttggaatgttgtgcttttgtcttcattcatctcaaggcctgggttcctgtgaaaagtcaacggcccctgagggggctgctggagcagcaggacagcctagcagtggcctccacccctgcccacagccctgagatccagccgagggctgccatggacatactgaggaagagccggaaacttcagggccacacgagccacggccatggccacatcaccgagtgcggaagcaccgtggaggctgtggtaatgcaggtggtgtgcaccaccacaggatcaactttgacaaatgtcacccaggcccagggcttacgcaccacagggggacagtgtccgtgcttcagaagggatgtgcggaacaactgctttacagcaagatttacgatgtccttgggtagctgctatacccggtcagagaagtggggaaaagctcgttcatggatgaccaaagaggccttgttgaaacactatcgtaatttactagaaaagttccagtaccatattggcagtcgtgttaaagagtaa

SEQ ID NO: 115481 - DNA, 1285 bp, Homo sapiens
  misc_feature (1)...(1285): n = a,t,c or g
gagcgtggggcaaaggcgatagacgccggcggtgcgcgggcgcggcnggccccggaggatgctgctgagccccggcactgcctggctgcgagcacatgatggcgatacgggagctcaaagtgtgccttctcggggacactggggttgggaaatcaagcatcgtgtgtcgatttgtccaggatcactttgaccacaacatcagccctactattgggggcatcttttatgaccaaaactgtgccttgtggaaaatgacttcacaaagttcctcatctgggacactgctggtcaggaacggttttcattcattgggctcccattgtactattcgaggcttcagctggcagctgtttattcgtgttatggatatttaccaagcagggatttcatttttattaccttgaaagaaatgggtccaagcggctgaaagaacttggtccggaaaaacattgtaatggccatcgctggaaacaagtgcgacctctcagatatttagggaggttccccctgaagggatgctaaaggaatacggctgaatccataggtgccatcgtggttgagacaagtgcaaaaaatgcctattaatatcgaaagagctctttcaaggaaatcagccgcccagatccccacccttggacccccccatgaaaaatgggaaacaatgggaacaatcaaagttgagaagccaacccatgcaagccagtccgccggtgctgttgaccccaaggggccgtggtcccacgggtactttgaagaagccagagccccacatccctgtggcactgctgaaggaccctacgcttcggtgggcctgggcacctcactttgagtaagagtgaggcacactggctttgcatcctggaagacctgcagggggcggggcaggaaatgtacctgaaaaggattttagaaaaccctgggaaaacccaccacaccaccaccacaaaatggcctttagtgtatgaaattgcacatggaggggatgttagtttgcatttttgctaaaaaaaaaaaaaaaaacctttaaaaattgttggatgtgtacaaaagtcttactgccttattatgtgtatgggattctaaagtggcattccacttggatttcctgtgctacctatccaaattccaagtaactacttcaggggcattgcctttgttacctaaccacccttccctgaagggcaaatttagttcaggggggtagtttttacctacctttggaagaaaccctttatttattactttttggaggaaatcaaaaaaggggcaagggcccgcccctcaa

SEQ ID NO: 115482 - DNA, 149 bp, Homo sapiens
atgcagctgcaaacattttttgagacattcctgagagccagttcacctcaacaggcttttgacattatgaaggaagcaattggcaaactactgctagcggctgaagtattcagtgaaacatctactctgggaccaaagaccttccatag

SEQ ID NO: 115483 - DNA, 294 bp, Homo sapiens
atggctgaacttacaatcatggcagaaggcaaaggggaagcaaggcaccttcttcacagggcagcagaaaggagaagtgccaagcaaaagggggaagagccccttataaaaacatcagatctcgcaggactgagagtaagacatacttttatggaactgagctacctggagatgataggataccagactagtcaaggccaggtggcagcaccaaattatcagagtcaagatgaatgtaattcttgtaatgggcagcactgtgagaaatccctaacccatgcaaataaacaataa

SEQ ID NO: 115484 - DNA, 469 bp, Homo sapiens
tttcgtgagcatttgcagctggtcactccagtctcctgggactttgactcgccgtactcggcgcgctcctgctgagggtcgccggagatgtcgctcggccgccttctaccaggagcctgatccgtgccgcccgccgcccggatgggaccaccagagtgctctaaagtctccagtgaatattgaattgctgaggattttgggaaaagacaaatcaaagttcccattccatggatcccttaggtgcaccttcccagtttgtggatgtggatacactaccaagctggggtgactcatgccaagatgaattaaattcctctgatactacagctgaaatatttcaggaagacactgttcgatcaccttttctttataataaggacgtcaatggaaaagtggttctttggaaaggagatgtggcattactgaactgtacagccattgtgaataccagcaatgaaagtctcacaga

SEQ ID NO: 115485 - DNA, 518 bp, Homo sapiens
atgcaagagagaaaagctaattcccacttggtgaaagagcacttaagtctcagtgagcaaacaaggaggagtcagccttggtcacttccccctcaagcggccagagagcggaaacacaaagccaggccagtgtcactccagggattgcgggaacctagacaacgcaccatcctgggctcagcgtctacccacccctcacccgagagacggcgtccccgtacaacgcctcgtggaaagaacctaagcaacatgcgaggaagtggcgccaggctcgttcttcaagagaacactctggtggtcccatccgggcggcgggcggcacggatcaggctcctggtagaaggcggccgagcgacatctccggcgaccctcagcaggagcgcgccgagtacggcgagtcaaagtcccaggagactggagtgaccagctgcaaatgctctgggctgcgaaacaccggcttccgctcctggccagagctcaccaatcagcgcccggctttctccgtcatttcctcctag

SEQ ID NO: 115486 - DNA, 461 bp, Homo sapiens
acactttagttgggagctgcgcgccgcgctcagttactggagagctggccgcgcgccgccgcctcccgcacgcttgcacgcttgccaccttcagcccccccgcgaacgcccaaggtgcacacatcttgaccaactcagcagcaaggtggattttctttgtgtttaaagaaaaaaaatgtccctgtgtctgtagagatgatttgcagttcagcccggctgaagctgaccgaatgagactatgggctgtgcctccgccaagcatgttgccactgttcaaaatgaagaggaagcccagaaagggaaaaactaccagaacggagatgtgtttggcgatgagtataggatcaaaccagtggaagaggtcaaatacatgaaaaatggggcagaagaagagcagaaaatagcagccaggaaccaagaaaacttggaaaaaagtgccagctcaaatgtaagacttaaaa

SEQ ID NO: 115487 - DNA, 489 bp, Homo sapiens
atgggctgtgcctccgccaagcatgttgccactgttcaaaatgaagaggaagcccagaaagggaaaaactaccagaacggaaatgtgtttggcgctattatggccctcgactatgtggttactcgacacagcgacacacttgcgtcggatgcacccctgctgacgtgccggctccgacttgggaaccagggctcgcagctctttcctgcacttcctacatcctatccttactgtgcttttatgtgtcttctttccaactataccatgagtgacaaaagcaggggctctctcttattcactgtggtagataatctacccccaactcctagcacagaagtgcattatggtactagtcaagaagaacaggggaagtgtttgagatttggagatttggcagtggtcggcttggagagtggacggtgtacctgcaaagggtgtgtagaaggatgtggtgcaaagtcggcagcccacgagacacattcggcatga

SEQ ID NO: 115488 - DNA, 957 bp, Homo sapiens
cggccgctgcttctttcaactttatgttgggagctgcgcgccgcgctcagttactggagagctggccgcgcgccgccgcctcccgcacgcttgcacgcgggcccggcttcggggttttgggttcttactccaagcggcggggaggagggggagccccggacacactgtggggaggaggaggaagaagaggaggagggaggaagaaaaaagacgaggaggacaggggcggggggcgggaggcttgccaccttcagcccccccgcgaacgcccaaggtgcacacatctttgaccaactcagcagcaaggtggattttctttgtgtttaaagaaaaaaaatgtcccctgtgtctgtagagatgattttgcagttcagcccggcttgaagctggaccgaatgaagactatgggctgtgcttcccgccaagcatgttgccactacttcaaaatgaagaggaagcccagaaagggaaaaacttaccagaacggagatgtgtttggcgatgagtataggatcaaaccagtggaagaggtccaaatacatgaaaaatggggcagaagaagagcagaaaataggcagccaggggaccaaggaaaacttggaaaaaagtgcccagctcaaatgtaagacttaaaactaataaagaggttccgggattagttcatcaacccagagcaaacatgcacatctctgaaagccaacaagaattcttcagaatgctggatgaaaaaattgaaaagggtcgggattactgttcggaagaagaggatatcacatagcaccaattttaccactcaaaccaggagctactactgtgtaaataggttacaccccagttgaaatctttgcaaaggtcggttctattcagcgaacagcactatagcaaaagaagatcgttccatattgtacgccccattaaattacagtgtttcttaatgaacttgcaaaggaatattgc

SEQ ID NO: 115489 - DNA, 459 bp, Homo sapiens
cgggaatttttaggccaccatgctatctactttgtggattgtagtagtaaatgaacgaaggcggacttcctcagaattggtaataaactgtggtcccgactcttcccatttttcaggtacaaccaaatctttgtctgtataaatcagcagatcaaatgaacaagaaacttccaacagtggcagaaatgtcaccgtagctgtgatctgtctgatcactgaacggatttcatcctggatagctttctgagacttttctctgggtgcaagaagaactcggccacgatttcgcgtccgcgcagggtgattccctgctcccgggagagctgcagcgccatggccagggacacaaacaaaagcacgcgcttccactccgcggacagcaaccacagcggctccaacagcacttccccgccaagcgtttcaaaagtaacgacgcagcacgtcgtcaggtcctttgcg

SEQ ID NO: 115490 - DNA, 320 bp, Homo sapiens
cattcggcatcaacagcattttatatcagcgtggcatatatccatctgaaacctttactcgagtgcagaaatacggactcaccttgcttgtaactactgatcttgagctcataaaatacctaaataatgtggtggaacaactgaaaggttcatttgatctgctgatttatacagacaaagatttggttgtacctgaaaaatgggaagagtcgggaccacagtttattaccaattctgaggaagtccgccttcgttcatttactactacaatccacaaagtaaatagcatggtggcctacaaaattcctgtcaatgactga

SEQ ID NO: 115491 - DNA, 426 bp, Homo sapiens
atggcgctgcagctctcccgggagcagggaatcaccctgcgtgggagtgccgaaatcgtggacgagttcttctcattcggcatcaacagcattttatatcagcgtggcatttatccatctgaaatctttactcgagtgcagaaatacggactcaccttgcttgtaactactgatcttgagctcataaaatacctaaataatgtggtggaacaactaaaagattggttatacaagtgttcagttcagaaactggttgtagttatctcaaatattgaaagtgacaaagatttggttgtacctgaaaaatgggaagagtcgggaccacagtttattaccaattctgaggaagtctgcctttgttcatttactactacaatccacaaagtaaatagcatggtggcctacaaaattcctgtcaatgactga

SEQ ID NO: 115492 - DNA, 1455 bp, Homo sapiens
  misc_feature (1)...(1455): n = a,t,c or g
ctgacgacgtgctgcgtcgttacttttgaaacgcttggcgggggaagtgctgttggagccgctgtggttgctgtccgcggagtggaagcgcgtgcttttgtttgtggtccctggccatggcggctgcagctctcccgggagcagggaatcaccctgcgcgggagccngcataatcgtggccgagttcttctcattcggcatcaacagcattttatatcagcgtggcatatatccatctgaaacctttactcgagtgcagaaatacggactcaccttgcttgtaactactgatcttgagctcataaaatacctaaataatgtgggtggaccaactgaaagatttggttatacaaggtgttccagttcagaaactgggttgtagttattcttcaaatatttgaaagtgggtgaggtcctgggaaagatgggcagtttgatatttgagtgtgacaagactgcaaaagatgacagtgcacccagagaaaagtctcagaaagctatccagggatgaaatccgttcagtgatcagacagatcacagctacggtgacatttctgccactgttgggaagtttcttgttcatttgatctgctgatttatacaggcaaagatttggttgtacctgaaaaatgggaagagtcgggaccacagtttattaccaattctgaggaagtccgccttcgttcatttactactacaatccacaaagtaaatagcatggtggcctacaaaattcctgtcaatgactgaggatgacatgaggaaaataatgtaattgtaattttgaaatgtggttttcctgaaatcaggtcatctatagttgatatgttttatttcattggttaatttttacatggagaaaaccaaaatgatacttactgaactgtgtgtaattgttccttttatttttttggtacctatttgacttaccatggagtttacatcatgaatttattgcacattgttcaaaaggaaccaggaggtttttttgtcaacattgtgatgtatattcctttgaagatagtaactgtagatggaaaaacttgtgctataaagctagatgctttcctaaatcagatgttttggtcaagtagtttgacccaagtataggtagggagatatttaagtataaaatacaacaaaggaagtcctaaatattcagaatctttgttaaggtccctgaaagtaactcataatcctataaacaatgaaatattgctgtatagctccttttgaccttcatttcatgtatagttttcccctattgaatcagtttccaattatttgactttaatttatgtaacttgaacctatgaagcaatggatatttgtactgtttaaatgttctgtgatacagaactcttaaaaatgttttttcatgtgttttataaaatcaagttttaagtgaaagtgaggaaataaagttaagtttgttttaaaaaaaaaaaaaaaaaa

SEQ ID NO: 115493 - DNA, 330 bp, Homo sapiens
atcttctgatgagaacttcaggatgcttccacttatggaggaaggtaaaggggaaccagtatgtgcagagatcacatggtaagagtggaagcaagagaggggtggggaggtgaaaggctctttttaacaaccagctctcagctctttgggaaccaataaagtgagaactcacttaccacctcaccctaacctccagggagggcattaatctattaatgaaggatccaccctcccatgacccaaacacttctcattaactccccctaccaatgttagggatcagatttcaacatgacattctgagggtcaaacatctgagctatagcaagg

SEQ ID NO: 115494 - DNA, 351 bp, Homo sapiens
atggagccagcatcatcttctgatgagaacttcaggatgcttccacttatggaggaaggtaaaggggaaccagtatgtgcagagatcacatgctcctttagacaccgtctggtggattccttggggtcaggcaggaatgtccttgggcacccagtgaactcccagggcctttctgctgcttcttctacccctgtattcactcagctctctaaattgactcagctccagattattgcccccaggtgctattttgctgtagggaatctcagaaataaaggaaccaacagaaaggataatgtgaggacacagggatctgcaggtcaaggagagaagaggcctcaagagaaatga

SEQ ID NO: 115495 - DNA, 250 bp, Homo sapiens
atggctttagcagcacctcaatttgggatgtctattttccggaacagcgggaataagtgtctgctgctctggtctctcactgccttcgagccccatcacctgctcgggctccccctctgtgtgtccccagttctggacacttattcagcagacctgtcatgcgacatctacatccgcatcaagatgctccaaactgcccagcagcaccaagtcgggctggccccgacagaacgaaaagaagccctccgag

SEQ ID NO: 115496 - DNA, 2985 bp, Homo sapiens
atgctcctggtcatgtattgggcccctgccccgccccctgtgcacatgtcccagttcctcactactggtcctaagtgcctagaactgagtctggaccatgggagggactcacaggagatcacagcatctggccttttgtggctacaacatgctgcctgtggcctggctcagtggaaccaaaaaccacatcctccatttctaactttattgcaggcagaggagccctttgagagagccaggtcatgcgacatctacatccgcatcaagatgctccaaactgcccagcagcaccaagtcgggctggccccgacagaacgaaaagaagccctccgaggaagtcagagtccccagaagtcagccagtgggcagaggcctgggtctctggaccgggagctgctgatgctgatcaaaatcagcaagtgcttaagagtacctagtgggcctagctcagtgctggggacagaaagcacaggccctgtccctggggagcttgtcctttgtcagcaggatgcaggtgctacacaggaaggtgtctgttatgggagggagttgatgatctgtagatgtgactccttcccgagactcatggagccctggggggtgaagggaaccccagaggttttccggacagacttgatcacagccatgaagatcccggactcataccagctcagcccggatgactactacatcctggcagacccatggcgacaggaatgggagaaaggtgtgcaggtgcctgccggggcagaggccatcccagagcccgtggtgaggatcctcccaccactggaaggcccccctgcccaggcatccccgagcagcaccatgcttggtgagggctcccagcctgattggccagggggcagccgctatgacttggacgagattgatgcctactggctggagctcatcaactcggagcttaaggagatggagaggccggagctggacgagctgacattagagcgtgtgctggaggagctggagaccctgtgccaccagaatatggccagggccattgagacgcaggaggggctgggcatcgagtacgacgaggatgttgtctgcgacgtgtgtcgctctcctgagggcgaggatggcaacgagatggtcttctgtgacaagtgcaacgtctgtgtgcatcaggcatgctacgggatcctcaaggtgcccacgggcagctggctgtgccggacgtgtgccctgggtgtccagccaaagtgcctgctctgccccaagcgaggaggagccttgaagcccactagaagtgggaccaagtgggtgcatgtcagctgtgccctatggattcctgaggtcagcatcggctgcccagagaagatggagcccatcaccaagatctcgcatatcccagccagccgctgggctctgtcctgcagcctctgcaaggaatgcacaggcacctgcatccagtgttccatgccttcctgcgtcacagcgttccatgtcacatgcgcctttgaccacggcctggaaatgcggactatattagcagacaacgatgaggtcaagttcaagtcattctgccaggagcacagtgacgggggcccacgtaatgagcccacatctgagcccacggaacccagccaggctggcgaggacctggaaaaggtgaccctgcgcaagcagcggctgcagcagctagaggaggacttctacgagctggtggagccggctgaggtggctgagcggctggacctggctgaggcactggtcgacttcatctaccagtactggaagctgaagaggaaagccaatgccaaccagccgctgctgacccccaagaccgacgaggtggacaacctggcccagcaggagcaggacgtcctctaccgccgcctgaagctcttcacccatctgcggcaggacctagagaggggctcccccaacccattagtgcccttgcctcacccaagcccagtcaccacctccagctgctcccaggttagaaatctgtgctacatggtgacaaggcgcgagagaacgaaacacgccatctgcaaactccaggagcagatattccacctgcagatgaaacttattgaacaggatctgtgtcgagagcggtctgggaggagagcaaagggcaagaagagtgactcgaagaggaagggctgcgagggctccaagggcagcactgagaagaaagagaaagtgaaggcggggcctgactcagtcctggggcagctggcaggcctgtccacctcattccccatcgatggcaccttcttcaacagctggctggcacagtcggtgcagatcacagcagagaacatggccatgagcgagtggccactgaacaatgggcaccgcgaggaccctgctccagggctgctgtcagaggaactgctgcaggacgaggagacactgctcagcttcatgcgggacccctcgctgcgacctggtgaccctgctaggaaggcccgaggccgcacccgcctgcctgccaagaagaaaccaccaccaccaccaccgcaggacgggcctggttcacggacgactccagacaaagcccccaagaagacctggggccaggatgcaggcagtggcaaggggggtcaagggccacctaccaggaagccaccacgtcggacatcttctcacttgccgtccagccctgcagccggggactgtcccatcctagccacccctgaaagccccccgccactggcccctgagaccccggacgaggcagcctcagtagctgctgactcagatgtccaagtgcctggccctgcagcaagccctaagcctttgggccggctccggccaccccgcgagagcaagctccagcagctcagctgtgaatgggaagagctcagcgtcctcaactgtggaatcagcatgggatgctggcaggaaatcagccctggggctgagggggtatctgggtggccagcccacctggccatgaacaccattgtggcggctgactcatctgtcaccaggacactctccacgtga

SEQ ID NO: 115497 - DNA, 292 bp, Homo sapiens
  misc_feature (1)...(292): n = a,t,c or g
atggtggtttcaaaaggtgactggaagaaagcggaaggaatgcttgcctcatcttgcagacatcaggtgcattcctgagaagctacaggtgcacaaccttagtcaggctctggggatacagaagtaacaagaagaccagacccttgttccaatggaggagacatcctgtctcgcgctcttgcccttgctggagtgcagnggtgtgatctcggctcgctgcaacctccgcctcccgagttcaggcgattcttctgcctcagcttcccaggtggctgggattgcaagcgtgtgc

SEQ ID NO: 115498 - DNA, 996 bp, Homo sapiens
  misc_feature (1)...(996): n = a,t,c or g
aaatagcaccccagttttcctctgggaaaatccttctcccactctctgttcaaaagattcaggtgctgtcagcttcatcctctgattcagtttccaagtcgtcctttgtatttgatgcccttaacacacgtatatgcatgtgtgcatccacggacatatgcacattatttggacgtgtaattttggagaacaaaattaaacttcacagaaccaccaacagaccaaaaacacatttttcatactttattgcttcctcacctcttcggattaggagaacaggtggatatttcagcgtgaatctgaatgaagaaattttgagaagaggccttggcaaaactgttcttgttaaagggcttaaatatgattctaaaatctactggacagttcacagaaacttacttaaagctgaattaacagccttaaaaaaaggagaaggaatatggaaggaagactctgaaaaagaaagttacttagaaaaattcaaagattcctggagagaaatatggaaaaaggacagttttttaaaaacaacaggatcagatttcagcttgaaaaaagaaagttattatgaaaaacttaaaaggacttatgaaatatggaaagacaacatgaacaactgctccttaatactgaagttcagagaacttataagtcgcataaactttcgtagaaaagggtgaaacggtcaagaaatctagaggtaaccttctccaaagagtgaaatatgtaaatatatggacgtttttcattgaatcaaaatggaagttttgccaaatgatcaaagggttagtccaatggtatttaaatattaaaaagagatgattattataagcataatgtcagaattaatttaaacaaattataattaatgtaatatgattttaggaaagatgaaacactttatgagaagttaccaggctgaatgatttacatatatagggctaatgggtgaagagaaaagttaactcctccaccctttggntggtttaagttatt

SEQ ID NO: 115499 - DNA, 281 bp, Homo sapiens
gggttctaggtgtgagtcaccgagttgagcccctaaacacatgtttttctttttagagacagggtctcactccagcctgggtgacagagcaagaccctgtctcaaaaaaaaaaaagctgggcgtggtggctcatgcctgtaatcccagcactttgggaggccgaggcgggcggatcacctaattagccgggcatggtggcacatgcctgtaatcccagctactcgggaggctgaggcaggagaattgcttgaacctgggaggcggaggttgcagtgagctg

SEQ ID NO: 115500 - DNA, 341 bp, Homo sapiens
cgtttggttttgtttttcttctttgtttgtttttgagatggagtcttgctctgtctcccagactacagtgcagtggcatgatctcagctcactacaacctccgcctcccaggttcaagcgattctcctgcctcagcctcccgagtagctggtattacaggcacaggccagcacgccaggctaatttttgtatttttagtacagatggggttttgccatgttggccaggctggtttcaaactcctgacctcaggtcatccacccacctcagccttccaaggtgctgggatgacaggtgtgagcccccgtgcccagccaagacaggagaagttctaatctttg

SEQ ID NO: 115501 - DNA, 505 bp, Homo sapiens
ttttttttttaggtggagttttgctcttgttgctcaggctggagtgcaatggcaccatctcagctcaccgcaacctccgcctcccaggttcaagcgattctcctgcctcagtctcccgagtagctgggattacaggcatgcagttagagtttttaaggtgatgaaaaagttttggaaatagatagtggtgatggatgcaaaacactgtgaatataattgatgtcactgaattgtacactaaaaaaaatggcaggtttatgtcatatatattttaccacaattttttttttttccttgagacagaatctcgctgttgcccaggctggaatgcagtgggcgcaatcttggctcattgtgacctctgcctcctgggttccagcgattttcccgctcagcctcccgagtagttgggaccacaggggcatgccaccacacttggctaatttttaatttttttttggtagagacgtgggctttaccatgttagccaggctggtctcgaact

SEQ ID NO: 115502 - DNA, 469 bp, Homo sapiens
cccacgcgtccgcccacgcgtccgggagtcctggtttttgcttcatttccttcaccaccattatccaaagattgtattgagcagaattttttagacaacttccctagcagtgacaccctgtccttcattgcaaggatattcctgctgttccagatgatgactgtatacccactcttaggctacctggctcgtgtccagcttttgggccatatcttcggtgacatttatcctagcattttccatgtgctgattcttaatctaattattgtgggagctggagtgatcatggcctgtttctacccaaacataggagggatcataagatattcaggagcagcatgtggactggcctttgtattcatatacccatctctcatctatataatttccctccaccaagaagagcgtctgacatggcctaaattaatcttccacgttttcatcatcattttgggcgtggctaacctgg

SEQ ID NO: 115503 - DNA, 1023 bp, Homo sapiens
atggtgcgcatgcctgtaatcccagctactcgggaggctgaggcgggagaattgctgaacctgggaggcggaggttgcggtaaatgggcagtaagatggaaaaaatggagtggcagacagcaggatccaggtggcagcatggcagccccagacaacttctggctggggtctagtcccagtaaaaagtcaggacccaggctaaaaaccaggaggcagacaggcatgaatacagggaagctgcagcttagtgtgcacctggagccttgggccagccccaccatctggggaccagctaatgaaggtgtttcaaggctacctctggtgtctcaaacgaccccctttacaggcccattgtcactgccaccaccccgatactgggtacatgtggtgtaccaatatggagatgaatactctgaaggtcatgcatttgttgcccaaaattttttgacaacttccctagcagtgacaccctgtccttcattgcaaggatattccgctgttccagatgatgactgtatacccactcttaggctacctggctcgttccagcttttgggccatatcttcggtgacatttatcctagccgaacacctagtactacttcctccggtgccttacgccgaaggctcctgccgaccaggcgcctccagattggccgcttgcttaaagtttttcgtgtcttttctggactttgtcctccggtattttggggaattggcatacaggtcgggggagtgtttcgcccatgggtttgcactccttgtaaacgcactacaagcgcccgaaatcttgccaacattcgcgccgctcgtacgcgcgttcggacctccgaacgtctgcaagtaccgttttcttggccccatacacacagggagaatacaaaagacaaaaatttgcatagatgccgtttcttccaaggtcgcgtcacttcggtactggtagtaaccatcgtcgcatggagtgttggtaacaatgtggtatcaattgacggaaccacgtaccgtacaatatttatcatttga

SEQ ID NO: 115504 - DNA, 3143 bp, Homo sapiens
gtctttatttcagtcccggatccgcgggcgcaggcccagctcaggcccccagggatggacgtcgtggaccctgacattttcaatagagacccccgggaccactatgacctgctacagcggctgggtggcggcacgtatggggaagtctttaaggctcgagacaaggtgtcaggggacctggtggcactgaagatggtgaagatggagcctgatgatgatgtctccacccttcagaaggaaatcctcatattgaaaacttgccggcacgccaacatcgtggcctaccatgggagttatctctggttgcagaaactctggatctgcatggaattctgtggggctggttctctccaggacatctaccaagtgacaggctccctgtcagagctccagattagctatgtctgccgggaagtgctccagggactggcctatttgcactcacagaagaagatacacagggacatcaagggagctaacatcctcatcaatgatgctggggaggtcagattggctgactttggcatctcggcccagattggggctacactggccagacgcctctctttcattgggacaccctactggatggctccggaagtggcagctgtggccctgaagggaggatacaatgagctgtgtgacatctggtccctgggcatcacggccatcgaactggccgagctacagccaccgctctttgatgtgcaccctctcagagttctcttcctcatgaccaagagtggctaccagcctccccgactgaaggaaaaaggcaaatggtcggctgccttccacaacttcatcaaagtcactctgactaagagtcccaagaaacgacccagcgccaccaagatgctcagtcatcaactggtatcccagcctgggctgaatcgaggcctgatcctggatcttcttgacaaactgaagaatcccgggaaaggaccctccattggggacattgaggatgaggagcccgagctaccccctgctatccctcggcggatcagatccacccaccgctccagctctctggggatcccagatgcagactgctgtcggcggcacatggagttcaggaagctccgaggaatggagaccagacccccagccaacaccgctcgcctacagcctcctcgagacctcaggagcagcagccccaggaagcaactgtcagagtcgtctgacgatgactatgacgacgtggacatccccacccctgcagaggacacacctcctccacttccccccaagcccaagttccgttctccatcagacgagggtcctgggagcatgggggatgatgggcagctgagcccgggggtgctggtccggtgtgccagtgggcccccaccaaacagcccccgtcctgggcctcccccatccaccagcagcccccacctcaccgcccattcagaaccctcactctggaacccaccctcccgggagcttgacaagcccccacttctgccccccaagaaggaaaagatgaagagaaagggatgtgcccttctcgtaaagttgttcaatggctgccccctccggatccacagcacggccgcctggacacatccctccaccaaggaccagcacctgctcctgggggcagaggaaggcatcttcatcctgaaccggaatgaccaggaggccacgctggaaatgctctttcctagccggactacgtgggtgtactccatcaacaacgttctcatgtctctctcaggaaagaccccccacctgtattctcatagcatccttggcctgctggaacggaaagagaccagagcaggaaaccccatcgctcacattagcccccaccgcctactggcaaggaagaacatggtttccaccaagatccaggacaccaaaggctgccgggcgtgctgtgtggcggagggtgcgagctctgggggcccgttcctgtgcggtgcattggagacgtccgttgtcctgcttcagtggtaccagcccatgaacaaattcctgcttgtccggcaggtgctgttcccactgccgacgcctctgtccgtgttcgcgctgctgaccgggccaggctctgagctgcccgctgtgtgcatcggcgtgagccccgggcggccggggaagtcggtgctcttccacacggtgcgctttggcgcgctctcttgctggctgggcgagatgagcaccgagcacaggggacccgtgcaggtgacccaggtagaggaagatatggtgatggtgttgatggatggctctgtgaagctggtgaccccggaggggtccccagtccggggacttcgcacacctgagatccccatgaccgaagcggtggaggccgtggctatggttggaggtcagcttcaggccttctggaagcatggagtgcaggtgtgggctctaggctcggatcagctgctacaggagctgagagaccctaccctcactttccgtctgcttggctcccccaggctggatggagtgcaatcgggtgtgacctcggcttactgcaacctctgcctcccaggttcaagcaattctcctgcctcagcctcccgagtagctgggattacaggcatgcgcaccactaacgtgcccgggcaatttttttattcccagtaaagacggggtttctccatgttggtcatgctgatctcaaactcccaacctcaggtgataacgcacgccttggcctcccaaaagtgctgggattacaggcttgagctgagctaccgcgcccggctttttttttttttttttttttttttgagacggagttttgcttttgttgccgaggctggagtgcaatggcgcaattccggctcaccgcaacctccgcctcccaggttcaagcaattctcctgcctcagcctcccgagtagctgggattgcaggcatgcgccaccatgcctggctaattttttttctgtttttagtagagacggggtttctccacgttggtcaggctggtctcgaactcctgacctcaagtgatccgcccacctcggcctcccaaggtgctgggattacaggcgtgagccaccacgcccagcaatttattcatatatgtaaactatctgaaactcttgtagcaataaagcaggatacttattaaatatcctgccacattacacaggttcaggcttcaagatccagacgtcgac

SEQ ID NO: 115505 - DNA, 1707 bp, Homo sapiens
atgatgcttactgaagttgcttggactacccggcaaattgcccaggggggcacagtcccactgctccctgccaccaggacacatcagcacctgctccagggaatcacggtgccccatgaaaagtggagcaaactcttctcacccactctccccccgactagtgaccctaaggattgggatgagaaagagaaagctttggaagagcctaatcccaggaactggctctatgcctttagtctccatctagttactaaaatccagcttctgaaattcacacccatggatggagttcttccagcctacaagcctcgcaagaccatagggtctttagattttgaaaaacatccctgtcttaacaacgcagtaaggctgtacgtcaaacttcccccgtgtgtgatgtctttacccaagcacacaagggccatggacgtcacgcgaaaagcgcgccactcagaaaccccaacgctacacagggcaatcagcgcgctcattcccgattgtagtatcatgtccatggccaacgagcctctggacgcccgaggcatagttgctcgcaccgcctacgtcgactctagaggatccccctctaaaaaggacaaagagatgagagaagaacaaggtcccacaacagaggcccaggagggactaggactcctgggctcatgtaaccacagagctcacagctgctccagagtagatcggagtatacaggcatgcggtcagccatctccaagcagaagagcgcaacagctgaaaccctcggaatcctccccgaacagaaacaaccaccgctgccagctgcgcgctcgggggaaaagacgttgcgcccccgccgactgccggtttcccgggcgcgagcccggatccaggtggtcagtcccggtacgcaaccacggcgagaacccggccctgctaagggagaagggaagccgtttcccgcgggcttcatacagacacggtgctaagacagcccgagtcgcggaccagtccaacaggcaggcagatcagtgggcagcccgcgtgcgcgaggaccccgatggcggcgcgggtccctgtctgaaaagagatatacttccacttatggctgtaagctgcgctgctaggggcattgcagcgaaagaggatctgcactcggtatatcttgtacgtgtgacacgcttaatagaagactgcacggcggcacgcctagatcagtgtcgacttgattacatcaactgcatcgacgtggaggtaacttcgtttgctcagacatgcactgatttaacacgcattcgatgtagtctatcacgaaggtgcgattatgatgggatgagagtgctacatgtgatcgatattatctcttcgatgtgtgctctggagagagctgcgcagtcactcgctgttgagatagctagtgtggattgcatctgtacccaaactatccaccctcttgctagagacaatgaagggggtgagccggagaaagcggaccggtattccacaacagagccgacacaccgacacaacaaaatcgccatatgcattactcaaacaactaacaagtggctaacagacgaaatctatctctacacggacaacataagtaagagcgagcctcgaatcggacgcgacgccgacaaagacttctatatcgcggtcgatgatgttaatctgctaacatcacaaacacgacacacacatagcaatcggatcttagcgtctgattag

SEQ ID NO: 115506 - DNA, 2489 bp, Homo sapiens
atggacgacttcgatgattgtgtgacggatgaggagacagtaggcatggctgctaaattcaccactcatgcacccccagaagaatttaatgaagcattcaatgatgttcggctactactttaataatgacaatctcctcagggaaggggcagcacatgcatttgcccagtataacatggatcagttccacgctgtgaaagatagaaggatatgaagatcaggtcttaattacacagcacagtgacctgggttaatagcagatttttagatccaagaaacaaaatttccttttaaatttgaccacttacggaaagaagcaagtgacccccagccagaagaagcagatggaggtctgaagtcttggagagaatcctgtgacagtgctttaagagcctatgtgaaagaccattattccaacgggtttctgtactgtttatgctaaaactatcgatgggcaacagactattattgcatgtattgaaagccaccaggtttcagccttaaaaacttctggaatggtccgggtgagatcagagtggaaggtcccccatcacaccaccttcagcccaaggtggttggcgtgctttaagattcaggtttcactattatgaagatggcaatgttcagttggttagtcataaagatgtacaggattcactaactgtttcgaatgaagcccaaactgccaaggagtttattaaaatcatagagaatgcagaaaatgagtatcagacagcaattagtgaaaactatcaaacaatgtcagataccacattcaagggccttgcgccggcagcttccagttacccgcaccaaaatcgactggaacaagatactcagctacaagattggcaaagaaatgcagaatgcttaaaggctgaatgtaggattcttcagtatgtggaaagacaaggattcaacgtgtggtcatatgataaataagtgatttataaacaagagtgatattttgctagggctttcaaagttaaccggttttctagcctcatggaatactgttgaacctatagcgttgtcttgattcttttgtgttctctgccttgtaattttctgttactgctatatctacgtgtaaatctttttttctttttttttttttttttttttcttttttggttaattctgccacatttaatgttggtgagagagtgatctatcctaatgacattttactgtttaaaaaagtttcctagccatgaagccctgctactgatttagacaaggtattatggtcattactttgtacccctatccttccaagcacttctggtacttcagtcgtttttactgatccaccaacacctaaagaggctatgctaccagtctctagctaaatggaaaacacattcatccttctccctctgactgctttgatcatcatttattgcatcgtcatatcatatttatcgcatctcataactcaaattttttaagagttggatggggactttccaggtcctttttggagggcaaaggaagtgccagcttctctggggaacttgtttttaaatccaaagacttgaaccacattccctggcacatgaacatgtttgcttttatcccttctctcattgtctccttcccattctttagtaccattggaagttataaaacatctggcattttttaggaaggcattttacccatttattttttttaaaacattcaaggaactgctgacgtactgtgggatgtaggagtataaaaacttgaaaaatgcaggatgttgaagggaataatagggtatcttgtgcttttaatacttttatgggcagggattgtactattaaggcaaatggaatttaaacagctatgttaaatccataaagggaaaacttaaaaatggaacccaaagtggaaaggggttaacttccaggcagtatctttctatggtaaccctgttatttaagggaaatactaagtgatttcttctaaataggatgtaaaacttctttccaaattactcttcctcagtcctgccctgccaaggaactccaaggtgtaaactgtgattaaaataacctttccccaggtatattcggcaggtaatgtgtgtaatctcagaatacacaggtgacatagatatgatatggaccactgggtaatggtggatttcatttacaattggtttacacttctatgacccaggccttaaggggaaggtcagttttttaaaaaaacccaagtagtgtcttccctaccctatctcccagatacatgtcaaaaaaagaaaggtgtttgtgcttccgttttgtttctgcctcagtaatatagtcaagcaagtttgttcccaggtgacccattgagctgtgtatgcatttttgtttatttcaataaaatatatttggtataatttggccttcatactatccatccataccacactatcttctgtatcaggtagtctaatagaaataaaatctgttttgttctaataaaaaaaaagaagggcgccccgtttaaagaaccca

SEQ ID NO: 115507 - DNA, 467 bp, Homo sapiens
  misc_feature (1)...(467): n = a,t,c or g
aactcccttannnagtgcggtggaattcggaactcacagcggaacctacaattgtggcccaactctgtaaggagctgcgggctgacggcctgggggctggagatgtggctgctgtgctgggcccactggggctgcaggaagtagctagttttgtgactaagcggagtgcctggaagctggtgctcttgggagctgatgaagaggagccacagctcagggtggacttggatacagccgactttggctacgctgtgggtgaggtgtgcctgcacaggagacagcaccagccaagctgattgtgtatctacagcgtttccggcctcaagactatcatcgcctgctagaagtgaacagctccagagagaggccacaggagactgaagatcctgaccactgcctgggctaggggtgtcactttctagaaagggaagggaactctgggtctaacggagtccactcctgggccn

SEQ ID NO: 115508 - DNA, 349 bp, Homo sapiens
aactcacagcggaacctacaattgtggcccaactctgtgtgcctgcacaggagacagcaccagccaagctgattgtgtatctacagcgtttccggcctcaagactatcagcgcctgctagaagtgaacagctccagagagaggccacaggagactgaagatcctgaccactgcctgggctaggggtgtcacttcctagaaggggaagggaactctgggtctaacggagtccactcctgggcccactgtgcctctcccctcagtgtcccttctgacagtgactcctctcctctccagcgctgcctgtttcttccccctcctctaagctactcttccttgagaaaaggaaa

SEQ ID NO: 115509 - DNA, 736 bp, Homo sapiens
gggtggcaagggattttcctgtgcttaactactgatcacggctaagtggaaatcctataaacacgagcggaaatcaatggaggctgcttagcggccaggggagaggggcggtccacagattgcatctgccggatgagcgagaggaagcagccagggagggctcaaggaagagtagcttagaggagggggaagaaacaggcaacgctggaaaaaagaggagtcactgtcaacaagggacactgaggggaagaggcacagtgggccccaggagtggactccgttagacccagagttcccttcccccttcctaggaagtgacacccctaagccccaggcagtggtcaggatcttcagtctcctgtggcctctctctggagctgttcacttctagcaggcgctgataatcttgaggccggaaacgctgtagatacacaatcagcttggctggtgctgtctcctgtgcaggcacacctcaaagcccgagagtctcctcgcgggacccacagagggggaagggagccccacgccatacactcgcgaggaatgccgggagcagttccggatcccggacctcggcccgaccctccgcgcgcccggcaggtcccggcaccagcggccatattacgcccgttgtggcggtgccgagagcaggccagggctcgagacacgcgctatgtaatgggaggccgcgacccccgcggtggccaggggagcgaggccgccccttgcattctgc

SEQ ID NO: 115510 - DNA, 1209 bp, Homo sapiens
ggaattcggcgtgggctcccttccccctctgtgggtcccgcgaggagactctcgttctttgaggtgagacctgaagctccgctggccggtagtgtagcaggaaagggcaggtcctcccgggtcgtgagccagtagcctcctggggtggcaaggtgtagagaggggggcgttgaaaggacacccgctacccggcctgctttctaggggtctctttggattgaggacatcaacagcagtggaagggattttactggagacctgtcactgtcagagccttaaaatatcaccgacggggccttaatgtcaccgaggtaaagagaaaagggcagcagccctagagactattgcgacacagtgtgcccctcataagtttttccagggaggggttctgtactgagttgacggcccaaggagcttgagcaccaaggctttcaatccttgggaactcagcaaacgtttgttcagccaattgcaggtagcatggcccagggcttgattgaggtggagcgaaagttccttccagggcctggcacagaggagcggctgcaggagttggggggcaccctggagtaccgggtcaccttccgagacacctactatgacacccctgagctgagcctcatgcaggctgaccactggctgcgacgacgagaggatagtggatgggagctcaaatgtcctgggagcagcaggtgtctttagggaccccacacggagtattaaggaactcacagcggaacctacaattgtggcccaactctgtaaggtgctgcgggctgacggcctggggggcttggagatgtgggctgctgtgctgggcccactggggctgccaggaagtagctagttttgtgactaagcggagagcctggaagctggtgctcttgggagctgatgaagaggagccacagctcagggtggacttggatacagacgactttggctacactgtgggtgaggtacaggccctggtgcacgattgaggctgagtcaccaactgccctagagaagatccacaggctcagcagcatgcttgtcaccactcctccacaaggagtaaaaagtgtgcctgcacaggagacagcaccagccaagctgattgtgtatctacagcgtttccggcctcaagactatcagcgcctgctagaagtgaacagctccagagagaggccacaggagactgaagatcctgaccactgcctgggctag

SEQ ID NO: 115511 - DNA, 1638 bp, Homo sapiens
atgagggctgagtacacaaagcgatctattcacatctttggacttcaagagaatcatattgtgtccggaattggtgggttcttggtctcaccaacttcaagaatgaagccgcggacccttgcactagacctaaaggttctccaagtccccaccagagtcaggagcccagctggcttcactcagtggatccggcacctggccgcaggtggagctgcctgccagtcccgcgcccccttgggtggtcgatgggactgggcgctgtcgagcaggggacgccgctcgtcggggaggctcggccgcacaggagcccacggaggcggaggggatgctcatgcttggtgggctgttggttccgagccctgtcccgcgggaaggcttctcaggctcggcgagaaattgagcacagcagctgctggcccaggtggtgatgatagtaataataatagttgctgtcggggacgtgacagctggctggtggtgttcataatgaaagttcaccttcccgccacctcccctagagccaagaagatcatggttatcacagtctcaggccatttttctttgggctcctttaccaagacagtcataggtaaagaaagtgacagggtgaacagtcttcagtcactaaagctaaagaaatccaatcttcctaacttaaccaaccccagatttacgagaagggaagagaaaggggagaagggtgctcaggaacggatagatagcttgcgtcgaactggggtgatccatgaaaaacagacagctgtgtcagtagaaaacttcattgcagaattgctgcctgacaaaataaccaatacagagaagtgcttaaaggagctgatgaagctgaaagccaaggctcgagaactacatgaagaatgcagaagcctcaggagccgacgcgatcaactggaagaaagggtatcagtgatggaagatgaaatgaatgaaatgaagcgagaagggaagtttagagaaaaaagaataaaaagaaacgaacaaagcctccaagaaatatgggactatgtgaaaagaccaaatctacgtctgactggtgtacctgaaagcgacggggagaatggaaccaagttggaaaacactctgcaggatattatccaggagaacttccccaatctagcaaggcaggccaacattcagattcaggaaatacagagaatgccacaaagatactcctcgagaagagcaactccaagacacataattatcagattcaccaaagttgaaatgaaggaaaaaatgttaagggcagccagagagaaaggtcgggttacccacaaagggaagcccatgagactaacagcagatctctcggcagaaactctacaagccagaagagagtgggggccaatattcaacattcttaaagaaaagaattttcaacccagaatttcatatccagccaaactaagttttgtaagtgaaggagaaataaaatactttacagacaagcaaatgctgagagattttgtcaccaccaggcctgccctaaaagctgctgaaggaagcactaaacatggaaaggaacaactggtaccagctgctgcaaaatcatgccaaaatgtaaagaccatcgaaactaggaagaaactgcatcaactaatgagaaaaataaccagctaa

SEQ ID NO: 115512 - DNA, 1128 bp, Homo sapiens
tttttttttttttttgcttttataaacattcaaccaacatgttctttaataatctcttctttaaagaacaaaataatcaagcacatggcattaagttaaatgtctctgcacatgaatttccaccttataaatctggtatattaaattgggctgcaaatagatttgcatattttcttttttgagtactatgataggtgaaatggtatgactataaaaaggatttgtttctttttgtctcctgggaatgacatggtgcctttctagagaaagaaaaattgcaaggctaacaggaaaatgaataaaaactaactgggattcaatttaagactattcggattttaggaaggtacaaccacttctttaacatcaagctaaaagtgggggaaagtctcagtctccccaggtaggtctcctctcacactgtcctgggggtggcaggcgctgtttatacatgccctgctatcgctctggctgcacttgtaggatccatcttgcccgacggggacatccccaggtaaatgcccattgtgcccaatcagtccggctgacattcagtaaacttcttttccaaggacttcacccactggtcaccaaaagggccttgaccacctccagattataagtcctgggggaagttagacttttgagcctggctgtacaaatttccaaagggcaccggtgtggcttgtgtaaaatgtttcctaagatgaatgcccatgggacaggatcttcaaccaccaaacaaccaatgtcaaaccatttgtccaggcagcaattctgcaatgaagttttctactgacacagctgtctgtttttcatggatcaccccagttcgacgcaagctatctatccgttcctgagcaccttttaatcctagctgcataagctaatggttgtggggcaaatattggactgtccagcttcccctacaaccacagctaagccaaagacctcctggaaggcatctcggacagcagcaacttttacttctttatttgaggtcactacaatatccagttcacctccagatttgatatagggagccatgccagggtccagcgttgtaatcatgctttctactgaatgccttgtcttatcaagcacagacttcaccataggattcccagc

SEQ ID NO: 115513 - DNA, 552 bp, Homo sapiens
atggcagtagcaagacagaagaaaggaaaagggctcaggtttaagcgactggaatcattcctacatgattcctggcggcagaaacgtgacaaggtgcgtctcagacgactagaagtgaaacctcatgccttggaattgccagataaacattccttggcctttgttgtacgcatcgaaaggattgatggcaatctaaaaatgctgcatatagtggaaccttatgtgacctggggatttccaaatctgaagtctgtccgagaactcattttgaaacgtggacaagccaaggtcaagaataagaccatccctctgacagacaacacagtgattgaggagcacctggggaagtttggcttcatttgcttggaagacctcattcatgaaattgccttcccagggaagcatttccaggagatctcatggttcttgcgccctttccacctctcagtggcccatcatgctaccaaaaatagagtgggcttcctcaaggagatgggcacacctggctatcggggtgaacgcatcaatcagctcatccgtcagctgaactag

SEQ ID NO: 115514 - DNA, 3039 bp, Homo sapiens
  misc_feature (1)...(3039): n = a,t,c or g
atgtttggccgctcgcggagctgggtgggcgggggccatggcaagacttcccgcaacatccactccttggaccacctcaagtatctgtaccacgttttgaccaaaaacaccacagtcacagaacagaaccggaacctgctagtggagaccatccgttccatcactgagatcctgatctggggagatcaaaatgacagctctgtatttgacttcttcctggagaagaatatgtttgttttcttcttgaacatcttgcggcaaaagtcgggccgttacgtgtgcgttcagctgctgcagaccttgaacatcctctttgagaacatcagtcacgagacctcactttattatttgctctcaaataactacgtaaattctatcatcgttcataaatttgacttttctgatgaggagattatggcctattatatatcgttcctgaaaacactttcgttaaaactcaacaaccacactgtccatttcttttataatgagcacaccaatgactttgccctgtacacagaagccatcaagtttttcaaccaccctgaaagcatggttagaattgctgtaagaaccataactttgaatgtctataaagtggataaccaggccatgctgcactacatccgagataaaactgctgttccttacttctccaatttggtctggttcattgggagccatgtgatcgaactcgatgactgcgtgcagactgatgaggagcatcggaatcggggtaaactgagtgatctggtggcagagcacctagaccacctgcactatctcaatgacatcctgatcatcaactgtgagttcctcaacgatgtgctcactgaccacctgctcaacaggctcttcctgcccctctacgtgtactcactggagaaccaggacaaggtcttcttaattatacatcatgcaccgctggtgaactcgttagctgaagtcattctgaatggtgatctgtctgagatgtacgctaagactgaacaggatattcagagaagttctgtcttacccactctaagctccttatggcagggatctcacctgtcactgaatcagctgcagtctgggctgcacaaatgctcatctcacttatgcggagcccaggctgcagctgattcagtgacaggtgagatccctgccataaggagcttagagtggctaatcagtgctggttccaaggcgcgcacattcttcttcctgaaaatgctaataggcttctgggagaaggttgattgtgaatatcaaaggcgtcaagtgctgagcacgcggctgcaagaggccttgccgtcaaatcgcctcactgatgttgcagctgtgcattcttcatgcatgttgggctttggttccacagctccacgcggctcctggattggcgatccagcggctgtgcatctgcccctacctggggagctggccgagcaccttgggtccaagggtaccaccactgtcaccaagcaccagccccaggccaagcccagcattcggtgcttcattaaacccaccgagacactcgagcggtcccttgagatgaacaagcacaagggcaagaggcgggtgcaaaagagacccaactacaaaaacgttggggaagaagaagatgaggagaaagggcccaccgaggatgcccaagaagacgccgagaaggctaaaggtacagagggtggttcaaaaggcatcaagacgagtggggagagtgaagagatcgagatggtgatcatggagcgtagcaagctctcagagctggccgccagcacctccgtgcaggagcagaacaccacggacgaggagaaaagcgccgccgccacctgctctgagagcacgcaatggagcagacccttcctggatatggtgtaccacgcgctggacagcccggatgatgattaccatgccctgttcgtgctctgcctcctctatgccatgtctcataataaagaaaatctcctgaaaaagaggaaggcttatcaggcactcaaagccacccaggcaaagcaggaacttttggcaaagaaggagcagaagaaaggaaaagggctcaggtttaagctactggaatcattcctacatgattactggcagcagaaacctgacaaggtgcatctcagacgactagaagtgaaacctcatgccgtggaattgccagataaacattccttggcctttgttgtacgcatcgaaaggattgatggcgtgagtttactggtgcagagaaccattgcaagactttgcctaaagaaaatttttagtggtgtctttgtaaaagtcaccccccagaatctacaaatgctgcgtatagtggaaacttatgtgacctggggatttccaaatctgaagtctgtccgagaactcattttgaaaccgtggacaagccaaggtcaagaataagaccatccctctgacagacaatacagtgattgaggagcacctggggaagtttggcgtcatttgcttggaagacctcattcatgaaaattgccttcccagggaagcatttccaggagatctcatggttcttgtgccctttccacctctcagtggcccgtcatgctaccaaaaataagagtgggcttcctcaaggagatgggcacacctgggctatcggggtgaacgcatcaaatcagctcatccgtcagctgaactagacccaggtgaggcagggctgaaaactgcccttgggctgacttttgataggccatgccttgccactttacaagttctttttgcatttactagtatttaagagtaaccttgagattgggaggaatagaggaggctggtacaaatagatggagacctgctgggatcagtgaatgcctgattaggacatggggctatgcatagcctaagagttatagggcttaaagatgttcgagtaactgaaaaactgtattgctggccggggcgcggtggctcacggctgtaatcccagcactttggggaggcccaggcgggcagaccatgaggtccaggagattgagacctnctggccaacatggtgaaccctgtctctanttaggaatacaaaattgagct

SEQ ID NO: 115515 - DNA, 487 bp, Homo sapiens
ctagtgcaatgcggtgcaattcggagcgctctcaagccccaagtggccgtgccatcctgcccctccactcccgactatgagaacatgtttgtgggccagccagcagccgagcaccagtgggatgaacaaggggctcacccttcagaggacaatgacttttacatcaactacaaggacatcgacctggcttcccagcctgtctactgtaacctgcagtcactgggccaggccccaatggatgaagaggagtacgtgatccccgggcactgagcctaagatgtcctaacctccacccagaaccccttcagtccctgctgggtgactcagggcgtcctaacgcctccatggcctcagtttccccatctgaagaatgggtacaggaaaggattgtccttgaggccccaggaagctctgccgccccctccctgtccctcatgccgctcctcagctcccttcagctctagagggggaagaggagagaccccct

SEQ ID NO: 115516 - DNA, 415 bp, Homo sapiens
cggcacgaggtggatcacttaatgtatgggatgtatttcagtcacggctgttattaaaatgttttattcagacagctttattgaggtataatcgacttacaataaatgtcacatgtctaaagtgtacaatgtgaaaaatttgacatatgtatacgtccatgaaaccatcatcacagccaagatcatggatatctacaccacaccccaaagcttgctcctccctgtcctttccgctctccctggacaactggatgaacattaacctgcgagaagtcatctgcacgtccagggacggggacaagttctggcggatgcccgagtgctacatccgcggcagcaccatcaagtacctgcgcatccccgacgagatcatcgacatggtcaaggaggaggtggtggccaagggccgcggccg

SEQ ID NO: 115517 - DNA, 495 bp, Homo sapiens
cagggtcgacgatttcgtggctgcagcggcagcagctgtcgcgccagtcgtattatatgcatgtccgaggcacagcccgatcccgccatggagcatccgaggaaggcggtggtagtgacgggatttggcccttttggggaacacaccgtgaacgccagttggattgcagttcaggagctagaaaagctaggccttggcgacagcgtggacctgcatgtgtacgagattccggttgagtaccaaacagtccagagactcatccccgccctgtgggagaagcacagtccacagctggtggtgcatgtgggggtgtcaggcatggcgaccacagtcacactggagaaatgtggacacaacaagggctacaaggggctggacaactgccgcttttgccccggctcccagtgctgcgtggaagacgggcctgaaagcattgactccatcatcgacatggatgctgtgtgcaagcgagtcaccacgttgggccagtgtatt

SEQ ID NO: 115518 - DNA, 436 bp, Homo sapiens
gcggccgcgcccgaagcgcctgtctacgcgaacctgagcagctactcgggcggcgccgggggcgcggggggcgccgcgacggtcgccttcgctgccgaacctgtgcccttcccgccgccgccacccccaggcgcgttggggccgccgcgcctggctgcgctcaaggacgagccacagacggtgcccgacgtgccgagcttcggcgagagcccgccgttgtcgcccatcgacatggacacgcaggagcgcatcaaggcggagcgcaagcggctgcgcaaccgcatcgccgcctccaagtgccgcaagcgcaagctggagcgcatctcgtgcctggaagagaaagtgaagaccctcaagagtcagaacacggagcttggcgtccacggcgagcctgctgcgcgagcaggtggcgcagctcaaagcagaaagtcctcag

SEQ ID NO: 115519 - DNA, 515 bp, Homo sapiens
ggcacgagccctccctctctccctccctgtttctccctccctgtttctccccgctgtgcctcccccagttacccacagaagtgcctgcctctccagcgctcacagaacacacaaaaagggacaggaattggtcactgggtagtggccgtggctcctgacgatccagaccagcgtctggcccaagccattcagaggtggggtctggggcctgggggttttgtgtcgtgacactttgtctcaaggagattccacatagggatttgaattaggctttctgcttgccaaggcctgtggcatctgagcctggctgagggccgggcaagcctcccctgagcctttggaagccgagttcactctctgcctgcccaaggggatgcaccggcttggttctgggggctcctctaacatctcaggtttttatcttgtcttaaatttctttctaggaaaaaacccttccctgccaaaggtgactgtgttttctgccgccgaaggagggcccggtccctccaggctta

SEQ ID NO: 115520 - DNA, 3511 bp, Homo sapiens
gacagctcctcggtgtcggccccaccttgagccccagttccaccttctaccgcttcagcacctccggcgcggacagctcctcgctgtcgcctccactcccggccctgggccggacccgggagcagacgctcctcggcgcccgctcacggggacgagtcctgctccctgctatcccagacccctttctctggcgcatggagaacctgggggtcggcgaaggggcagaggcttgcagcaggttgagtcgctctcgcggccgccacagcatgaccagagccccgaagcacctgtggcggcaaccccggcgccccatccgcatccaacagcgcttctattcggatccggacaagtccgcgggctgccgcgagagggacctgagcccgcggccggagctcaggaagtcgcggctctcctggcccgtttcctcctgcaggcgctttgacctggaaaatgggctctcgtgtgggaggagggccctggaccctcagtccagccctggcctgggccggattatgcaggctccagtcccgcacagccagcggcgcgagtccttcctgtaccgctcagatagcgactatgaactctcgcccaaggccatgtctcggaactcctctgtggccagcgacctacatggagaggacatgattgtgacgccctttgcccaggtcctggccagtctgcggaccgttcggagcaacgtggcggcccttgcccgccagcaatgcctaggagcagccaagtaggtagagggcggggcggggcgggggcggggccggcagagacaaggtgggcggaaagcgggctgcaaattgaggctggggctccggcgcctccaggtgggtttgaggggcggggcctggtggacttgggggcggggcgagatgggcggagcagccacgcctgaggctgctgtaccgcaggcagggacccgtcggaaacccttcatccagcaatcagctccctcctgcaggtaaagtacctgttccttccctcccccgctgaggacagctgggagcttcctttccatagtgacctccccagtccatgagccccttatactggggctaattgtagccccgcccctgcaaaaacaataacgccctcggggatggaccccaccacactcatattacagatgaggaggctgaggcccagagatctcatggtcacacaggcactcggggaacagatctggaacttgggtccaggagtcctgggtggcccccgtgggaacagtttcagggtccagatgaagagacgaagtcgcgagaggcgtggggtccctgagcgggggggttgggcaggcccctgactgcctcggctcccagaggacacggggcagaagctggcattggagacgctagacgagctggactggtgcctggatcagttggagacgctgcagacccggcactcggtgggggagatggcctccaacaagttcaagcggatcctgaaccgggagttgacccacctgtccgaaaccagccgctccgggaaccaggtgtccgagtacatctcccggaccttcctggtagcgatggggtttcaccgtattgctcagactggtctcgaactcctgacctcaagtgatctgcccacctcgacctcccaaagcactgggattacaggcgtgagccactgcgtccggccgacagggtctttactccgaacttactttggttcctgtagaaagggaaataggttgattctggggtttggcaaaattcaggtcctgaggccaggccccagcaggtgaaatcggcttctctgagcttcaccctggcccatccgcagaccagcagaccgaggtggagctgcccaaggtgaccgctgaggaggccccacagcccatgtcccggatcagtggcctacatgggctctgccacagtgccagcctctcctcagccactgtcccacgctttggggtccagactgaccaggaggagcaactggccaaggagctagaagacaccaacaagtggggacttgatgtgttcaaggtggcggagctaagtgggaaccagcccctcacagctatcatattcagcatttttcaggagcgggacctgctgaagacattccagatcccagcagacacactggccacctacctgctgatgctggagggtcactaccacgccaatgtggcctaccacaacagcctacatgccgccgacgtggcccagtccacgcatgtgctgctggctacgcccgccctcgaggctgtgttcacagacttggaaatcctggctgccctctttgcaagcgccatccacgacgtggaccatcctggggtctccaaccagtttctgattaacaccaactcagagctggcgcttatgtacaacgacgcctcggtgctggagaaccatcacctggctgtgggcttcaagctgctgcaggcagagaactgcgatatcttccagaacctcagcgccaagcagcgactgagtctgcgcaggatggtcattgacatggtgctggccacagacatgtccaaacacatgaacctcctggccgacctcaagaccatggtggagaccaagaaggtgacaagcctcggtgtcctcctcctggacaactattccgaccgaatccaggtcttgcagaacctggtgcactgtgctgatctgagcaaccccaccaagccgctgcccctgtaccgccagtggacggaccgcatcatggccgagttcttccagcagggagaccgcgagcgtgagtcgggcctggacatcagtcccatgtgtgacaagcatacggcctcagtggagaagtcccaggtgggtttcattgactacattgctcacccactgtgggagacttgggctgacctggtccacccagatgcacaggacctgctggacacgctggaggacaatcgagagtggtaccagagcaagatcccccgaagtccctcagacctcaccaaccccgagcgggacgggcctgacagattccagtttgaactgactctggaggaggcagaggaagaggatgaggaggaagaagaggagggggaagagacagctttagccaaagaggccttggagttgcctgacactgaactcctgtcccctgaagccggcccagaccctggggacttacccctcgacaaccagaggacttagggccagccctgcgtgaactgcaggggcaatggatggtaaagccctttggctcttggcaggcagactttccaggaagaggctccatgtggctcctgcttcactttcccacccatttagggagacaatcaagctcttagttataggtggctcccagggtctaattggaggcacctggctggggtccactctgaccctagacttgcctaaaagagctctctaaggggcagcctcttacgatgccctggtgtctttctcctgggcttctatccctgtgaggagaggtgctgtctgctggagcctctagtccaccctctccagtggtcactcttgagtcacatctgtcacttaattatttccttctttatcaaatatttatt

SEQ ID NO: 115521 - DNA, 3097 bp, Homo sapiens
atggcgggcgcgcgggtgggtcccgccgccggagcgcgcacggcagtgcccgccgcggggggtgggggcgcggctacacactcgcgggtcagatcccggacggccacccagggacgcacagctgatcgcggctgcacacggcgcgtgcacacacacgttcactcacctcaaatggagccggccacccacattgttgtacacccagccacacacattcgcagcgacactcaacatagcgctccacacagcaaaagtgtaccccgctgctggaacgactgcggatagcccctaaagcctcaggcagtgacattgggtgtctcaccccgcagagctacccacactcagcaagggcaagcccgcgtgtgtgcaaacacgcgctcccgtttacccacagaagtgcctgcctctccagcgctcacagacacacaaaaagggacaggaattggtcactgggtagtggccgtggctccgacgatccagaccagcgtctggcccaagccattcagaggaaataggatttctgtactgggatttgaaccccattcccttgtttctgctgacccccagcagtctcaatatccctacttcctcttcccagaaccaccctccccaaagcccttatcgatgctggaggattcctatgcatccctcaaaatccaagcttcggcgagagcaccaccgttgtcgcccatcgacatggacaagcaggagcgcatcaaggcggagcgcaagcggctgcgcaaccgcatcgcagcatcacaagtgccgcaagcgcaagctggagcgcatctcgcgcctggaaagaaagtgaagaccctcaagagtcagaacacggagctggcgtccacggcagcctgctgcgcgagcagctcctcccttgttggagggagcagagagcgggtgtctgagagcggcccgcacatctgcgcgcagcgagcgccccctagacgcgccttggcgcggggccggctgatgccaggtgacactgggccccgtgagttacacaggaacccgagtgtggtggtggtcgtgtgtttgctggtgtctcttttgctcatcgggtctgtggtcatggctgtgagattctgtcaccggaatgagtccaagtttgagaacctggacgaggtgtccatgggatccgtgaatgacagattgtcctttgcccaccacctccaggaacaccagttcctcttcccccgagtcgctgggtgcagagccagaggaacgccagcgaccccagcagcgctcggacggtgctggccgtggccgctgcggcccccgtgtccaggtgggccagacgcagcctctgggcgccgtcgcttttccagcatcgcagaggcaaaaggtggcagtgggacccaaaaggatgggcccaagcccgtttaggcttgcagccacggtacggcagccggagcgcccccaagccccaatggccgtgccatcctgcccctccactcccgactatgagaacatgtttgtggccagccagcagccgagcaccagtgggatgaacaagggtaaggccctacctgccggcatcctgcagatggtcaccgacacatccaggcccaacgtgggcggggatgagtctctggactgtttggtactcaaccgaatctcgtacacatgcaggtccacgctgtcgccaaggcctagcttttcagctcctggaagagaggagagtgggagtgtcatggccccagatgacagcatggggataatgcgctctctggggggtctgtctagactcactgtggcagcaattgtccgtgatgttaccaagttctgtgacccgggtcctcctcacccagctttgcaagagacaccccagatggccccgagccccggagctccccagcccttaaacccacctgcacctcctcggaagagaaacacagccagtgccccagtccacctgagagctgcgagagatgacagcgaggctgcactgtaccccttcctacaagtttcctattcgttaagtgggcacaagaataactacacgtactatgcatgggttgttgggggattcagagcgctggggtacaaacactcaacagatgtgtgctccggtgttaccatccaggaagagatgtggatccgacatcgttttttaagagctgcccccatcagccagcgtacccgtcactaccaccgcttcctcggctgctccatggcgggatcgggctgtgcctcggacctgctttgttgcgactggcgcgacagctgctgccgctgcagcctctcggccgcgcaggccacgcccctgtcaagcccccggcctcgcccccggtcagccgctcgccttagtgcgcgcggcgcggcgacgaccgccgggagcgtgtgcagcggcggcggcgaagtggccggcgagcccggtccccgccggcaccatgttggtggagctgaaaaatggggagacgtacaatggacacctggtgactgcgacaactggatgaacattaacctgcgagaagtcatctgcacgtccgggacgggacaagttctggcggatgcccgagtgctacatccgcggcagcaccatcaatacctgcgcatccccgacgagatcatcgacatggtcaaggaggaggtggggccaagggccgcggccgcggaggcctgcagcagcagaagcagcagaaagccgcggcatgggcggcgctggccgaggtgcttcggggctctgtcatgctgtggcggccgcgagagcgactcaacctgctgcaagcctctgcccttcgccgacccccaggttctccatgcgccagagaaaggggtctgggaagcagggagcaggactcgtccccgtgagcgggcgccgaggagcgtctgccccgggtccggcccagggccgggagtggaggcgacagcgaggagctgtcgcgccggaggtgctgaagcggtagaaggtggaactggggctcaagcctcaatggtgaacaccactgggtactgggctcgacctctccaggcaacacaaggcggctcggcagcgtggcagcaatggggtacccgagaagcctctccggatgataccaccaccagggggctcacaggggccaagccagaatccaccaactcccagaaccactga

SEQ ID NO: 115522 - DNA, 1026 bp, Homo sapiens
catcccaggctggagggagccccagtcagccactcttgagccaggcccacgggcagaggataggagccagtcttccttgtgagtgcacaatgggggctgcgcctaccacaacccacccttgctcctgggtgaaggattgcctggggtcaggacagatcctgcctgcagggtggaccctttgccacgtatgtcccgggactgatactgtgcagcttgcaggggtggtacggggtgcaggctgggcaggatctgcagggcctcccgcgctcccagggctgggccagacggcccggtggtaagttaataacctgctccccttctccgcaggacggggacaagttctggcggatgccctgagagctacatccgcggtagcaccatcaagtacctgcgcatttcccaccagatcatcgacatggtcaaggaggaaggtggtggccaagggccgctggccgcgaaggccttgccagcaagcagaaagccagcagaaaggccgcggcatgggcggcgctggccgaggtgtgtttggtggccggggccgaggtgggatcccgggcacaggcagaggccagccagagaagaagcctggcagacaggcgggcaaacagtgagcgcccacccagaccggctgctgcgccccctcctgccagggtgggcgattccgctccacagtctcggacggatctgctcagaaaggaagaggcaggcgccagggggaacccccttcgtgttttgtgaccctcccttttaggtgaagccccttttttcttgctaaaaccggcaattctccggttagaaatgttacttggtgttttttggttttgtgaaacggccgtcccaaagctggctggattcctagaagagtctgtgttgaaggcatctttcaagccctcgctctggttctcagggcagcattttccaggcgggtttgttttgcatttcttggagcctctccgagcagcaaccagacgggagatttttattttaagctgttcatgctgggactgacagcctgcagggtttcct

SEQ ID NO: 115523 - DNA, 436 bp, Homo sapiens
ctggttccttcaagtggtccagaaggagcaagtggggccatgaggggagcagctgtaactggtggaaatggtgagctgaatccacatgcttgcccactggaaggagacacctttgataatttcatttctgtctttttctctttggagacactaagttccggaagaaggcaagccacattctcaggatcatgtgggtctgccccagctaaagatgtacaagctatagggactcctaagtgcgagccctgtgactgttcatccttaaatacgttagcagccagcatgctgactatgatgagttgtgcgctccaagtcagagggtctgattccccaggttccagaaggagctcaggaggctccatggtgcactttccccacctgcaactattttcctaccagccactatccagcaagagcctccgaattccaccacgct

SEQ ID NO: 115524 - DNA, 981 bp, Homo sapiens
atggggaaatactatgggagttggcagctagaaacacaagttaggaaaggaaagagtgggaaattcagagaaagtgaagaatcacctaagctctgcaatgacagtggtcaagctgctacttcaaaatccatgcctggattcttatgtggaatgtgccctctgtctacctgcatttctttagagcttaaatccaaacattgcctgttcggtgaaggctctgaaataaaaataaaagagcactttcaccttctcctcattgcttacacctgctgtggcctcagaggagcaatagccttcatgggccacccagaagttggatataagaaaacagctctaaacccatcacgggaaggggagtactcaggtgagtgggtgcaggaaccagggcaaatcaacactggaaccagccagttgctcctctctggcccagctgtgagatacagtaagttcaagatgtcagaggccaggccgcccccgctgctcgggcagcacacaacgcacatcctgaaggaggtcctgagatacgatgacagggccatcggggagctgctcagcgctggagtgacgctggagccgaacagcttgggtcttgctgttgtggttacagaggaagttccattagggcaggagcagggagagcatgacagtgtgatcggggactgttctgctccagcgtcaggctgggtcttggactttgcttcttactctttcttagcaaaggaaaatttacttggccttcagggaaagccgaaggaggagcttgacaagctaaaggctgctggcatagtggagaaaagacttcaggaaccttcagcagactgtctccctgtccagatttgtatcaacattaatgctttgctcatgattgaaaaacatgttcaggcttccagactcaaatatgtttcctttgctcataaccctctggtgagggaacaaatggttttggatccctggagagatgggatgtccctttatgactga

SEQ ID NO: 115525 - DNA, 464 bp, Homo sapiens
tttttccaggaaaaaaattaaatctttatttttaaaaatcccacaaatccataatgaaatcatcatctgaaaaaaaagatggtagggaacaaaacgtgggatacatttaaaaggcactagattcattaataccagagccattctggagatgccatgtaagaaatctggagttactctaaatcttcttcttagtggtatcagaactggggagaagggtccaagcaaagtgttgcctttgccagtgtattcggatcgaggttatgaggaagagcccttttcctttgtcagtgagtttcatgttggtccaccactccagcgctgagcagctccccgatggccctgtcatcgtatctcaggacctccttcaggatgtgcgttctgtcgtgcccgagcagcgggggcggcctggcctctgacatcttgaacttactgtaatctcacagctgggcctatgaagtaacaac

SEQ ID NO: 115526 - DNA, 555 bp, Homo sapiens
atggcggaagctacaaataaattcaaattaatgaatggcaataccctggtgaatgtgttatacatcacacaacagtttgctggtgaggcccacgatccgctagttgaagcactagttacagaagcatggggtaggctagaaaggtttgatattaaactgctgtcagaattttcctcttgcttagcagatcagcatttgtattttagtccattaatgggaaaaatagctgatattgtccataggaacttggaaaccatccagaacttaagttccttgtctgtcttgatggtcaacatatcttctttaatatcacgacattttcaagaacaactggtgaacaaaacggaacttgtttttgacaccacagattcttctgaggtcaacgttgcaaaaagaatggtacagtttcttcgaaactttagatatcattatcaaccactattagaaagctttgtaaagttttttgtagcattgggacccattgcaggacctgaagaaaagaaacaacttaaatcaactatgttattgatgtcagaggagctaaccaacgagtaa

SEQ ID NO: 115527 - DNA, 487 bp, Homo sapiens
  misc_feature (1)...(487): n = a,t,c or g
cgagccnnnggggnnnnaaatgatagctnatgagaaagccatcgccaagcntcggacgaggcatagattcttnnnaggcaacgttgcaaaaagcatagcaaagtttcttcgaaatgttagatatcgttatcaaccactattagaaagatgtaataacgtatttttaagtaatgtggaccaccttgatttggattccatcagtaaaatacttagtgtatacaaatttctacaatttaatagttttgaatttattataatggctaaaaagaagctaactgaaatgattcctctgtgtaatcatcctgctagctttgtaaaattgtttgtagcattgggacccattgcaggacctgaagaaaagaaacaacttaaatcaactatgttattgatgtcagaggacctaactggcgagcaagccctggcagtgttgggagcaatgggagatatggaaagcacaaactcatgtctgattaaaagagttacttca

SEQ ID NO: 115528 - DNA, 429 bp, Homo sapiens
tccattctcctggagagtgtttcaatttcgacccatcagttgtgaaccactaattattcagatgaataagtgtacagatgaggagcaaatgtttggttttattgaaagaaacaaagccatactttcagaaaagcaagcgggatgtgcatttgatatgctttggaagcttcaaaagcagaagaccagcctgttaaaaaatgctgagtatgtcagagaccatcctcaatttcttactcttcataatttagctacaaataaattcaaattaatgaatgacgataccctggtgaatgtgttatacgtcacacaacagtttgctggtgaggcccatgacccgctagttgaagcactagttacagaagcatggagaaggctagaaaggtttgatattaaactgctctcagaattttcctcttgcctagcagatca

SEQ ID NO: 115529 - DNA, 2700 bp, Homo sapiens
acccctccaaactgtgtagacatagtctaaaatgtttggagtgtaatgaagtcttccaggacgagacatcactggctacacatttccagcaggctgcagatacgagtggacaacaaatgaagaaacacccctgccgccagtgtgacaagtctttcagctcgtcccacagcctgtgccggcacaaccggatcaagcacaaaggcatcaggaaagtgtacgcctgctcgcactgcccagactccagacgtacctttaccaaacgtttgatgctggagaagcacgtccagctgatgcatggcatcaaggaccctgacctgaaagaaatgacagatgccaccaatgagggagggaaacagaaataaaagaagacaaccaaggtccccagttcccaagcggaagttggaagaaccagttctggagttcaggcctccccgaggagcattcactcaaccactgaaaaagctgaaaatcaatgtttttaaggttcacaagtgcgctcgtgcgtggcttcaccaccgaaaacctgctgcaatttcacgaacacatccctcagcacaaatcggatggtgtcttcctaccagtgccgggagtgtggccttctgctacacgtctcacgtctctctgtccagggcacctcttcatcgtacacaagttaaaggaacctcagccagtgtccaagcaaaatggggctgggggaagataaccaacagggaggaacaaacccagccacgagggtggaatcccctgatgggcgccgtgttcagacagaaagtgcaaagtgttgcgcaaaaacttttgaaactgaagctgccttaaatactcacatgcggatacacggcatggccttcatcaaatccaaaaggatgagctcagcccgagaaatagccacagatgctcccatgaggaaaatccccgtcccacattggaataaaaaagacatttttgttaacaaagtttgccagtataatagagttaacagtactgtcctaggctgttgccaatatattctctttcaatgtaccttccttcacctcgtccgtatatatccctcgataagtattaaaacagtatttgagtttaaaagagtttgtatatatttaaatgaataactttttatactctttgttacatgtttgtatcagtatttagtggaaaaccatttgagttgttttgggttagaatttttctttttgtactgtttctttaaaacagagttcttagtaacaggggcagttcctgaattcaaataaaccattttgtatgtttggattttgaatgggttaactaattacaggctaaaataatgccttttttagtgtttttaatttttaagaattcactacataaattgtaagtaattgtgggtctcaaaaacactaggaacttttaagtgtcgttaacacttcctcgatgtgcctgccctgagggagagagttcacatttgagacaactgcactccagtgtggaccgtgcctttgtcttcaggccatgcgagacggtcgtttaaagcagtcttgcaggtcgctcctttcccagccgtggataaaaactgaagctaggaatctaataaggaatgctgatttcctcagttccattttgaggaatggggaaggctattctaaagaaaaaaaaaatgggacaggttttctgggtagatctgcaagtctggctttaagagcacaaggagggaaagtaacgaaagggctggactactgtaaaagttacaaatacgtagttagaccaatagattttatatagtccagggttttttgtcatgtaatttattaacctaactattacagaaacacagctaagaatatcaagtatttctctggctcttgatagaaaaaaaaatcagctgacttaatcctttgctgtcaaaagagttggcgtttcctgttctgggtgctactgcccaaacgttatggtacttagagtccgggatgcacaacttcaaacccaccgacttatcaatgcagccgcctgtgtattgccaattggcccgttaccttaaggcactgagcccacccggggattagttcagccatttccaagaagtatatttaacgtcggtagttctgctttattaaaatgcagcagaggtactcttctgtcccttccgtttatagaactctctcagagagttctattttttgggtttggtttgggtttttctttggcattttggatcttggatttaacccccgaacatgttttgcacctttttttttttttttttttttttaagaaaaggaattcttttgtgtatatatagatacttgcatgatatactgtagtcaatgttcggttcctcaaagaggtcttgctgctgtcaggtgttatgcactccatccatcataactgtatgaaacacatttcatatgtaaataaacgtgggacatttggcccttgtgcttctgtgagagaattattgatggtgggtctctgacatctttgtgaagtttgggaagtaattaattgcagcgacaagctacagggtgttgcagaattcttcccactcagaagaatggcatattcgttctcattagtaatcagctattttgtcactttcttgttgactccatcagtacatgggtacaatccgagggtgtgaatttcagcttgaaattccattgctgttccttggtttgtttgtattgctctaagttgtattcataatagcactttcatatgtttctg

SEQ ID NO: 115530 - DNA, 369 bp, Homo sapiens
atgatacttccgtatactgacctggtggatgacctagagctcatgggaaaagactgccttttcctagaacctgcaattccagagatgttcgttcagcactcgccagggctctgtcttgtgctgagcaatgagtggtttctcccaaagtataagacgcatcccaagagcatgcgccagtcatccgtgggtttcagggaagtgtgcgatggccctggggaatctgctcagaggatggtccctcctaggatgtcgacgagggattttaaactcatgggctttcaaagcggactgcccggggtttgcatgccagccctgccattttccaggccccttggtccagctgatgtgggttacaaggcccacccgtga

SEQ ID NO: 115531 - DNA, 460 bp, Homo sapiens
aggcccgtgatcaaaaatgcggacatgtcggaaaagatgcaacaggactcggtggagtgcgctactcaggcgctggagaaatacaacatagagaaggacacatgaaaccaaacacttcatctacttctacctgggccaagtggccattcttctgttcaaatctggttaaaagcatggactgtgccacacacccagtgatccatccaaaaacaaggactgcagcctaaattccaaataccagagactgaaattttcagccttgctaagggaacatctcgatgtttgaacctttgttgtgttttgtacagggcattctctgtactagtttgtcgtggttataaaacaattagcagaatagcctacatttgtatttattttctattccatacttctgcccacgttgttttctctcaaaatccattcctttaaaaaataaatttgatgcagatgtgaaaaaaaa

SEQ ID NO: 115532 - DNA, 1003 bp, Homo sapiens
tttttttttttttttttttcacatctcgcatcagatttattttttaaaggaatggattttgagagaaaacaacgtggggcagaagtatgggaatagaaaaataaatacaatgataaagactattctgcctaaattgttttaataaccacggacaaactaagtacagagaatggcctgttacaaaacacaacaaagggttcaaaacatcgaggatgttccccttaagcaaggcctgaaaaatttccagtctcctggaaatttgggaatttaaggctgcaagtccctggtttttgggatggaatccactggggtgtgtgggcaacagtcccatgactttttaacccagattttgaacaggaaggaatgggccagcttggccccggggtaggaaggtaggatggaaggtgtttgggtttccatggtgttcacataaaacctaccgaaagttccctcccccacggatggcaattgccagggtggggattggtacttctcttgtcaaaattccttcttgaatatgaagccgcaatgtccttcctcctatgttgtatttctcccagcgcctttagtaggcgcactcccaccgagtcccgtttggcatcctcttccgacatgttccgcatttttgatacacggcctatcggtcgctacatggttaacctagtgggcaaggcctggggtaaggggttgagttgggccgcgccccccaggcactaactgcccccaccccggccggcgccaccacgggacgacgccccccaccccacttctcaggaagcgcgggctacgcggagggctaagtccggagtggggcgaaataaggcagcgaggacaccccctggccccccgagtttctcaccgtggagaagggggctggccgactgcaacggtctcctgggggaggtgctagcacagctcaggcccggctagagctaccgtcgctaccgaaaccgtggcgcatctaagcagccccacgccagccgccgccgcttagtgctcaggc

SEQ ID NO: 115533 - DNA, 587 bp, Homo sapiens
ggttagaagcacaggcttgcgttctgggggatgagtacaggacccctgtcatgctacgagcagatggcatcgatcctgactttgctgccatgaaatcccctcaagagagccccacatcaggggtcctgagtttgcagacagtcattagagacatccttgtttgggaaacagctgccctccaccctgatttcacagctggggaaacagggcctggagaggagactcatctggtgagaaaactaaagctcaagaaggccacggcacacacaggcagcgagggcagcaggaagattggaaatcagctctgctcccaatgcctgtgcccactctgttccaacacagccttccaaagctcatacgctgtgaagttttctgcccatcacattggccaaagagctctagccagagttgaagccagtgctgatcactttcctgacaacctggctggcagagatgggaccgtatgtagcacagggaagagctcacttggacagggaatgtcccgcatgtttgaaaagatggttcagaaaggagcctttggcaatccccagggtttctgcacccaagatggactggagggatcatga

SEQ ID NO: 115534 - DNA, 533 bp, Homo sapiens
ggatgcatgctagagcccacgccaggtccctcctcagcctcctcacaaaggaccgaatgacttggctctgtgatcccatcccccagagactttggtgtgactgtggtgacccttggcatagggcacccctccgactgcctcctcatctcaaaactttccaaaccatgacttttatagcagggctttaggaatcgcctggctctaccctctcacttcatggctacagatacttgtgccctgagagagcaagtgaatttcccaaagccaacagcaagccctctgattgctgctctaccaaaccaaaatgatttcagttctcatgaaacctaaggcctgactaaggaagattaagaaacctggtggtggtcgggtcctgtagtggggtgggaggaggggggagggatagtattaggagatatacctaatgtaaatgacaagttaatgagtgcagcacaccaacatggcacatgtatacatatgtaacaaacctgcaggttgtgcacatgtaccctagaacttaaagtataataaaa

SEQ ID NO: 115535 - DNA, 1434 bp, Homo sapiens
atgacaggaaaatgtgggaaatttgggaacttcctagagtcttggagggctcagaagacaggaatatgtgggaaagtttggaacttcctagagaacttgttgaatggctttggccaaaatgcttatagtgatacggacaacgaagtccaggctgaggtggtctcagataaagataaagaacttgttgggaactggagtaaaggtcactcttgttatgcaaagagactggcagcattctgcccctgccttagagacctgtggaactttgaacttgagagagatgatttagggtacctggtggaagaaatttctaagcagcaaaccattcaagaggaagcagatcataaaaatttggaaagtttgcagactgaagatgcaatagaaaagaaaaccccattttctggggagaaattcaagcttgctgcagaaatttgcataagtaacaaggatccaaatattaatagccaagacgatggggaaaatgtccccagggttgccgtgcacccgaatggatgctttgcatggaaactgcccgtcctgagccgaaaattcgaacgcaaaccgatttactggatcctgagtgaagtcgcgaaacgtcttggacctgacgtctatcaaaagttcacagaaggtcgcacgcaggaacaatggttacaacatctgtacgccaaaatgcttgccaaagatccggcgttaccgtcttacgacgaactgaaaaaaatgggtatctataagcgtaaagatcccaatggccattttgtcgcctacaaagcatttcgtgacgaccccgaggcaaatccacttaaaacgccttccggtaagattgaaatttattccagcaggctggcggaaattgcccgtacctgggaactggaaaaagatgaagtgataagcccattgccagtttatgcctcaacctttgaaggctggaactcccctgaacgtagaaccttcccactgcaactgtttggtttccatgacaaatcccgtactcactcgacctacggcaatattgatctcctgaaggctgcctgccgtcaggaggtgtggatcaaccctatagatgcgcagaaacgtgggattgccaacggcgatatgccatatgtgttcagcagccaaatggcaaaattcacccccagaactgtgattgtcttccctaatctggaaggcccacaagtgtggagaagcactggagaccctccagaagcagtagtgctagcagtcaggggctactctccctgccgggccccgtgcaagggcctggccaccctatcccaggttgtttccaacgggtttggcctgtgtggatcttcacggaaatgcgcggaaagcgacgtagtgtccttccgggcatttttccttaaagaatcccggtcgttttcatctcctcgtagtcgggcatctcagggttacgtccttcgttttcgcatgtga

SEQ ID NO: 115536 - DNA, 407 bp, Homo sapiens
taattatactttaagttttagggtacatgtgcacaacatgcaggtttgttacatatgtatacatatgccatgttggtgtgctgcacccattaactcgtcatttaacattaggtatatcccctaatgctatcccttccccttccccccaccccacaacagaccctggtgtgtgatgttccccttcctgtgtccatgcgtcctcattgttcagtttgcacctgcgttttcaaggaaagcttggcaaactaaatggtgggcatgccatcgtttattttcacaagtgctcctgaatgcagcattcataagtggatcttaatttaagttagtgatccagaaaagataaggagcaccagaaaaccaggaagaaaatcaacatctccttgattatgaaacttaaaattattact

SEQ ID NO: 115537 - DNA, 744 bp, Homo sapiens
cctgtttcatgcctcaagaggtgaggaaagagggaaagacctctcttcttgaatctgaaaaatagtctgtttttgtttttttagatggggactcgctttgttacccagtggtataatcttggctcattgcaacctccgcttcctgggctcaagctaacctcccacctcctctctgcctcacactgcagtatccactctgtcgccagcagcgaggcattatagcaggaggcttctgaattggccagaacagcagctctcaggtggggtgtctgagaacctcatttcctcattacatgcctccctggtcagccatatgtgttcagcagccaaaatggcaaaattcaccccccagaactgtgattgtcttccctaaatctggaagggcccacaagtgtggagaagcactgggaggaccctccagaagcagtagtgctagcagtcaggggctactctccctgccgggccccgtgcaagggcctggccaccctatcccaggtatgtgacacttggctggctgttctttattgtcctgctagtacctgttgtaaagcttcttttattaaagaagagccaggagattgaagtgtcataaattgaaaagattcacaccaacccggcaaatgtatacatatgtaacaaacctgcacgttgtgcacatgtaccctagaacttaaagtataataacaaaatatgtattaaaaaaataaataaataaattgaagagattgaaaaaaaaaaaaaaaa

SEQ ID NO: 115538 - DNA, 1331 bp, Homo sapiens
aatatattttaagttctagggtacatgtgcacaatgtgcaggtttgttacatatgtatacatgtgccatgttggtgtgctgcacccattaactcatcatttacattaggtatatctcctaatgctatccctcccccctcccccaaccccacatcctggtgtgtggtgttccccaccctgtgtccaagtgttctcattgttcaattcccacctgtgagtgagaacagtgtggcgattcctcaaggatctagaactagaaataccatttgacccagcaatcccattactgggtatatactgggtgtatacccaaaggattataaatcatgctgctataaagacacatgcacatgtatgtttactgcgtcaccattcacaatagcaaagacttggaaccaacccaagtgtccatcaatgatagactggattaagaaagtgtgacacatatacaccatggaatactatgcagctataaaaaaggatgagttcatgtcctttgtagggacatggatgaagctggaaaccatcattctcagcaaactattgcaaggaccagaaaaccaaacacctgcatgttctcactcataggtgggaactggaacaatgagaacacaccggacacagggtggggaacatcacacaatcacacactggggcctgttgtggggtggggggagtggagagggatagcattaggagatatacctaatgctaaatgacgagtttaatgggtgcagcacaccaacatggcacatgtatacatatgtaacaaacctgcacgttgtgcacatggtaccctagaacttaaaagtatattaaaaaaagaaaccttggcactgattttgttagatttattcctaggtatccttcctcttttttgatttgtcattgctattgtagatggcatctttttaaaaagttatattttctaaagcaaaaaataaaaaaagttgtatttctaatttttattaccaatatataagaatgtaatttatttttacataattatcttatgtctagtaataattctgataatttgcttcttcctattaaaaccttacacccattattgatttatttttctgttttaaaatatcttcctgcactggctaaaacctccactataatgttgagcagaacagtgaggcatccttagaactatcttggttgcaaagggtaggtctctaatgtttcatcaataaatgtgatgtttctagtctgagtttgctaagtatattttaaaataatcagtaaagttagattttatccatttttatcttaactattgagatgctcatatcatttttcttcttcaatgtgttaaaatggtga

SEQ ID NO: 115539 - DNA, 504 bp, Homo sapiens
gcccatccacagttgaagcagtgtgtgcgtcaggcaattgaacgggctgtccaggagctggtccatcctgtggtggatcgatcaattaagattgccatgactacttgtgagcaaatagtcaggaaggattttgccctggattcggaggaatctcgaatgcgaatagcagctcatcacatgatgcgtaacttgacagctggaatggctatgattacatgcagggaacctttgctcatgagcatatctaccaacttaaaaaacagttttgcctcagcccttcgtctgatggaagtagtgcgatccaactatgaagcaatgattgatcgtgctcatggaggcccaaactttatgatgcattctgggatctctcaagcctcagagtatgatgaccctccaggcctgagggagaaggcagagtatcttctgagggaatgggtgaatctctaccattcagcagcagctggccgcgacagtaccaaagctttctctgcatttgttggacag

SEQ ID NO: 115540 - DNA, 361 bp, Homo sapiens
aagttcgagcatatcaagctgaacggatgccagagcaaatcaggctgatagttggtggtgtggacccaaaacagttggctgtttacgaagagcttgcacgcaatgttcctggttttttacctacaaaggacttaggtcagcccacgggatttttagcccagcccatgaaggggaatgcggtttaaattaaaacgagtgttttgccaattaatttaaatggtcttgacatttaatatatgattctgaattgcttcctgggagaataatttacaggggaaaaaacacctatagtttttgagttgtagggattctttgcgtgcaattaagtatgacatacaggggattttagaaaagattgact

SEQ ID NO: 115541 - DNA, 5768 bp, Homo sapiens
  misc_feature (1)...(5768): n = a,t,c or g
caggagtatattgagtatggacaagcagtctagagatcctcctgtgaaaatgcaaggctctatcacaacccctggaagtattgcactggctcaggcccaggctcaggcccaggttccagcaaaagctcctcttgctggtcaagttagcactatggtaaccacctcaacaactaccactgttgctaaaacggttacggtcaccaggccaactggagtcagctttaagaaagatgtgccaccttctattaatactacaaatatagatacgttgcttgtggccacagatcaaactgagagaattgtggagcccccagaaaatatccaggagaaaattgcttttattttcaataatctctcacagtcaaatatgacacaaaaggttgaagagctaaaggaaacggtgaaagaagaatttatgccttgggtttcacagtatctggttatgaagagagtcagtattgagccaaactttcatagcctgtattcaaacttccttgacacgctgaagaatcctgaatttaacaagatggttctgaatgagacctacagaaacattaaagtgctcctgacctctgataaagctgcagccaatttctcagatcgttctttgctgaagaacttgggacattggctaggaatgatcacattagctaaaaacaaacccatcttacacactgacttggatgtgaaatcattgctgctagaggcttatgttaaaggacaacaagaattgctctatgtagtggcctttggtggccaagtcttagaatctagcattcgtagtgtggtttttaggccaccaaacccttggacaatggcaattatgaatgtattagctgagctacatcaggagcatgacttaaagttaaacttgaagtttgaaatcgaggttctctgcaagaaccttgcattagacatcaatgagctaaaacctggaaacctcctaaaggataaagatcgcctcgaagaatttagcatgcagcaactctctggctccaaacgaaagatgtcaacgcagcccagaacagaactccactcccaatcgacacaccacaacaacttctactacaccagctaccaacaccacttgtacagccacggttccaccacagccacagtacagctaccacgacatcaatgtctattcccttgcgggcttggcaccacacattactctgaatccaacaattcccttgtttcaggcccatccacagttgaagcagtgtgtgcgtcaggcaattgaacgggctgtccaggagctggtccatcctgtggtggatcgatcaattaagattgccatgactacttgtgagcaaatagtcaggaaggattttgccctggattcggaggaatctcgaatgcgaatagcaagcttatcacatgatgcgtaacttgacagcttggaatggctatgattacatgccagggaacctttgctcatgagcatatctaccaactttaaaaaaacagtttttgccctcagcccttcgtactgcttccccacaacaaagagaaatgatggatcaggcagctgctcaattagctcaggacaattgtgagttggcttgctgttttattcagaagactgcagtagaaaaagcaggccctgagatggacaagagattagcaactgaatttgagctgagaaaacatgctaggcaagaaggacgcagatactgtgatcctgttgttttaacatatcaagctgaacggatgccagagcaaatcaggctgaaagttggtggtgtggacccaaagcagttggctgtttacgaagagtttgcacgcaatgttcctggcttcttacctacaaatgacttaagtcagcccacgggatttttagcccagcccatgaagcaagcttgggcaacagatgatgtagctcagatttatgataagtgtattacagaactggagcaacatctacatgccatcccaccaactttggccatgaaccctcaagctcaggctcttcgaagtctcttggaggttgtagttttatctcgaaactctcgggatgccatagctgctcttggattgctccaaaaggctgtagagggcttactagatgccacaagtggtgctgatgctgaccttctgctgcgctacagggaatgccacctcttggtcctaaaagctctgcaggatggccgggcatatgggtctccatggtgcaacaaacagatcacaaggtgcctaattgaatgtcgagatgaatataaatataatgtggaggctgtggagctgctaattcgcaatcatttggttaatatgcagcagtatgatcttcacctagcgcagtcaatggagaatggcttaaactacatggctgtggcatttgctatgcagttagtaaaaatcctgctggtggatgaaaggagtgttgctcatgttactgaggcagatctgttccacaccattgaaaccctcatgaggattaatgctcattccagaggcaatgctccagaaggattgccccagcttgattggaagtagtgcggatccaactatgaagcaatgatttgatcgtgctcatggaggcccaaactttatgatgcattctgggatctctcaagcctcagagtatgatgaccctccaggcctgagggagaaggcagagtatcttctgagggaatgggtgaatctctaccattcagcagcagctggccgcgacagtaccaaagctttctctgcatttgttggacagatgcaccagcaaggaatactgaagaccgatgatctcataacaaggttctttccgtctgtgtacttgaaatgtgtgttgaaatcagttaccgtgctcaggctgagcagcaggacaatcctgctggcaatcccaacatgatccgagccaagtgctatcacaacctggatgcctttgttcgactcattgcactgctcgtgaaacactcaggggaggccaccaacactgtcacaaagattaatctgctgaacaaggtccttggtatagtagtgggagttctccttcaggatcatgatgttcgtcagagtgaatttcagcaacttccctaccatcgaatttttatcatgcttctcttggaactcaatgcacctgagcatgtgttggaaaccattaatttccagacacttacagctttctgcaatacacttccacatgttgaggccctaccaaagctccctggctttgtatatgcctggcttgaactgatttcccatccggatatttattgcaagaatgctgggcacataccgccacaagcagaaggtgggtggcctatggtatgcacagctacctgattgatttaattccaaattatttaagcgcctttccttagaaatgtggaactcaccaaaacctatggcaaatcctctacaaggggcactttaagaagtgcctgctggttcttttgcatgatttcccagagttccttttgtgattaccattatggggttctgttgatgtgatcccacctaattgtatccagttaagaaatttgatcctgagtgtcctttccaagaaacatgaggctccccgacccattcactcctaatctaaaggtggacatgttgagtgaaattaacattgctccccggattctcaccaatttcactgggagtaatgccaccttcagttcaaaaaggatttggattcctatcttaaaactcggttcaccagttcactttcctgtctgatctgcggcgaacccttacaggttaattggtttggcttaaaactcatctacgtcttccatataaagcactttctatctcatcaatgcactggtgctctatgtcgggactcaggccattgcgcacatccacaacaagggcagcacaccttcaatgagcaccatcactcactcaggcacacatgggatatctttccaggaatttgggctgtgggacttgggacactgaggggtcgctattctcttttttggaatggcaatttggcaaatcagcttccgggtaccccaaataggcacactcactaccttcaggttggaaccatggcggaaccttttttgcagagggccaatacgggaagccatcccaagaacagatcacaagagtcctcttgggaacggttgattgttaaataggcccacatccttggggtcttcttattaccttcattgagctgattaaaaaccagcggtttaaggttctggaacccatgaaatttgttacacttgtgccccaggaaattcggaaaagttatttccagtcgggtcggcacagttgctggcatggggacaggaagggcagggccccagcaagttaattgggagggggacagggttgcccagttagggacggaaacttgcatctctgttgtacgtgttcagtcttggaggtctcacttgcaccgagttcataaaactgactgaagaatcctttcagctccttcctgaactttccccaggccctttggttttgtgggtaatctggcccaactaactggtggggatcagccctcctggcctaatgtgggcacggttcccaaggtttaaatgccatttttttgacccttggccaaaatttagaagatgctgtgaatatcattttgaaacttgtgtaaatacatgaaagagaaaacctttgtctggaacttcttggctttgtgcaagctgtgtccaaggcaagtacataaactggtaccttgtaatgaagaggcagctgattcccatgcacttgtctgagggcatagctcccatgtccttctgacaatcccctggtgtccccaaaagaatagccaaaaagcccagtttgaatattatggtaacttatttttttaatgtggacaggggaccctgaaaatcacctaagttattaaaaatgtgggatgtgctaggaattgggatatgtccagggaacatggggaagggctcactattgggantcccatgagtttccagtttgtctctacccaaacgtattccaaagctgactgcatttgtacccatcttatttcttttgggggattaatacaccctcagccgccctgagaatgggggtcagctcctttatataaaggggaaaaccagacccaggcctaaaagccccaccccctacccctcaccccccacaatccctctccctgaaacttaaaaacagtggggatttagggaagggggacccaaatcctcattaattaattgttcctcccccattaaccccactgaatgaatggccatacaggctaagctgaataatgacaaagttgaaaggaccaatacagccccttttataaggattttgaatgttttgcaaatgtattggtccctgtgttgtattttgtagcctttccctggggcttcagctcccctacttcttgtatgtgtatgcatactgtagctaaccattaaagtcatgacacacacatgagtcccactgtgccctttctcagtaggcaggcaggcagtgctgggtgggtgaggagggaaaagtgggacaatccaggccctgtaggaccttgggggccatggggggaaccaacaactaacttcttgctggaatgattgatttgattgattgattgatagggtcattcctactactaagctggcatgtttaaggaaattgtatttttcttcctatttatttcaacactggacaaatgctggagcaggtttatctggttaaggctgagtttaaaatacccaggttttaatatccttttcccccaggtatttttttttttttttaaagaaaatgagtagatacgtatttaaaaacttaacccacttaaaatttgccttacctttcatgactgtcaagttttc

SEQ ID NO: 115542 - DNA, 1032 bp, Homo sapiens
atgaacgaaggaacaagtgaccgctcgaccttctacagcgacagggcgcaggcgctcccgcaccaacagccccccaccccgccaccgccagaggcgcagacaggccgggtcccgagtgtctgtcccaggcccccgccccacagatcccggcccgggagcccccgatgcagggacccgcccgggactctgggccccgcccatacctcaacttcgcacgactgcgtgcctcaagccgacgcacggcctactctcgcactgcagacggggaaactgaggcctgaggcggccgggtggggcagacctcccggcgagcccgagcccccgcccccggctagcccgccctggcccgtaagaagcacccggggcgcgaggcgaaggcgcacagcgggggccaggctgggtccagcagcgcgatggcagctcagcggctgggcaacgcgtgctgagcaagctgcagtctccatcgcgggcccgcgggccaggggcagtcccggggggctgcagaagcggcacgcgcgcgtcaccgtcaagtataccggcgggagctgcagcggcggctggacgtggagaagtggatcgacggcgcctggaggagctgtaccgcggcatggaggcagaatgcccgatgagatcaacattgatgaattgttggagttagagagtgaagggagagaagccggaaaatccagtcccagcaagcagggccccttatgcaggctcctgcaggaatctgggtcaaggggcatgctcatgaccaaggtgaccgatattgactcagtacagaatattagctcctcgcctaccttgaaaagcgctgtgtcctgtgtagaacggcgccgggcgcacagtaggcgcttgcccaagaacctactcccaggtggccacgttgtctccaagcaccgcagccctctacgtgtgacctgctggcccgagtggtccagcctggtgaacgcagccaaggcatacgaagcccgggcaagcgtcgtcatctctttgatgccagcgaaccacgttgaccaacagcggaagtga

SEQ ID NO: 115543 - DNA, 429 bp, Homo sapiens
ttttaattgttaacagaaccaatttaaatacaacttaatacacaaagcaaagctgggcggcgttccggggggccagggaaaagtgccaagagggtcaggggtgaagcagtccgggcccggtccctggagggggctgaggctgccgtcgtgggaggggcttggctggcggaggccgggctgcctgtggaggccttgaagctttgccagcagctcctggatgaagtcctcgacaggtttcccacatgacttcaggagtccctaaaaccccctggattttccggcttctctcctcttcactctctaactccaacaattcatcaatgttgatctcatcgggcatgtctgcctcctagggccagggagggaggggtgcttaggatccccttccctccctccctcgcctttgtccagggctctgcaggagctcaa

SEQ ID NO: 115544 - DNA, 614 bp, Homo sapiens
  misc_feature (1)...(614): n = a,t,c or g
ttttttttttttttattgttacagaaccattaaatacaacttatacacaagcaagctgggcggcgtccggggggcagggaagagtgcaagagggtcaggggtgagcagtccgggccccgggtccttggaagggggctgaagcttgcccgtcgtggggaagggctttggctggcggaaggccggggcttgcctgtgggaggccttgaagctttgccaagcaagttccttggatgaagtccttcgacagggtttcccacaatgactttcaggagtcccttggattttccggcttctctccttcttcactctctaaactccaacaattcatcaatgttgatctcatcgggcatgtctgcctccatggcgcggtacagctcctccaggcgcccgtcgatccacttctccacgtccagccgccgctgcaagctccccggccggtcatacttgacggtgacgcgcgcgtggccgctttctgcagccccccgggaactgcccgcgcatgcccgcgcggcccgcgatggagactgcagcttgctccagcacgcgctttgcccagccgttgagctgccatcgcgctgctggaaccagcctggccccgctcgtgcgaattntgg

SEQ ID NO: 115545 - DNA, 469 bp, Homo sapiens
ttttctccctcaaacaagaagggcttcctttaatagactttaatatagctcatttacaatcgtatgaaaatccatcaagatcaatcatgttgcacaatccctaaaggataaaactgagggaagtcatggataattttcacagcttcattgtaaagtccaagatcaaaaggatggctatcttctttaaactggacataagatgtacacaagatggtggccttggcggttactcttccaaccacttccacaattccagagatttcttcatcaaggggttccatcaactcgatggttccattttttccttctccatcttttccagcctccctacgaagcagacaggcttgtcgatgaattgagctagcatgccggcgttgatgcgcgacctgggcaagtccatcatgtccaccatgattatggtccaagactgcggctggcgggaaacccacggacgactgaaactgtgcgc

SEQ ID NO: 115546 - DNA, 1110 bp, Homo sapiens
atgtctgcccccaacacctatggtgttaaccactccatgttagaatatggtgctctggatgaacgtggctcccctaagtgttggaccataatcatggtggacatgatggagttgcccaggttgcgcatcaacgctggcacgctagctcagttcatcgataagcctgtctgcttcgtagggaggctggaaaagattcatcccactggaaaaatgtttgttcttttagatggagaaggaaaaaatggaaccatcaaactgatggaaccccttgatgaagaaatctctggaattatggaagtggttggaagagtaaccgctaaggccaccatcatgtgtaaacttatgtccagtttaaagaggaacaacaaattgaacaactatccacataagaacaccttcataagaaccaaaaatcaggaaaccaaggcgccttacccctgggagggtttctttgtggggctcttgccggtccggacctctgcgctttaccggataacttttgccggcttttttcccttcggggaaggggtgcgggcttttttcatagctcgccgctgtcgggtatctcatccccgtgggttggctcgttcgttccaagcttgggcgataacctcagggatggtgataagcacatttgtgtctgctcccatcatgtacgtttctgcctggttactgacctttcccactatggaccctaagccattggcatatgccatccagaatgttagttttgatataagtattgtcagcctgatctccttgatgatcaccacagcagtcaccctgttctgcagcatcctgatagctggcatatccctcatgtgcatgaaccagactgcccaagcaggaagctatgaaggtttcgatcagtctcagagccacaaagtggtggagcctggaaatactgcttttgaggagagtccagcaccagtaaatgaaccagaactttttacaagctctattccagaaacaagctcctgcttcagaggctgcaagggccttgcagtgcccgtgatgcccaaagcgctgcacgtagtgcccaagcccttccactgccagccatattccctctccgagcctattctgccacctctccctgcagctgcctga

SEQ ID NO: 115547 - DNA, 946 bp, Homo sapiens
atggggattctgctggttcctgagtacaacaaatctgactatacattaaccaagatctcagtgaaggttataataaagtgttggggagggacagcattaaaggtaaagaactggcaagagggaaggcgagacagcagtgaacagctggtacgcagcacccacagcaccgcggcagcagctagtgccgactcccgcctagctcttttgactctgttcgcgggaagaatggggaaacatttcagtcgtccgtgggtttcccgccagccgcagtcttggaccataatcatggtggacatgatggacttgcccaggtcgcgcatcaacgccggcatgctagctcaattcatcgacaaacactgtctgcttcgtagggaggctggaaaagatttcatccccaccggaaaaatgtttattctttcagatggagaaggaaaaaatggaaccatcgagttgatggaaccccttgatgaagaaatctctggaattgtggaagtggttggaagagtaaccgccaaggccaccatcttgtgttacatcttatgtccagttttaaaggaaggttagccatccttttgatcttgggcttttacaatgaagctgtgaaaattatccatgacttccctcagttttatcctttagggattgtgcaacatgaatggatcttgatggattttcatacgattgtaaatgagctatattaaagtctaataaagggaggcctttcttggtttgaggaagaagattctgggctttctcatatttaatttgctgttttaaagatattcccacctagagtttttgatggaactgatatattgacagttctcaccgaagtccttttataaagaattgctactccaatatatggtcagattagatgcaagaataaagcagttgtccgagtctaagtttctattttattaataaaaactaaaatggtacgtac

SEQ ID NO: 115548 - DNA, 723 bp, Homo sapiens
  misc_feature (1)...(723): n = a,t,c or g
taaantgggcctcctnacttccccaanaacaagttccaggaggaacttctggaaccactgcttctctgtncaagtgaataccaggtttcccaaaggtgtttcttgaattagccagacattgtcccttcaagaaaggggttgaccccaaacggggcattgcgcaaccccttgttccaagccgggggccctttttttgtagatgggctttgacgggagccaggagcccagcgccgtcaagttacccggttgagtttggggtttgctcttcgggaacaaactccttccaggaagccgaggccttgtgatttggtaaatagacctgctcggtgggccatcttcaacaacactccctcgaatcttgcggtgttccttcccctggcaataggccctgtgaatctttcggggcaagcaatccctcccatgaggccggatgaaactggctaagcaagcagaacatcgtccatagttatacttgtgcttcaggttccaactggcagatggggcactggcccagaggggttaggaggatttggactctccttgggagtcgctgtgatacggccttcaattatagttgtcttcccttcttgggtctccaccacttccctgaacccgcgagctggaagccgagacccagctggtcgctgccgggcccgctagtagcccacggagaaaacgcccacagccgaacaccagagccttgaggccccccgcacgcgtggg

SEQ ID NO: 115549 - DNA, 747 bp, Homo sapiens
atgatgccagggcagctcttggatgcaggagagcactgtcagccagtcaggaaaccgcagtctatgagcacagggaccacagagccaacccctcacgtggcctttgctcttctccatttgattctcacagaagccccggggatagatgacggcaccctgcccacgtcacagacgaggaagctgaggccggaggaggagggctatctgctacagctggaaaaaacaatcgggcgtttgctccgaggaaaaagctctctgacgtttgaaaggcgagatggcatcacggataacagcagagcttcccagcccgccccttggaaggcgcaggagaggaaaaaggaaacatttgcaccaccccgcacctgcgacgtggcaatacggctggagcaacacaagcatgagtttaaaggcagcatttcgcagaggcctggggctctgaggggcgccaaggagccctggctttcatttcaggaaatctgggagtctttacttccgctcagtgcctcagtctctcccaaagcccaggacagtctggacacttatgaggtcaccaataaatatgcaattgatgaaagcaggagcagccatgagaaagctattcaccaggatcctgtttacactccttttgtcaaaacaaatccgttgctccttaaggaattggagcacaagtcctggtctgtcttatccatggttgtgtgccccagtgcagagaacaaggcctactacgcggcaggttctcggaagtga

SEQ ID NO: 115550 - DNA, 933 bp, Homo sapiens
atgggagagcaatccagggcccacacagctaaatccaagtccgtgcaaagtgtgctgggtgagattggcctaaggaaaggggaaaagagtgggaacaagtcctttcacccagagataagggggtgcaagtgttcaccggcccatggcataatgggaaggaagcgtttgcacggaccacaaggtggcacagcagctctgcccacagtcggccagcttgggatgggaggaggggtgaagaagacagcctcagtcagggccagagtgggaaggcagatgcatcctcacactccctcccgcttcctcatgacagataccgccagtgccccggatctcagtgaaaacttcagcctctgcctcattggaggcgacagccatgggcacagagaagggagctgttctgatgagaggcctggaactgccaccaacccaccacgacttcaggcaagttattcagccttcctgtccccatctgttcaaaaacaaaaagttttagaagttgggaattccaaaaccaagcccccagatgattcagttcctggtgaaggcgctcttccctgctggcaggcagccaacttcttactgtgtgttcacgtggtagagatagagtgctctggtcccttatctccattgacaagtcctaaaccaaacattgcaaaggaaatggcagaggggattagctcttctgaagctaaagatctgtttgcagtcagaaaacagaacatcacgatccaatcattcccagccagtgtttgtggaaatgagcagcccagaaaccgctctgtggaagtgatcacccagacactgccctgtggaagtgagcgccccaaacactgctctgtggaagtgatcaaccagacactgctctgtggaagtgagagtcccacataccactctgtggaagtcagcaccccagacaccgctttgtggaaatga

SEQ ID NO: 115551 - DNA, 689 bp, Homo sapiens
ggccagacccgtggggatttctgaacccaaaacatcaaatctgtgtgggaatcgagcatatggaaaatctctgataccgccagtgccccggatctcagtgaaaacttcagcctctgcctcattggaggcgacagccatgggcacagagaagggagctgttctgatgagaggatccagacatctcaagaagatgactgaagagtatccagcccttccccaaggagcagaagcctctctaccactgacaggcagtgcttcctgcggcgtccccggcatcctccggaaaatgtggacaaggcacaagaagaagtctgaatatgtgggagccaccaacagcgcctttgaggccgactaaaggtgaccctcttcaagtgccctgtgttggccaaggttccccggacaagaggaaaaaccttcaggattgaaactgagccacacgcacctctgctagtagctggtccaaacccattatcctccctcactcattgattaccctgggatagggcacaggaaagaaatgtccctcgaaggcaatataaaactgccccttcttagaattgctaaagccattggtctgaaagtgactttgggaggtcataaagtttgtatctctatctttaagccaaaaatttaacctttcccggtcctttttaaagccctccaaggaagcaaaaaaccaaaaaaaaaaa

SEQ ID NO: 115552 - DNA, 2507 bp, Homo sapiens
tcaatgccttctgcttttatctgctcggcctgaaacagtgacgtccagccaagaggccagagctagggctcctccgatgctcctccgatgctccaacggtggtggccctgctcctcgatgaggccggttcccgcaaggccgatgcttaggcatttcagagagatgcactctccctcttcttatcgctttccccttcaggtctgcaagatggcagcccctttggtttgccctccagccttctcttaagtcctggagccgctctggtaattgagccttccttctggcatcctctggaaggctaattgaatacagcaggaggcagtcacagagctttttagcatttctacttcgaggagggcctaaaagaagcacagcagatcttcgccccggcaaacccacaggggcgctgtggagtttcttcatttttgagagaaacacaacctcttggacatccatcagcccctccatgaaacgtctgctcaacatgtgctctctctctcttcgggctccaagctttccataacgcttccaggttgccaaaccgtcaatcccagccactttgaagacccctcctaatgcttccctgccattcacaactacaccttgtggtgactgaacagctgttctgtttcgcttcaggctgttttcctggtggaagaggaagttaattttctttccgggcaaaatgaatggtgtctgcaaatagccagaggccacaggagcatctgtgtttaaacaactgaagaaagcccacagggctgcagaacggagagagaacaagaggcataaggagatgccagacagtgggctttggcagggcagggaaggcttgcgtttgtcaggcgtggccatgtctccctgctcttgtctttgagctgcttcctctcgttctatcttctgcagataccactcctctgtggtctggggattttctctgccaagaacatcatgcagtttgggggtgcagttcccatttgtctcttgacaaagggaaacacaagtggattgaaagcaaaaacataagggctctttccccgaagccattcctgaatcctgaaatgtggccaatggaatgtggaggaagtggcaggtgcccgtcccaaacctatcctcagaagctgtctgctgggaaacaagcccaggcaaatcccagcttcctgcattttgcttcatgctcagagctagccagctgttcagcaagcactcgatcagaggctgttctacgacaagggcatcgttcctgccttgagtcactctcaagctaatcagcgtgggtggctggtggaaaacatgcctcagttcaaggtaaagccggatttccgtggcgggggtcccacaggacctcctgtagtagcccctgcgctgtgtgtctggagcgcggtcctcggccttattgaaatggtccaagtagacagctgcttgttggattccagtgcaggtacctgcgatgtttacgtcccaacaccgaagcccaagtgtggggactgaccatttctcaatggaagtgaaaatttggggattggactttgaagacggattactaaataataattattatatggtaactgaagcaacctacttttgaaaatcaaactgtattgggtagtgggaggtgggaagggaagggctttgggaaaggggatggaatatccctttttacctttaacagacttactttaatcttctcgatgtagatgtttaatgtaggtacttcacattgcaaacgccttttatgtctatttacaagctcagatgtctctgctctcctgaatcttggggcatgccatttctgtaatccaaaaatccctgtaggcgtgctaacaaattccggggtggtccgggtttggcagatttgatttttaaaaaaacgtattatctttaataaaatgttattatgtcaaccagtgaggctgccctgaacaaaaaaaaacaaaaagaaaaaaaaaaaaaaaggaaagaaagaaactgataaaaagaggcattccagcccctatgttattgatggaaaaagaaaaagaagaaaagcaatcttcgcagtacatgtttacttgttcgaaaaaattcccgggacaagactacccttgtttttaagtttttcagtattctgaaaataccagtgtgtggcagttctcgcagatgttacctaaaactgctgaacttgaccggcagaatgttctgccgttttctgctccctcgacacttgattggagggctgtcgacctctcctcccgtgggggccttccccaagtgcctatcttctctgatagtcatgggaggaggttacacttaattcattgggagatgtaagttgttggttttgttttgttttgtttttagaaaaatatatataaatatataataggatatctatcgctataggaattaatgcatttaataaaaatgagggcttttttagagggaaggacccaaaaaattccaatgtctttaaaaatatatttaatgggcaatgccaaaagtcttcctgcttccgtgctgaactttagaac

SEQ ID NO: 115553 - DNA, 351 bp, Homo sapiens
atggcctatgaagggcatgtggtagcattagacgagaggccgccagccacagcccagatgatacagtccccacacgtcccgtacaccacaagcacacaggcgaccctgccagggaacacgcatggctcggagctcccaagtactctctcctggcaagtgaggagtgtaaataaatcttgggaggaggacatgagagagaaacacagtccctggaggacagcattctggagtggccacatgagttggaaacttccatgccgaagccttaagaggttgacttctcagcctcatcttcagaactgcttaacggtggtaacagtcggcagccagcacgtggtggcactgcgctga

SEQ ID NO: 115554 - DNA, 1272 bp, Homo sapiens
atgcttggaggtggagatcttgctgacaaaacagtgaaggtcaagggcgtcttttatggcagcagcccaacaggaaatctgactaaccaacaagtaattcttttgcacctctatggaagaaaacattctccgagtgttcagggagaatccaggcaggaaaagcaaagccatcctcatgtggtcatgggagaacaattaagtatcaggttgtgtgatcctgaatattatgggagaagaacagatcatttagaaaagaatggaatagggacccaggccacttcctggggcactcaaacatttgtaggtctgatagaggagggaaaactggcaaatgagcccaagaaggagggcccagtaagaggggtcaagctggtggatgaactcagttgtgctgactccttgaggtgtatggtgacccaggacgggcggttggaaaatgtggctgtgattcttggagaggtaatgaataagggaaaagctggaagagcaaaatggctcacagtgcctgatgattgtgccacatgcctggaagaagagcagtatgagcaatccgaaaataaaattaagaaaatggaagccaagatggtggccaagttggagtatgagtctgtgctgtgtgtgaagccaaacatcagcgtctactggattcctccctgggcctccaactgtgattacagggcatctgactggaaattagaccagcctgattggactgttcacctccgaatcatttcaaaagggaagactgcctatatcaaactcgaggataaagtttcaggggagctcttcactcagataccagtagaacaatatcctggtattgctgtggagacagtgacagattccagctgctactttttaatctggattcaggatggtcctgggcagagtgctgtcattgacactgctggcttcacagatcggggagatgcctttgaatttaatgtctccttgcaggatcacttcaaatgggtaaagcaggaatctgagatttccaaggaatctcaagaaatggacgcttgtcctaacttggatctgggcttcaaagaaagacaaaccatcaagttgagtacggggaacattacaaccaagaatggatgtgcttctaagcccaggactgcaatgggtgggggcctgagcttactcgcatccccaccaggaggccaagtcagtattcccccactgtcctcctcagttgcatcagcaatcatgtcaccctaccagccattccaaaatctaaccatggaggcagtgatgcagatatccttttag

SEQ ID NO: 115555 - DNA, 783 bp, Homo sapiens
aagatggcgaccgagttggagtacgagtctgtgctgtgtgtgaagccagacgtcagcgtctaccggattccgccccgggcctccaaccgcggttacagggcctctgactggaaattagactatgcctgattggactggtcgcctccgaatcacttcaaaagggaagactgcctatatcaaactcgaggataaagtttcaggggagctctttgctcaggcaccagtagaacaatatcctggtattgctgtggagacggtgacagattctagccgctactttgtaatccggatccaggatggtactgggcgcagtgctttcattggcattggcttcacagatcggggagatgccttcgactttaatgtctccttgcaggatcacttcaagtgggtaaagcaggaatctgagatttcccaggaatctcaagaaatggatgctcgtcctaagttggatctgggcttcaaggaaggacaaaccatcaagttgtgtatcgggaacattacaaacaagaaaggaggtgcttctaagcccaggactgcaaggggtgggggtctgagcttactcccacccccgccaggaggcaaagtcactattcccccaccatcctcctcagttgccatcagcaatcatgtcaccccaccacccattccgaaatctaaccatggaggcagtgatgcagatatccttttagatttggattctcctgctcctgtcacgacaccagcaccactgtattgcggccgctctggaggatccacgctaacgtacgcgggcgttacact

SEQ ID NO: 115556 - DNA, 507 bp, Homo sapiens
ttttttctttttctcagaaaaatgtatttgcaattcaaatgttcatataaaaagcataaattttaaaaagttcatagatgtgtttttagaagtgctatggttttgccattcactgcaattacattgcaaaatgtgcagggtggtccacactgcatcatcttatgcttttgtcacactgaagtcactctcatcacaacctcccccgagctgttatcttctgataagtcttcatggggcctcatccgattgaacaggtgcaataacacatagccacatctgaaacccttggtgaggttaactgagttgggtggacccaagttttctgttccgcagagctgtcaatggcaaccacaaagtcctacttgtggaagactctccccggctgctttcttcgatgtctgtggctttgtcataatttaacacatcccagtgcaaattcacagctcgccagcgcttaaacactctgtaaactgcagctccttcatgaacaatgagaccttcaatctg

SEQ ID NO: 115557 - DNA, 826 bp, Homo sapiens
  misc_feature (1)...(826): n = a,t,c or g
gggcaagctctgtgtgattgattggaagacatcagagaaaccaaagccttttattcaaagtacatttgacaacccactgcaagttgtggcatacatgggtgccatgaaccatgataccaactacagctttcaggttcaatgtggcttaattgtggtggcctacaaagatggatcacctgcccacccacatttcatggatgcagagctctgttcccagtactggaccaagtggcttcttcgactagaagaatatacggaaaagaaaaagaaccagaatattcagaaaccagaatattcagaatagggagcaagttgctatttgggaacattcagcaccttctcacagtttgggaacatatattgctgtttactccagtgtaaaaatgaggtgccactggatctgagtgctacacgaacacaagtagaagtattaatttgttgaaatgtgttgttaccaaaaagactgaaaagccccaaagtctagatataaagacctagacttcggcacgcgaaatcccagctatgctacctcttatttacctgaaaggaggacacgcaggatgggcagtcatgctggtgactcttgtactcccttgagggacattggtnnnnnnnnnnnnncctggccccaggcaggatgcccagtctttgacctgaaattggaaggcagtgaggctgagggtgccaaaatttccccagggttcacccaaaggggaaggggctaaatgcccccagctgggtgcaggggggacccattagcccattaccggtggcaaaaccaaggcctaaaacttgtttaatacattggggttttttatatatttcg

SEQ ID NO: 115558 - DNA, 196 bp, Homo sapiens
atggctgaaagctgggacagcttcccattggcagcggacagaattcacatccggtttgcacgccggaccggagagcgcggggcagccatggtgcggttcaagcacagcctcgatgaccgagttctgagcagcctcgtacgggacacgatcgccagggtgcacggaactcggcgcgccctgctccatggcttcgcgg

SEQ ID NO: 115559 - DNA, 185 bp, Homo sapiens
tcaagtgggtaatgtctgctggttggcagctatccagtttggaaaactgtggaagatgctgttgctacccagattgttctgttcaacaagtgggcctgaagcctgagcagtgtagccagctgactcctcctcctcctctagtaagcagcttcttgtcacagacttctggatagcttcccgctctc

SEQ ID NO: 115560 - DNA, 411 bp, Homo sapiens
aaggcagccatggtgcggttcaagcacaggtacctgctctgcgaactggtgtctgacgacccccgctgccgcctaagcctcgatgaccgagttctgagcagcctcgtacgggacacgatcgccagggtgcacggaactttcggcgcagccgcctgcctccatcggcttcgcgggtacaataagaacatgtcagaagttcctaattcagtacaacaggagacagctgttgatcttgttgcagaactgcactgatgaaggagagcgggaagctatccagaagtctgtgacaagaagctgcttactataggaggaggaggagtcatgtgaggaggctgcaaaagcaatggagtgaacctctgctccccacacagctggctacactgctcaggcttcaggcccacttgttgaaca

SEQ ID NO: 115561 - DNA, 470 bp, Homo sapiens
cccacgcgtgcggtggaggcagccatggtgcggttcatgcacaggtacctgctctgcgaacaggtgtgtgacgacctccgctgccgcctaagccttgatgaccgagttctgagcagcctcgtacgggacacgatcgccagggtgcacggaactttctgcgcaatcgcctgctccatcgccttggcgcttgcaagggcgctgaacgaagaggggaacccggaaggatggcgggatgtggcgggagcaagcgccggaggaagaaagaaggggcacgagtgcccaagcccgtgcaccgttttttgtaaggtatctctttaagcgcctgggaccccaagcgagagtccgaaattagcagagcgctaaaaggaggggcccgaaggcagtggggctttgagctagaagcctctttttacctgcttgacaggtaatttctgtaattggttgtgattgaatttgatagggtagagaag

SEQ ID NO: 115562 - DNA, 990 bp, Homo sapiens
ggcacgagcggactggagagcgcggaggcagccatggtgcggttcaagcacaggtacctgctctgcgaactggtgtctgacgacccccgctgccgcctaagcctcgatgaccgagttctgagcagcctcgtacgggacacgatcgccagggtgcacggaactttcggcgcagccgcctgctccatcggcttcgcggttcgatatctcaatgcctatactgggatagtgctacttcgatgcagaaaagaattctatccagcttgtgtggtcagctcttcccttcatcacatacttggagaacaaaggacaccgttacccatgctttttccaacacaattaacattgtgggggggacaataagaacatgtcaggaagttcctaattcagtaccaaccaggagacagctgttgatcttgttgcaagacctgcactgatgaaagggagaagcggggaagcctatccccagaaagtcctgtgacaagaagctgccttattaagaggaggaggaggagtcaggtgatggaggctgcaaaagcaataggagtgaacctctgctcccccacacagctggctacactgctcaggcttcaggccccacttgttgaacagaacaatctgggtagcaacagcatcttcccacagttttccaaactggatagctgccaaccagcagacattacccacttgaaatggagcactcagttaaactgaagttgcctttacctaccattccctggtgaagtgttgcaggttgtgaactctgtacacatctttattgcttggctaagagtacatttaataaatgtatctggcttccgtggcatttagcatacttatattacagaaagggcttatggagtcccactcctccaaaacatataaacaaccaccaacaccactcccaacccaaaaccatctcaccaaccctatcccataattacacacaaaaaccaatccccgcgcggcgtctaataccttccctttcctccc

SEQ ID NO: 115563 - DNA, 366 bp, Homo sapiens
atggaagccatgagtgagaataaaatggtgccctctgagtttagcacaggacctgtggaaaaagctgccaaacctttgccatttaaggatcccaactttgtggtaagcatcgaagacttcagtattgatgctcctccatcctttaagccagctaagaagtattctgatgtttcaggtctgcttttgttgaatatggaccacctggaggaagaacaggaccttaggcaaggcagccctccagctgagagaggccctgaaagcattgtatctgtcaccagccctgtggccaaaagtcgtgatggaagctgctcagtgcacatgtgtcttatacgctactgggccacatcatggctgaagcctgaatga

SEQ ID NO: 115564 - DNA, 2814 bp, Homo sapiens
ggacgggcgaggagactcgtggtctggttctgggacttccctaacagcatggcccctaaacgccagtctccactcccgcctcaaaagaagaaaccaagaccacctcctgctctgggaccggaggagacatcggcctctgcaggcttgccgaagaagggagaaaaagaacagcaacgaagcgattgaacacattgatgaagtacaaaatgaaatagacagacttaatgaacaagccagtgaggagattttgaaaagtagaacagaaatataacaaactctcgccaaccattttttcagaagaggtcagaattgattcgccaaaatcccaaatttttgggtaacaaccatttgtcaacccatccacaagtgtcttgcactgctttggggagggaagatgaagaggcactgcaattatttggaccagagttgaaagtgacagaattggaagatattaaatcaggttacagaatagatttttattttgatgaaaatccttactttgaaaataaagttttctccaaagaatttcatctgaatgaggagtggtgatccatcttcgaagtccaccgaaatcaaatggaaatctggaaaggatttgacgaaacgttcgagtcaaacgcagaataaagccagcaggaagaggcagcatgaggaaccagagagcttctttacctggtttactgaccattctgatgcaggtgctgatgagttaggagaggtcatcaaagatgatatttggccaaacccattacagtactacttggttcaagataaggatgatgaagaaggagaaggagaagaagatgatgatgatgatgaagaggaggaggaaggattagaagatattgacgaagaaggggatgaggatgaaggtgaagaagatgaagatgatgatgaaggggaggaaggagaggaggatgaaggagaagatgactaaatagaacactgatggattccataccttcctttttttttaaattttctccagtccccgggaagcaagtgccagtctttttttttttttttttttttttttttccctcttgtgctcagtcgcccctgtttcttgaggtctcttttcttctactccatggttctcaatttatttggggggaaataccttgagcagaatacaatgggaaaagagtctctacccctttctgttcgaagttcatttttatccccttctgttctgacaaaaacctgtatggaatcaacaccaccgagctctgtgggaaaaaaagaaaaaccttgctcccttcgctctgctggaagctggagggtgctaggcccctgtagtagtagtgcatagaattctagcttttttcctcctttctctgtatattggccgagagagtccactggtgtctccatgtggaatttgggacaggttagcatttacccaaccatgtatctgtctactttctccttgtttaaaaaaagaaaaaaaaaacgtaaaaaaatggggtttatagaaggtcagcaaaggggtggggtttgagatgtttgggtgggttaagtgggccattttgacaacatggcttcccctttggcatgtttaattgtgatatttgacagacatccttgcagtttaagatgacacttttaaaataaatttctttcctaatgatgacttaagccctgccactcaatgggagaatcagcagaaacctgtgaggatcttatttgggaattgacattctctattggtaattttgttcctgtttatttttaaaattttctttttgtttcactgggaaagggaaaggatggatggctcagttttaaaacgtttaaaagtgttacaagttggcttttgtttacaattaaaacttaaatgtggtacaccaaggggttttgatgcttttctcttcagcatagggtatgctttactatggaccttcccaagttttgacttggtataaccatcactgtcaaaactttgtcacccctaaccttccgtatttttttgatacggcacttttgcagggatgacctcaggggctaatggtgggattgaagtaatggggattttggaatcaatggtattaataatcccccataggctggggaaaccgtgggttcaatttgcccattgggttcctgaaaagtattccacatctttggaataccacaatagcctcaaatactctctgaggtacattgtgcccgttgattttttatctccaagtgggcagtttttaaaattgggcccttttacctgggatataaattaattggtgcctgccacccacccatccaacagaccgtggtgctcctaatgcccaagttattacacggggacagttggctgggcatgtctttcattgggctattattaaaatgtgggcccaagaagataggctctcagtaaagaggtctgatggtgagcagtaactgtccctgcctttctggtcataaagctctccaaatgtgaccatgtgaatcctggggtggggataatgggactcagctctgtctgctcaatgcccattgtgcagaggaagcaccctaatgcataagctttttaatgctgtaaaatatagtccgctgaaattaaaatgccccttttttagagggtgatttaatgggacagtctggtgaaacttcaaaagctttttgatgtattaaaacttgattaaatgggaactttttccatcaattagggcaaaagtgttaaccaacctatctagatggatagtatgtaatttctgcacaggtctctgtttagtaaatacatcactgtataccgcatcaggaatcttgctccaataaaggaacataaagatttaaaaaaaaaaaaaaaaaagtttt

SEQ ID NO: 115565 - DNA, 276 bp, Homo sapiens
atggaggtgtggatggtggaggcgcagatggtggaggcgaggatggtggaggcgaggacggtggaggcgaggatggcgcagctgctccctgatgccctgcatactcacgctcagagcagcaaccagaggcgagagctagggtggaagtccactgaagcgaaacaggaagagccgacaggtccccaaattcaagcggcaaaagccagagctttgtttgtgcattttgtccaattctttgttcaaagcaccaagaacctggacaccctccaccggtaa

SEQ ID NO: 115566 - DNA, 420 bp, Homo sapiens
atgcccctgcagcataaaacagcatcctcggggtttgtaggtccccattgtgttctgaaaactgggaaatccaagatcaaggtgctggcagatctggtgtctggtgagggttctcttcctggtgtgcagaaggacatcagtcatattgttaccagtggagggtgtccaggttcttggcattttgaacaaataattggacaaaatgcacaaacaaagcgaggaaagaatgaagcaacaaagcagaggtttattgaaaatgaaagtacactccacagggtgggagcaggccaagtagaggggctcaagagccctgttacagaattttctggggtccaaatatcctctagaggtttcccattggccatttggtatacaccccttgcaaatgaagtagtggccctcaatcagacgctgaagtga

SEQ ID NO: 115567 - DNA, 477 bp, Homo sapiens
gggatagccccggagatgcacctgataacccggtcggtacttgcttcacgcagcgagagtaagcagcatatatctgtgctgttctctggtgcatcctcgctcactgcgagggcttcgctgatcgcgctactgcggcgagagtactgcccgtcactgggtaggtgggacttgaaattcattttaatagaaggaattttcgtggatataatctacaaccgattttgctctgcgcaggtgagcaaggtcatgctcgtgctgaaggctctggagtcttcagacctcaccgaggttgtcggttacggcttctatttatacaagtgccagaccaaacttcatactggagagaaaccttacaaatgtaaggtttgtgacaaggctttcatgtgccattcttatctggcaaaccatactagaattcatagcggagagaaaccttacaagtgtaatgagtgtgatctaagtgattgtacacaatag

SEQ ID NO: 115568 - DNA, 892 bp, Homo sapiens
  misc_feature (1)...(892): n = a,t,c or g
cacttttatttctttttcctttatttcactggctggaacctttcatattgtgtggaatagtagtgataagaggggacattcttgccctcatcccaacctctaggggaaactatgctttcaccagtttgtatgatgattctgattctgtaaggattggtaggtgatcttgagttgaggaagtttcccatgatactgctttccatactgaccgcagtatttcagattcccacaaaatgtacgaaaatagtttctccacatccttgcttgtgaagcaggttcactgcacactggttgccaatgtgtctgagttgagtgagagataatctcacggacacacagtaagttacatgaagtgaatttggtacatacagatcggcagatacctgggattcaatgcattctgctccccaaggctcaggaaatccacccagtgcagatgcagtctctctgtatgtgttcaacttgcatcacagctgtgggaggctggaaggcggcccatcctgggtttcatgctccagggatgcatggcacgttggcttttctttcttgtccatttattttcggtttttttctctttctttcatggttttctttctctttttcaacttctctttcttttctctttctctttactctctctcttctctctctttctgcttccagggtaggtgggacttgaacttcattttaatagaaggaattttcgtggatataatctacaacaaattttgctctgcgcaggtaagatccgttttcagaccaaaaccctgaaaacaagcgcagccagtcaagcgaacggaagcgcaggcccggcccaggctttgtcccggcccaggctttgtcccggcccgcgaattccnccngctggncagaggtcctcaggggcgccatc

SEQ ID NO: 115569 - DNA, 467 bp, Homo sapiens
caccctgccgctctgcagagggtctgtggcctcagcttccttcccagtcagcccgctctgcccccaggaggttcccgaggctaaggggaaacccgtgaaggctgcgcctgtgaggtcttcaacttggggaacagtcaaggactcactgaaagccctctcctcttgtgtctgtgggcaggccgattagctggccctgcttccccagctaagcaggagtcttttgtgcttgagccaaggaaacatcattagatccgctaaggggcatctgaaacatcccgtcgagtggcagaggcaggataagtcacctgcacatgaagagactcattcattcatacagcaaatattactggtacatcttccacatgccaggccctgcaaagtgctggggagataccatggttttcctggagctggtatttttggggtggagggaacccaccctgaataaataaagtaacccaataaat

SEQ ID NO: 115570 - DNA, 504 bp, Homo sapiens
atggccccgtcagaagatcccagggactggagagccaacctcaaaggcaccatccgtgagacaggcctggagaccagctccggtgggaagctggctggccatcagaagaccgtccccacggctcacctgacttttgttattgactgcacccacgggaagcagctctccctggcagcaaccgcatcaccaccccaagcccccagtcccaatcgagggcttgtcaccccaccaatgaagacttacatcgtgttctgtggggaaaactggccccatctgactcgggccccaaggacaaggctgcagagggagtttgagaccctcaaggagaaaggagacctgtggctgcacatccggcttttcaccagcaggtgtcgccctctcatcagactagaggacactgggtccaggcctggacagggaagggtcaccttggccgggctggcggccaagggctccttcagacccgacgtgccccagcggcccagcggccgcttggtcccctga

SEQ ID NO: 115571 - DNA, 931 bp, Homo sapiens
cctaggatagctcctctcctgccagagctaggtaggcgccgaagtagccgcatggccccgtcagaagaccccagggactggagagccaacctcaaaggcaccatccgtgagacaggcctggagaccagctccggtgggaagctggctggccatcaaaagaccgtccccacggctcacctgacttttgttattgactgcacccacgggaagcagctctccctggcagcaaccgcatcaccaccccaagcccccagtcccaatcgagggcttgtcaccccaccaatgaagacctacatcgtgttctgtggggaaaactggccccatctgactcgggtgacccccatgggtgggggatgcctttgccaggccagggccacccttgccgttttgaaaagggctggtggcctaagtttcctttcaagtcagcccgctcttgccccaggaggttcccgaggctaaggggaaacccgtgaaggctgcgcctgtgaggtcttcaacttggggaacagtcaaggactcactgaaagccctctcctcttgtgtcctgtgggcaggcccgattagctggaaagggccgggctctgaattccccagaggctgcaattccccagggcctggccctgcttcccccagctaagcaggagtcttttgtgcttgagcccaaggaaacatcattagatccgctaaagggcattctgaaacatccgtcgagtgggcagaggcaggataatcaccctgcacattgaagagactcattcattcatacagcaaatattactggtacatcttccacatgccaggccctgcaaagtgctggggagataccatggttttcctggagctggtatttttggggtggagggaacccaccctgaataaataaagtaacccaataaataaagaagatgattttgaaaaaaaaaaaaaaaaa

SEQ ID NO: 115572 - DNA, 1446 bp, Homo sapiens
gaaaggatgcaagacctcaggagaaactcctcacttggtagcccatttgaggcctaaaactgggatacaaatgcccctgagagagcaacggtatactggggtaaacgaggacgggcatatggtggaaaggcgtgcctttgtgtaccaaccctccacctctgccaatctcctcaattggaaaaacaataccccatcctatactgaaaagcctcaggctataattgatttgctccaaactattatccagacccacaaccctacttgggctgattgccaccagttgctcatgtgcctgtttaacacggatgaacggcgaagggtgctccaagcagcgactaagtggctagaggaacatgttccggctgattacaaagaaagggccttgtttaatctggcagaagggttactggactgagggggactaggctcatgtgcacccaaagagcccatggtcagaatgacagtcgggggcaaggacattgagtttcttgtcgatactggtgctgaacatccagtagtaaccaccctggtcgcccccttatccaaaaagactattgatataatcttggacctaaaaaatgctttctttagcatcagactatctcctgagagccaaaaactgtttgcctttcagtgggaggatctggagtcagctgtcaccactcagtacacttggacccggctcccccaagggttcaagaactcccccaccatcttcagggaggcactggctcgagacctccagaaaattcccaccagagacctaggcttcgtgctgctccagtacgttgacaacttcctgctgggacaccacaagaagagaggtgtgtaggatatggtaatcctggatgctgtcattgaagccaaatcgcccctaccaggcatcagtcacagccccctgctccctcaggcacctgaccttgtacctacttattctaaagagaaggactttctccaggcagagggagggcaggtgatagaagagggatggatccagttatcggatggaagaatagctgtgccacaactgctaggagccgcagtcatactggctgtgcatgagaccacccacctaggccaagagtcacttgaaaagttgttaggctggtacttctacatcttgcatctttcagcccttgccaaaacagtggcgcagcagtgtgtcaccttctggcagcacaatgctaggcaaggtctaaccatccccgccagcatacaagcttatggagcagccccttttgaagatctccaagtagacttcaccaagatgcccaaatgtggaggtaacaagtatttgctagttctagtgtgtacatactctgggtgggtggaggcctatccaacacggaccgagaaagctcgtgaagtaacccatgtgcttctccgagatctcatccctaggtttggactgcccttacaaatcagctcagacaacgggccggcatt

SEQ ID NO: 115573 - DNA, 636 bp, Homo sapiens
ccacaagaagagaggtgtgtaggatatggtaatcctggatgctgtcattgaagccaaatcgcccctaccaggcatcagtcacagccccctgctccctcaggcacctgaccttgtacctacttattctaaagagaaggactttctccaggcagagggagggcaggtgatagaagagggatggatccagttatcggatggaagaatagctgtgccacaactgctaggagccgcagtcatactggctgtgcatgagaccacccacctaggccaagagtcacttgaaaagttgttaggctggtacttctacatcttgcatctttcagcccttgccaaaacagtggcgcagcagtgtgtcaccttctggcagcacaatgctaggcaaggtctaaccatccccgccagcatacaagcttatggagcagccccttttgaagatctccaagtagacttcaccaagatgcccaaatgtggaggtaacaagtatttgctagttctagtgtgtacatactctgggtgggtggaggcctatccaacacggaccgagaaagctcgtgaagtaacccatgtgcttctccgagatctcatccctaggtttggactgcccttacaaatcagctcagacaacgggccggcatt

SEQ ID NO: 115574 - DNA, 470 bp, Homo sapiens
ggaattcgctgttccccctggcatacaagcttatggagcagccccctttgaagatctccaggtggacttcacagagatgccaaagtgtggaggtaacaagtatttactagttcttgtgtgtacctactctgggcaggtggaggcttatccaacacgaactgagaaagctcatgaagtaactcgtgtgcttcttcgagatcttattcctagatttggactgcccttacggattggctcaaataatgggctggtgtttgtggctgacttggtacagaagacggcaaaggtattggggatcacatggaaactgcatgctgcctaccagcctcagagttccggaaaggaccccagactgtcatcctgagcactcccaccgctgtgaaggtagagggaatcccaacctggatccaccacagccgtgtaaaacctgcagtgcctgaaacctgggaggcagaccaagcccagaatat

SEQ ID NO: 115575 - DNA, 2682 bp, Homo sapiens
atggataaaaatccaccaaccaagtatcctatctgttgtcttcaagagactcaactaacacataaggactcaaataaactccagcagtgtgcggcagacccccgtggagaattaacacagcggttgaacaccgggaaggaatcggcgattggagtctggacatctggaacatgggaagtcagctcctacggttctgtccgaccccacatcagaggatgcatggcagaaatggcaccaatggtgcccctccttaccaagaagagaggctccccacatcgaagcccacagcccctgagcctctgcaaggatccaaacgagacagagggtatgcaaaggctaatgcggtatagggaagcactcttagaagggttgaggagaggagcccaaaaggccacaaacgtaaacaaggtctccgaggttatccaaggaaagcaagaaagtccagtgcaattttatgagagactgtgtgaggcctatcgcatgtacactccctttgacccagacagccctgaaaatcagcgcatgattaacatggccttagttagtcaaagcgcagaggatattaggagaaagctgaagaaacgggctgggtttgcagctgcagctattagaggggtccccctgaaaggacaagggaatgggggctccaggaaaaatacccagtctgaccgtccacgcttgcaacgtaaccagtgcgcctattgtaaagagataggacattggaaagataagtgccctcagctgaaagaaaagcaaggtggttcagagcaaaagaccccagacaaggacgaaggagccttgttcaatctggctgaggggttattggaccgaaggggaccaggctcacgtgcccccaaggagcccatggtcagaatgacagttgggggcaaggacattaagtttctggtcaatactggtgctgaacattcagtagtgaccaccccggtcgcccccttgtctaaaaaggctattgatataattggagcaacaggagttttgacaaagcaggctttctgtttgccccggacctgctcggtggggggacatgaagtgattcaccagttcctgtacatccctgactgccccttgcctttgttaggaagggacctgcttagcaagctgagagctatcttcctttaccaagcaaggctctttacaactgaagttgcctggaacaggagttatcatggccctgacagttccccgagaggaagagtagcgactcttcctaaccaaaccaggcaaagagatagggccagctctggcccagtggtggccaaaatatgcgcagaagacaaccctcctggattggcagtcaatcaagctcctgtactcagggaagttaagccagaggcccagccagtcaggcaaaaccagtatccagtccccagagaagccctggaaggtatccaggttcatcttaagcacctgaggacttttggaattatagtgccttgtcagtctccatggaacacccccctcctacctgttcccaagccagggaccaaggactacaggccagtacaggacttgcgattggtcaatcaagccacagtgactttccatccaacagtacctaacccgtacacattgttggggttattgccagctaaggacagctggttcacctgcctagacctgaaggacgccttctttagcatcagattagctccagagagccagaaactgtttgcctttcagtgggaggatccggggggttcaagaacttcccccaccatctttggggaggcactggctcgagacctccaaaagtttcctgccagagacctaggctgcgtgttgttccagtacatcgacaacctcctgctgggacgccccatggcagtcgggtgcgtcaaaggaacagacgccctgcttcagcacctggaggactatgggtataaggtgtccaagaagaaagctcagatctgcagacagcagcaaaatgctaggcagggtccaaccatcccgctcagcatacaagcttatggagcagccccctttgaagatctccaagtagacttcaccgagatgcccaaatgtggaggtaacaagtatctgctggttctagtgtgtacatactctgggtgggtagaggcttatccaacacgaactgagaaagctcgtgaagtaacccgtgtgcttcttcgagatctcatccctaggtttggactgcccttacggattggctcagacaatgggccggcatttgtggctgacttggtacagaagacggcaaaggatccccactggaagacaggagaaaatgtaaacctaggaattgatggaactgggcttgacccccgagtcaaccttttaatccaaggggagatccacaagcgctcccccaaaccagtgttccagaccttttatgatgaactaaatgtgccaataccagaactgccagggaagacaaaagatttgttcctgcagttagcagaaaatatagcccattccctcaacattacttcctgttatgtatgcaggggaactactatgggagaccaatggccttgggaggcccgagaattagtgcccatggatccagttcctgatataattccagtccagaaggcccacactggtaacttttgggtcttaaaaacctcaattattgggcaatactgcttagctagagaaggaaaagacttcaccatccccgtaggaagctcaattgcctag

SEQ ID NO: 115576 - DNA, 1602 bp, Homo sapiens
gcggccgcccggcccggccgcggatcagagactggagactgggtcttgctctgttacccaggctggagtgcagtggtgtgatcatagctcactacagccttgaactcctgggctcaagaggttgaggctccctcctcagcctcccaagtagctgggactacaggctttcagcaccatgcctggctaattcaaaaaaaccttcagagagatagggtctctctatgttgccctagctcgtctcaaactcctggcctcaagtgatcctcctgcttggacctcccaaagcgctgggattacaggctcctggaaccatgggcctcaggccctgaggatacggggctcccggtggccatgacgacgggtgactgctgccacctccccggctccctgtgtgactgctccggcagccctgccttctccaaggtcgtggaggctacgggcctcggaccgccccagtatgtggcacaggtgacttcaagggatggccggctcctctccaccgtcatccgtgccttggacacaccgagtgatggtcctttctgccggatctgccatgagggagcgaacggggagtgcttgctgtccccgtgtggctgcaccggcacgctgggtgccgtgcataagagctgtctggagaagtggctttcctcatctaacaccagctactgcgagctgtgccacacggagtttgcagtggagaaacggcctcgacccctcacagagtggctgaaggacccggggccgcggacggagaagcggacactgtgctgcgacatggtgtgtttcctgttcatcacaccgctggccgccatctcaggctggttgtgcctgcgcggggcccaggaccacctccggctccacagccagctggaggccgtgggtctcattgccctcaccatcgccctcttcaccatctatgtcctctggacgctggtctccttccgctaccactgccagctgtactccgagtggagaaagaccaaccagaaagttcgcctgaagatccgggaggcggacagcccccagggtccccagcattctccactgggcaggtggactcctgaagaaggtggcagaggagacaccagtatgaatgctgggctctccggaccctgcagcagagaggccagaggtagctggtgataccctgtcctgtggaaggacttccacttcaacacttccacttcaacagttcccgcacggcctgaacgcttcttaggcccaagagacacccatgcagagccttagtctgtgatcctgtgtgaagatattttcagggttttttttttttttttttttgcatatggaggacaggtgggacatggtcctgagctctggacggagcaggcaccctgatttcattttgaggtccacatggccccttttgggccagcagctgtggccggtgtatcaagggggcccttaaagctggaacattccagcaagcttcttgggcttttttgcacccggcaggccccctttcctggcaccctcgactttatataaaagttgccctgggtttcaaaaacccccccctgaatgaataaaaggagccctggctggaaaaaaaaaaaaaaaaaaaatatataaaagtcgtatcga

SEQ ID NO: 115577 - DNA, 443 bp, Homo sapiens
tgcggtgcaattcgaatatggtctgtaggggtcatatcagagttccccagggacactaggggctgactcttgggtgggaggtagctgagggacttccgctctggaagtctcttccttggtggctggcaagaggcaacctgctcctgcctttgggagcctcatgtccccttggttctctccgtgtcctcccagctgggagctgttgctgggttcagaccacatgctgccacttgtgtttctgcagagggtcctggtgtttggtcactttcatctccagccccacagctcaccagctgctgcaggccaattccgtcatagccatgcatctggagccacgtgcaaaggttccagtgggccccaaatctaaacttccccccgctgtcctcagtgtacaaacgtaaatcattttatatctgcgtgggtttctgatacagagcaatctt

SEQ ID NO: 115578 - DNA, 1114 bp, Homo sapiens
  misc_feature (1)...(1114): n = a,t,c or g
gaattcccgcctccttcttctgccgctcctggtgctgcttgtgtgctcgtttggtgcggacctggtacctcttttgtgaagcggcagctgaggagactccggcgctcgccatggccgacgaaaagcccaaggaaggagtcaagacttagaacaacgatcatattaatttgaaggtggccggggcaagatggttctgttgtgcaagtttaagattaagaggcatacaccacttagtaaactaatgaaagcctattgtgaaccgacagggattgtcaatgaggcagatcagattccggatttgacgggcaacccaatcaatgaaacagacacacctgcaccagttggaaatggaggatgaagataccaattgatgtgttcccaacagcagacggggaggtgtctactgaaaagggaacctgcttctttactcccagaactcttgttctttaaagacccaagattacattctcaattagaaaactgcaaatttggtcccacccacatccctgactactaccgtatagttttctctattctttcatttccccccttccccattcctttattgtaccataaagtaactgggtatatgtgcaccaggccatatggcattttttttttttttttaactaaaccngcccaatgggtaggtttggattgaccatccaagtgggagacccgggatgggggaaaaattactgattctgtggaaaatacccccctttctcccattagtggccatgttccattcagctcttaccctttatattccagtaaagttattttggctctcactgttttaacaaccacaacaaaacaacaacaacaacataaaaattccttggcatacccttgttcaattggatgaattttaatgtttttcaatttatcattgttaaaaccccnggggccaaantttttataacttttttggtacggtagctgttaccnatgtagggcaatctcgtctttaagtagggattaaattactcnctaaaacaaaaaagaatcctagawcactwctcccttcaagtcaaagcgtcttggttgtttaaataaacttcttgtttaaaaaaaaaaaaaaaaaaaaaaaaaaaacctcgagggggggccc

SEQ ID NO: 115579 - DNA, 517 bp, Homo sapiens
gaaaaccagcgtgtgctagtgatacaccatgacagggccaggctgttggcgccctcttgtcctccaaggtcctggccatccgcagcagagctttgccctgctgctgcatctcgcccagactgagagcggacggagcctgatcatcaaccaccttgacctgaccagattattggaagcgctggtgtcatttcttgatttctcggataaggaggccaacacctgctatgggactgttcacagacttggctctggaagaaagattccaagtctggttccagggccaaccttccagggtgttctccctggcacttcacaggcgttctgaagacagatcccaaggtaaaggcagcttccttcggctcttgttgccagttgcatttgccatcatggggaaacctcagttgttgagcccattacccgaagacacatggcggcctgtgaggaatttggggatggctgcttgagcctcctggccaggtgtgaggaggatgtggacctgttcagagaggttatctac

SEQ ID NO: 115580 - DNA, 1082 bp, Homo sapiens
gtgtttttccacagcaggaaatgatgcagttgaagaaatggtcctggccatccggcggcagagctttgccctgctgctgcatctggcccagactgagagcggacggagcctgatcatcaaccaccttgacctgaccaggctgcctgccgacactacggccactgtcgaggacatgctgccttctgtcaccagcgtcaccactaactctgacactatcaccgaaacctttgccactgctcagtatatcctcaccagtgagaccaccaccctgacctccagtattgccccgccggccacggccacgcctgactcaaactctgtaccggctggccaggccaccccttccaaggggcccagcgcctctgccccctccccggccccagcttcagcccccaaggtcgcccccctcgttgacctgagcgacaccccgacctcaacccctgccgctagcaatttgtcttctagtgtcctggctaaccaaggggctgtcctcagcccaagcgcccctgctggtgtcggggaggcctctaaggctcctccggccagcaagcccacccctgcaccagtccccaccccgactggggcagccagtcctctagcagcagcggctgcccctgccacagaagcccctcaggccaagcaggaggctcccagcaccaaaggcccggacccggagcccacccagcccggagccgcgaagagcccggccgaggcagccacagcccttgctagcccgaagagcgaggctgcctccgtcagcaccacaaacccttcccagggcgaggactttaaaatggacgaagggaacttcaagaccccagatattgaccttgcaaaggatgtttttgcagccctgggctctcctgctcccgccgctggggccagtggacaagcccctgagcttgctccttccactgcagacagctctgtttcgcctgcgccagcaaagaccgagtacggcctctctttgtctgctgtcatcgggttgtgtcctgtggtgagtggctgggaagactcggggctccccagcatcaaatggctgctgggtctcaaagttcaagagaaaggccttaacctttcag

SEQ ID NO: 115581 - DNA, 1771 bp, Homo sapiens
  misc_feature (1)...(1771): n = a,t,c or g
atggtgctgatgatgtcgtccacgctggtgaacagaagccagactcctggacttgcctatgagccatcttcatttccaaaaaggcgatattgggtcctggccatccggcagcagagctttgccctgctgctgcatctcgcccagactgagagcggacggagcctgatcatcaaccaccttgacctgaccagctgccaagaggagcagaacatccgtggcccctttgtgttatactgcattagaggggtacccaagcaggatgacagctctgtttcgcctgcgccagcaaagaccgagtacggcctctctttgtctgctgtcatcgggttgtgtcctgtggtgagtggctgggaagactcggggctccccagcatcaaatggctgctgggtctcaaagttcaagagaaaggccttaacctttcaggtttgaagggccccgtagaagcaaagccagagtgccagagaacagaaaacgaaagcagcgccagcgaaagtcaagacggtccccaatgtacgccacacagacaaaggagaacgagagcaaagcatgatgggtgaagagaaccgagcaaagatcaaaataaaaagtgacacagcagcttcaccagagcatttccaacaccacagacacacacacgcacgcacacacacaaacacacatgcacacacacacatctcatttcctctagtgtcttttgcctttaaaaaaaactaaacagataaaacatgggaatctcctttttgtaggtttatagaaagggtccctttgttgcaccactcacttgtaagaaaatgagacccaaaggttaaacccacagccaaactaggacactccgttccctgaaaccgttaaaaaatcaaacaaaaggaccccaaattaagaatctaggaagctcagaaacgaaatctaggttcaggaagaccacacttggtgttacccgattggcacagaccagtttcagagaaatactttcaggcactaagactaatcgaatgaacaaagtccacagtttatttttatactttcagtcaagtttgaactctgtaaaacctcataaataagttataaattctggttcactttgaatttgttcagtatgcaaagtgtgtcaccctttctagctgaattcaattcccacgtagactcttattttataggacgaatgccaaattgcagcttctgggggtagatctcaatttgcagtattcagacttctttttctttcttttacattcttttttctttctttctttctgccaactttgttttccagtgtttacaaggtgacaaatgtttgactttggttgtgtttaaatgtccgtgtaaaatagctgccttttattttttaaggtaacaaataccacctagaggtaggtaggatcatcccacgcttgctttagcacaggacaactttacaaaacatgattgtttacagctgctcttcccctcttttctgatctgcagtttttgcctgggtcccactcaggtgaaaatccatctcattctggaatggttttgcttttgaatttttggttatttnttgtgtttctttgggggttagaccactttctgattagccgccacctgcctgcatctgtgaaaagggatctgctcccaggcgttctcacccttcttttgaaggactccttaggctttgttgaatgaagcagagaagattgtatagttggggctggtcttggtgaacacacattattaccccacacatcccctttgtgtagaaagccaaataaaatctatacataccaaaaa

SEQ ID NO: 115582 - DNA, 2600 bp, Homo sapiens
gtcgaccctttccacccctggaagatggaaataaacctgcgtgtgggtggagtgttaggacaaaaaaaaaaaaaaaaaagtctagagccaccgtccagggagcaggtagctgctgggctccggggacactttgcgttcgggctgggagcgtgctttccacgacggtgacacgcttccctggattggcagccagactgccttccgggtcactgccatggaggagccgcagtcagatcctagcgtcgagccccctctgagtcaggaaacattttcagacctatggaaactacttcctgaaaacaacgttctgtcccccttgccgtcccaagcaatggatgatttgatgctgtccccggacgatattgaacaatggttcactgaagacccaggtccagatgaagctcccagaatgccagaggctgctccccccgtggcccctgcaccagcagctcctacaccggcggcccctgcaccagccccctcctggcccctgtcatcttctgtcccttcccagaaaacctaccagggcagctacggtttccgtctgggcttcttgcattctgggacagccaagtctgtgacttgcacgtactcccctgccctcaacaagatgttttgccaactggccaacgacctgccctgtgcagctgtgggttgattccacacccccgcccggcacccgcgtccgcgccatggccatctacaagcagtcacagcacatgacggaggttgtgaggcgctgcccccaccatgaccgctgctcagatagcgatggtctggcccctcctcagcatcttatccgagtggaaggaaatttgcgtgtggagtatttggatgacagaaacacttttcgacatagtgtggtggtgccctatgagccgcctgaggttggctctgactgtaccaccatccactacaactacatgtgtaacagttcctgcatgggcggcatgaaccggaggcccatccctcaccatcatcacactggaagactccagtggtaatctactgggacggaacagctttgaggtgcatgtttgtgcctgtcctgggagagaccggcgcacagaggaagagaatctccgcaagaaaggggagcctcaccacgagctgcccccagggagcactaagcgagcactgcccaacaacaccagctcctctccccagcctaaagaagaaaccactggatggagaatatttcacccttcagatccgtgggcgtgagcgcttcgagatgttccgagagcctgaatgaggccttggaactcaaggatgcccaggctgggaaggagccaggggggagcagggctcactccagccacctgaagtccaaaaagggtcagtctacctcccgccataaaaaactcatgttcaagacagaagggcctgactcagactgacattctccacttcttgttccccactgacagcctcccacccccatctctccctcccctgccattttgggttttgggtctttgaacccttgcttgcaataggtgtgcgtcagaagcacccaggacttccatttgctttgtcccggggctccactgaacaagttggcctgcactggtgttttgttgtggggaggaggatggggagtaggacataccagcttagattttaaggtttttactgtgagggatgtttgggagatgtaagaaatgttcttgcagttaagggttagtttacaatcagccacattctaggtaggtaggggcccacttcaccgtactaaccagggaagctgtccctcactgttgaattttctctaacttcaaggcccatatctgtgaaatgctggcatttgcacctacctcacagagtgcattgtgagggttaatgaaataatgtacatctggccttgaaaccaccttttattacatggggtctagaacttgacccccttgagggtgcttgttccctctccctctccctgttggctggtgggttggtagtttctacagttgggcagctggttaggtagagggagttgtcaagtctctgctggcccagccaaaccctgtctgacaacctcttggtgaaccttagatcctaaaaggaaatgtcaccccatcccacaccctggaggatttcatctcttgtatatgatgatctggatccaccaagacttgttttatgctcagggtccaatttcttttttcttttttttttttttttttctttttctttgagactgggtctcgctttgttgccccaggctggagtggagtggcgtgatcttggcttactgcagcctttgcctccccggctcgagcagtcctgcctcagcctccggagtagctgggaccacaggttcatgccaccatggccagccaacttttgcatgttttgtagagatggggtctcacagtgttgcccaggctggtctcaaactcctgggctcaggcgatccacctgtctcagcctcccagagtgctgggattacaattgtgagccaccacgtccagctggaagggtcaacatcttttacattctgcaagcacatctgcattttcaccccacccttcccctccttctccctttttatatcccatttttatatcgatctcttattttacaataaaactttgctgcca

SEQ ID NO: 115583 - DNA, 129 bp, Homo sapiens
tcagagggaccacttggggccagccagactggcctcaatggcggactcagtcacattgactgacggggaccagggcttgtgtgggtcgagagcgccctcatggtgctggtgctgttgtgtgtaggtccc

SEQ ID NO: 115584 - DNA, 490 bp, Homo sapiens
ttgggaagtcagaacttccttatagggctgttatgatcatacttgtacatgtcttttggagcacacgtgtacacatttctttctgtatatactgggagtggaattgctggggtgtggtcatggatacacatctgttcaactttttagtaagtttaaattcttctgaacagttttccaaacaaatgaaccgtcttatactctcaccagcagtatatcaatgttctgctttctccacatctttgataatacttgacatcatcagtttaaagaatattttcattactctcataggtaatatagtggcatttgattgttgataattgtggattaattttccattttctgattgctgcctatttgtatattcttgcaatttctcttcgctccttgctccgggcattggatgcattcgatgtgtcagtgagctggttttgatgactgtgatggaatcagctttatctctgcatctccagttcccagtatgaaccat

SEQ ID NO: 115585 - DNA, 428 bp, Homo sapiens
ttccctacattgaatccgcaaatcttgttgactctgctttcaaaatacatcctgtactcaccacctttacatacaccattctagtccaagccagcatcatctctgaaatgtgttgtagtggcatagtgtcctgtgtctgcccttgtccctcctcaacagcagccaaaatagtcctgttgaaacccaagtcaagtcatgtgactcgtctgctcacaaccctcagatgacttcctgcctcactcaggaaagccaggtccttatgatggtctacaaacaggacatgatctggacttttttccatctcaaacctttgtctctacctgcccgctgccattataactccagccacagtgatctccaacacagtggagatctgtgatctccaggtaagacctgagagcctgggcacttgatggcccctgcctcag

SEQ ID NO: 115586 - DNA, 480 bp, Homo sapiens
atgcttcctgcactggaacatcggactccaagttcttcagcttttggactcttggacttaacaccagtgatttaccaggggctctcaggcctttggctacagactgaaggctgcacagtcagcttccctacttttgaggttttgagactcagactgacttccttgatcctcagcttgcaaacggcctattgtgggatttcaccttgtgatcgtgtgactcatggacacatagaagtggggattcagactggcgaggctgctgaagggcagtggaacacacttgatggcctaaacctggttgtgctgcaagcagcccaggccatctgtcaggttggcattgggcccactagcaagttcatgacccagaaaaacaagaagtatagaaagccagataccctgggccaacttgaagccctggaaagagaggcagccctagggattgtgggggcagggaaatgtgtcgttcatacgaacccttga

SEQ ID NO: 115587 - DNA, 256 bp, Homo sapiens
cagtgtgaaaacaaactatacaataaattggtatcagtagagtggggcacggctgaaaagatacctgaaaatgtggaagcgactttggaactgggtaacaggcagaggtcgaacagtttggagggcttagaagaagacaggaaaatggacttgctgaatggctttgacaaaaatgctgatagtgataagaacaataaggtccaggttgaggtagtctcagatggagatgaggaacttgctggggactggagcaaag

SEQ ID NO: 115588 - DNA, 454 bp, Homo sapiens
tttttcttcagaaacacaggagagaagatttattttacatcatcaacattgcaagatttcagaatgcacagtattaaacttggccttggggtgagagggaggaggacggggagggataaaattgcagctttcaagggatcacaggttgagattaaacctgcacacaggaaacaaccagaaaacaactccaaaccatgaatcaagccatgtgcaacgtagggacatctagttccacaaagtgatggggggatgagcacagggttcaagtctgatcattgggcagaagcctaggtcataataggggtttgcctgccatttcactgagttttcacccagctggtactaagcccttgcatagatgagaccatcattattcaacagcccaatgaaataggtacttagccgtcccattttacagataagaaactgaggctaatagaggtgtagcaactta

SEQ ID NO: 115589 - DNA, 909 bp, Homo sapiens
atggacaagggaagagagagaatggccgctgccgccgccgctgctgccgccgccgccgccgccgctcagtgccggagccctcggtgcgcggcggagagaagaggattccggcgggaactcgactcttggcgccaccgcctcatgcactgtgtagagtggggcactgctgaaaaaatacctgaaaatgtggaagtgactttggaactgggtaagaggcagaggttgaatagtttggaaggcttagaagaagacaggaaaatgtgggaaaatttggaacttcttagagatttgttgaatggctttgataaaaatgctgatagtgttatgaacaataagatccaagctgaggtggtatcagatggggatgaagaacttgttgggaactggagcaaaggtgactctttttatgttttagcaaacagactggtagcattttgcccctgctatacagatgtgtggaactttgaacttgacagagatgattttagggtatctggcagaaaaaatttctaagcagcaaagcattcaagatgcgccctggctgctttcaacaacctatggtcatatttgtgagcaaagaaattatgttaagttggaacttatatttacaggggaagcagagcgtaaaagtttggagaatttgcagccagctatgtggtagaaaagaagagcccattttcagggaaggaattcaagcaggctgcagaaatttgcataagtaaaaaggagccaagtgctaatggccaagaaaatggggaaaaggccttgaaggcatttcagagacctttgtggcagcccctccctttcaccccaaggccaagtttaaaactgtgcattttgaaatcttgcaatgttgatgatgtaaaataaatcttttttcctgtgtttttgaaaaaaaaaaaaaaaaaa

SEQ ID NO: 115590 - DNA, 696 bp, Homo sapiens
atggaaaccgacgctctgcgcaataagcaaattgcccaaagccacgtagctggggaaaatccattcaactctttcatccgaattattccgtattttcctttctatctctcagtcactgcctctgctgctcctcttgattttctagcgtcagataccacctgcggatttctcagtttagcagatgcctcagactccctgaactccaaactccatctcctctacttggcaagaccacctggctctgtcctatggtttgcaaaccctgcaggcgcacgtattgtcagaacacagttcctgccccatttccttgttgcatcatctacagatcttctggtcgcttcctttcctccactgatgactttagcacctgtcttcatccttgatacccctgcaggttgtatcacatatagaaaagaatcaaatatgtctagcacccccgaggtaaaccagaggggatctcatgatcttcacatgaaccttagtgtcttagacaaagggggcagtggtagttttgttctattttggtttgtttttgaaacgggtgatagaaaagcatgcttttgtgctgacaggaaagatctaggagagagggagaaattgatgctgccagaaagaggggacagttacagaagcgaagaccttgagaaggagatgatgagacccaggatgcaacacagaaggcttggacttagataa

SEQ ID NO: 115591 - DNA, 246 bp, Homo sapiens
atggggatggctgacattcaggtcggaactaaacctcagggttctttgaaaccccaattatctcagatgtttgctgggaacagtgataatgataatgagcatcatattgaggtagaggaagaggactggttagtggccacagccccgctggagcagtcactctctggaaaccacggggaaacagcctttttggtccggcttgacagccccaaccagaccgagggtgcagaagaaccagggtggtga

SEQ ID NO: 115592 - DNA, 313 bp, Homo sapiens
tcaaggtcttcgcttctgtaactgtcccctctttctggcagcatcaatttctccccttctctccctagatcttttccctgcaggggtatcaaggatgaagacaggtgctaaagtcatcagtggaggaaaggaagcgaccagaagatctgtagatgatgcaacaaggaaatggggcaggaactgtgttctgacaatacgtgcgcctgcagggtttgcaaaccataggacagagccaggtggtcttgccaagtagaggagatggagtttggagttcagggagtctgaggcatctagaatttgtgggggcacagta

SEQ ID NO: 115593 - DNA, 597 bp, Homo sapiens
ccttcatctttctggaagggccaaccaggcattcatccttggcctccactggctccttctctgtctccaaagattttaaataacgtggcaggcaaggctgcctgaaggctggggacaagcgatggtccctgggctcctccccagagctcgacttctcctacgctggagctgtctccacaggcccccctgtgtacagtgcaggattggaaggagcactggacggggagtcagtggagcagatctcgcagacagaaaaacctgaggatcgggcccacaacttaattataagtggagctacagagaaggctgaattctcgactctggcaagtctgctagtccaagaccagtatcttcagtcaagttacaacagaattcagttataccacgagaataaagggatgacagagaggctgcaggacccagccaacgttcactggcagacatcagaagaggatggatgggactggatcacgagggtgctgggatcaaaggcaatggaggagggagtcggattccttggaccaaaaggccatgggacgagggaaggagtcactgtactggcaggaattactgtccctgagcaactggcaggagaag

SEQ ID NO: 115594 - DNA, 361 bp, Homo sapiens
atggtcagtaccgcccaggataaaagcaggcagaggaacgtggaagaaccagactggctgagttttccaggcttcatctttctcccgtgctggatgcttcctgcccttgaacattggactacaagttcttcagcttttggactcttggacttataccagtggtttgacagggactctcgggccattggccacagacagaaggctacactgtcggcttccctacttttgaggtttggggactcggactggcctccttgctcctcggcttgtagacggcctattgtggaacttcgccttcgtccaccagctacagcggcgatggaggcgatggaaatgcgcctatttggagttgagctgttct

SEQ ID NO: 115595 - DNA, 276 bp, Homo sapiens
atggtggtgtgtttcatcagcctctgtcaggacaaggctgtcactgatcaggccaggaatctggaggtaatcaggctgctggagaaaagttacagagaaataaaaactttcaacattcaagtgatgtttcgtcatggtcacggttcttcaggaaacaaaactgcagactggttagttctgagggaggccatctactgccccccaaggagagatgacctaattctggagatgcaactgaacaacacaacttggatgtctgcaaacctgagtccatga

SEQ ID NO: 115596 - DNA, 790 bp, Homo sapiens
atgtggaaaaccccacatggcaaggaattgagggagaccctgccccaaccaatcaccatcaaggaacagaatcctgacaacaacctaactcactccaatttaggcacccgcctggcagaaggagcgatgtggaggagcatagaggaggaaagtggggatgttcctggctttgaggttcaagagacccttggccccttcctgggctatatctgctgtagtgtcctggttacagtgctactgattgaagaaacagaggcccagacaagctcatactcacaaacagaggctggtccaagaccagcaaacaaagcacagatggcctcatggcccaatgcaactgccttcacccctgcacctacaccaatgcttcccaacgttcttcacattatggcacacagagaatgtgataaaatccgtaagattcactgggacccgaagcagcgcaagggcgtcctggctgcccaaacgcggggctccagcgccgcctgccggccgccgtgtgcaacgccgacccggaagtctcgccgtctctgcctgcgctggggacgcgcgggacacccggttccgggaatcccggtgggggtccgaccttgctttgggcgcagggaacgcggctctgcaggacgggctgccgccgagggcatcggcaagcttcggggtgtggaccgtgcctgcgcccgctgcatccgttttgggcaaggctgtggctttttgagcctcagtcactctttgcggaggacgaacaggatgatgcccagttgtggtgtcactaatctgggtcctgtggcct

SEQ ID NO: 115597 - DNA, 663 bp, Homo sapiens
atggaggatgtcagtggggtcaccagcagggagagttccaagcagccaggagctggagttgctctgaccactgtggagaccctgcctgacgttataaatgctgtgtcttggaggactggtgtgatgcggttgatgacactgattgctgtcatctgtgagatgggctatcaggttcggtgcttggcattggagaaatatcttcaggataaggcaagtttcatatgcccgtgcactggaatggcagatggccttgcccaaatagaaagcctgcatgctcttatgcttgtgggaaaccagaacatatcccaggggccctactggtatggggactccaggactgacagggtccggaggagtcatctgaaaatcccccaaaaggaccagttagacaagggctcagggatggtcattgaatttagaaatttacaaaacacatccaagcaaagaagcttggaaacaccgttgaaatggcaggaccctcaagtccagctcacggaccacaaaaccaagcaacacaagcaaaaagcaaaatcggttcttcccacacctctctccccaccaggaggcaaagtggaacaacaggcaaaagcctgttacagcaaacacaagtacagtccgaaaaggtcagcagaacataaagattcccacctccgcgaatcctga

SEQ ID NO: 115598 - DNA, 577 bp, Homo sapiens
gattccgagtatgcagactgggattacaaagtggaaagaaaggatcctttgaaattgtagaaaaagagaataaagtcagcctagtagttcactaccaatactggaggaactccaaggatatttcagctaagtcataacattaaaaatgtggtgcttcgacccagtggagcgaaacaaagccgcctaatgttaactctgcaagataacagcttcttgtctattgacaaagtaccaagtaaggatgcagaggaaatgaggttgtttctagatgcagtccatcaaaacagacttcctgcagccatgaaaccgtctcaggggtctggtagttttggagccattctgggcagcaggacctcacagaaggaaaccagcaggcagctttcttactcagacaatcaggcttctgcaaaaagaggaagtttggaaactaaagatgatattccgatttcgaaaagttcttggtaatccgggtagaggatcgattaagactgtagcaggaagtggaatagctcggacgattccttctttgacatctacttcaacacctcttagatcagggttgctagaaaatcggtag

SEQ ID NO: 115599 - DNA, 207 bp, Homo sapiens
atgactgcagggtctgcctctgaagcccagcgtttctactccatttgggatattccacacaggaagagaattggaaatgctggaggctccccacgtcaggccgtcctccaggagtggctatccatctctaagggctttccggactgctgcccagcaacttcaacaggcacctctaatcgacgacctctcctgcctccgctggtgtag

SEQ ID NO: 115600 - DNA, 512 bp, Homo sapiens
  misc_feature (1)...(512): n = a,t,c or g
atggatggagtatttcaaccacaatggcaaagaatgaattaccggcagtgtcagagtttcttggttngctgtgggaagacagctgccatgttgagaggtgccttgtggagaggctcatgtggcgaggaactgagactggcttctatccaacaaccatgttaaagacgcagaacctgttcaggcaagagtggaagcaagaggacgcataccacagtctggaattgacagtcatcctgacagatgccctgacaattgaaaaagatggtagaaaagggggagtcaggggctacatcctcaggagccttgaacatcatcttcccagcagggatttcccaagggtaacatgggtaccactgatatcttccaaatcaattaaagaaaaaaaagacagcaaaatctgtgttcatcatttcatatcggcaccagatgaacagctcattgatggagtaagggcagtcgagggggagtgtcataaaaagacaattctttttatgctgaatggagaggactga

SEQ ID NO: 115601 - DNA, 221 bp, Homo sapiens
tcaatagtcactgatccagatggcttggcttctccttttaagatgtttgtattctctgtacctcacaggtcagcaagtcctgggcttggtggagaaccagagtgagctgtgctgtgtttaaaatccttcctggggttggcagcaatgagtaagataatgctccttgctcacagagagtagtcggccagctgaaagcctgcttggcagtactgccatgggct

SEQ ID NO: 115602 - DNA, 785 bp, Homo sapiens
atgaaggctgggctagggggtgagctgtgtccggtgtcgaaagaccccaggcaggccgcagaggggattgtggaccacaagcccccagatgcctgtcctctgatgattcagggcctgtgcttgaaatcagcccagaaacctgcagaagatgctggagccaggtggtccctgcatcaccaagcctctcccctggatgtcactgttgtgctgcgtgaacaagaagttgagtgtcagtttgccaatctttctgagctgaacaggtaccaccctggggcctctccttccctccttcctcttcctttcctcgggagtcacaggtcagtcccagttggggtcctgatactcatctctatttcatcagcaacctgtggacaactggagtacgctggactccttcctactccaaggcttcatatggcttttccccccaacttcacctggttgagtcctcaaccagcgaattcttcaatgccagctcagctctgagtcctaagacactgagctcaaaggtagatgtggtcccgaggaaggacaccccacagaataaggcaggccagctggagcctgacttggggaaacacccgcctcctctgctgtggaggccggcccacgccatgtcccgtggcccatatgcattccatagcaccttctttcaggacacagactccccttgccggaagcaaagcctttgcatctggtttctccacggcagttcagagattgctgaagcccaatctcatatgacgatccagatcttaggaagtccagaaaaatgggcaggataa

SEQ ID NO: 115603 - DNA, 498 bp, Homo sapiens
atggcggatgatctgggtggagaaacatattttctgcacgacattggtgccctcctccctgaagaagcaaagccttatgaggggatctctcgggcccagggggttgcatgtgtcactgcagctgtggggggtgcggggaacagcttcagacttacagcacttctgtgccctggcttatcaggtcagccaagagcggcggttgagttcctgagaaagctggcttccttcaccggcggacgctatcactgccctgtggaaagccacctggggctgaaagtgctatggaccaatcctatgaacaacagtaagaccaggtatgggggcctgggaggcacaggctctgggctagtgaatacttgggggtctccaaccctcatgccaacaagtcacatcagctatgccgatagggtaggcatttatgagagcgatgacatcaactccatcatgtctgagatggaaaaggctctcaactactcccaaaagaggctggaagtctga

SEQ ID NO: 115604 - DNA, 221 bp, Homo sapiens
atagtcactgatccagatggcttggcttctccttttaagatgtttgtattctctgtacctcacaggtcagcaagtcctgggcttggtggagaaccagagtgactggtgctgtgtttaaaatccttcctggggttggcagcaatgagtaagataatgctccttgctcacagagagtagtcggccagctgaaagcctgcttggcagtactgccatgggctact

SEQ ID NO: 115605 - DNA, 291 bp, Homo sapiens
atggcagaagtatcagaagcattcaaagggttgatgccctttgattcatcaaatttatttctaaggattaatcccaaagaagtaatcagagaggcagagagggacgctgctgagcacctatgtgtgtccagtgctcaggacaaaggtctagccaagggagacacttttcaagggaaaggtagacacagaaacaaacaggcacagaggaaagacgatgtgaagatacaacgagaagattgtcatttacaggccaaggaacagagaacgctgctggcaaacatcacaaactag

SEQ ID NO: 115606 - DNA, 504 bp, Homo sapiens
atgcaaaatgatagaggagacctgacacatcttcattttgcctttactgagcgggtatccacagagacaggtgataagaacactgagtctcagaagctgcccaaggttccaaagacattaagtggtaaaggaaatacaagctgtatggatcgcaatgacgctggtgttgcactgacggaatacaagcctgatggatccgatgacgctggccttcccgccggtctcctgcgtccaaacctgctgcagcagccgcgcggagcactcagacaccagtacgtccatcctcccatcagcgtctcactcgccaagtggacggaagcggaaacggtcagcctctcccggaagcggaaaccccctccggtccgctgtcccgtcggactgggtgctggcgcctctgctgcctcctggcgggatccagtagacactgcgaggagaacccgcggggatttcggtcaggagcgaggccgcaactcagggacgtttgggcgaggggagaggaattga

SEQ ID NO: 115607 - DNA, 470 bp, Homo sapiens
gtgagacgctgatgggaggatggacatactggtgtctgagtgctccgcgcggctgctgcagcagggaagaagagattaaatctctgactgctgaaattgaccggttgaaaaactgtggctgtttaggagcttctccaaatttggagcagttacaagaagaaaatttaaaattaaagtatcgactgaatattcttcgaaagagtcttcaggcagaaaggaacaaaccaactaaaaatatgattaacattattagccgcctacaggaggtctttggtcatgcaattaaggctgcatatccagatttggaaaatcctcctctgctagtgacaccaagtcagcaggccaagtttggggactatcaatgtaatagtgctatgggtatttctcagatgctcaaaaccaaggaacagaaagttaatccaagagaaattgctgaaaacattaccaaacacctcccagacaatgaatgt

SEQ ID NO: 115608 - DNA, 282 bp, Homo sapiens
atggtcatctgtggacgatcatcaagtcagcatggttccattctggcacataggtcacacgactactgtgcactaggacctgtgtctagttctgtgcccttcgtcctcgtgggaaaaccagaagagcgtgactccaagtgtggcctgggacggctgcctgtccatggcaagatggccaccaaagtgtggcccaacagcaacgctttgctaaaagaactccaactgtaccccagccaaccctacgaactcatccactcactttctcagcttcctgtggagtga

SEQ ID NO: 115609 - DNA, 408 bp, Homo sapiens
  misc_feature (1)...(408): n = a,t,c or g
cctaattcggcacgagggaattcagacacagcttacctggatcccttggcccatggtctctcacaggctacagtaaaggtagccctcagttccttgccatgtgggcctctccgtggtgcagctctcaggatggcagcagaatttatcagagcaggtaagtgaataaagccagaaaaagagtatgagcaagacaaaatccacagtctttgtcacctaatctcagtgacattccatcatgtttgccataccctatttgtcagaagcaagtcgtttgctccatcccacactcaaagggaggggattgcnnnnnnnnnnnnnnnnnnnnnnnnnnnnnnnnnnnnnnnnnnttcagaagctgcctgccatactcccctccacatgtacctgcccattcctgtgtgtcccaan

SEQ ID NO: 115610 - DNA, 398 bp, Homo sapiens
  misc_feature (1)...(398): n = a,t,c or g
ggaattcagacacagcttacctggatcccttggcccatggtctctcacaggctacagtaaaggtagccctcagttccttgccatgtgggcctctccgtggtgcagctctcaggatggcagcagaatttatcatagcaggtaagtgaataaagccagaaaaagagtatgagcaagacaaaatccacagtctttgtcacctaatctcagtgacattccatcatgtttgccataccctatttgtcagaagcaagtcgtttgctccatcccacactcaaagggaggggattgcnnnnnnnnnnnnnnnnnnnnnnnnnnnnnnnnnnnnnnnnnnttcagaagctgcctgccatactcccctccacatgtacctgcccattcctgtgtgtcccaatagtgan

SEQ ID NO: 115611 - DNA, 1027 bp, Homo sapiens
atggagaggacatttgaaaaaggtgaagaaggtggagttctaaaagccgaagagttcaagatcaagaccctaactgaattagtgtctgaggtgggcccacttgcgggttaccaacttgcaaacagtcatctccttgtctatcctcacgtggtggacacaaagagaggaggcaagtgctgtcatgcctcttcctgtcagacagagacgcactcctgtggtcagagaacaccctcaggcagagttacaagtcatcagagcagggagtccttggcatctatccatattgcccaggtgatacgggacattggcagtgtctgcaacaagctacttcagaatcctgaggggagctggccctgtgggtcttggtggactggatgcatgcacagcattcctggagggatctggatcacagtagtgttttttctgagtgtggcatatggatcacaggtggtacaaaagccagccaagataaccctagccaaagagaaaccttgcctcattcttggattaaatgcaaaggtcggcttgaccattccaagctgctcaaaagaacacacgtttattatctcagaacttccatgggtccggaattcagacacagcttacctggatcccttggcccatggtctctcacaggctacagtaaaggtagccctcagttccttgccatgtgggcctctccgtggtgcagctctcaggatggcagcagaatttatcagagcaggtaagtgaataaagccagaaaaagagtatgagcaagacaaaatccacagtctttgtcacctaatctcagtgacattccatcatgtttgccataccctatttgtcagaagcaagtcgtttgctccatcccacactcaaagggaggggattgcacaaggctgcgtattcctggagatggggtcattgagggccatttcagaagctgcctgccatacttccctccacatgtacctgcccattcatgtgtgacccaatagagatagttgacctgcacactctaatgaagttacatgggtacttactt

SEQ ID NO: 115612 - DNA, 372 bp, Homo sapiens
atgcctgttgacaacttgattgtgttttctttttttgttatatatggtaaagtatatcaggcgattttcaacagtttagcagctttgcattctcagctggaggaacccaagtctgagctggctttaccaccagctgatgaaaatgacctggggactggaataaatttgaatggcagtcaggtcacaaagaatgcaatcctaagccaagccctggtgctgcactcatctcagagacagtggactttggtggttacccaatgcaacaccagttgtggcagccagtggagtaactgtgtcgcctatcccccaattccacacagtgtaactctgggagagactccttctgctgggggcaagaagagggaagagtaa

SEQ ID NO: 115613 - DNA, 1086 bp, Homo sapiens
atggaccttgcttcaagtgccgcaaaactggctactgggccaaggactgcccacagcccaggattcctcctaagccatgtcccatctgagcaggaccccactggaaatcaaactgtccaactaatattgcagccacttctaaggcccctggagctctggctcaaagctctctggctgactccttcccagatctccttggcaagactgatgctgctcaatcgtctcagaagccccccggaccatcatggatgccaagcttcagttcccttattaggccaagacattttaacaaaattatccactaccctgactattcctggaatacagccgcatctcattgctgcccttcttcccaacccaaagcctgttttgcatcctccccttgtaactctccaccttaatccgcaagtatgggatacctctactccctctttggcaactgaccatgcaccccttaccattccattaaaacctaatcacccttaccccactcaatgccagtatctcatcccacagcaggctttaaagggactgaagcctgttatcactcgcctgctacagcatgggcttctaaagcctacaaattctccttacaattcccccattttacttgtccaaaaaccggacgagtcttacagctctcagcgagccgaactcattgccttaacttgggccctcactcttgcaaaggtactgtacgtcaatatttatactggctctaaatatgccttccatatcctgcaccaccatgctgttatgtgggctgaaagaggtttcctcaccacacaaggctcttacattatcaatgcctctctaataaaggctctccttaaggctgctctcctgccagccaaggctggggtcattcattgtaaaggacaccagaaaccaactcatcttattgctaaaggaaatgcctatgctgacagaacagcaaaagaaatagcaaatgcctccacacccacaaatattccagccctcactccaaaaggccaatatttttctttctactctatcacccccacctactcctcttctgaaaacctgctctaccagtctttccaactcagggcaagtggctcttag

SEQ ID NO: 115614 - DNA, 673 bp, Homo sapiens
tctcgtagtgaacaccttatgtatgtaaggtgtccccagcccccgggccacaaacgggtaccagcccatggcctgttaggaaccgggctacacagcaagaagtgaatctctggcaagccagggaagcttaatctgtatttacagccactccccatcgctcgtattaccacctgagctcggcctcctgttggatcagcagcagcattagattctcagaggagtgccaaccctattgtgaactgcgcatgtgagggatccaggttgtgtgctccttttgagaatctaatgactgatgatctgtcactgtctcccatcaccccccagatgggaccatccagttgcaggaaaacaagctcagggctctcactgattctacattatggtgagttgtataattatttccttatatattacaatgtaataataatagaaataaagtgcacaataaatgtaatgcacttgaatcatcctgaaaccatcccctggccccctgtctgtgggaaaaattgtcttccacaaaaccagtccctattgctaaaaaggttggggactgctgctctagtgtgctcaccttctgatctgtctgatgtaacttcttgggattatttgacttatttctctagagcttgtgattcctattaagagaactttagatcttaagattcaagttaaa

SEQ ID NO: 115615 - DNA, 587 bp, Homo sapiens
tttttatttgattgcattttattgtttccttcagctcaatgtgtacctgatattggagggctctccctatgggttgagattgagacatgttataaatgatgtggtttttattatttctgtgggctcctgtgcagccaggtgacaatcctgaggctgcgtaacgtcggaggtcaggcccgagttgccctgttctgactagcagagcccagtgtccacaccgtggcacagccacttctgcctgcatcatagaatggctggggcagctgctgttgtgccgacttgagatgcctgttccatgaggagatcagtaggcattcagcacggctatcctggccttttcacacagtgggttctagtttaccatcgcctccgaactccaagtccttaatgttgcagtggaagatgacttcttcattcaccatgagttccaccacattccagtcttctatcttctctaggatgacctcatgtccatctatggccaacacagcttgcaggccctgcaggcggaaggtgtggtgctccaccggtaggcctgccgcgctgtagggcccatagcgcaggatgaccactgcgttcttgggcat

SEQ ID NO: 115616 - DNA, 537 bp, Homo sapiens
tgcatgaagctttttttttgcaactaacattttaattgaaaacaaatagggggaagtgttcacatattctagagagagtgttatagattaatattggacaccttccataggccctataaacagcagccaccattctgccactgccatccccaagaagaaagttggctggcgttcttgggtacatggagtctggcggcggtggagtcccacagtatagggggcgtctttccttgaattcaagggcaggtctccagagtaattattaggtcccatggaagtgtctgcatcatgaggagcctgacagctttctccctctggacacttgcttagctccacaagtcccattgcccgtcttggtgctgctgtcaaagaggaatctgggggagtctttaagagagcttcacacaggttccctgcagttggaggatgtgctcggccatagaggctgttgtctattttgggtccagagatttcccattccaggtttctgagtccattagaaggtgtagaagaggtctcaggttcttgtggctccat

SEQ ID NO: 115617 - DNA, 405 bp, Homo sapiens
tttcatctgcaaggtattaaactaagggaatgaatcagggcattgcacccagatattttctagattgctaaaaagcttgtgattacctagtcataggaaaagcatgctattgatatggacaggagacagggaaatactgggtagaagagggcagttcccgtgcaaaggctccagtctcaagtctggaggcctgcagccctaagtgggaacaggcatttctgttttcatgcccaaaaagttgtgttttggcctgcaatgccccactatcctgtacccatataaccttgaaccccaggctccaggagaagacaaggagatgaggagacaagcaggtgaatggcagaacggtgtagcagggaaagagagaagagaaggtatgtctgaacaccaggaggagtacagctg

SEQ ID NO: 115618 - DNA, 693 bp, Homo sapiens
atggctgtggcaggcctgggccaagggctgggaagacgtgggagaaagaagcagtgggtctggccccatcctgctggagccccacatggagaggaagttcccccacggggctgggtcctgccctctgccattgtccccacagctgctgccacagacccaggaaggtccacagatgatgctccttctcacggatgcgaggccatcaaatcactttttgtctccgctgctctctctccatcgtggatagccaccatggtttctcaggagggaaaggacacaactggggcctggtctcccctcaagacacggtcacagatcagaggccacaccatcctagcagtggagcaggaccagctgggacagggtccttctgtgacacctgctgcatcaccaggctgggtgaacggacacaattgccagaactcacagaatagaagtatcagcaccgaaacctcacaggaaaaatgcgtggatcgtaatgcacgggaggcagtgttacatgcattccagcaccctgatggccatgggctaaaacaaaaagattttccttcttttgctaagaccatttcacttgcccagtctttaccagccaacctaatcagtgtggttatttatcaggagctcaaattatcccatgtccttgatgcatacactgtatgtgaagaaggcccattgcctcctaagggtagctga

SEQ ID NO: 115619 - DNA, 129 bp, Homo sapiens
atgagaagatcggagcatgtggatgggttaatcagagtggaggaagcccataacacaagtctaagtaaggaagaggctaaagtagagacctgcaataaagtctacaaaggatactttgagcagaattag

SEQ ID NO: 115620 - DNA, 486 bp, Homo sapiens
atgaaaaaccccaggtgggatgacaacgacatcatactctttagaggaaaagaatgtaaagagacaaaaacgatggttgcaatggggcagggagggcaccctggaggagacactaaaaatattcccaaagacgaacaaagcgggtttgttgatgtactgaatcggacacattactttctagctgaacactcagcttcatccactccaggacagctgagcgtctggatatattgggttgggcccatcataggagctgtcctcgctggtggcctttatgagtatgtcttctgtccagatgttgaattcaaacgtcgttttaaagaagccttcagcaaagctgcccagcaaacaaaaggaagctacatggaggtggaggacaacaggagtcaggtagagacggatgacctgattctaaaacctggagtggtgcatgtgattgacgttgaccggggagaggagaagaaggggaaagaccaatctggagag

SEQ ID NO: 115621 - DNA, 1377 bp, Homo sapiens
atgctggctgttaagacctgggtaacagtgaaaagtggtcaaagaattgcaaaccaggaaataacactgaactggaagaaccccaagtttcacatgcctgaggatgtacgagaaaaaaaggaaaatcttctactcaattctgagagatctactaggctcttaacaaagaccagtcattcacaaggaggggatcaagctttaagtaagtccacagggtcaccaacagagaagttgattgaaaaacgtcaaggagctaagactgtttttaacaagttcagcaacatgaattggccagtggacattcaccctttaaacaaaagtttagtcaaagataataaatggaagaaaactgaggagacccaagagaaacgaaggtctttccttcaggagttttgcaagaaatacggtggggtgagtcatcatcagtcacatctttttcatacagtatccagaatctatgtagaagataaacacaaaatcttatattgtgaggtacctaaggctggctgttccaattggaaaagaattctgatggtactaaatggattggcttcctctgcatacaacatctcccacaatgctgtccactacgggaagcatttgaagaagctagatagctttgacctaaaagggatatatacccgcttaaatacttacaccaaagctgtgtttgttcgtgatcccatggaaagattagtatcagcctttagggacaaatttgaacaccccaatagttattaccatccagtattcggaaaggcaattatcaagaaatatcgaccaaatgcctgtgaagaagcattaattaatggatctggagtcaagttcaaagagtttatccactacttgctggattcccaccgtccagtaggaatggacattcactgggaaaaggtcagcaaactctgctatccgtgtttgatcaactatgattttgtagggaaatttgagactttggaagaagatgccaattactttttacagatgatcggtgctccaaaggagctgaaatttcccaactttaaggataggcactcttccgatgaaagaaccaatgctcaagtctcactggaaatgatcaacacaattagatttgcttcttttgccccagaacaaagcgggtttgttgatgtactgaatcggacacattactttctagctgaacactcagcttcatccactccaggacagctgagcgtctgggaaaatccattccatgtatcacctaagggcatcttgcataccatcagtggcccatatgctgcctccatgatgaggaatgacactgtttttgagaaaggaggaaagaaaacgaggattcaggaggaaatgccttatattaagatggagatgaagatttgtgtgcatctcatttga

SEQ ID NO: 115622 - DNA, 491 bp, Homo sapiens
ggtggcagagcttacatggccagggatcccggaggacctggaaggggttttaatggacttttgagaatcaaagtgaactgccagggacaaacaagagtggcgaggaaatggaagcagtcataccactcaggctggaaaatcgctctaggaatggcaagaagggctctttctcacttggatggtctccagaaagtcagctgccatgtcacgaagtgccctgtgagaaggacctgtaaggagggacggagggaggcctctaaatgacagccttcgaggaactgaatcctgctggtgaccatgtgagggagcttggactccggtccccctgtgttgagccttcagatgagttggcagccccagctggtggcatgactgtaacgtcctgaaacaccttcagccagaaagcattcagctaaaccacacctgtatttctgacccaaagaaattgtgagataataaacatttcttctcttgaaaaaaaaaaaaaaaaa

SEQ ID NO: 115623 - DNA, 410 bp, Homo sapiens
  misc_feature (1)...(410): n = a,t,c or g
nagaccaaggagcagaaacatgggggcaggtaccctttaaaaaaaaatctatggaaggatctggnnnnnnnnnnnnnnnnnnnnnnnnnnnnnnnnnnnnnnnnnnnnnnnnnnnnnnnnnnnnnnnnnnnnnnnnnnnnnnnnnnnnnnntggcacctggaaccccagcgagacaaaaactgttcacactcctggaaagggggctgaagccagggatccaagtggtctcgctcagcgggtcccactcccagggagtccagcaagctaagaaccactggcttgaaattcttgcnnnnnnnnnnnnnnnnnnnnnnnnnnnnnggacaattgagcttggtgtnnnnnnnnnnnnnnnnnnnnnnnnnnnnnnnnnnnnnngggtttcccctcacagtgctaaggactgggt

SEQ ID NO: 115624 - DNA, 266 bp, Homo sapiens
  misc_feature (1)...(266): n = a,t,c or g
attgcaacacgcagaccaggagattcccttgtgtgccaatgctaccagggccctgggtttcaaatgcaaaaataggtggctgtttggggagacccttagctaactgcaggagnnnnnnnnnnncccccagtgggacctggaacctcagtgagacagaaccattcactctcctggagaaggggctgatgccagaaagccaagtggtctcgctcagcaggtcccactcccatggagcccagcaagctaagaaccactggcttgaaatt

SEQ ID NO: 115625 - DNA, 786 bp, Homo sapiens
ttactttctgcaccttcctcctctctgctctgcatcctctccagcctgcactccattcttgtgaggcttttctctagtgtccggggcttggtgggccctggtgtgagaaacctcccgtcccgtgagaatttgcacatgaagaccccaaggactgagggcattacaagaagtcctctgaagaagcttgggcctaggagtcatgaggcccaagaacccaagagctaagtttggacatgaattcactgtatggctctgtccaagtgagttccgctccctggctcttggatcccctgtttgtagaatgagggcctcagtggctgtggtgctgtgagatcctttgcctctgagccccacactggaagcagacccataggggcagcagggcagaggcggcaggggaaaagccagaagggacccttgggtgacaccaggagtagaaagaagctgctctctagttcccagttttaagttattgtcacatactccccttttgttatcttcaagctttgttattcgctgttcttggggaataaaaggagaagtatggtttgtggtacccaaaaagtttgtagctttggtatcctctggaatattttgggaaagaactggatttcctgcagtcatgtaggagcggggctggaaaggaggctgaagccagggagccaagtagtctcgctcagcaggtcccactcccatggagcccagcaagctatgaatcactggcttgaaattcctgctgccagcacagcaggaattgacctgggatgttgacctgggatgattgag

SEQ ID NO: 115626 - DNA, 528 bp, Homo sapiens
atgagagcaggtggaacctattgtacttctaaggcagactggccctgtcctggaacctcagaagccacattaacccatgcttctcctcctacagcagagacattcagaagacccaaacgccactctttctccacccagccacatgtccagaagtctgagctctatggactgcacactaaagtagcacactttgcttttgtcctctggctgggttcagccatgagagtcactaacaaattagagggtaagaggagcaaggcgctaaggccccgcgacgcagccaacggccgggacgtgcgcgcatgcgcgctaggactccgctccgcctacgctgcaggcggagagcaaccgccaagcttggtgggagtcaaggtgagtggcaaagcactacagcgctggggtcccactaactcgaggtcaccgctgtcagtgggaggggtcctcatgagtctggactcgctttcatccgctttggttgtgaagtgttttcctgcagtcttcccctcaccagttcatccccggtgctga

SEQ ID NO: 115627 - DNA, 461 bp, Homo sapiens
atgtggttcctgctccccgtcctcatccgccagggtcggcaaccccaggagaccaccccgctggccctgtccttgatgtcagatgccgtgctgggtgctggagtgccatgccggccactcccaacttcacgcagccacacagccaacttgctgtgtaccaggcactgtggggctgctgggaccctaaaagagctgtcagagggtgttccacggccacctttcagtttccgtgtgggtggctcagcggacgtttccatccttgcagaaaggtctcgggccagtgcggctcccagtgcctcagtgcgcgtgcccagcatttacacacagagccactgctgcacagccaaactcagagggagcttcagatgctctggccggtgggacctgggaaatggggcatcatcaacccagggaagctcaacccagagcagctagcctgtgtctccgcccagaaactgcag

SEQ ID NO: 115628 - DNA, 861 bp, Homo sapiens
tttgctaaacttggtttattattgtctaaaatcttgacattggtatttgtagggaccagccccacagggtccgtgggtctctccctccctgtgtgcagcaatgagagagtgtagaaataaagacacaagacaaagagataaaagaaaaggcagctgggcccgggagaccactactaccaatgctcggagaccggtagtggccctgacctgactgactgcgctgttatttatcggatacaagacagaaggggcagggtaaagaatgtgagtccatctccaatgataggtaaggtacacgtgggtacacgtgtccactggacagggggacccttaccctgccctggacagttgaggcagagagagagagagaggagacagagagaaagacagcttacgccattatttctgcatatgcagggactatttagtattttcacttaattttgctactgctatctagaaggcagagccaggtgtacaggatggaacatgaaggcggactaggagcgtgaccactgaagcacagcatcacagggagagggttaggcctccggataaccgcgggccagcctgactaatgtcaggccctccacaagaggtggaggagcagagtcttctctaaactgccccggggaaagggagcctccctttcccggtctgctaagtagtgggtgttgttccttgacacatttcgctaccgctagaccacggtccgcctggcaatgggtgtcttcccagacgctggcatcactactagaccaaggagtcctctggtggccctggaaagtatccttaaagcgtttgagcctggattgtattgctattaagccagtgaacttggtgatgaacaagttaattatc

SEQ ID NO: 115629 - DNA, 131 bp, Homo sapiens
ctagatctcgtatttgaatttgtggcgcttggtgtccgcgagttgccgaatgaagctgagcgtctcagtggaaccagggatctcaggggtgagcgaccgcgaggggagagcgacgaaaagggcggccggag

SEQ ID NO: 115630 - DNA, 571 bp, Homo sapiens
gtgttctgagtaacagtcagtgtataaaaggggattgcagaaaaaaatgagggcttgctttactcaacagaaaatatggcccttcctgaatgacactaggagagtcattttatctcatacattcccttcatttcgttggtggacatttgttgaaaccggcactcaatggtcaaaccgtctgtgccctccagttgctgacagtcctgcaggaagatggacaagaggcccagtgctgacagtcacacgactctcactacttgaatgaggggactgtgggtgcaactagaaaatatgttgattcttagccattcccaccttgcctctccggttcagaaccccagctgcgagctgtttgtttccctgcctggaaatgatgttttaggcaggttccttaatttctcaggtctgtctcagataataaaaagctctttgtatgagcctcagaactgtatcttcagtgaatgaaattaccagtcattatacgaagggactttaaaaaatttgtggaaatactgaagtaaaagatgataaaaaaataaaaactttatctcttggctgggaaaaaaaaaaa

SEQ ID NO: 115631 - DNA, 291 bp, Homo sapiens
acatcatggatgagagaaagaaccaaaaaggatgaagaactaggtgcctggaatgttcctaaagattcacttgggaaacagcttaatatagtggactttggcaacagaccaactaggcttcaaatcttggttctaccacctaacggttataagaccttgaaagatggtttaacttctgagttcatttcctatttcaaaactctaagagactctgcgaagagacacattgctttggaggaatcagccccaggccaaagcaacaagcaacaccagagtcctgcggagagctga

SEQ ID NO: 115632 - DNA, 522 bp, Homo sapiens
atggcatttaacccagaccttcagaaattggtagaacttggacaggtgggcctgaggaagagcagctttctaaccaaatggcctgatgcaaaccaaagcacaaaggtcgcaatgaagatggactgtacccggggctttggtgatgtgctgtcactggtgatggctggtgaaggccagaaagagctgctgtctaaattaataacaaaaataaagacacccaaccagagagtctgtgaaagaggaggagggctcagggcgtcagaagacttccctccccaagctgccatgtgtttgccacagagcatggtacttcaccagcagtttggcaatgggctcacgcaatgttggagctggtctctcagctgtaagaagcaggctaggacgctgccctatggcttctccatggccttgcagggcatctccgtggaagagaacaggctcacagatgacttttttgggacagcaaattcactcgacacccatttgtaccaaggacctacttggcattcagctgtgtggtag

SEQ ID NO: 115633 - DNA, 1166 bp, Homo sapiens
atgaccagtgacacaggagttataacctactggagtaaagtaaataccacatggaaatttaagcaacagtctgaagcaggatgtggtttgttgacagtctgtgtcacagctggtaaattcagagaggggcatgtttctaagctgaaatggtcagggaagtcttcactgagaagttctccaggttgggcaatagataggcactgctacataggcattgaagaaagcatttggaactatgctccttctggtaaaaatatgctcaatgaaaagcctttttctgaagacctagttatagtcacaggtgataagaaaaggcaagagagaacagttaacacaaaaatcagtctagcagttagctcttggaagaaggaggaaactgtgaccagaatgaggcatgtaagaattccaagagaagacttgtggtctggagggcagctctccctctcagtcgatggtcctgtcacagatgtcgagcacagactagtcgagagtccaagcgatttcagagccccagtggccacttgtagatggggaagtagggcagggcctgagctaggtcacctgggtctctgggatgctttccatgagctccggcagggcagggagagaggtgtgcaagcagatagctgggtgcaaggagccagcgccatgggagagaggtccgcaagaggccatgggacggtgggcagcacagatgagtgtgagaattggcagcaagtaaccaagatgctcacaacctcagacactggggagacatggcagaacctccagcaaacagggccaacaggaggatcttgagtggatccccagtcctgaaaaacgcctatcaacaactatcttgggacaactgggaaaattggagtaagaaaccaaagaactccctgtttctcagcccttgccagcagaatctggtcacccctctgcccctcaaaattacacatcttatacaactagctcctgtccctgcaccattcctgtcccttgtccttgatccctggtttcccagtggaacaggaaaaagagagatcacaataaaggggaaaagcacccatactcgccatgtggacaagtcagtgtctctgtattcccataaaattccattgacaaagcaggcagcagaccagatttgtcccgtgggccatagtttgctgaccccggattactga

SEQ ID NO: 115634 - DNA, 1548 bp, Homo sapiens
atgatatgcatgcgcctcttctcactcctgctggtccggaagtggttttctggttccacagaaactcacaagacttggaatcacttctgtaagacctataatgggaacacagccaacttctcatatacgtgtgtgttttccagagaagacttgtggtctggagggcagctctccctctcagtcgatggtcctgtcacagatgtcgagcacagactagtcgagagtccaagcgatttcagagccccagtggccacttgtagatggggaagtagggcagggcctgagctaggtcacctgggtctctgggatgctttccatgagctccggcagggcagggagagaggtgtgcaagcagatagctgggtgcaaggagccagcgccatgggagagaggtccgcaagaggccatgggacggtgggcagcacagatgagtgtgagaattggcagcaagtaaccaagatgctcacaacctcagacactggggagacatggcagaagctcagcaaacagggcaacaggaggatcttgagtggatcccagtctgaaaaacgctatcaacaactatcttgggacaactgggaaaattggaggatatactttcctactgaccatggggcctggtacacagcggacagtttaataaatgctgtcacagctgctgttgatcttgttatgtttcagtataaagcagtttgttttcttaccactttagtttctcttgggacaaggaagctggaacatttgtcactggaaagtttttggcagtcacggaaagccaagccccactggggaaaaaatgaaatgaggaatgcttctggaaatagacccctaagtgggaaggaaagggaagttagccaacagcctcatcttccagtcacccagaaactccattctcctgagccagaaaccctctcctggaactccgaagcagctgagatgtcactgcgctactttgtgaccatgtttaggaattgcaccttctgtggggcagccggctatgcgaccgccggcaaggcacttaactgccagcttactcaaccatatggtgaggatgagataaaatgtccgtggagtgcctggcacatgctgggtgtgcagcacattagtgactccattatgaaattggtgatgcttgtggtcaaagtgtggtgcagaaaacccttcacccccgtgtcaaaaggagctgacgaagaagcaaagatgcccttgccaagtgacccattgagaggtgatcctagagtaaacacacttcttccccctctgtgttcattaatgttccagctgtgtagaggactgaaaagtaaggccactcagcaaaatcagtgctgccaaccatggggtgttcaggggcacagtcctcaccctgggtatcagggacggctgggcactggtcagattgcaacggcccaagcctccctgcagcaggatgccacgtcgtcatctcacaaaggcttgctgagttcagcacacaggatccatggctgccggaaacctggaattaattcccctttattctcttcattcccaatgatgtgtttcaagttctga

SEQ ID NO: 115635 - DNA, 475 bp, Homo sapiens
tggttggttactcgcactatgcagacgtgttgcggtgctgaatacaacatttattactaaagccagacactggatcaccgtcacggcagatgtcagcacacctgttgtaatcaagaatatgccttctgcatcctgtgatacactactggatgacatcgaagatatcgtgtctcaggaagattcaaaaccacaagataggcattttgtaagaaaggatgttgtcccgaaggtacgaaggcgaaatacccaaaaatatttgcaagaggaagaaaacagtccaccaagtgacaggcctccatacactcctattacaagaggacttctgtctctgttccacatttcccttcgttgttggcgacctaaccttggtgaccgcaagcgatcggttgtgagagaaagagctcaaaattccttggaaggacctgctgcttctctttctgtttctagttcactctacggaggcccttttacttga

SEQ ID NO: 115636 - DNA, 646 bp, Homo sapiens
atgctagaaggagaatgcaagttaaacccaaataaaagagaagaagacaataataaaggggttctgaaccaggcagaaatagctgaaatgacagaaatagaatttagaatatggataggaacaaagatcattgagctaccgaagtatgttgaaaccagatccaaggaagctaaaaatcatggtaaaacaaacgacctgatagaggtgggtgtcattccaagcactctgaactgtcctgtggaattcagaaagttcagctctgctctgtgtttgacaagctccatttttcatgcgatggcagaagactggagacctgaggatatgttcatggtggcttgctcccagtgcatcacaatctggagaggcctccggcagaactatagacaaataatttcaagcttcatttggaagaagaaaatctatgggaaatatcaagtccccttggcactctggtaaccactgacaacccttgaatttgattcccacaaatttcatgggagcatcagtgatggagaagcggaaaggagtgctacacatgctttacacctttgtaagataaacttttaccggggattaagtggcaaccagctaacaacaatagacagaaatctgggagctaggaaaggaagtgtgaatgatggggcag

SEQ ID NO: 115637 - DNA, 722 bp, Homo sapiens
gataattttgtgtcttgataaagtaggaatatggctgggaccatccctgactctcttttttccttgaatgtgaacacatgagtgaagcatacatccattgtccatggggcaagaaacatgaggatgaaaagccaatatgttaaggacatgaagtgaaaagcgggaagagcttcttattcatgttatcactgagcagcgggaactgggggctctgctcattatagttgcccacggcctccagtcaatgaaatttccggccaatgaaatgctctactgtgactgaagcagcaaagagaagatgttctgccggaggcctctccagattgtgatgcactgggagcaagccaccatgaacatatcctcaggtctccatgtcttctgccatcgcatgaaaaatggagcttgtcaaacacagagcagagctgaactttctgaattccacaggacagttcagagtgcttggaatgacacccacctgcaatttaaacaaaaaagaaggatgagtaatttgctgctacatttgtgtgggaagtgctgcttgccgatagggaagtaggagaggaaataaggaaaacaataaaccaagtacagttttgcaaatacccagacacattggatggacacagaagctttcactgggagattattgaagggtagatgcttggtgtctccattgcctcctgtgatgggacctcacattacaagccactgtggttggaact

SEQ ID NO: 115638 - DNA, 870 bp, Homo sapiens
atggaggtcaatggcctgtctctggaggcactagcatatgtgaaactctttttgggcttcttggtggatggttttggtagcagaaccaaggccaaatggggctgtagtcaaacccttggggaaacagggccatttcttggtctgcagcccaaatcacagtctgtgagtctgctacctgggcccgcagtgcacagggctcgtactctgctgtgttgtcttctctctgccttggctgcgcagtatcaaagccctccctatttacggggaaacctttacctcgcgaatcttggaatcccaccgcccaccacagcagggccaaagcctgtgttaggcttggcctcagatccccgcaccacggaacttgtagtgggagccagtgactcagagttgggaaagcaaagatgtcgttacccgggggcacatggggactgctgcagtggtcctggcgtccagtgtgcaaggacagcacaggtattgctccagcagtggtgctcagaagccaatcccccttccccccggcaaacccccagccaaagcctaagtggaagcgtgggagcccagcaggaggcgcagaggcagcagctgcggaagctggtgcaggacatacaccagtgtcaagccaagaggtctaaggctgtgcttgggcttggaccacgggcacagggagagatatcagagtgcagggcagtaaatagtcacctgcatctttgtgaagaactggaagttggtgtcatctcagcaaaatgttctctgtatgatggaactgagaagtgctggctgccttctaggagacaccgggcaccagtgacattaccagttgccagttacatcagcagtggcattaccagttaccagttacattactggtaa

SEQ ID NO: 115639 - DNA, 708 bp, Homo sapiens
atgaattcaaatgactcttttgacccaacagttacaaaatcattggccattgctgcccaggagagtgtggcctctgctcaaacacagcaacagaccctgaaggtgccgcagctggtggccatcagctcactacactctcatcacaaggttccctcggagggagaactgagtggcaccttccactggctgccaacatggcaggcttatgcggatgtttctgggggttcccaggtgccatcccacatgggctctgaagcaaggccgcagacatgcttccagtctccctgctcaccgctggccccagcactgctgccccttctgcccaatgtccttgcttttacaactactgtgatgggctgtatcccctctttgtgcttgatgttttattttaaacgaaatgagtcagaactggcttcccacatcccctctgagggcctcacggttctacccggcaatccacccttctatgctgcatgccttctcacgctgtctcttgaagatcctgggcctggcactgagcactcagggacagtaggcctctgccatacatgtcgatattcatctgtcaaatatttatcgagcagccactccgtgccagccgatcgaatgcctgctgcactgctgaagaggaaacagagtcgtggcctccgggagggggctcaaacctgtgactggtgcatgttcgccattagacacactggctggtga

SEQ ID NO: 115640 - DNA, 420 bp, Homo sapiens
atgacagaaaccctatggccagcagagcctaaacgtttactatctgacccttcggaggaaaagtttgctgaccgtgtgctaaaggatgttcatcaggcagtcatactggcaggcatggccagcttgaaagctttcttcagaaccatcaagaggcattcactgatcccttatggatgtgagcaccctacccccactacacagttggcacatggagaggtaggtgaaatgaacaaacccatctgccagatcatagccccaaggtcaattgagctggaaacagaaacttctgcagtgttagaccagcgaggttccagtgctgctcctcccaccagccagccttccctgacaggaggaggagaagataaacaacaaataaaaaatgaaaaaataaagtgttcagcttatgataaagtggaataa

SEQ ID NO: 115641 - DNA, 1011 bp, Homo sapiens
atgaagatcctctctcctggccacagtagttgggatctggccccaggctcacctgtgctcagcaaagcagaagcctgcactgagcgggacccatcatccctggcaggcccccccggcttcccgaaggtcccaaagacggagaaaagctttgaggagaggctgatcttcaaggctttcctgctgaagtttgtgaattcctacacccccatcttttacgtggcgttcttcaaaggccggtttgttggacgcccgggcgactacgtgtacattttccgttccttccgaatggaagagctcctgtacgaagagtgggcacgctatggagttttctataagtaccagcccatcgacctggtcaggaagtattttggggagaagatcggcctgtacttcgcctggctgggcgtgtacacccagatgctcatcctgcctccatcgtgggaatcattgtcttcctgtacggatgcgccaccatggatgaaaacatccccagcaggctctgaagaaccaggaagaaaacaggaagtcgaaaccagggctagggacctggagcagattcccacgcacggctgggtccctgctgtgacccgctggacgacaggctgtacctgctggaatgggatggcactcttttctttactgccatgggacagggagctccagaatttccgaggactgcagggagaacctggtgagcagacccagggtccccttttggggtcttcggtatacaggcctgggcagctgggccgggtcctcttgcctcggctcaccaacactgtatctcattcctacccttccggagacccgggacagaggccgccagctctgagcatgggtgccggcaatggaatctggtacaatatcctcagaggcattgggaagcttgctgtcatcatcaatgagcagaaatgtgaacagctggaggccggaaaagaaaggacacaagcggagaagaaacaccagaggaaaaataatcccttagagggtaaagaacaaataattgaataa

SEQ ID NO: 115642 - DNA, 195 bp, Homo sapiens
caagttaatggtagactaacactggggggtggggtctaggcatcatgcttttgtcagcatactcttgagcttttaagtctactatgtctgaactgtggtttcttgtttatccttttttccttagttggactgttctgtatgggtgtctatacccttattccaaggtgaataaataaagttgtgtttgcctaatca

SEQ ID NO: 115643 - DNA, 733 bp, Homo sapiens
cgcgtccggcaggtgcatgagcccgtgtctggagaaaggttatgaaggtgaatgctggttacatgggagggtgacttggagccctctagtttccttcttgtgccagctgggttcctgtttcaaggccaggcttctctaacttgtcttcctgggaaatgtagcttttccaagaatttggtagtgcacaccaggaaaaactaggtatcagaacagatttttttttaaatagtggaaacaccctcactcccacactttggacagttagggttggatatttaatttcatagttactctttttttccacagaagaaaggccagcctgacccaagttgcctatttttaatgtgttactgcaccttaattttccccttcaaagtgaaaaaaggcccagaaactagcagatagaaatggaacccgttgacttagttcccttataagaagttcttgcaaacacctctgtgacgttttcattcaagtggatatgttggacaaataggaaacagttttagtttacgcgaacagtatgagacttcccaggtggtggacgccatttttttagaagtgttgatgatgtatttgataacattataaaagtatgtgtctcccgtgaaagaacattgagctatttccctggaatggatggggaagaaatgagcaaaggagtgctgttctgtatgggtgtctatacccttattccaaggtgaataaataaagttgtgtttgcctaatcatg

SEQ ID NO: 115644 - DNA, 154 bp, Homo sapiens
ctagctaaccgcagcaaggactggcgtccggagaagggcgaggccgcttgtatcatggagtgtcagcttgctggaagccgaatgaattccgcgatgatatgtgcagaaaagagatccagggctttttcgattgtgcttcaagggattaggaagc

SEQ ID NO: 115645 - DNA, 390 bp, Homo sapiens
atgtccataagcaggcgccacgaagcggcccctaacagatctattgaaaagcaattctctgtcctcttttcctctccacctttgcttctcacaattccgagccctcgggtggtttgtgggagcacactctgcattcgaaaccacgcgcacctggccttagagagcgggaactcggatgcgaaggcatgcagaatctccttttcaacccttgcagctcttccctccttcaccccattgctcgcgcctttttccccaacagtttcatctcctacacccactcacatcaaagataaccatgttcacagctctggaactgtccaggccttgctcatcttaccacagcataatgcctctcaacatatatcaccaattggaggaggaaagcgtggg

SEQ ID NO: 115646 - DNA, 403 bp, Homo sapiens
cccccatcccatgaatggggtctggcttgcacaaggaatgcagaggcctcagcctgtcctgtgacaacgttaagtccaagagcgccaaaaggggatggcagaggagtcatcccccgaatctgctggtacccaagaggtggggggttggctgttcctccagactcactaaagcttcggcatcgcctcccgacggccgccgggaggagccaggcgtcccggtagtcgcgcttggaaggatggggtcggggggagtcagtctccccgaccggctttcccccaagctcgaggtcccaggagcctcctccaggaccccgtaaacgcacggagtagaggaacttccagtcctgcccacccccaacgcccactcgcacgagccgcaccagcactcaccttctccacgaaa

SEQ ID NO: 115647 - DNA, 501 bp, Homo sapiens
atgttacactctcctcaagcccagaagagctgcgtgggcttgataaacagccacgtttggtccgactgcagctccaaacagatgtctgtagatattgcagaaagccggcagaaagtcgacagtccgcggtgtaacaatagcaagcgcaaacaggctaagagtcccgaagagggcgacggtcccctggccaacgcggcgctggaccccagcttatgtgtgctgttgcttcctgccagcgcgactaccgggacgcctggctcctcccggcggccgtcgggaggcgatgccgaagctttagtgagtctggaggaacagccaaccagcgtccttacaacatgggcacagaccagaaatcggatctcagctttggttctgcgcaagtatcaacaacttgatttctgctcagtgcatgaagaaaccttcaacagcagcagctgcgccgtgaagtgcgggggcagggcacccccggggaaccaacaggtcaacccgtgttttgcctaa

SEQ ID NO: 115648 - DNA, 752 bp, Homo sapiens
gaaaatggggggccctgagtccctggcctggaagtgggcctgaggctgtggtgaatggagccaagagaataattaccaggtcagtttcctatggagtttctgggtcagtaatgccaagaccaatagtccagggtcagggtgccaaattcagacagggcaataaaaaagagaaagctctaattcaaattgatcgttctgacagagaaggcaatgcaaagggagttcagtcagacaagccaggactgattcctgagaaaaaaatgcacacagtgccaatttccttttttaactggttcctgccacagctaacatcggggacatatcctaaatctggcaaagctgttgaagaagcccagccaaacagtccacctgccgagggcagaaacgttcgggacagggtgagagaccgaatttacgattcaagtctaatgttcttcggacgtgcgcttcggccccagagaaggggagtctcggtccccgttttcaggtctgcgaaggaacacattggcagggtgaaaggaattcctcccacacaaccagctctaaacctgatgacgcgggtggagaaggtgccatcccgccccaaaggggcaacggggaagatccctaggccagaccgccggaccccggttagcctttgggccacaaggagccgagagggagtaggggaagagctggccgcagtcgctcagccccaggatagaagctaccaaccagttaatgcaaaatggtcgctatggcaacacacgtag

SEQ ID NO: 115649 - DNA, 536 bp, Homo sapiens
ctccagcgtggtggaattcgcggctacgtgtgttgccatagcgaccattttgcattaactggttggtagcttctatcctgggggctgagcgactgcgggccagctcttcccctacgtgcctctgggctccttgtggcccaaaggcctaaccggggtccggcggtctggcctagggatcttccccgttgcccctttggggcgggatggctgcggaagaagaagacgaggtggagtgggtagtggagagcatcgcggggttcctgcgaggcccagactggtccatccccatcttggactttgtggaacagaaatgtgaagtttttgatgatgaagaagaaagcaaattgacctatacagagattcatcaggaatacaaagaactagttgaaaagctgttagaaggttacctcaaagaaatttggaattaatgaagatcaatttcaaggatgcatgcacttctcctcttgcaaagacccatacatcacaggccattttgcaacctgtgttggcagcagaagattttactatctttaaag

SEQ ID NO: 115650 - DNA, 476 bp, Homo sapiens
  misc_feature (1)...(476): n = a,t,c or g
gggcaaaaaaaattgaacgcctgcggaatatgtacgacggaccaggtgcctactccgtagattttgtctctctattgcctgcgccgtgtcctggactgctcacgggagttctgcaggagacgccggaatatatggaagctgaaaaatggacataaatggaaagaccagaatattgaagatcactacagaaatctaannnnnnnnnnnnnnnnnnnnnnnnnnnnnnnnnnnnnnnnnnnnnnnnnnnnnnnnnnnnnnnnnnnnnnnnnnnnnnnnnnnnnnnnnnnnnnnnnnnnnnnnnnnnnnnnnnnnnnnnnnnnnnnnnnnnnnnnnnnnnnnnnnnnnnnnnnnnnnnnnnnnnnnnnnnnnnnnnnnnnnnnnnnnnnnnnnnnnnnnnnnnnnnnnnnnnnnnnnnnnnnnnnnnnnnnnnnnnnnnnnnnnnnnnnnnnnnnnnnnnnnnnnnntcttgctttaan

SEQ ID NO: 115651 - DNA, 2274 bp, Homo sapiens
atgtttggagtccacggcaacttcttgggaatagagtctaggcccccactgctgtcactctcacccagcctcctctacacatgtgagatgtttcaggaccctgtggcctgtgaggatgttgctgtgaacttcacccaggaggagtgggctttgctggatatttcgcagaggaaactctacagggaagtgatgctggaaactttcaggaacctgacctctatagggaaaaagtggaaagaccagaacattgaatatgagtaccaaaaccccaggagaaacttcaggagtctcatagaagggaatgtcaatgaaattaaagaagacagtcattgtggagaaacttttacccaggttccagatgacaggctgaacttccaggagaagaaagcttctcctgaagcaaaatcatgtgataactttgtatgtggagaagttggcataggtaactcatcttttaatatgaacatcagaggtgacattgggcacaaggcatacgagtatcaggactatgcaccaaagccatataagtgtcaacaacctaagaaagccttcagatatcacccctcctttagaacacaagaaaggaatcacaccggagagaaaccctatgcttgtaaagaatgtggaaaaacctttatttcccattcaggcattcgaagacgcatggtaatgcacagtggggatggaccttataaatgtaagttttgtgggaaagctgtccattgtctcagattatatcttatccatgaaagaactcacactggagagaaaccgtatgaatgtaaacaatgtgttaaatcctttagttattctgctacccatcgaatacatgaaagaactcacactggagaaaagccttatgaatgtcagcaatgtgggaaagcattccatagttccagttcttttcaagcacataaaagaacccacactgggggaaagccatatgaatgtaaacaatgtggcaaatccttcagttggtgtcattcctttcaaatacatgaaagaactcacactggggagaagccctgtgaatgtagcaaatgtaataaagcattccgtagttacagatcctatcttagacataaaaggagtcacacgggagagaagccttatcaatgtaaggaatgtagaaaagcattcacgtatcccagttcccttcgtagacatgaaaggacccactctgcgaaaaaaccttatgaatttcctttcaatatcatgaaaggactcacactggagagaaaccctatgagtgtaagcaatgtgggaaagccttcagatgtgccccacaccttcgaaggcatggtaggactcactggagagaaaccctatgagtgtaaggaatgtgggaaagccttcagatctgcctcacaccttcaaattcatgaaaggacacaaacacacataagaatacactctggagaaagaccttataaatgtaagacatgtgggaaaggcttttattctcccaagtcatttcaaagacatgaaaaaactcacactgcagagaaaccctatgaatgcaagcaatgtggtaaagccttcagtagttccagttcctttccgtaccatgaaaggactcacactggagagaaaccctatgagtgtaagcaatgtgggaaagccttcagatctgcctcaatccttcaaatgcatgctgggactcaccctgaagagaagccctacgagtgtaagcaatgtgggaaagccttcagatctgccccacaccttcgaatccatggtagaactcacactggagagaaaccctatgagtgtaaggaatgtgggaaagccttcagatctgccaagaaccttcgaattcatgaaaggacacaaacacacgtaagaatgcactctgtagaaagaccttataaatgtaagatatgtgggaaaggcttttattctgccaagtcatttcaaatacatgaaaaatcttacactggagggaaaccctatgagtgtggcctccagctgcccagaacagctgcagagagtgtggattctgagaagctgcagggccctggaaagcaggagacccacgtgcagcttttgtctctctattgcctgcgccgtgtcctggactgctcacgggagttctgcaggagacgccggaatatctggaagctgaaaaatggatcgtcatcgccatcattgcttgtcgctgacttcggacttgtcctcggactccttggagacatctgcagactagaagtagacaacataaacataccaatattaataatgccagtgacaacaatgatcctccgaggggtttga

SEQ ID NO: 115652 - DNA, 486 bp, Homo sapiens
atggtggctcatgcctgtggttctagcactttgagaggccaaggtggcctccagctgcccagaacagctgcagagagtgtggattctgagaagctgcagggccctggaaagcaggagacccacgtgcagcttttgtctctctattgcctgcgccgtgtcctggactgctcacgggagttctgcaggagacgccggaatatctggaagctgaaaaatggtgagtgtgcggagccggaaaccccgaggagtttacatgcagcaactgacgcacattcatgtaaaaacagacattatctgactggaaaaacagactccttgtggcaagaagataccaaattacaaacaagacctaaggccacgcaagacaagggagaaaaagtggacactgggggccccacagaccgctgctcctcccaagcacgaaccccacacccgagtcgggatcacccacatgaccctcccgtggcccccgcacaatctgggtag

SEQ ID NO: 115653 - DNA, 553 bp, Homo sapiens
cccgaaggttcatgcattcctcccagggataaaattttcttttcattttttttaatagcgatcagctccccagactcaatgcttcttcccagcaggacggaaccgtaggttccatccccgagctgcctgattgttgtgtatctattcatggtgtgcctgctcaggccggacactcatctcacggccgaagtggttcagttctgcagtggtagcagtcctccccagagtgtaaccagatttttcgatggcagcaccagcacaaggtattcaataggacgtgactgtctcccaaatacatatttccaaaaatcagtcttctgctggcgccgcgaacgcaggcgggggcccgcccctgaggtgagcgcagctcctcgacgaagcggggcgcagccgcccgctccggagctggaaatggcgacaatccctgctaggaccggccgagggctccgtacagggacgcccgcgaggtccggcgagtcgcactgggcccacggcgcatggtagtgcagcaggaacccggccgttttcccagccggcaggaaaacaaacaaaa

SEQ ID NO: 115654 - DNA, 918 bp, Homo sapiens
ggcagcaatgaggagaaaggaagaaggaacagtggcgtggtgagtacccaggatttcccttcagttccctttgctgctggaatgaagcagctggcaggacatgagaaacgagcaggcacaaaagaaggacctcatcaaggaggaagggatgaggaatcttgtaaggtgcgcctcctttctacctgcttctgccttccctcccctctgtgttcagggttaggctgtggcccagtgctgatttttcgatggcagcaccagcacaaggtattcaataggacgtgactgtctcccaaatacatatttccaaaaatcagtcttctgcctgcagagaaaaaaagaaacaccggatgctggaagcaaaggagacttggaaagccatgataattgttccaagtgtacaaaggatatcagagagaagggttagttacactaggtatggttccagagaacaagaaccatgaccactctttgagctttctattattcacatcctgaaatctctgagtatatgacattagcatacaaagatttcacactgtgtagaccagagaccacatactggcagcataatatttcacccgtaagtcactccattgagacctcactccacaagtagaagaccgtttctactgctgggttctttacaatttgtctttgtcttctcactccacttgcagtagcaagtcctcaaagattgtttgaagggcccaaatgtgagttttagtctttgctattattttctgtaccaccttggctaagtacctcaaaattctcagtgcttctagctgtcgatggacgttctgagcacattaaattaaagataatcgttgtgaaaacatttttctgatttgaaaaaacgtagttgaggtggcacgacattgtgaaagtaatcaatgccactgaattgtattcaaagtg

SEQ ID NO: 115655 - DNA, 918 bp, Homo sapiens; identical to SEQ ID NO: 115654

SEQ ID NO: 115656 - DNA, 395 bp, Homo sapiens
agttgtcactgtggcacataaaaaacagttctttttctttttttcctgcttgcaagacattcacaatgctcagcaggcgttcatcatttggtgtaaaaatgtctctttgtaatgcatgcttgattgctgtcatcttttctcagcgggacaaacggggaaaggaaggtcagaaggagcggtgcccgaccccaggcgtggagacagcagccggactgaggagccgccttagaccctggtgcctgtcagctcgtctgtccgccgccgccgggactaccgggcagccgcggcagaaggcttaccgcaaggccggactgagcctggctgtgccgaggcgggtcttccaaaacggagaccggatgggggccactaggatacgcccctcaataaagcgttga

SEQ ID NO: 115657 - DNA, 415 bp, Homo sapiens; identical to SEQ ID NO: 108724
  misc_feature (1)...(415): n = a,t,c or g

SEQ ID NO: 115658 - DNA, 1326 bp, Homo sapiens
atgcctcgcctgagactgtcaggccgggaatggcaatgttttgaggcggtgatctggcttacctacggctggaacaagaaacaggaccgcgtgacaaatacggttattgccgagcttacgggcctgagcgatacgcatgtatcggacgcgcttaagtctctcgcagaacgcaaaatcatcttttcacagaagcagggcatgatgaaaatcgtcggtgtaaacactgacctttcagcatggattttagacaaaccggaaacgggaagaaaattcccgaaaacgggaaaatccttcccgaaatcaggaataaccttcccgaaaacggtagacacccaatacaagaacaagaacagtattaaccgccctccgtccgagacttctgacgaatcctctgacgcacgtctgaagacattctcctcaactcatcctgaagctgcggtctacacaccatccggtgcgaagtggggctctgctgaagacctcgagacagctaagtggatttcctccagggtgaagctgattaacccaacctgcaaagccccggacatgacctcctggtctaacactgttcgcctgatgcgccagatagacaaccggtcgcaccaggacatctgcgcgctgtatgactgggctagcaaacaccacttctggcagaacaacatcctgagtcccgaaagcctgcatccttcaaagagtcatattgcccagtggtcacctcacactccttcaaggcacaattttaatgcaaaagatcaaatgtattcagatggcaatttcactgatgtaggtgttgtggaaatagaagcaaatgacaaaaagccttttgcagaagatctgaaatcattagacctgttcaaaaaggaaaaaattaatactgaaggacacggcagtggccaagcatttctagcagtgatgaaaatgaatcttcacacaacacttcgaacactgtccagtattctgctgtggtacacagtggctacagacaccaagttccatcagtccagcgtggctgatctgatcatcatcgaccactgtggtcgaattcatgggacaatagacactggggactacaagagagggaatggaagaagagaggcaagggctgaaaaacaactgggtgctatactcactacctggcggaactaccgcgagctctttatggctgacttcgccccgggcttcgtgcatccggaaaagctcgtcggtatcgtttctccagagaagctacgtcgattcttctttcggcagaaagtagaagcgcaggacctaagttaccgcgggccgggtcggagcaaaggagaaagcatcttcttcagttggcaatag

SEQ ID NO: 115659 - DNA, 1992 bp, Homo sapiens
atgggtgggaacacccagtcaactgggcttgaacacatagaagatggtggccttctgcgcctattggacacctcatttctcgttccggaactaaaagaattctttttggacaaggcgaacaacgggcttgatacccgacacgtgactctaaagaaccccctagcaaacatgaaagtttcgttcgaccctgcgtgtgatttgctgatttcggttggagaccttgttgaccgcggcgcggaaaacgtcgagtgcctggagctgattactatgccttggttccgggctgtgcgaggtaaccatgagcagatgatgattgatgggctatcggagtatggaaacgttaaccactggctggaaaacggcggcgtgtggttcttcagtcttgattatgaaaaagaggtgctggctaaggctctggttcataaatcggccagcctgccattcgtcatcgagctggttaccgctgaacgtaaaatcgttatctgccacgctgactacccgcataacgaatatgcgttcgacaagccggtcccgaaagacatggtcatctggaatcgtgaacgggttagcgacgctcaggacggcattgtctcgccgatagctggtgctgatctgtttatcttcggccacacccctgcgcgccagcccctgaagtatgccaaccagatgtacatcgatactggtgccgtgttctgcggaaacctcacgctgtgcaaagtatgcggtgaatacttcgtgccgaaattccacgacatccggatccggtggtgcagcccggagcatggcgcaatcctcgcaatgggagaacgcaagaaggagaagaagaatccccgagagagtgcatgggtgggaacacccagtcaactgggccttgaacacatagaagatggtggtgagagggaaaattcccttctgactagttctaggcctggacaatgggaccatccacagcagctgttgggcaccttcctaagaagtgaacaaggtgggaaccactcaagagagcctctagggaagtattctctgtggaggttgacatttaagtggagagctaagaaaagaattggtcatgggaaagaacattccagaaagaggaatggcagaggcaaagatcctaaggtggcaactagaataagtcctgggaagtggctgaaggctttggtggacatgcagaatcaaaatctgcatgtggcccctggagatccacgttccaaaagctccttgggtgatattgaaacacactcttgtttaagaaccaggcagttaggggcaagcagctggagacgctgcctctgtcagggccgagactggcagatcctggaagtctggccctgggatgccactgggaaggacactcttgcactaatgccagaggaaagggttcggaactggctcctcccaggtgcggttatcaatcacaagaaacgtaaaaatagcccgcgaatcgtccagtcaaacgacctcactgaggcggcatatagtctctcccgggatcaaaaacgtatgctgtatctgttcgttgaccagatcagaaaatctgatggcaccctacaggaacatgacggtatctgcgagatccatgttgctaaatatgctgaaatattcggattgacctctgcggaagccagtaaggatatacggcaggcattgaagagtttcgcggggaaggaagtggttttttatcgccctgaagaggatgccggcgatgaaaaaggctatgaatcttttccttggtttatcaaacgtgcgcacagtccatccagagggctttacagtgtacatatcaacccatatctcattcccttctttatcgggttacagaaccggtttacgcagtttcggcttagtgaaacaaaagaaatcaccaatccgtatgccatgcgtttatacgaatccctgtgtcagtatccttcttctacgggccttcacctcccaaaggaatctccaatgctgggactgacccatggttctcatccgaagggcaagatggca

SEQ ID NO: 115660 - DNA, 1548 bp, Homo sapiens
  misc_feature (1)...(1548): n = a,t,c or g
atggctgcgactcgcggcgaggagaaaatctgcatgagcatgtatcaacgcattaatggcgctgactggcgcaatatnttcgtcgtcggcgatctgcatgggtgctacacgctgctgatgaatgaactcgaaaaggtttcgttcgaccctgcgtgtgatttgctgatttcggttggagaccttgttgaccgcggcgcggaaaacgtcgagtgcctggagctgattactatgccttggttccgggctgtgcgaggtaaccatgagcagatgatgattgatgggctatcggagtatggaaacgttaaccactggctggaaaacggcggcgtgtggttcttcagtcttgattatgaaaaagaggtgctggctaaggctctggttcataaatcggccagcctgccattcgtcatcgagctggttaccgctgaacgtaaaatcgttatctgccacgctgactacccgcataacgaatatgcgttcgacaagccggtcccgaaagacatggtcatctggaatcgtgaacgggttagcgacgctcaggacggcattgtctcgccgatagctggaggagcgactcaagccttcgcgaaagaaaataaccaaaaagcatacaaagaaacgtacggcgtctctcatattacacgccatgatatgctgcagatccctaaacagcagcaaaacgaaaaataccaagtgcctcaattcgatcaatcaacgattaaaaatattgagtctgcaaaaggacttgatgtgtgggacagctggccgctgcaaaacgctgacggaacagtagctgaatacaacggctatcacgttgtgtttgctcttgcgggaagcccgaaagacgctgatgacacatcaatctacatgttttatcaaaaggtcggcgacaactcaatcgacagctggaaaaacgcgggccgtgtctttaaagacagcgataagttcgacgccaacgatccgatcctgaaagatcagacgcaagaatggtccggttctgcaacctttacatctgacggaaaaatccgtttattctacactgactattccggtaaacattacggcaaacaaagcctgacaacagcgcaggtttcctcattcgaaagtgcgctgaaaatactgcacatgtgtgaattcgagaataaccgctcggggagtgggcgaggtcgaggtttgaattatcctgccccaactgacatcaagtcaaggcaggttcccctgtgcggcaggaacatctgcacagtgcagacagacggctgcgaaacagccatggcctggagttggcataggttggttatgccggtactgccgggcttcttgcgggatatcgtccattccgacagcatcgccagtcactatggcgtgctgctagcgctatatgcgttgatgcaatttctatgcgcacccgttctcggagcactgtccgaccgctttggccgccgcccagtcctgctcgcttcgctacttggagccactatcgactacgcgatcatggcgaccacacccgtcctgtggatctacccactagtcaattcaccatcttgttga

SEQ ID NO: 115661 - DNA, 1440 bp, Homo sapiens
atggctgcgactcgcggcgaggagaaaatctgcatgagcatgtatcaacgcattaatggcgctgactggcgcaatattttcgtcgtcggcgatctgcatgggtgctacacgctgctgatgaatgaactcgaaaaggtttcgttcgaccctgcgtgtgatttgctgatttcggttggagaccttgttgaccgcggcgcggaaaacgtcgagtgcctggagctgattactatgccttggttccgggctgtgcgaggtaaccatgagcagatgatgattgatgggctatcggagtatggaaacgttaaccactggctggaaaacggcggcgtgtggttcttcagtcttgattatgaaaaagaggtgctggctaaggctggcatcgatgtaaccatcgtcatcagcggtcctacctgctccggcatgaggcgaaacaatgacgctatgccctcgcttaccggggatcctctagagtcgacaagacacgaacattcacctaaaagggcttctcgccaagcttacttcctctccctgcagcaaatctccaaaatgatggagctggccagagagaaacaggcggcagagctgaaggccctgaaggagacgtcggagaagtacgactgcctccctcccacacctgcttcgcctcccagcaagggctcagggtacaacgtggccggaaaatggtggggcgcggtgtttgtcgatagtgccgaagcgggtaagcgatattcgccgcagcgacttttaaaacaggtacgagggtcggcgtgcgctgggaatcgccggtcgggcaaatcaaactcgattttgccgtaccgatcgcggataaagacgaacacgggttacagttttacatcggtctggggccagaattatgagtttatggaaaaaaatcagcctcggcgtggttatcgttatcttactgttgctgggatcggtggcgtttctggactggatattggcaaggtcaccggcggctggcgcgatctcaccttgtctgacgttcgttatgagcagccaggcgtggcggtaaaagcgggcaatctgcatctggctgtcgggcttgagtgcctgtggaacagcagtgtttgtattaatgatctggcgctgaaagacattcaggtcaacatcgacagtaaaaaaatgcctccttctgaacaggttgaagaagaggaagatagcggtccgctggatctctccacgccgtatcccataaccctgacacgggtggcactggacaacgtcaacattaagattgatgacacctcggtatcggcgacgatgcttgccgaagatgacgatcgacacatcaccacggaaatcgctaacgccacacagttttataatgacgaagatgaccaccagcaatatctgcataaaaacccgtatggttactgtagaattggcggaattggcgtctgtatgccgccggaagaatag

SEQ ID NO: 115662 - DNA, 1878 bp, Homo sapiens
atgggtgtttcgctactggcggccttgaccgtcatccgctgcatccggaccgactgtggtgtgattcaggtgacggtgaaaacgcgtattggcatcgacgaccaggacagctatgaatttctctgcgatttcatcaataccgtttccggcaaaggcgagtgtgagatgttcatcatccacgcacgtaaagcctggctttcggggttaagcccgaaagaaaaccgtgaaatcccgccgctcgattatccgcgtgtgtatcaactgaagcgtgactttccgcatctgacaatgtcgattaacggtggtatcaagtcgctggaagaggccaaagcacacctgcaacatatggatggcgtgatggtcgggcgcgaggcgtatcagaatccgggtattctggcggcggtagaccgggagatctttggttcctcggataccgatgccgatccggtggcggtagtgcgcgccatgtatccgtacattgagcgtgaactcagccaggggacgtatctcggccatattacccggcatatgttgggcttgttccagggtattcctggcgcgcggcagtggcggcgttatttaagtgaaaatgcccataaagcggtgcaccgaacggctatccttacgtctggcagctccttgccgatgattccgccaatacgttggcggcggccattaccggcggctggtgatcgctttcggaatcagacgtctggcacctggtttggtatctttgacccgctgatcggcctgatgtcgccgttggtttcgttttatctggattgtggttacgccgcaaagcgaaagccgcgcaacaggagcttgtccatgaacattgagttactgcaacagttgtgcgaagccagcgccgtcagcggcgatgaacaggaagttcgcgacattctgataaacacgctggaaccttgcgtgaatgaaatcaccttcgatggtctgggcagctttgttgcccgtaaggggaataaaggtccaaaagttgccgttgtcggacatatggatgaagtcggctttatggtcacccacatcgacgagagcggttttctgcgttttaccaccattggcggctggtggaatcagtcgatgctcaaccaccgggtaaccatacgcacacacaagggagtgaaaatccctggtgtgattggttccgtcgcgcctcatgcgttaacggaaaagcaaaagcaacaaccgctgtcatttgatgagatgttcattgatattggcgcgaacagtcgcgaagaggtggaaaagcgcggcgtggaaattggtaattttattagcccggaagccaattttgcctgctggggcgaagataaagtggtcggcaaggcgttggataaccgcatcggctgcgcaatgatggctgaactattgcagacggtgaataatcccgaaattacgctgtatggcgttggcagtgtggaagaagaagttgggctacgcggggcgcaaacctcggcggaacacattaaaccggacgtcgtgatcgtgttggataccgccgtagcgggcgatgttccgggcattgataacattaaatacccgctgaaactgggccaggggccggggctgatgctgtttgacaagcgctacttccccaaccagaaactggtagcagcgttaaaaagctgtgccgcacataacgatttaccgctgcaattttccaccatgaaaaccggtgcgacggatggcgggcgctacaacgtgatgggcggcgggcgtccggttgtcgcgctgtgtctgccaactcgttatctgcacgccaacagcggacaggctacatttgtcacaatggaagacggccatcaagcagcagcaatgtctgcgtggatgtctaaatgcctgtcagggcctgcttggtaa

SEQ ID NO: 115663 - DNA, 602 bp, Homo sapiens
acttagccaaaatatttctgagctaaaagatggtgaattgtggaataaattctttgtgcggattctgaatgccaatgatgaggccacagtgtctgttcttggggagcttgcagcagaaatgaatggggtttttgacactacattccaaagtcacctgaacaaagccttatggaaggtagggaagttaactagtcctggggctttgctctttcagtgagctaggcaatcaagtctcaccagattgctgcctcagagcaatggttgtattgtggaacactgaaactgtatgtgctgtaatttaatttaggacacatttagatgcactaccattgctgttctactttttggtacaggtatattttgacgtcactgatattttttatacagtgatatacttactcatggccttgtctaacttttgtgaagaactattttattctaaacagactcattacaaatggttaccttgttatttaacccatttgtctctacttttccctgtacttttcccatttgtaatttgtaaaatgttctcttatgatcaccatgtattttgtaaataataaaatagtatctgttaaatttgtgcttctaaaaaaaaa

SEQ ID NO: 115664 - DNA, 3188 bp, Homo sapiens
atggctgcgactcgcggcgaggagaaaatctgcatgagcatgtatcaacgcattaatggcgctgactggcgcaatattttcgtcgtcggcgatctgcatgggtgctacacgctgctgatgaatgaactcgaaaaggtttcgttcgaccctgcgtgtgatttgctgatttcggttggagaccttgttgaccgcggcgcggaaaacgtcgagtgcctggagctgattactatgccttggttccgggctgtgcgaggtaaccatgagcagatgatgattgatgggctatcggagtatggaaacgttaaccactggctggaaaacggcggcgtgtggttcttcagtcttgattatgaaaaagaggtgctggctaaggctgggtaccaagatgattttgcgttctgcgagagacttaagcgcgtccgatacatgcgtatcgctcaggcccgtaagctcggcaataaccgtatttgtcacgcggtcctgtttcttgttcccagccgtagcatcgatgtaaccatcgtcatcagcggtcctacctgctccggcatgaggcgaaacaatgacgctatgccctcgcttaccggggatcctctagagtcgacaaccgttaatcccgactgtccgcgcagagtctttacaacgttcatggcgcccaactgttttaccgacaagaaaaaaaagcctgccagtagtgccttggtggtcggtgcacaagtcgcacccaaccggcttattctttacgctctgcaagttccgttgcagatgtttcccgccaatacgctgcaggcgagcattaccggggtgttggtgatcgctttagaaatcaaacgtctggcacttggtttgggtatctttgacccgctgatcggcttaatgtcgccggattgtggttacgccgcaaagcgaaagccgcgcaacaggagcttgtccatgaacattgagttactgcaacagttgtgcgaagccagcgccgtcagcggcgatgaacaggaagttcgcgacattctgataaacacgctggaaccttgcgtgaatgaaatcaccttcgatggtctgggcagctttgttgcccgtaaggggaataaaggtccaaaagttgccgttgtcggacatatggatgaagtcggctttatggtcacccacatcgacgagagcggttttctgcgttttaccaccattggcggctggtggaatcagtcgatgctcaaccaccgggtaaccatacgcacacacaagggagtgaaaatccctggtgtgattggttccgtcgcgcctcatgcgttaacggaaaagcaaaagcaacaaccgctgtcatttgatgagatgttcattgatattggcgcgaacagtcgcgaagagctcgctactcaccgggctgttatccgggttagcgggcataacatcggtcatatatttccaccaacgttggcaaacatcagtgctggcaaccgcattccagcgttcttcagattcaatctctaccatggcaaacagcagattacgcgctttgtcgagatagatggcgtagttatgcgcaccgatctgtacagtccgaaagccgctgagggtaaaaacatccagctgcaccctaaggtcaacactgtaggaaaagtccactatcttcaaagcttgattgttcttgttacaatcatagggatcgtggattctgagcccagatttaagagagggctaaaagatggtgaattgtggaataaattctttgtgcggattctgaatgccaatgatgaggcccaagtgtctgttcttggggagcttcaacaagaaatgaatggggtttttgacactacattccaaagtcacctgaacaaagccttatggaagaaaaagcgggtggttagcaggaactgggcaaggggtacttgtggacccagagtgaccaacgagatgcttgaggatgaggatgctgaggaccacgggggtactttctgcttaggggagctggtggagctggctgtgaccatggagaacaaagcagagggcaaacggattgtaagtgaaaagcctaccagagcaaggaaccaaggcatagaggggtcacctggagggcgtgtgacccgaagcccccccacgcaggtggccatcagctcagattctgcacggaagggttcttgggagccctggagccggccggtgggggagcccccggaggcgggctgggactatgcccagtggaagcaggagcgggagcagatcgacctagcccgcctcgcccggcacagagacgcacagggtgactggcgccgcccgtgggacctggacaaggccaagtccacgtgggtggctgggttgggcaggttgcctgtggtcccaggagccaccagaaactacagcccccaccattgctccctgatggaaaaggttaatgagatgctgggagaggccattagcagaggctgcagcgagagcctggtgcccggggaggctggtggtaattacagcagctcccttcccctgggaaatgaggcagggggacatggctctggagtgaagtggggtggggcgtgccatgagctgtgtttctacaggtgggatatgaaggaagacaaggaggagctggaaggtcaggagggaagccaaagcaccagagagactcccagtgaggaggagcaagcccagaagcagagcgggatggagcagggccgactggggagcgcccctgcagccagcccagccctggcatccccagaggggccgaagggggatcacaagaacatggctttggagtgtgacactggcctaggaatccatgactcccaaaggacggggctaggggtagaggaggttcaggcaaagcccttagattttggagacatcaggcagatgtctccaaaaatgattgtgatcaagaatctgaattataagattcacagtctgctccccaacccagtgctgccaactgtacagctgcgcctccacgaaggggcatatgccaggctcgtctgaccctgggaatgaggatgtaggaagcaggcagagctccggttcagccctcacaatgggactgaagcaggagagaaggctgggcagaagggctgtggggaagtagggcttgtctccatggatgacgtccagaaggatgtcaggaggaggaatatcacaggagttatagacattggagggaacagagactggcacaggacctcttcattgcaggaagatggtagtgt

SEQ ID NO: 115665 - DNA, 1284 bp, Homo sapiens
atgaacatgaacatcaaaaaaattgtaaaacaagccacagttctgacttttacgactgcacttctggcaggaggagcgactcaagccttcgcgaaagaaaataaccaaaaagcatacaaagaaacgtacggcgtctctcatattacacgccatgatatgctgcagatccctaaacagcagcaaaacgaaaaataccaagtgcctcaattcgatcaatcaacgattaaaaatattgagtctgcaaaaggacttgatgtgtgggacagctggccgctgcaaaacgctgacggaacagtagctgaatacaacggctatcacgttgtgtttgctcttgcgggaagcccgaaagacgctgatgacacatcaatctacatgttttatcaaaaggtcggcgacaactcaatcgacagctggaaaaacgcgggccgtgtctttaaagacagcgataagaccccactcaatcgacgctggaaaaacgcgggccgtgtctttaaagacagcgataagttcgacgccaacgatccgatcctgaaagatcagacgcaagaatggtccggttctgcaacctttacatctgacggaaaaatccgtttattctacactgactattccggtaaacattacggcaaacaaagcctgacaacagcgcaggtaaatgtgtcaaaatctgatgacacactcaaaatcaacggagtggaagatcacaaaacgatttttgacggagacggaaaaacatatcagaacgttcagcagtttatcgatgaaggcaattatacatccggcgacaaccatacgctgagagaccctcactacgttgaagacaaaggccataaataccttgtattcgaagccaacacgggaacagaaaacggataccaaggcgaagaatctttatttaacaaagcgtactacggcggcggcacgaacttcttccgtaaagaaagccagaagcttcagcagagcgctaaaaaacgcgatgctgagttagcgaacggcgccctcggtatcatagagttaaataatgattacacattgaaaaaagtaatgaagccgctgatcacttcaaacacgttgcatgccacagataaagataagcgtgcacctgccactgcaataacccatggtttccgagacccctgccacagccagactgtcccacgtcggccaccgtcgagcccccactttatccaatcagatcgcggggaaggacacgcaaacctgccgagggctcgagggctccgggctgctgctgctgccagcgtcctgggaagtgacaggcattag

SEQ ID NO: 115666 - DNA, 454 bp, Homo sapiens
  misc_feature (1)...(454): n = a,t,c or g
taggtctgtttcctttgnaaggtcccccagcctccaaatagaagcagataacaaacacattccacgtaacccagaggactagccagacagcatatcctgttatgtaacgaggtctatattgaatagttccaaacaaaccaagaatgacgataataatatgtacaaaatttgcccaggataggtgcccactgatatccaaggaagtcaaatatttgcctctccagcacacaaaccagttgcatgccacagataaagataagcgtgcacctgccactgcaataacccatggtttccgagacccctgccacagccagactgtcccacgtcggccaccgtcgagcccccactttatccaatcagatcgcggggaaggacacgcaaacctgccgagggctcgggggctccgggctgctgctgctgccagcgtcctgggaagtgacaggcattaggaccc

SEQ ID NO: 115667 - DNA, 1050 bp, Homo sapiens
atgttcatagatgtaagtgtacaaatggaagataactggcttccaaacacaatcattagggcagttaatgaactgcattactcacagcataactgcaacctggttggaactggagaaccttgtcttaaggaagcaactcagttaagaaagtcaaataccacatgttcccatttacaagtggaagctaagcaacttgtaaacgtggacatacagagtggaataatagagattggagactccaaaaggtggcagcagcgggctccgaagcctgtctctgcaggtagcagccgcttcacagctttcaggccggtgctcagcggaggctggtgcatccccactaggaatccacacccagctgggactgctgtgaagctgaagacgctggcagcagcagcagcccggagccctcgagccctcggcaggtttgcgtgtccttccccgcgatctgattggataaagtgggggctcgacggtggccgacgtgggacagtctggctgtggcaggggtctcggaaaccatgggttattgcagtggcaggtgcacgcttatctttatctgtggcatgcaactgtgagatctcaaccttctcaatcagtccctctgactcccttttcaagctcatggcactgcgattcatcataagaaccaacagggaccaactactgcaggatactgcagatcttcttaaacaggataatggtagtggacagacgccagctcttcagagaatggaatctctaagaaggaaggggcaacaaaggcgatggcctttgttaactaaaaaccagattgacagaaaaatttctaagagaatgtttgacaatgtcaaattaaattgtcagcctgacagagtgatggaaaagcctctgacggcacagctgaggtgccagcttggagattataccctgcaaggatggggcatcatccttcaggatgtagtatgcacaccaaatcaacaaccattttatggtctgtgtcccaattattctggctgtcatgtggaagatgtactagaaggagaagatattggaggcaagaagaccaattaa

SEQ ID NO: 115668 - DNA, 561 bp, Homo sapiens
atgaacaagagacaccatactcttacctcctgttcttggttctccgacatcctacaccaaaagcccattggaaggaaacatctgatgagggacagaggatacaggatcaaggcattggataaactgccagcacaggagcagagagttaaatattctgaagtgtctttaaacaaaactaacaacgggaaagacgatgacaaggaaatcacagtcatccactcagtggagctcatacatcttttgtgccttgaaaaaggcccgggctctgagtgggattcccgcttccgaatagcgcggctccgctggccaaggccccggactggagtcgggatcccccctccactcacttgggacgccggagagtgcacgcaggtgccgggtgagggacggcgaatggatatccaatccggggccgcgttccgcccactgtcaggggaagccaatcagcggccagggggcgtcagcgacgggcagccagtgggtcccgggagcagaggggtcggagctatcaaggggactccgattcagattcgtaaagccacggaccgattgtcagagtga

SEQ ID NO: 115669 - DNA, 330 bp, Homo sapiens
gatgcacgtgtgctagcgctgagcaggcaagagtcccacactgaagtatcagagaagctccagggcaaaaagcaagaggcaccaggtgtgggccagaagggtccaaaatggtttttgaaagaaacgatgagccggactaagaaaacagataatgtgcccacggccacggagctggcagatgagaaggaattcggtctctgcgtttccataccaaggccctttccactcacccaccgcttctcttcctgcccggggcatctgctggcggaggaaggcttgtccacggaaaggcaaaagcgactcccgatcaaaatccgggggcacctgtag

SEQ ID NO: 115670 - DNA, 443 bp, Homo sapiens
tttcgtcagactctgcgaaaggccgagagaagctggtcctgctcacgagagaaaaaggagggttacgctaaggacatggtgacagactttgatgagaaacatgatgagtatttaatattgcttcagcagaggaaccggagctgagaagaagcctggaacttagtgtaaatctacaaagggaacaaaaggattgttccagcgatgagtatgactctattgaggaagacatactctctgagcctgagccagaggacccggcactggtgggccatcccagacatgaccgccctccttccagtggcgactggactcagaaagatgttcacggggaacaggagacagaaggacgctcttctccaggcccagacaccctcgtggtgctggaatttaacccagcttccaaaagtcataaaagggaaaggaatttgtctgcaaagcggaag

SEQ ID NO: 115671 - DNA, 924 bp, Homo sapiens
atggcctgcatttttgtacagaaatctgtgcagatcagaacagaagctggcccacggctccacatcgaacctcctgtggactattctgatgattttgagctgtgtggggatgtgactctccaggcaaacaacacttctgaggatcgtccgcaggataccaaatctcccaccagtaccaagccctgtggttttaacttctcccttctgaatgcatgtggacattctgacccttcaagcagcgtggacaaagaaaggatcctcttaactattcaggatgtgatgaaacatcaaaggcccccagggatgaccaactggacagctcagaccaaaagacggctggcttgtggcattagaaagggccctgggcaggagctgagaagaagcctggaacttagtgtaaatctacaaaggaaacaaaaggattgttccagcgatgagtatgactctattgaggaagacatactctctgagcctgagccagaggacccggcactggtgggccatcccagacatgaccgccctccttccagtggcgactggactcagaaagatgttcacggggaacaggagacagaaggacgctcttctccaggcccagacaccctcgtggtgctggaatttaacccagcttccaaaaaaagtgaatttttctttcccaaaaggcccagcaaaagtcccagacctggttctccaacccacacggggtcacatgctgtcttggattggatcaccgtggctctgatgggccaggtccagccaataggactaaggggtgtggttatcaccacccagccacacgatagtgcggtaaagctctcatctccaaaagaaactcaaggtgaacctgaaggagggaggatgctggcacgcagagacagcagtgtccaatggaggaagtttgtcaagaaagatcttggaaagtag

SEQ ID NO: 115672 - DNA, 479 bp, Homo sapiens
gtcggaattcccgtgtcgacgatttcgtggagggatgcggaggggaaagatcgattattatgtttttagtgattggtgtccccgtgctgctgcaaggcgaaacgggagggagtgacccctgcgcccctcagaccctcctacgacgtcgcctccatagtctgcggagaagcggagactgcgcgcctcgcctcacagcgaaacgccgcgcactcggagccggcacggctcggcgggtggtggttttttgcactgaatgtaacctagactcatcttcacgggcttgcgttgccccaggcactgtcaaaggcagtatttttgtgtttctgcacagatgtgcacacaatctgttcccatgcaaaccaacgagggagaagtatcgtaagaaagcagttacaaggtggagcaggaggattttgtaatggaagggcatggcaagactccacctcctggagaagaaagcaaacagtgagtcacagttg

SEQ ID NO: 115673 - DNA, 843 bp, Homo sapiens
gcttgcaggcctgtgctcagcacactccttggtctggtgctgtactgtctgcttcctccagacccacgctccattctccgcctaactgtgtgccccaggggacaccatcattgggctccttatcttggtaacaggatcttactttaatggtgagtttggaaggagaaacaacgtaggtggagctcagccctgtcttttccttccttctggaaaccagctgccccaggaagcctgcattctcctcttctcctccacccataaacacaggaccctcacaactactaatgtcctacagtacctgtgcaagttcttccaggaaaattgccaaatatgttaatattttcaagagccctccaggatccagcccttgcctgtctctccagcctcgtctgcctggtctctgttccatttgttccagccgtaatgaacatcttacagctttgccaatatggcagactgtttcaggtttccatgtttttgttgctatcactccctctgcctttccctcctctggttattttaaaaacttacctttgacagtacctggggcaacacaagcccgtgaagatgagtctaggttacattcagtcagaaccacctgaaacctgtcatttgggagctcctttcctgtcttaagagtaaggatactgaagatccagccactgggccaggggcatcctgttttagttcctggtatccaggctgtgtcgggtcctcctgttcccttgggtctgcaaccagccttcttatcatgggcagggtttggggtgggtgagacggtgaaaagctcctggtccctgctcaccccggtccctgctcgccccactgccttcgcctccaaag

SEQ ID NO: 115674 - DNA, 93 bp, Homo sapiens
atggagaaggccacccacctcactgacagtcccaagaatgaccggctgcgaggtcctagtcaaaagatagcagtcatctacatttttgtgtga

SEQ ID NO: 115675 - DNA, 782 bp, Homo sapiens
atgacgaatgaaactgttgagcgccagacatatagtctaggtggccgcacccataagctctcaggttactggaggggcaaaagaacagataaagtttatgttgctccgggggagaagattaggggaacactggttaaagaaaggctctctggggacaagtcactcggccaacacacgaaggacccacagaaaacgctgttacagctagaacggctgcacggttttctacgccgctttttcggcgactttttgctcttccgctttttgccaccgcccccaaccttctatatccttgcagcccctaccttttcttgtgttgctcctcccctggcagccgtgaggggggttagatctcagccggagccggagctgggcctagctgtcccacgggccaccactacctcctttggttcgggagaaagctacgaccaagtacgcccagctcgggccttaaaacttctgaacgggcagtgcgggtaggccctgcttagcccttcccggaggacacctgaaaccgtctttaaggttttctccgtaaagaaagtaccagtatactctttcatggtcaagtacagattgtggaactgataacttttaagggaccgtctgactcatcactgggggtcaacgtggaacatagcaactcaccatacctctactccttcgcgtcccctgggaactcaagccgatacgggcatacctggcatggacttagagtcaccacattttatacaccctactatccctggttgggacccattagcccccttccttctatctag

SEQ ID NO: 115676 - DNA, 416 bp, Homo sapiens
gggggaccacccttcaagagaccctcacccagcccatcagtgcccaagagaggcaggcatccaactgcaccatctccctctccttccccatgcagctccctctgaatgatgatcacacgttctcaacaccgattcagcttcccagcatccatcgatggaaagatgactacactcatgtcccagacaggggatcggatgctagcgaggtcaatggctacaagtacaaacctgatcgtaactgccttccacaaaggatcagaaaaacacctcttctggatcagtccactaaacccagccaagaatctgcagaaatgctgctacaccgcttcaccagcaacacagtccctgcgctactcactgcgttgcccaacgttgcttttctaccctgttatggcctgtggacacatactcactag

SEQ ID NO: 115677 - DNA, 1656 bp, Homo sapiens
tctcaaagagccgcaggcgtcatccagccccaccccctgctggcatcctgccccaagaattacaaggagtccaggacatggaggtgcctggtgtctgcctccttgtcatgctgtcctctccttctcctggccccgtctgtgtcctgtttggcagttactcctgccagcaaaggcctcgtgactcactgccgctgcctgccccccagcccgcgggagaggagggcgtgggcccaccccggaaacagccctcaggcaccgttgatggtgaggtggacccaccctggaagccgtcactcaccgttgatggtgaggtggacccagctgccattgtggaaggctggcagatggaggtggcggtggctgtcgctggtattattagacaacaggcctgtggtttggaagtctggtgcccagaggaggaggaggaggaggaggaggaggctgcaataaggacttgtactaatgagcaacggatgctggtgctcactccgttccccgcttccccagccaccagccagacccagctaggggtctcagagtctcaggcagaaggccaggctcctcagagctgcacgttctcaacaccgattcagcttcccagcatccatcgatggaaagatgactacactcatgtcccagacaggggatcggatgctagcgaggtcaatggctacaagtacaaagtgaggtgcaaagtcgaccctgagatggtttgtgaggaacaaattgctcccgtgggaagtaacagaggagtgcagggggcaggggggaagggaaagaagccaaacaagagggccatttcagacccgtcccagcctcagccgaccctgcgggggagctctggggacaattactcctcagtttgtcccaactggaagcaaggggcatttctgtaaggctgacaatgaggctcacatccagggctgcaaatccagctctgtcatcgtgcagagggacaatggcagcgaggtctgccagtttgatatcctgatgttcgaatgctcaggccctgacctaggtctaacagagcagggagaggagaggagggcgcctccgatgggggtgagaacagctgtgcagctcatgggaagaagccgcaggtggagtggaggaggccccttggaggcggtgacggtgggggagggaggccacacattccagatcagtggtgggagtagtgacgatgatgagtccaagtgtaaggaaacgctaagtcaccaggaaaatcaggagccaccctggatgcaggagaaatcaaggagacagagagaaaatgactggtttgtcttctgcaacttccttcagagctttgcgaccatcacaaaggctgtggcaggaagcaaggccaaggggctacaccagacccacaatgcgtatgaccctggagccacgcaggggatgcctaacaaagggttggggcaggattggattcagttcccggagctgtgcagcctactattgaccacacaaaagcagctggaccggagcatctttactattccagactcagctcccctaaaagtccactgcgtcctgacttctgctaagatcctgcactcaaaacaaagtactgccaccaaggtctcctcaaaagccattgggcgttttcaaggagaagctctgacatccacagcccttgccaggatcatggggaag

SEQ ID NO: 115678 - DNA, 2259 bp, Homo sapiens
atggctgttatgtcgcagcatgtatccgctgctcctcacgatgatgcgatgctggctgctgctgcaatgaactgcgtgtacagctctgcatgcagcatgaatgcgagtggcctcgatgctgcgtatatagcagtgtatctcaactccctggacagattctggatcccgtgcccagtctccagcacgataacatcgccagctactaatgagaagtcgtcgacgctatccactcgggcacgtacgagcatgaactactcgttcgaccttgcatgcctgaggtcgactctagaggatcccctcatccggcacccgcggacctttctcagcaagatcctcacctcgaaattcctgaggcgctgggagccgcaccacctaacgctggccgacaacagcctggcgtccgccacgatactgtggtacgagctcggtttcgtcatcataggcatagctgtttcttgtgtgaagtcgttagcgctcaacaatccacacaacatacgtagcggtagcatcacgtccgtccaaaaacgcttcagtgaatatttgaaacagtctctttgggcactgattcaagcagcatccgagagcttgttgccacagtgtggtcctcgggccggcggagcaccagcagctgccaggagatgtggcagcggccgtgctactgcgttcagctatgctctacgtcacactgcatcggacatgtcgtataccgctacaagatgtcagtgctcctattctcttgagctcagtcatgcggagtacctggcccgcgaatgggcttgtgcccctacccacatggctgagtcttgtggggatgctccggagaagctccgggtgaccccgtcgtttcttgctacacgcagcgagagaaagcggcatataactgtggtgttctctgaagcatgctcgctctggcgagggcactgccgaccgcgctactgcgcggggagatactcgccgtcactagtcttctgcacatacgtgaagacgttccaggcttggaagccgtcagattttcctagcgtggacaatctcataggacacgcggatgatcttgctcgtggtaacccagcttttacctccgatgtgagcacagagcagttggaagacggcattcaagatatccatgtatggatagatctcgtcatgtgccggggagatgtcggccgcttccgtgggcctggcgaccccgagagccagattcagtccagcagtcagttctacaaagacaagcattgttcgtgtccctcgaagcacgctgtgcagtggatggaggccggcgctccatggaatcaccggttatgtgagtcaaatagtcgttggtgcgagcgtagatgtgtcgtgctctcggagcagtgcagctcgttctttcggcaccagcacgcatatgtattcggtgctgatcgtgccgacgagcgccttgttcgtactgcttcaggtttgatactggtgctcgctgctgtactcgtgacgctagcggcgccaatgcgaaatttagagaggggacctgccgagcacgccatgacattaatgatgtactcactgagagaggacagcattaagaagcgccccacggtaaacgacgaggattgtacggaatgtccagctacgacatgtacactacgccttgcagcgaacgaggctgactatgggatttcgggggcatacgagatcgttctcgtaacagggtacatgcagattgatagaggagctaccacagaccaagtggggcgctggggtccagtaacagaaaatgcgatgaacactcccctgagcatcgttgttcgagggcctgctgtgtgccaggcccaacagccctggaggaagagcagaacaacaggagtaaataaccagtgcgccacatgcgcggcgatttttatcctacggttttactctctagcagagaacgagataggtatgtactatcggctacacgtcaagagtatgctccatctctggaagatgacctcgtgtgagttcgctgaggacatggataaactcattaatgttcccgtccgctcctccggcctcagtgttcatggcactgtcatccggaacagcgacgaatgggaagtgagctctacaactgaaaccaccgtgtggggccataagctgcgcacggagatgtggccctctgcggaggtctcatctgtcttcgccaggctgttccctgaagctgtcattacgctggccttccagccgcggtgcagcagcattgggtggtgctccggcgactgcatgcagcctgcggttgttttttaa

SEQ ID NO: 115679 - DNA, 427 bp, Homo sapiens
cgcacatccccgaggcgactcaaacttaaccttcatgttctttgtctcagtgtctgagatcattgatctgggtgacttgactggtgtctgtctccccctgctcattggaagcctctcatcacatgtgagccgtggctcttttgctcacctgtgtattctcaatgcctgccgtagaatagatgctcagtaattgttcgctgaacttctgtgtcttgtgccttcccctttctctctaccagcaaactcctgttcatccttcaaggcccagctccagtgacttctccctggagccattggcagccagcctctcccctgccttcctgcagagctcactacacccctttgctctgccacttcctatgctggcttaaagccctgcgtcttctttcctcaagggagatgcttggcacagtacataatatgtggt

SEQ ID NO: 115680 - DNA, 852 bp, Homo sapiens
atgacaggcctaagcaacaaccagatttggcccaaggcccatgtttgttctccctttgtccctggcttcactgtccaccagagtgaaaacctcatacgcagaaaacacccacaacccaagctgaggggaaacaatggccctccaggctctgcccttattctctgccaagacttacacctctggccttatgctgtcactgtccgctggccacagatgcctcccagagccctccctgagaagacacaggattctctcttgaatgtcacaggtgtgatgtggcagcctctccagcagagagcctccatgtccacctacagcagtgagatttccagcagcaaaggctttagcacaatccttccagaagttccaaagctgacagggaccgacagacttgacaacggtgacagcactgggctcccagccgcacatccccgaggcgactcaaacttaaccttcatgttctttgtctcagtgtctgagatcattgatctgggtgacttgactggtgtctgtctccccctgctcattggaagcctctcatcacatataaggaaactaagtcagaaaggtgaaatgacttcccccgttgggacaactattgtaaaaagaatcagccctcaaggacaggatgttcgcattagggggacaccaacagcaaaaagtggaaccctaaaatgttcatttttcgagaccgctggaggagctatccatgaatgtcactgctccagggccaacatcacacttcctcctccacccatacccaagcctcaggtccttacaaggagcttctgggctgtctccttcaggaagtcctcctgccagccctccctctccagccccgagctgctctaa

SEQ ID NO: 115681 - DNA, 204 bp, Homo sapiens
atggcactgtcgcgggggctgcccgggagctggctgaggcggtggccgggggccgggtgctggtggtgggggcggcggcatcggctgcgagctcctcaagaatctcgtgctcaccggtttctccacatcgacctggttgccaaggaaagtgtactgcagttttacccgaaagctaatatcgtgcctaccatgacagcatcatga

SEQ ID NO: 115682 - DNA, 2632 bp, Homo sapiens
ggcacgagctccgccgcggctcgtggttgtcccgccatggcactgtcgcgggggctgccccgggagctggctgaggcggtggccgggggccgggtgctggtggtgggggcgggcggcatcggctgcgagctcctcaagaatctcgtgctcaccggtttctcccacatcgacctgattgatctggatactattgatgtaagcaacctcaacagacagtttttgtttcaaaagaaacatgttggaagatcaaaggcacaggttgccaaggaaagtgtactgcagttttacccgaaagctaatatcgttgcctaccatgacagcatcatgaaccctgactataatgtggaatttttccgacagtttatactggttatgaatgctttagataacagagctgcccgaaaccatgttaatagaatgtgcctggcagctgatgttcctcttattgaaagtgggaccagctggggtatcttggacaagtaactactttccaaaaagggtgtgaccgaggtgttatgagtgtcatcctaagccgacccagagaacctttcctggctgtacaattcgtaacacaccttcagaacctatacattgcatcgtttgggcaaagtacttgttcaaccagttgtttggggaagaagatgctgatcaagaagtatctcctgacagagctgaccctgaagctgcctgggaaccaacggaagccgaagccagagctagagcatctaatgaagatggtgacattaaacgtatttctactaaggaatgggctaaatcaactggatatgatccagttaaactttttaccaagctttttaaagatgacatcaggtatctgttgacaatggacaaactatggcggaaaaggaaacctccagttccgttggactgggctgaagtacaaagtcaaggagaagaaacgaatgcatcagatcaacagaatgaaccccagttaggcctgaaagaccagcaggttctagatgtaaagagctatgcacgtcttttttcaaagagcatcgagactttgagagttcatttagcagaaaagggggatggagctgagctcatatgggataaggatgacccatctgcaatggattttgtcacctctgctgcaaacctcaggatgcatattttcagtatgaatatgaagagtagatttgatatcaaatcaatggcagggaacattattcctgctattgctactactaatgcagtaattgctgggttgatagtattggaaggattgaagattttatcaggaaaaatagaccagtgcagaacaatttttttgaataaacaaccaaacccaagaaagaagcttcttgtgccttgtgcactggatcctcccaaccccaattgttatgtatgtgccagcaagccagaggtgactgtgcggctgaatgtccataaagtgactgttctcaccttacaagacaagatagtgaaagaaaaatttgctatggtagcaccagatgtccaaattgaagatgggaaaggaacaatcctaatatcttccgaagagggagagacggaagctaataatcacaagaagttgtcagaatttggaattagaaatggcagccggcttcaagcagatgacttcctccaggactatactttattgatcaacatccttcatagtgaagacctaggaaaggacgttgaatttgaagttgttggtgatgccccggaaaaagtggggcccaaacaagctgaagatgctgccaaaagcataaccaatggcagtgatgatggagctcagccctccacctccacagctcaagagcaagatgacgttctcatagttgattcggatgaagaagattcttcaaataatgccgacgtcagtgaagaagagagaagccgcaagaggaaattagatgagaaagagaatctcagtgcaaagaggtcacgtatagaacagaaggaagagcttgatgatgtcatagcattagattgaacagaaatgcctctaaacagaaccctcttactatttagtttatctgggcagaaccagattgttatgtcctttgttccaaagggaaaaaattgacagcagtgacttgaaaatgattctgctccctttgaaagcattcattttgctagaactgttagacacattgcagtatgctgtattgaaagtaggaatatagttttaaaaaccctttgaacaaagtgtgtgcataaccagtcatgagataaaacaacacaatgcatgttgcctttttaatgtaaatacccttaggtatcattaatagtttcaaaatattgtggtttagtaaagttgatacctggttataaatattatgcctttatttttggctagaagaagaattatttttagcctagatctaaccattttcatactcttaactgattgaaacagattcaaagaagtatcgagtgctatgcattgaaacttgtttttaaatgttagatggcactatgtatattaatgtaaaacaatgttaatttactcaagttttcagtttgtaccgcctggtatgtctgtgtaagaagccaatttttgtgtattgttacagtttcaggttatttatattcgatgttttgtaaaactcaaataacgactatacttatggaccaaataaatggcatctgcattcttgtt

SEQ ID NO: 115683 - DNA, 1505 bp, Homo sapiens
cccggcggtgcagaaaggtcagggcgatcttgtgggtgaaacgtccaaacttattcaactggcatatgacacaacctgatgaaagcattctggtttctgacggtaaaacactgtggttctataacccgttcgttgagcaagctacggcaacctggctgaaagatgccaccggtaatacgccgtttatgctgattgcccgcaaccagtccagcgactggcagcagtacaatatcaaacagaatggcgatgactttgtcctgacgccgaaagccagcaatggcaatctgaagcagttcaccattaacgtgggacgtgatggcacaatccatcagtttagcgcggtggagcaggacgatcagcgcagcagttatcaactgaaatcccagcaaaatggggctgtggatgcagcgaaatttaccttcaccccgccgcaaggcgtcacggtagatgatcaacaaaatttagcacagtatatcggccagcaacatttgctggctgcggggaagccgttgccgcgcgctatcgaagccgggcatttacattctatgatcctctgggggccgccgggtaccggcaaaacaactctcgctgaagtgattgcccgctatgcgaacgctgatcgtggaacttgtgactggaacgagcagaacgaaggctacctcgtcggcgcgcaccaacggcagctatgctacgtgtacgcgtgcttccatgcgcttcctagtgtgcatctatgtatgacgcttttcgagcgcgtgctcaaggctgaagaagagcagttctccaagaccctggagcacggcctgaagatcctcgagcaggacctggctgaactcaaaggcaccgtggtgccgggcgacgtggtgttcaagctgtacgacacctacggtttcccgatggacctgaccgccgacatcgcccgcgaacgcgagctgaccatcgacgaagccgggtttgagcgtgagatggaagcccagcgtgtacgtgcccgttccgccagctcctttggcctggactacaacaccctggtaaaggttgatgtagcgacttcgttcattggttatgaagccaccgttggctcggccaagatcgtggctatctataaggaaggcaagtcggtcgacgtgctgaacgaaggtgacgagggcgttgtagtcctggatcagaccccgttctacgctgaatccggcggccaggtcggtgactgcggtttcctgagctccacctccggtcgttttgaagtgcgcgacaccaccaagaccggcggtgcgttcctgcatcacggcgtgctggtgctgggtaacctgaccgtcgggcgcgccgtcatttcgagggcccgattcaagcctgagcagttgaaggccctggaagacatcgtcaacgccgagattcgcaagaacaccccggtggaaaccgaagaaaccgacatcgagaccgccaagcaaaaaggcgccatggcgctgtttggccgaggaagttacccggcggaccgaagtggcgcgtactga

SEQ ID NO: 115684 - DNA, 1792 bp, Homo sapiens
atggcgtacagatcagctctggtgacaccctgtgcgcgtattccgcaggaatccggcggtaccaaggacatcaccggtggtctgccgcgcgttgcggacctgttcgaagcacgtcgtccgaaagagccggcaatcctggctgaaatcagcggtatcgtttccttcggtaaagaaaccaaaggtaaacgtcgtctggttatcaccccggtagacggtagcgatccgtacgacgagatgattccgaaatggcgtcagctcaacgtgttcgaaggtgaacgtgtacaacgtggtgacgtaatttccgacggtccggaagcgccgcacgacattctgcgtctgcgtggtgtccatgctgttactcgtcacatcgctaacgaaacccccccccggcccggaaccccaacccccacgaacccatgcacagccgccccgccctcccccccgcgagccccaccccgcaccctatggtcaattaccgcctttacgaaagattgtattctggtcgatctggcatcagtgaaaaatgggccattacaggccatgctggtggcgcatgatggtccggtgctggggctacacccgatgttcggtccggacagcggtagcctggcaaagcaagttgtggtctggtgtgatggacgtaaaccggaagcataccaatggtttctggagcaaattcaggtctggggcgctcggctgcatcgtattagcgccgtcgagcacgatcagaatatggcgtttattcaggcactgcgccactttgctacttttgcttacgggctgcacctggcagaagaaaatgttcagcttgagcaacttctggcgctctcttcgccgatttaccgccttgagctggcgatggtcgggcgactgtttgctcaggatccgcagctttatgccgacatcattatgtcgtcagagcgtaatctggcgttaatcaaacgttactataagcgtttcggcgaggcgattgagttgctggagcagggcgataagcaggcgtttattgacagtttccgcaaggtggagcactggttcggcgattacgcacagcgttttcagagtgaaagccgcgtgttattgcgtcaggcgaatgacaatcgccagtaataatccagtgccggatgattcacatcatccggcaaccttttcatcagttggatcaacaggcactacgttctcacttggccaggccaaactggcgcgccagttccaccagaaaatagctggttatcgcccaacaccgctttgtgcgctggacgatctcgcaaacctttttggtgtgaagaaaattctcgtcaaagacgaatccaaacgattcggtctgaacgccttcaaaatgcttggcggtgcgtacgccatcgctcaattattgtgtgaaaaatatcatcttgatatcgaaacgctgtcatttgagcacctgaaaaatgccatcggcgaaaaaatgactttcgcgaccaccaccgacggcaaccacgggcgcggtgtggcgtgggcagcacagcaactcggacagaatgcggtgatttacatgccgaaaggttctgctcaggaacgcgttgacgccattctgaacctcggtgccgagtgcatcgtcacggatatgaactatgacgataccgttcgcctgaccatgcacacgcgcagcagcacggctgggaagtggtacagacacggcatgggaaggttacaccaaaatcccaacctggtcggggatccactagttctaagcgccgcacccgtgatttacaaaaatgtgatcattgtactgtattatgttaataaaacatag

SEQ ID NO: 115685 - DNA, 684 bp, Homo sapiens
gcaccaccgcgccggaattcccgcgacgactatttcgtagctccataccactttgcctggctctcaagatctcaccctccatcctgtctgccctgcaggatgccgcaactgaccctgtactggctgggcctcgggcaactggcagcattcccgtggctgctcctgctgctggctggggcctcccggctcctggccggcttcctggcctggacctatgccttctatgacaactgccgccgccttcagtactttccacaacccccaaaacagaaatgggtttggggtcaaccaggacctcctgctattgcgcccaaggatgatctctccatcaggttcctgaagccctggctgggagaagggatactgctgagtggcggtgacaagtggagccgccaccgtcggatgctgacgcccgccttccatttcaacatcctgaaaccctatataaagatcttcaacaggagtgtgaacatcatgcacgttgttccctgcaaacacaactctgaaaaatggctgaagtaagaacatcatggccttgcattcttggcatgcccagcaagggtggctcaggggctgatgaaaaagatgcctcttccaacacaagggatatctttctgaaatgactttgtaaacaaatggagaaagagtgaaagagaaacatttactggagcacctcccccatag

SEQ ID NO: 115686 - DNA, 2352 bp, Homo sapiens
tctttcgagggaaaaaatgcaagaaaactgattattctacctgccgcaagatactttgtcagttagcaccaaacctggaatctagctcctcttgccaaaagccagtgtcttctaatacccccaataatgcaaacagcaatgcaaagaggaatggaagatttcatgccccaatctctgaagaaaaaaaaagagtagatgcaaggttcctggggtccgggccaacttcaacagaggtggcacgtgcagaagaaatggtggatctccttgtgtccacagaaggcgaggtggaaaaggccgaggtcaccaccatccccatgaccaagccaccagcccaggagcagccacccggcaggatgccgcagctgagcctgtcctggctggcctcgggcaggtggcagcattcccgtggctgctcctgctgctggctgggcctcccggctcctggccggcttcctggcctggacctatgccttctatacaactgccgccgccttcagtactttccacaacccccaaaacagaaatgttttggggtcaaccaggacctcggcctgccgcctggtgcacgacttacagatgccgtcatccaggagcggcgccatacccttcccactcaggtcttcattatacagaaatatgaaaatatcgagtcattgattcctcccaccagggaccaaagacaaggcaaaggagcggggggaagaccttggaatgggggctctggtgatggtgaacaagagagactagacattcagagtgggtttgagtttctggaagaagatcggaccttcaagattgtctcagggcctcaatgcatggacgctgtccaccctctggtgctaagcagcccagagacccaagcctgcctgcttccccttcaggccatgacacacagccagtggtctctcctgggtcctgtacaacctcgcgaggcacccaaataccaggagcactgccggcaggaggtgcaagagcttctgaaggaccggatcctaaagagattgaatggcattatctgcatcatcaacattataggaatccatcacaacccactgtgtgaccggatcctgaggtgctgcctttcccatccacccccgacccctgccctctttgtcaattccaaggtctacaaccccttccgcttcaactcagagaacagcaaggagaggtcacctctggcttttattcccttctctgcgggacccagcaggtgcagctggatctctctacgcctactataaaaacgccgatttgccgttagcacaggctgccatgatcgttttattcgccttaacccgacccatccgaatatcgattatgcaacactatgacatcggaaaacccgttactggcgctgcgagagaaaatcagcgcgctggatgaaaaattattagcgttactggcagaacggcgcgaactggccgtacgagttgggagaaggccaactgctcttgcatcgcccggtgccggagatgtgaatcatccggcactggattattactggcgattgtcattcgcctacgcaataacacgcggctttcactctgaaaacgctgtgcgtaatcgccgaccagtgctccaccttgcggaaactgtcaataaacgcctgcttatcgcctgctccagcaactcaatcgcctcgccgaaacgcttatactgcttgttcgatcaggcggtgcagtttgtcactgaaaaacgcaagcgtcaatttctggcgtacagcgtcagttccgcattggttataaccggcagcgcgtattatcgaacagatggaagcgcaggggattgtcagcgaacggggcacaacgtccagcgactggcagcagtacaatatcaaacagaatgggatgactttgtcctgacgccgaaagccagcaatggcaatctgaagcagtcaccattaacgtgggacgtgatggcacaatccatcagtttagcgcgcaacgctgtctacactgcgtttaaagccgcgctggccgatgctcgcgaacgcccggattatgacgtgccggttcatttgcgtaatgcgccgacgaaattaatgaaggaaatgggctacgggcaggaatatcgttacgctcatgatgaagcaaacgcttatgctgccgttatgctggatctgcataccgaacagcatggctacagtgagaactatgttccgtacctggttaaccaggacacgctgtacggtacgggtcaactgccgaaatttgctggcgatctgttccatactcgtccgctggaagaagaagcagacacagtaactatgcgctgatcccaacggcagaagttccgctgactaacctgggcgcggtgaaatcatcgatgaagatgatctgccaattaagatga

SEQ ID NO: 115687 - DNA, 450 bp, Homo sapiens
acctcgttgatctctcgtgacttcaacagacttcgctttcttcttccatttgtggagacttaaaacgaaaggcgacaggtcttcttggcagccagtgtcgaggccaattgcagacagcggtccccttcttcccagtcacactcgtgagtcctggaaaaatccgaatgggtcgtgaaggttcgagtgtcagctcctagagatatcctggttgttatgcagccttcaagaaaaaatgttccccattcaagtgcgttttaattcatgtctttcctgggtagagcagaggtctgtgcatgttgttttctgcatcacccagacagggactcttcggtgaagttttctcccccgcgaggctgaaatgggatccctctttccaagccccctcttcgctcccctccgcccaccaaaaacgcaagcacacagccagcctgtctgggtccggcgtgggct

SEQ ID NO: 115688 - DNA, 406 bp, Homo sapiens
gaaagcggtccccttcctcccagtgccactcctgagtcctggaaaaatccgaatgggtcgtgaaggttcgagtgtcagctcctagagagatcctaggaaaacgagaagttaaaggtcatgaactttctccaggcgcctatcactgtcttgcccacatgtccacaccaagttcgcgtttcctcccgagcaaaacaaacaaaaaaaaattttaacgtaaacaaacaaaaagcctataaattcgagggggtgtttaaaaaagagaaatctcgaaactgcccagcggttgcgtcaaacacacctggctgttatgcagccctcaagaaaaaatgttccccattcaagtgcattttaattcatgtctttcctgggtagagcagagggctgtgcatgttgttttctgacgaaa

SEQ ID NO: 115689 - DNA, 804 bp, Homo sapiens
atgattacgaactcgagctcggtacccgaccggtcaaacctgaacagaggatttcgcatgcgccagcctgaattcccgaaaaccgtcgccatcgcctgccaggggggcggcagccacaccgctttcacggccggcgtcctgcaaaccctgctgtgtgaaatcgatactgcgcgctaccagatccaggataaattcatggacagagaatgtatcctgtctcctaaggcgctgtctgtggcggtgtgttttcgcatatttcgcggtcgccgcccccctctggcctatcgcggctgcttctccttttttgcattcgtctccgcaggcccgagcgggcgggaagggatctctctaggagctgacactcgaaccttcacgacccattcggatttttccaggactcaggagtggcactgggaagaaggggaccgctttctgcaattggcctcgacactggctgccaagaagacctgtcgcctttgttttgaagtctccagaaatggaagaagaaggcgaagtcagttgaagtcacgagaaatcagcgaggcatttgaaggcgcttcctgaaaacctttattccctggcacgttgtctgtttcaacagccctgcccctcctcggagcctgcttgtggaattcttccccttcgggtgtgtggtggcattccccgccacgtccaatgtggactccaaaggatttgtcccttctttgtcatttgaaatgaaatgatggccacgcgtcggactggtctgtctgagggagatggtgacaagctcaaggcctgcgaggtctcaaaaaataaagatgg

SEQ ID NO: 115690 - DNA, 2496 bp, Homo sapiens
atgcttctctcaatagatgcagaaaaggccttcgacaaaattcagcagcccttcatgctaaaaaccctcaataaactaggccatggctatgagcagcaccatctccacaccaccaatgacgtggatgaagaagatttgagcgatgcagcctccaaaggagatgactttgcgctttctgaacagtctcaagatgcacactttttacaaccagaagcctatggactgggtgagggagcagaaacagccacaggtactgcccatcagggtaatcatgttcgtgtggaggaatgtggaaggtcactctgcggctgtgttcccctggtactccatccccttcctgacccctccctgcagccacacgaggcccagcaacctgccagtcactcagtggcctgcaaccagagaaaacaacctgccaagttgccagctgttgctcatgagcgtccaccaggtgggacagggagtgttgaccctgggcggccccctggagccacctgccctgaaagcccagggcccgcaaccccacacactttgggggtggtggaacctggtaaaagctcacctcccaccatggaggaggagccctgggcccctcaggggagtccctgctggacagcccagtccctcagtgccctgcgcaaggaacaggactcatcttctgagaaggatggacgcagccccaacaaatgggacaaggaccacatctggtggcccatgagtggcgctcatgatcttcagcaagcggcaccaggccctggcggggcgcaccagggtcaccccaaccaggataaccggaccgtcagccagatgctgagcgagcggtggtacaccctggggcccagtgagatgcagaaatacgacctggccttccaggtgaaggtggcccacttgcaacaaggaccgaaagaagtccagctcagaggccaagcccacaagccaggggctagcagcagtgtaacaagggctcgtgggagcggagcatatcagagacgggcactgccactgcccctggggcgtcctctgaactcctgtcagttgcagcccaaacactccagagctcggatgccaaggagcagcttctgtggggcagaacggctgcacacacacatggccagtgaggacacagcgagtgacgaggagcacacggtcatccatgaggaggagggggtgatgatgtcattgctgatgatggctttagcaccaccgacaccgatctcaagttcaaggagtggcttttggcagtctatggtcacaccctgtcctcctcctacacatactcggatgcttcctcctcaaccttggcgcccacctccttcttactgggcccaggagccttcaaagcccaggagtctggtcaacgcagcagagcgggccccctacggccccaacccctggggatgggggcccagggacgccttccaaggtggcctgtttcctcccaatggatcctgccaccttctggtggagaagccgaggacaggctcagggaaccggagaccgagaaggagctgtcctcttcactgcacgtgccctggaccagtgccggccctgatcatgcagctcttccaggcccactgcttcttcctgtccactaggccacagccgccctccaggcccactatgcacacatcttcccctccaagccctgtgggggtcctgaccgcacctcacctggctcagactcttgacgctgccctggctgccccaccactgcctctgcccgagagtcacccctgcctgaccccacctcaacctgctcaggctctggcacaaacctggctgccctgccactgcctctgccccagagttggggccttgacagcctggttggaaggggacaccccagccctgcctcaacacctgggggtctccataactaccacaggcagggctgcaaacagaaaggattttgttcaccgtcgatgctgccctgagttgtcccaaagcgaggccgtgcccccaagcacacactttctgagtgccgagtgtctccagcaggagaggggctctagttcccgggatcccaccctccacagaggacagcagcaccttgagggacagatgtgcaaagggcaagtcagcggttttgcagcaatagcattgcatgtgggttttaggctgatgatgctcaacagtggacaatcctcttcacctgcctgggccccactgcctgcccttccatacagtgcagggtcacagctgagctctctgagacacctcgcaggatctcggcttctgaactatcaagtgtcttccagggctacagtgaattacacactctggcatgggtttgcacgccacgtgctggaagccagcagtcatgcaggccatgctctcccacacttaggaaaacagcgcatgagaaagatctccatcaagttcacacagaatgacctccagcaagacctggaaaatgctcagttccacaaaatacctgtgtccaaatcctttcagtgcacagctctggcatcaggttcctgtgaggacagaccctga

SEQ ID NO: 115691 - DNA, 1188 bp, Homo sapiens
gcccagtccctcagtgccctgcgcaaggaacaggactcatcttctgagaaggatggacgcagccccaacaaatcagacaaggaccacatccggtggcccatgagtggcgctcatgatcttcagcaggcggcaccaggccctggcggggcgcaccagggtcatcccaaccaggataaccggaccgtcagccagatgctgagcgagcggtggtacaccctggggcccaatgagatgcagaaatacaacctggccttccagcacatggccagcgaggtcatagcgagtgacgaagagcacacggtcatccatgaggaggagggggtgatgaatgtcattgctgatgatggctttagcaccaccgacaccgatctcaagttcaaggagtgggagccttcaaagcccaggagtctggtcaacgcagcagagcgggccccctacggccccaacccctggggatgggggcccaggacgccttccaaggtggcctgtttcctcccaatggatcctgccaccttctggtgcaagagacctgaaagtgtgggcgacctggagctaccaggctcctcagtcatcagggtggagaagccgaggacaggctcagggaaccggagaccgagaaggcgctgtcctcttcactgcacgtacactggaccagtgccggccctgatcatgcagctcttccaggcccactgcttcttcctgtccactaggccacagccgccctccaggcccactatgcacacatcttcccctccaagagcttttcacttttcggaaaatagctcctgctggggctacaagatggagtgtgaagagggccttgggccacagggaggcgcctgtggactagggggagttcatgcaccccttctttccccagaggggctggactcagatcagtactgccacatggagggtccagcactggacgtgaatgagtgtgcagagaaccctggcgtctgcactaacggcgtctgtgtcaacaccgatggatccttccgctgtgagtgtccctttggctacagcctggacttcactggcatcaactgtgtggcctcaggttcttttgacgtttccctcaaagtcgtcgacctgtttcttcaggttgatggtttgctgtccgttttaatgtgcagtccctctcaagtctattacccagcagaggtagtggaagagaaaagctattag

SEQ ID NO: 115692 - DNA, 1654 bp, Homo sapiens
gcctgcgttcagtgaggcctcccgtggcgtcagcatgttcgtgtggaggaatgtggaaggtcactctgcggccgtgttctcctggtactccatccccttcctgacccctccctgcagccacacgaggcccagcaacctgccagtcactcagtggcctccaaccagagaaaacaacctgccaagttggcagccgttgctcatgagcgtccaccaggcccagtccctcagtgccctgcgcaaggaacaggactcatcttctgagaaggatggacgcagccccaacaaatcagacaaggaccacatccggtggcccatgagtggcgctcatgatcttcagcaggcggcaccaggccctggcggggcgcaccagggtcatcccaaccaggataaccggaccgtcagccagatgctgagcgagcggtggtacaccctggggcccaatgagatgcagaaatacaacctggccttccaggtgaaggtggcccacttgcaacaaggaccgaaagaagtccagctcagaggccaagcccacaagccaggggctagcaggagtgtaacaagggctcgtgggagcggagcatatcagagacgggcactgccactgcccctggggtgtcctctgaactcctgtcagttgcagcccaaacactccagagctcggataccaaggagcagcttctgtggggcagaacggctgcacacagtccagggaacctggctcagcctggcccaagccttctcccacagcggggtacacagcctggacggcagggaaatagaccgtcaggcactacgggaactgacacaggtggtgtctggcactgcatcatactctggcccaaagccttctactcagcatggagctccaggccactttgcagcccctggtgagggaggtgacccgtgggcagccctgctgccgcccacgagccttcaaagcccaggagtctggtcaacgcagcagagcgggccccctacggccccaacccctggggatgggggcccagggacgccttccaaggtggcctgtttcctcccaatggatcctgccaccttctggtgcaagagacctgaaagtgtgggcgacctggagctaccaggctcctcagtcatcagggtggagaagccgaggacaggctcagggaaccggagaccgagaaggcgctgtcctcttcactgcacgtaccctggaccagtgccggccctgatcatgcagctcttccaggcccactgcttcttcctgtccactaggccacagccgccctccaggcccactatgcacacatcttcccctccaagagcttttcacttttcggaaaatagctcctgctggggctacaagatggagtgtgaagagggccttgggccacagggaggcgcctgtggactagggggagttcatgcaccccttctttccccagaggggctggactcagctagctttgactcctctgtcacttgtccgctttggcatcacctcctcatagaagacttctatgactcccgagattctcaggagcatggcaggaatcaaggttccctagagaaacggctgactccatgtatggtgcagtatattgatcctggaacatctgttttgccagaaagcaagaaagccatcaaagtccaacaggatcacgtcaaaaagacatga

SEQ ID NO: 115693 - DNA, 783 bp, Homo sapiens
cgggtcgagggctccttccgctgcatctgtccccatggcttccaggtgcagagtgaccactgcattgatatggacgagtgctcagaggagcccaacctctgcctctttggcacctgtaccaacagccctgggagcttccagtgcctctgcccacctggctttgtcctctctgacaatgggcaccgttgctttgacacacggcagagtttctgcttcacccgttttgaggctgggaagtgctcggtgcccaaagctttcaacaccaccaagacccgctgctgctgcagtaagaggcctggggagggctggggagacccctgcgaactgtgtccccaggagggcagcgctgcctttcaggagctctgcccctttggccacggggcagtcccaggcccggatgactcccgagaagacgtgaatgagtgtgcagagaaccctggcgtctgcactaacggcgtctgtgtcaacaccgatggatccttccgctgtgagtgtccctttggctacagcctggacttcactggcatcaactgtgtggaaccttcaggccaggcgtcacccacaggacaacctacatccctgcagcccaaccccttggattctttcaaaacagatgctcctgccccagtggggcccctggttgctctagcaatggaacagagctggatggagaatgactttgatgagatgagagaagaaggctacagacgatcagacttatctgagctaaaggaggaagttcgcacccaatgcaaagaagctaaatcattgaataaagattag

SEQ ID NO: 115694 - DNA, 1428 bp, Homo sapiens
tctcaagatgcacactttttacaaccagaagcctatggactgggtgagggagcagaaacagccacaggtactgcccatcagggtaatcatgttcgtgtggaggaatgtggaaggtcactctgcggctgtgttcccctggtactccatccccttcctgacccctccctgcagccacacgaggcccagcaacctgccagtcactcagtggcctgcaaccagagaaaacaacctgccaagttgccagctgttgctcatgagcgtccaccaggtgggacagggagtgttgaccctgggcggccccctggagccacctgccctgaaagcccagggcccgcaaccccacacactttgggggtggtggaacctggtaaaagctcacctcccaccatggaggaggagccctgggcccctcaggggagtccctgctggacagcccagtccctcagtgccctgcgcaaggaacaggactcatcttctgagaaggatggacgcagccccaacaaatgggacaaggaccacatctggtggcccatgagtggcgctcatgatcttcagcaagcggcaccaggccctggcggggcgcaccagggtcaccccaaccaggataaccggaccgtcagccagatgctgagcgagcggtggtacaccctggggcccagtgagatgcagaaataccacgacctggccttccaggtgaaggtggcccacttgcaacaaggaccgaaagaagtccagctcagaggccaagctcacaagccaggggctagcaggagtgtaacaagggctcgtgggagtggagcatatcagagacgggcactgccactgcccctggggtgtcctctgaattcctgtcagttgcagcccaaacactccagagctcggataccaaggagcagcttctgtggggcagaacggctgcacacacacatggccagtgaggacatagcgagtgatgaggcgcacacgatcatccatgaggaggagggggtgatgatgtcattgctgatgatggctttagcaccactgacaccgatctcaagttcaaggacttttggcaaagtctatggtcccaccctgtcctcctcctacacatactcggatgcttcctcctcaaccttggcacccacctccttcttactgggcccgggagccttcgaagcccaggagtctggtcaaggcagcagagtgggccccctacggcccctacccctggggatgggggcccagggatgccttccaaggcgacctgtttcctcccaatggatcccgccaccttctggtgcaagagacctgaaagtgtgggcgacctggagctaccaggctcctcagtcatcagggtggagaagccgaggacaggctcagggaaccggagaccgagaaggcactgtcctcttcactgcacgcgccctggaccagtgccggccctga

SEQ ID NO: 115695 - DNA, 2121 bp, Homo sapiens
atggcgggaccacggccccaaactcgtcgtattcacgaatcgagccgtgtgtatacgaatgacaagttgacgccaaactcctcacgtgactctcgggcagaagcagtggtggggcagcagggcagcgtcaagagtctgagccagcatgttcgtgtggaggaatgtggaaggtcactcgcggccgtgttctcctggtactccatccccttcctgacccctccctgcaccacacgaggcccagcaacctgccagtcactcagtggcctccaaccagaaaaacaacctgccaagttggcagccgttgctcatgagcgtccaccagcccaaacactccagagctcggataccaggagcagcttctgtggggcagaactagaggcccggatccgctacgtcatcgtccgcggaaacgagcaaggttttttcgcatgcatcacctccgtggcgtcagctccctgcagctggggcggagcgtccggggcctggaacctaccggctggaggtgtgccggaagcagacactcttcctcatatcgtagttggcacaaaggagaagaatgtggatgtcgatgagtgtggcgcagggagagtccctgccagcagaatgctgactgcatcaacatccccggagctaccgctgcaagtgcacccgaggattttgatgagtgtctaccctggtggggcaggtgtgccgatttggccattgcctcaacacagcggttccttccactgcctctgccaggatggctttgagctcacagctgatggaagaactgtgtgggctgggaagtgctcggtgcccaaagctttcaacaccaccaagacccgtgctgctgcagtaagaggcctggggagggctggggagacccctgcgaacgtgtccccaggagggcagcgctgcctttcaggagctctgcccctttggccacggggcagtccaggcccggatgactcccgagaagaagccatgtctgcaacgcctgccatccgcagagtgaatgagtgtgcagagaaccctggcgtctgcactaacggcgtctgtgcaacaccgatggatccttccgctacacagacgatgctctgtcggccacccctgtgggcaagggacatgcaccaatgtcatcgaggcttcgaatgtgcctgtgctgacggctttgagcctggcctcatgatgcctgcgaggggagctcccgggaaactgactctgcagaaagggggaagcacaggcactgtggggggtgcccagaggagaggagaactacctccagaggccgagtctgagtccctgcagagcccagcccagcaggagcgggaaagggaggactcgagccctccaggtgtctcccaaccgcggcctctagggcaaggggcagcgcattctgttggaacctcggactgcagtgccaggagacctggacgaatgcacctccggcagcacaactgtcagttcctctgtgtcaacactgtgggcgccttcactgccgctgtccgcccggcttcacccagcaccaccaggcctgcttcggtagtgacccttgcccctcaccgggagatatcgacgagtgctcagaggagcccaacctcgcctctttggcacctgtaccaacagccctgggagcttccagtgcctctgccacctggctttgtcctctctgacaatgggcaccgttgctttggcctcccagccagcacccctactgtctcagaaagggccttttcccctgtttccctcacctgcacacacctggtggaactggctgcctgcgaacaaggctcagactgccttgagcccccaaacaagccttaccttcatgctccccccgccctcaagccacctgttccctgccttcacggggaggaagggttcccactgcctttgctttggtccagatgcatagtggttgcccagcaaccggaggaggagacggacggacggacggaggacggaagacggacgacgaacgacgacggacgggaggacgaggacacggcggccgacaacgaggaggagaaggaggaccggaggagaacgagcgacggggacgacgacgcccgcgaccccgccgacgcggacgacaccgccgacgcggccgacacagtacatatgacaacgcgaccctga

SEQ ID NO: 115696 - DNA, 667 bp, Homo sapiens
ggtaaatggatccttctatgagatcttgcaagtggactttggaattgataatagcagtgacctggctggggcccagcagattacctggcaggtggagtacccgattgaggactccatgagtgagctggtcgtctccgagatcttcgtcagccagacaaccttcgtgggcatcgtccctcttgccatgtcaagctcaggggctacatctgagatcagggtcatgggtgagattccagagcctaaattccagagattccacggagacagtgaggccttttggaaagtgattagccatgagggctctgccctcacaaatggatggcttccttataaaagggttggaggaagctggcttaggcccctgtgcctgtcccttccgccatgcgaggacatggtgtttcgtcctccctggaagacgcagcaacaaggcaccatcttggaagcaaagagaccagatcttcagcagacactgaccttgctagggtctctgtcttggccttccagcatccagaacttgaatgaaaagagagaaaatggaatggatgaaagttttgaagttgaaactattaggccttggaaaccatttatgtctaagatttccatttctagcagagcagcacagatggtcaaaagcttcaaaaaccgcttcttgaaaagggtggtctaa

SEQ ID NO: 115697 - DNA, 339 bp, Homo sapiens
atgctgagctcccgggccgaggcggcgatgaccgcggccgacagggccatccagcgcttcctgcggaccggggcggccgtcagcggctccctccccgaacagctgctgctccagggaggaagcggcgcgggtgctgtccagcttcccggtgctgaaaaccggagggctcgtcatccaccactaccatgtaagggccatgagaagggctcatcctggcgcagcgcggacatggaggaggacttattccagctaaggcagctgccaaccaggcatgagacaattaaggacagcccctatgctccagagaaggatgaaattattcaaacgaaccgaacctaa

SEQ ID NO: 115698 - DNA, 434 bp, Homo sapiens
tgtcgtgttgaggcgccggctttcccgggtcttctccttttgccaccgctttactgcaaaactgacgggcgcaaaaacatgagtgactccgcgggagggcgcgctggtctccggcgttaccccaagctcccagtgtgggtggtggaggatcatcaggaggttctaccctttatataccgggccataggctcaaagcatcttcctgccagtaatgtaagttttttacatttcgactcacatccagacctccttattcctgtgaatatgccagcagacaccgtgtttgataaggaaacactctttggagaattaagtattgaaaattggattatgcctgcagtttatgctggccatttttcacatgtaatatggtttcatcccacatgggctcagcagatcagagagggcagacaccactttttagtaggcaaagt

SEQ ID NO: 115699 - DNA, 1392 bp, Homo sapiens
atttggcaccagttttattgagctagtttgttggccatgcctagctgagaaatagagaagtggagggagatggggggatgggagagcttttcctcatggcacactctgctccaggagtctgtatacaggagtgtggagaaaaggaagtgttaccttgcaggaagttgcccccaaagcaagggcaggaggtgggggtgggggacttggcctctgatggaattctggaattctgatgagagaggtgctagcctgacctgaacaggagatgctgacaggcagtgctgggcatgttgcacagagatggctggttacacagccccgtggcaggatcccagagtgccgagaccagctgggtcgtggagaccctaacccagtggcgctagaggaattaaagacacacacccagaaatacagggtgtggagtgggaaatcaggggtctcacggcctttcagagcttgagagccttgaacagagatttacccacatatttattgacagcaagccagtaataagcattatttctatagattatagattaactaaaaacactttcttacagggaaaataaagggatgggctgaaataaagggatgggtctggctagttatctgcaagcaggaaacatgtcgttaaaggcacagatcacttatgctaatggtttgtggttccaggaaacccctttaaagcggttttcccgccctggggtgggccagggtgttcctcgccctcgttccagtaaaccccaccaacctttcaggggtggggggtcatgggccattcaccaaacattgttcacagttgcttgcaggagatttttgttttatgggcccagttttggggcccagtttatggctagattttggggggcttgttccccaacacccagagatttcccccaaacagcagatgacttttgttagtcttcaaggaacaaaactgcctcagcggacctctgctccctgcccacgatcattacccccaaaacatgccggcaagtctctgctccctgcgtcggcagagggatttataagccctctcttataaatccctggtttagcctttgttttgtgactgagtccaccgagatccttgcaggagaagaaaatttgcaggcaaatgaactaaatgtctcttccctgaacaactccccttctggggggctgaggaaactgtgaacagccctggtttgtcacacagcacgatggccaccacactgaagcagcagcaagcagattcatggaaggtgtgctgagaaccagccacctgggagccctactgtccctgggtatcctctggcttctggctgcaaagctggtcttttttttttttttttttttcattgatatagggtcttgctttctcacccaggctggagtggtggtgaaatcacc

SEQ ID NO: 115700 - DNA, 171 bp, Homo sapiens
atgaaaaagcacaggggaatgcagggaaaaggtgggaaaatgggttctcgagataagggtggggtgtggaagatgagaaccctgtccgagagcctgcgtccacgtctggccacagcaggaggggcagccatgagtcctgcactctccaatctgcccacaaccctggggtga

SEQ ID NO: 115701 - DNA, 569 bp, Homo sapiens
cgggattgacaaaggtgtgggcccctacatgctcctctacaggcaaagaatttccacagtaggggcagaatttgaatgccgcttggatacttttgccacagtctggacagaaggagatcatgctttatgaggtcacggtctggcccttggatttactgggttggaaactccatcttgacagcgacctcagcgcaggtggggcgattgcttaggcgacgacaaaagcctcccttcggccgcacctccatagaaaccacgggatgacttagacgccaagtttcacagcggagaagctgtcgaacttcccacaagttccgcccatctccgccttagccatgcccaacacggagcccaaggtggcttgggaagctcaagaggaggccagtgaaccccgcgacccggagccgctctcattccgaaccccgacagcaggggcctccgcctcccacaaacggtcgtgctgacgtcacggacgccccggccgagctgcggctagggggtcgggggacgtcccctcgttcgcctcgcttcccctcacctctgtacttggggactggggtgggacgaaa

SEQ ID NO: 115702 - DNA, 912 bp, Homo sapiens
atggagaggctcaggtggagaggaactgaggccctggccaacagccaccatcagctgctgggtagggatgattatcccatctttgaaacctacaaaatgatgctcaaaggtgacaattctccttcccccagacctgactccactcacctagaaaacatggggacgcagctgaaatccagaacccaaaagcccatgttcttcacctgtgccaatttatacaacgaaaacgcaaaaccggactgggttcttggggcacagaaaccacgggatgacttagacgccaagtttcacagcggaggagctgcgaacttcccacaagttccgcccatctccgccttagccatgcccaacacgagcccaagccgctttgaacgccttctggttctactgcgcatgtgtcagtgtcagaccaatcggatgcaccgtgaggtacctctccaccaatcagaggtcacattacctaaactctgcctcaactccgccccttacttccgcttgttttctcagaaacccgtccaacgcgtttccatggcaacctaccgcttgctcttcggaaaagagctgagagtatatgagatgtgggcagaatgtgatttggtactgcagacagggatctcaagctcagctgtctgtgagggccaggcagatgcatacaggaaagaagagaactggtccagtggtagtggagttgtcggcaaggagatcctgtcctcagggcatgtacaaatgtgcatgcactgctgctggtgcaggggcaggactgctgtcaatggcagcagccccagcatgcagctctcaggctctgggaaatacatgctttggcccctggcagaaacagagtttcatcgagtcccagcactgatgccaacagggggccaatgtcctctgcgggagatttcactcggggcttga

SEQ ID NO: 115703 - DNA, 462 bp, Homo sapiens
tttcgtggaatgagcggttggctcgggctggtttcctccctccaccgcctgcttgtttcgccatgcccgggccggacggtggggctgcagcggcgaaagcgactgaagtccgggagcagtcgcatgagcttcccggtcaccaggaggccccgggaacagacacctcaccctgacattgtggcagctataccatctggaacagatgacttccaaggacaccgtagcaaagaaaaagagaactggaagcccatgtgccttaatcgcttcatcctagaggaatgtatagctgctgatgattttcgaattcgtggtctggaacccaacccacaataccttcaaggaaagcccacccaagtctcagagtctctgaggcttttgcgaaatgacactcaggatcccaacatcaaaaccaggtacatcatgaatcttgcaaaaacaatccagagaagtcctgacaagtag

SEQ ID NO: 115704 - DNA, 436 bp, Homo sapiens
ccagccctgatggtgacaacacaaatggttgtgagtaaaactctccttgccccaaatgtcatcctccctgtcccctttcaaagtaatctgaccagtccttgctgcaggcccaccttggacctgcacctgcagaaagtgccatgtggggcatcaggatcagagccacccagccagcctggtctatggaaaggggccatggagaatggtgagatcacgtacggtctcccaacagctgcaatgtgcaaaggaatgtgcgcctgggagagcccttgccggggtcaaccctggtccggcagggaagccgctccagtggtgggaagtccaccaaggtgagggatcctggttccagagccttcttcttcatgaactcatcaaccttctaggagctctgtattcttcatctaagtacaataacaacaactgtttttgtacgaaa

SEQ ID NO: 115705 - DNA, 1001 bp, Homo sapiens
  misc_feature (1)...(1001): n = a,t,c or g
tttttttctttcctagattgtattaagaaattaatgtagctgaatcacatcctatttagtttccaggtcaatatgaaaagatggtaatttttctttgaaacttacaagtacaatctgcaaatacataattttgagaataatttaatatgttgacttcaagatacaactatattctatataaggtacaactctatatgtcagtattttaaagaaatggatccttacaagaccaaaataacccacaggccatgaggttggtttttccttttttttttttttttttgtttaaacaaatgtgcaccacgatgtttcaacaagacaaatgccataaatgtgaaagctgcagtttgcaatataccacatttagaatccagcgaaaggtgaatcaaacagaggtggtagtcattctaattaaacaatcaggtaacttcaccgacaagctggatttgcagcatcaaaaagtgtccatttaagtttcctttttcttgatgatcaagaggggcccacattggtctccaggtcctcctcggtaaggttttggtggtgagcccccatcacagaaatgggaactttttggacctcccaacaacgggcagttccacaagcttatatcttcccaaagtccgtccatgtccaaaagcaatgtactatcttggggttgtccttctggatgtgaaggtttatcatagctttatttcgatgatctttaccataaaatcttttgtaagctagataaccaattggcagctgctcccagcagcaatggtaactgctgcgaaccattcaacccagctccaggcaatgttggagagaagaaagttctgcataatctggttagcctcagcctcagaggagagttgtctattcccagcatggagtgggctcgtacgctggaactggaagtcagactcatggcgccgtcgcttgcaaggcgtgtgcactaggataccgagctcaaacgggttcgcgcggccggcgagagtaaannnccagcgacgaaa

SEQ ID NO: 115706 - DNA, 701 bp, Homo sapiens
gagtagaataagtccagtatttatccctcttgatctccgttgcatggccagatatcagggaaacagctcagcaatgggaaaacgtactcaggtggtcagtttcaggtatctggggagatatacagacggctgaaccagaattcttaataccattacgttttaggtatagctcatgccctgaggatttctattccaccacagagtttcacgtccagctccccggaatccgaggttccctaggcacgcctcctaatatcgctgccaaggaccaagagcctgtgcccttcaacctcactgttcttaaagcttctcggctcctgagttttacagcgccaaccccttcctccgagtgtgggcacgtcgttcccgtgcggtccggcggagatgcggcaacttcgacaagaccccagccccccgggaggcgccgacctccgcccagcagccccagcccggccgccagctcccgcagcccggggaaacggcgagagatgccgctcacaaccaacgacagcagccggaccaaacagacgcggaaactcacgctctctacgacccgcctgcgtccccacgtcttcgcgcgcacgtggtacatcacgcacgttccccgatccggggcgccccggattcctggggccggccactggccgctgactacgcgtaaggcaaacaagcgacctgcgttcaagggacccgaagactag

SEQ ID NO: 115707 - DNA, 572 bp, Homo sapiens
  misc_feature (1)...(572): n = a,t,c or g
tttcgtgagagcnnnnatttccgcgtctgtttggtccggctgctgtcgttggttgtgagcggcatctctcgccgtttccccgggctgcgggagctggcggccgggctggggctgctgggcggaggttcagccgtctgtatatctccccagatacctgaaactgaccacctgagtacgttttcccattgctgagctgtttccctgatatctggccatgcaacggagatcaagagggataaatactggacttattctactcctttctcaaatcttccatgttgggatcaacaatattccacctgtcaccctagcaactttggccctcaacatctggttcttcttgaaccctcagaagccactgtatagctcctgccttagtgtggagaagtgttaccagcaaaaagactggcagcgtttactgctctctccccttcaccatgctgatgattggcatttgtatttcaatatggcatccatgctctggaaaggaataaatctagaaagaagactgggaagtagatggtttgcctatgttatcaccgcattttctgtacttactggagtggtatacc

SEQ ID NO: 115708 - DNA, 420 bp, Homo sapiens
tttcgtagggtggctttctccggctggcatggacttgagcagaaactcattgccggcttcctccttgcacgagcaccaagtgattcccaggtcccccatcctcccctgggacatcgaggacacacaaaaaccttgttcaccctccactgagagcggggctagagatggatgctgagtacaggaagggtgtgtgaggattcctttggctccactcttgtttccaactattgctggtcctaggcgcccagtcctgagcaaccatgacgatggagactctccccaaggttctagaggtcgatgagaagtctccagaagccaaggacctgctgcccagccagaccgccagctccctgtgcatcagctccaggagcgagtctgtctggaccaccacccccaggagtaactgggaaatctaccgca

SEQ ID NO: 115709 - DNA, 749 bp, Homo sapiens
agtactctcctggtctagaaatcaagtatttaaaaattagcataatgttaatctctatacttttcaaaaaagattggatcaaactgtgtcaaatagtaggtttttagtgttgtgatcccggctgcatttaattctataaaacaaagttcaaactaccagtatgtgtggtttttgagggcatttatccacatctaacttgcaattagacttttttttaaagtacgtcccctgacattaactgttcatacatccgcatcaaaacaatacatcgcaggggcgtgagggagaggggagacgaatgtttactcttggcaaagaggattctaaaagacgggaaaaataaaaacgagcgttttcagagtatcagttcttcgttgccaacaggctttttaccagctcaccgctacccccaaactccctcagcacgtgaatgttacgagagttctaaaagcatcataaaacgtttggcacacagtgcctggcattacgcgcctctacatacgttattctcctacccgtcttcagaccttgccagggagagaaataagagccgacgcgaatttagacgtaagacaaacaaaacgggcttctggaaaccggccaactgtgccaggggggacgaatgccccaaacagatggctcggagaatgatttcggcggggagcgcggtctcggacacgcacaaagcacgagaggacggttctgtccccgccctcccgcacgaaatcgtcgtcccgggaagggaaacc

SEQ ID NO: 115710 - DNA, 1949 bp, Homo sapiens
ctgcaactcagctgatggcatgttcaagcttccagttgcccaagtcccaaaaacctacagagtttagggaaaagttgaagtgtgaccccacaatgccagctacctagaaactaaggtagatcctaggtactgggattaaagatatcataaaatcattaaaatgttttctgaaatgtttgaagtttaactcattttatttctaggatttggatttcaacattttaatttctttggaatataagtcactttttgcaagctaaaaaatagaatcaaactaaggtgatctagtcctctaggcatccaggctgatccttcggaatcatcgagcagaatgatgacatactacaaggtgctagcaatacggctataaactctaaataataaccactacatgtttcattaggaaacagccaaaagtccggcccgttaaagggaataatctgcaggaacatcttgatttacaaggggacaaaatgatgcaaaattatatggctggcccaaccctactgggtggaactgggatccaggaatgggtcccaagggacctgttttaaaccgaggggaggtattttaccatttttggaaaaactttgctctgcagggataaaaaaattccctggttggctgtcagtaagaaagcaagtaaaaaaaatattccagatgaactccctgatctttgattttactaaggtcttccactggaacatgaaggtagggataagtgtacaggataatatactcagatatttttaaaataaattacttaataataagaaattaagccaggccacattgttccattagctacaagagcaagataggcaatgaaggctatgtaaaagaaatgctcagctttacagagggtggtggcaggcaacacttttccattacagaataacctctattcttccatgatacatattcctgtggaaaaacttgtcaagggcccccagggatgaaaaaaatagagcttgtccctaaattagctaaactgtaggttcaacttaaacatctttggggaaggaccccaaaaaatctggcccattattttccttaaaacatcctgcaagctgcaagaaattcccttagtccctccagctaatagtttctgcctagatatccttaaagctgggaacagttcccactgtgaactcctcctcagctatggggtgggtgctagtcattcaaaagtctggaatgttcatccataggaataaaccacggtaaccctttggaatgccataattaaccgaatgccgccaggtggtaaaatcccgggtaggaacaccaagaatgcccaatgatcagcaactggaacggcccggtctgccccccctttgctgatgtagcctgacagcaggagggagccctataataatgaagaaaggcgcccaatcaaaaacagcacagtggcaagtgcgatggcccttataagggatccttaaggaggggttttcctttaaactgaaaggtcaaatgttacccatcgtctgtgctggagagccttgaaatatttcactttactactggggattccagtagcccaggttggtacgggacggcatcataacacgctgacacaggtcccctgacattaactgttcatacatccgcatcaaaacaatacatcgcaggggcgtgagggagaggggagacgaatgtttactcttggcaaagaggattccgtcttcagaccttgccagggagagaaataagaaccgacgcgaatttagacgtaaaacaaacaaaacgggcttctggaaagaggccaactgtgccaggggggacgaatgccccacacggatgactcggagcttgatttcggcggggagcgcggtctcggacacgcccagagcccgagaggacggttctgtccccgcccggagcgccgcgccaggccgcccgcacacccagagctcgcccacggttggcagcgcccaaggttgcat

SEQ ID NO: 115711 - DNA, 575 bp, Homo sapiens
gtgaccgaactagcagttgcccagtgatcttcatattagatgaatttgatctttttgctcatcataaaaaccaaacacttctctataatctttttgacatttctcagtctgcacagaccccaatagcagttattggtcttacatgtagattggtgaaaagcccagaaggaaaatttcagaagaccagtactggagctgtcagaatgcaaccaaaatcagctgagttgaagtttgtcaccaagaacgatggatatgtacacattcacccttcatcagtgaactatcagatattaagaaccagaatagccttgtctttgtttctctttcctaggaaaactcaaaaagaagagcacagctcacaggccgggcctgcccaagcacaaggaagtccttttcgttctatcaatatccctgagcctgttcttccaagcgaagactttaccaaccttttgccttctcaggcctacgagaaagggatgttagaacagatattaaaaaatggtaccgaagaaactggctttccagtggaagtcagagttttggttattaacttacattcaactcaggaaaagtaa

SEQ ID NO: 115712 - DNA, 2238 bp, Homo sapiens
gccctagcctccgaactcaaaactggtttcacagaagcaatgcaagaactgtcaagaattcaacatggagaatatgctttggaagaaaaggttaagagctgcagatgttccatggaagaaaaagttactgagatgaagaattcattaaactatttcaaggaagagctgagcaatgccatgtcgatgatccaagccatcacttccaaacaagaagaaatgcaacagaaaatcgagcagcttcaacaggagaagcgaagagaatctcgaaaagttaaagccaagaaaactcaaaaagaagagcacagctcacaggccgggcctgcccaagcacaaggaagtccttttcgttctatcaatatccctgagcctgttcttccaagcgaagactttaccaaccttttgccttctcaggcctacgagaaagcccaagagtccagatctgttcatgtaggagacagtaatgtaaaaggaatgatgggtcctggagtgaacccaacaactccagaagcagaagaaaacctcaagtcttgcctctcggctgatatccagtccaagggccatctcccatctggcatgtggaggcagcctaaggatggtaaagaatggggtgaagaatacgtcacaaaagaccacccagataaactcaaggaggctggccagggtagacacagctccttggaaaacgttttatgtgaaacctccttagctgctaaaagacagactgtggccctggaactgcttgaatctgaaagaaaatatgtcattaacatctctctgatcttgaagataaaagccacattccaggggtcagatggaaagaggaattccaaagagagaagaccagctgaaggaaatacaaagcagaatgaaattgttccttttctctatcggcatttttctccatgcaaagatgaaaataagtatattaacatttactatcggcatttttctccatgcaaagatgaaagtttgcttgttgggaaagcaccccagttgtccacgagtttactctcatttgaccctggggaaatattcaacctcttccctggctctttacggtacctcgtccagcagcacctggatctgcttcacgcactgcaggaaagggtcctgaagtggccacgccaaggcgttcttggagatttattccttaagttaacaaatgacgagggtgatgaagagattaaatctgacatctacacgttgttttttcacatagtccagcgcatccctgaatatctgatacatctgcagaacgtcctgaagttcacagagcaggagcaccctgactattatctactactggtgtgtgtccagcgcctccgagtatttatctcacactacaccctgctgtttcaatgcaatgaagatttgcttattcagaaacggaaaaagctcaagaagtcatccatggcgaagctgtacaaagggctggcttcccagtgtgccaatgctgggcaagatgcttcccccactgcaggtcctgaggctgtccgtgacactgggatccactcagaagagttgctgcaaccctacccttctgctcccagttctggccctgccatcacacatctgatgcccccagtgaagaaaagccaacagcagcaaagcctgatggagagcatgcagcccgggaagcccagtgactgggagctggagggcaggaagcacgagcggcccgagagccttctggcaccgacgcagttctgcgcggccgagcaggacgtgaaggcgctggccgggcccctgcaggccatcccggagatggacttcgagtcctctccggcggagccgctgggcaacgtggagcgctccctgcgcgccccggccgagctcctgcccgatgcccgcggcttcgtgcccgcggcctacgaagagttcgagtacggcggcgagatcttcgcgctgcccgcgccctacgacgaggagccgttccaggctccggccctcttcgagaactgctcgcctgcctcctccgagtccagcctggacatctgcttcctgcggcccgtcagcttcgccatggaggccgagcggccggagcacccgctgcagccgctgcccaagagcgctacgtcgccggcgggcagcagcagcgcctacaagctggaggcggcggcgcaggcgcacggcaaggccaagccgctgagccgctctctcaaagagttcccgcgtgcgccgccagccgacggcgtggccccacgcctctacagcacgcgcagcagcagcggcggccgc

SEQ ID NO: 115713 - DNA, 933 bp, Homo sapiens
atggctctaaagttaaagagtccccagagaaaactaacagtacatgaaataggccctatgtgggcaaaaggacaagctgcagaaccagttaagacagaagaggcagcccaagtgaaatacaatgatcccagaatctcacctctttggtatattgaccatgaagggcatattgtggatggaaacctgaagtctatcatgaggctggtccttgccttggcagctcatttcaaacctggctccagcaggacggtgaaccaaggacgggactccagagcccctctgcaaagtcaccgaccacactgtgccactgctgttgcccagggagcagctgctgctctggccgatgtgtgtcatgacatgtcccgatcaggacgggatgtctttcgatatagacagaggaacagcagcatggatgaggaaattgagaatccatactggagtgtgcgggccctagtgcagcagtacgaagggcaacaaaggtccccgtctgaatccagctgctccagcctccctctggtgcttttcggcacccaaagtccagagggagctaaggcagcaggggctggcatatcagtgctgccccaaccctgtgcacacccagccaggttgtggcagtgcccgggcttggcctcaactttgctccaagatcggagcaggtgcagggagtcgggagaggccaggcagcaggagcaagcatttccaagcctagcccctgagagtgcagcgatgcctgggtccacagctgtggcttgggcagctgcagctgcagctatacctgaggggttggggctcctgcctgctcctggcccccaagagcacagggatgcctggtccacagccatggtttgggtggctgcagctgtgcccgggaggccgggactcctacctgcttctggcccacaagagcacagggatgcctgggtccacagctag

SEQ ID NO: 115714 - DNA, 1542 bp, Homo sapiens
atggcagaaggcaaggaggagcaagtcacattttacatggatggcagcagacaaaaagagagacagagtttgtgcagggaaactctgcctcataagccatcagatatcgtgaggcattgtgccaaggtcagtgcttacaggcacataaataacggacacaaagtgattgctgctacaagagagaaacgtttaaaaaaaaaagctatttatgcagagaaggagcaacaggatggaaggctggaggaatcaggaaaaggtcaacagggaaggagacatctggctggttctttacggatgtctgccaattgcagagaggacaagggcagagatgcttacacagtcattgatgttgcctacaatcctgatgttcttcatgcagcagaaaaggaccaagtgaaaaaaaatcagttaattcagatggccatgaaatgcattgaggagaaattccagttcaccctctcacactcttaccatattaccaaatttagaataaaaggaagcattcaaagaatgaaacaaaatctgatgggaatccaaactgattccatagatttaagagaaaaaatgagaagggaactaactcttggacagatacgaagcagtactatgagcaatccagatcactttcctcaactgttactgccaaaagaccaagtttcaggcaaagcagtgtgtctgatagaagagatttccagtactgaaatccaggtggagatgaagatgccagcctatgaactaaaaattgtgcatgatcacagtgagaaacctctgaaaattgagttgaaagttgaattacctggtattaattctgtctctctctgtgaccttagtgtttctgagcaacagctgcaggcctatgtggcctgggtgaatgcacagctgaagaagaggccagcagtgaagcctgtgcaggacctgcgacaagatctccgggatggggtgatcctggcatatctcatcgagattgttggcccctctggaacactcctgccccgtagtgcccctcgtccccgctccgtagagaaagagcgtgcgtgccgcgcatttctggcctggggagcgggtggagtaaacctgcgggaaccattttacgacaacgtgcggctgtgcggtgtggctgacggcaacgccgctgctcttggagagaatgaggtaatgcattctgaagcaacccagatgtcaccatctgatctaactatatttggtttgcagaaggaactgctgaaatgtaaacaagaagccagaaacttacaggggataaagatcaccacatgtcaaaagaacaccaactggggactttcattcaacagacagcacttgacacctatgatacagcttggatgtctgtcccctccaaatctcatgctgaaatatgatccccctgacttccgtttccgggtcagagccatggtggtggcaacttcaagccctgctaaccccatggtgttctttgatgtcagcaatggcagtcaggaagttggccgcacaaagatcgagctctctgcagacgttgtgcctaagacgaccgagaactttgggtag

SEQ ID NO: 115715 - DNA, 849 bp, Homo sapiens
atggctgtggaccaggcatccctgtgctcttgggggccaggagcaggcaggagccccaacccctcaggtatagctgcagctgcagctgcccaagccacagctgtggacccaggcatcgctgcactctcaggggctaggcttggaaatgcttgctcctgctgcctggcctctcccgactccctgcacctgctccgatcttggagcaaagttgaggccaagcccgggcactgccacaacctggctggcccatcaaaaccccagactcaaccagacttggaaaatgatgggacgacctgcctgcggagaggagctacccactccagggtctcctccctgctgaatggcaacaagaaggagagaacagaggagagaagagctgcagagagaagagctccctttggggagcccagacctaggagctccccaagccagggctgtgacaccctcttttgggctctgtggttcttggagtctccaagcttccaggcgccaccacattccctggtgccagctgtggaagctgcttgcagagaccctctgaagcttggggttcagcaacagctgcaggcctatgtggcctgggtgaatgcacagctgaagaagaggccagcagtgaagcctgtgcaggacctgcgacaagatctccgggatggggtgatcctggcatatctcatcgagattgttgatcatgagagggacactaaggagctacagcaaagccaactattggacaaagggccaaagcagatactgggaatgggtggaggatcagtgaggcctctcaaggaggatcttgcaggcatccagtcagctctgaaggacaacggggtcccgagaaggggggtctag

SEQ ID NO: 115716 - DNA, 684 bp, Homo sapiens
atggtggcggctatggtggcagcggctgcgatcgatccgaaggggcccctccacgcaccacgcagagcagaggagggcgtggtgtcttgcaggccggggcgcaggcgctggcttttgaatatccctttaaagactaaaggtaagcaggtagggaagcgtaagaagggagtacctggagagattccccagtccagggccattgccattttccaggcagtgaccaaggtttctccttgtatggttcccatgaaggtcatcaatgccaagctcgatggcttttactcattccccatctttgtcggcactgatctgttgatgctgcagtcgaggagctttagcttagagaggttaaatagcatcctcaaagtcacccaggtcatgctctgcttctggaggggctgggatgcagcatgggagtgtgacctcctgcgcacggactgcacgggccgcctcgcagccggcatgctgttccagttcctgcaggccaccgcccaggaagaagggatctttgagtgtgcagacccaaagcttgccatcagtgctatctggaccttcagagacctaggggttctgcagcagacgccgagccctgcaggccccaggctccacctgtcccctacttttgccagcctggacaatcaggaaaaactagaacagttcatccggcagttcacttgtagctag

SEQ ID NO: 115717 - DNA, 318 bp, Homo sapiens
atgccttcccgcgggcaccctcagctcccctcaggctgggcccgcaagccccaggcttcggctactccggacaaggagcgggtgcgcggactgagaacaggcctggccctaaccctaacagcagccgcagctcatctcttccgtaaggaagctggaacccagggcttcctgttcctcaccgccacaatagagtcccgccccacttccggcgacgtaatccaatccgaggagctcttcctccccgggagcccgatggaaatccggatacctgaaaacgagccggagagacttgattgggccattcacgcctcaggatga

SEQ ID NO: 115718 - DNA, 531 bp, Homo sapiens
atgattatcatccctaaaaacctcaacatgtgtgctcttcagagcaaaccagaatctagaggatttggagaactgtcacaaagaggaaatgtaaaattcaatgttgagaccttgtgcagccatcagaaaaaaatatcaagactttctgctgccatacatcagctagatatatcagatattcgaccactcacggtgttgctgactctttgtataacattggcacttctgatgaggggggcacaacccgggatgaactcaggcaagattccatacagaatgtttattcctaatagccatagtgactcagaactcatgtcattccaagatagtgtaagacacaggcgaggtggctttcaaacttttgactgtgactcacagcaagaaacattttggacctggagcattggtaagcgtcacactgccaaagtgagagctgctggagaactcataatcccaggaacgcctcttctactctccgagtaccccagtgaccagagtgagagaagctctgaacgagggcacgcggcttga

SEQ ID NO: 115719 - DNA, 393 bp, Homo sapiens
atggtcacggccacttctcttgcaccctccacacaaccctgtgccgtaggcgctgctgtttccccagcagcaataaccagagagaagggccaatcatcagatctcacctccaagcgaataaaaaccaagaaaagtacaggaagtagcagcaaccaggagggcaaacgccctggatgttccatgaacctgcagcgagccgagtgccactgccaagttccaggggccaccactgagtcactgcccgaggggatggctgcccatgagtgccgggaccaggagccctctggatggccgccctggctgctggcttgtcccttggaatcagatggaccaattccaccagtgttccagagaaatgaacaacacgtcctcccgcaaaaggaccctgagtag

SEQ ID NO: 115720 - DNA, 249 bp, Homo sapiens
atgacggccattatcatgactgaggtgtatgcagctgtcggggattacggcgacttcagaatttctggtgggcagggctcaaaggcagcaaatcacactggaagtcgagggttctgcatcgcctcgaacccgcaggccgtggcgggttctcctgaggaagcagggactggggtgcagggtgaagctgctcgtgccggccagcgcctgtgatcggactccaggaaaggcggggagcctgccggctactga

SEQ ID NO: 115721 - DNA, 498 bp, Homo sapiens
atgaggacaggtactcaaagaacacaaattgatcaggtggtagtatttgccttcagagttgggcatgcagccttcatcacattttgtgacagaacagagggaccgcctgcagttctgagactgcacgtggctgtccaggtgctgcaaattctcgacacagactccaggaggcgagtatctccaggacggccggggctgcggaagccctggagcagcttctatactttagagctttcatggcacaaatgccatgaaagcttgttaaaaacgacccgcgtaccccccttaggtggcaggtctcaggtgtggcccaagtttcaaggtgaacaagctcgtttcactacagggaagtttgaagggtgtccaccaatctggatttcctactccttcacaccagaaaagggtgataatactgcccttactaggccctggaactcagattacatgacagtgagtgtggctctaaataccacctatgtgcttatgactcctaaatga

SEQ ID NO: 115722 - DNA, 471 bp, Homo sapiens
atgacctccggggccagcctggtcctggccctgcctctgcagccccacctggcagccaggcctgtccatgcttatcagtgcctgtgtttgctcagcatggggtctgagtcctccattgcatcctctttatcctccagcaaacagagagcatggagaaggcaccacggccttaactaccttgtgaagagtgacatcaccaaggagatgcctgcgtccaacaaacctagcattctccagagccccgtgcctgaccagtgcttggagcccatatgtgcttgtgtttgtgtggccgccagtctaggacccaacttgtcttgccaaaggtccaagttcctgagccccagcctgaccccggctctgacaccaagctcagagtggcctttgtggctcattggcaagattcagtctcttccacttctgtacattgccattgtcctcactgaggtctgggtgcatggagagcagatatga

SEQ ID NO: 115723 - DNA, 497 bp, Homo sapiens
atggggctgcagttgggagccatcacccgctgggggctcacagtgagtgcagcctcggtcatgggctctgctgacgcacctggggaaggagacggcagcccgcctctgatggctcgggctgcactgggggagatgttgctgatggcccctccagatgtgcaggctgcgtccctgctggctgtgctgctgctgctgctggagcgcggcatgttctcctcaccctccccgcccccggcgctgttagagaaagtcttccagtacattgacctccatcaggatgaatttgtgcagactcccaatgtcatgtctttgaattttctggaagaacaacacagcatttttgaaaatgtgattcctgatcattctgcagctgcccggatggtcagagtcttccaaatacctcccatcatcctggccgaattggggagcgatcccacgaaaggcaccgtgtgcttctacggccacttggacgtgcagcctgctgaccggggcgatgg

SEQ ID NO: 115724 - DNA, 643 bp, Homo sapiens
cggacgcgtgggcgtatttgcgcgtatgagatgcattgtctcttcctctggagttgagctgaatgaatacctccgaagccgttttgttctccaaatgggaatagctccactataccagcctcggtttccttccgggggacaacgtgggtcagggcacagagagatatttaatgtcaccctcttggggctttcatgggactccctctgccacattttttggaggttgggaaagttgctagaggcttcaaaactccagcctaatggatcccaaactcgggagaatggctgcgtccctgctggctgtgctgctgctgctgctgctggagcgcggcatgttctcctcaccctccccgcccccggcgctgttagagaaagtcttccagtacattgacctccatcaggatgaatttgtgcagacgctgaaggagtgggtggccatcgagaagcgactctgtccagcctgtgcctcgcttcagacaagagctcttcaaaatgatggccgtggctgcgggacacgctgcaccgcctgggggggcccgtttggcctcggtggacatgggtcctcagcagctgcccgatggtcagagtcttccaatacctcccgtcatcctggccgaactggggagcgatcccacgaaaggca

SEQ ID NO: 115725 - DNA, 789 bp, Homo sapiens
atggggcgcgagcgcgatccgagcggctggacctggctgctccgctgtgccgcggccgcttgcgccctacttctgggctcccagcgccaggaaacccagctgctcctctcggagcactcggaccctgacattgagcaccgagttaggggagaaccaaaaaggactaccaggtggttaggtgttgagtgttggaggcaaggagtaattaacattgagacaaaagctcaagaacaactccagcccaaggggaaaaaggtttccagtcttttgaccgcgcttccggggtctatagatgagctcagtttgaaacgagatgtaaaggagtcgatttctttgccggcggttcccttccaaattgagttacttcttataagcaaaattaatatgcaaacaagactgctgcagctgccgctgaaattcgctgtggccgctgcctcttcccgctttaatcccagacctccagtcattgggcagctcctcagaggcaagaagtcaacaccatggcaacccgacaagcctatcaaatcaccggctggcgtgacagcagcaacactgcaggcaggagtgggctgggcggaagagcagagtggccactgcgctcaggtacacagtctgggagtggacagcagctgctggtctccacgttctggctacacatatgtgcaccacccagtccatacccctaccttatgtgccctagtaggttctggaggagaaaggggaggaggagaaggagagaagcatataggcttggaggaacaggaaccgcagaaaagagttttaaactaa

SEQ ID NO: 115726 - DNA, 444 bp, Homo sapiens
atgaaaactgctgctggagctccagacatcacatccatgtaccaagaaacagaaaagcagaaggtgcctctgcagcagcccctgcacctcaaccccttttcgcagccaactcccatggctcctcacggaaagggagctcagtggttcctactccaggacacttccccgagacttggcaaggtttgcaccattctgagacccgcacatcagacctccctgccagcctcccgcagccgccctggcttcagccgcccacctggcctgagcgctcagcacgtggactcgagctggctctgcacccagctcagaacacagctctcaactgtaagcatcagcaccaccccaagcctgaccattttctcacttactcccctttttgtaacatatgcagagttggagcgaacacctcagagaaaaagaggaaaagaaagagaagaaagttga

SEQ ID NO: 115727 - DNA, 465 bp, Homo sapiens
atgaaagcaggcagtttgacggctgtgttcaccattgcattgcccagggcctacaagagcaaccgacatatagtagatgctcaaatatttacttacacggatggggctctgccacaggcattggctataagaaggttggtctctcttagccatacgttgcgacagcaacaggaagagaaagatgcggcctcgttaaagcccattgggaaatgcacttctggtataggaacaaagaacaacaacagaaaaacccactcctttaaaggagcgagcctcagtgctttgaacgcctcctgctccatcacagtgactgctcaaggcaggacacctgatcctatcggaatccacccacggtctcctttagatgtgaagtgggaaacaaaggaatgggaagtgaaaggaaagataaattgggcagggaaatttgggaaggccatgaaaaggctctcgagctttgaaaattag

SEQ ID NO: 115728 - DNA, 948 bp, Homo sapiens
atgtgctgggaaggggagcccagaggaggcctgggcgagcagcaaagcttccctgaagtcacgtctgagctgagagctgagcagcagcctgacctgaccatgcaaggagtggatggcagttccgagtcgatggagcagtgtgtgcaaaggccaggaggcagaggcgaactctgtgcagataagaaccagccgctcaaccaggataagggacttgccctactgcggataagcagcagcttcggcctgactccagatcccaacgttgtggaagccggaacgccccgagaacaggcggagagcggagggagcaccgcagggcgccggccaggccacggactgcctgggcacaagtggtcctgccagtgtgtgtcccgtagcaaccccgatggctctgagacaagaaactcaagggtcaagttcatggaaccttctgcaggaattgagagtgaagtggagagagagtggtttccaggccagaccacgggtgcatcattccgcatccccatctgcaaaaatgagggtgctcctgccttccctgctggcacatgggacaccggggcaaccgtgagcctggccaaaaggcttttggatgccaagagcatgtggtcctggggaccaccctacagaggccagggcaggatcatcgccacctccatctccgttcctcacgaggaggtccacagtttctgtgtgcaacaggctggccctgtctgggagctgggcctgctggcagtttcctggtctatgaacatgggcctggctctttcccacttgcagggtgatgagaactcatccgtcgtcatccaccggagatcccagacccagaccccatcgaaagctccagggaacaagctgggcccagctttaaatgaactgcaggaatctagaggcccagctgcaggggccatctggggcttccctccaccagtcacagcagctgtttgttga

SEQ ID NO: 115729 - DNA, 401 bp, Homo sapiens
aaatacttattgagtacctgaacatgtcgacccatgttctagatgttgaagatgggaaaaacaaagttcccaccttcagagatattatagatgatattcagcacattttcctcacagcagccagagtgatcctactaaagagtaaacccaagcatgccacccccctgcttggtggcttccactgcacttggactcgcatccacacttactctgacgtgctccctctccaggctcccctccttgtttgccatgcttgtcagattgaacaccttcagttcctcaaacatgccgtattctcctcttctgtacaggctcttcaagacctccacttgtctcatagaaagatccttaaacgtccagtctcagctaaaacatctcctcctcagaggggccttccctga

SEQ ID NO: 115730 - DNA, 483 bp, Homo sapiens
tcattgttgcaaggcaagatccagaggtacaagcaacaaatggaaatgctgaaaagcttcaaaggaggagggcaaagatccccaaagaggtttggtttaagaaatgtcaagataacaggagatgcagcttctgccaaccaagaggcagcagatgagttcccaggtgccattaagaaaataattgaagagaaaggatacctacctgaacaggttttcaatgtagacgaaagtgccctattctgggaaaaaaatgccacaaaggacattagtaaggaagagaaggaatcaccaggatttaagagaaaactgtgttcagatgttgtgcatgacttcccagaatttacgacagagcctatcaaggaaaccatgaaagagaccgcagatatggcaaaaaggagcaggtggggtggggtgggtaaagggtttcaagatatggatcttggagaaattcaaaagctaatagacaccacaccagaggaataa

SEQ ID NO: 115731 - DNA, 1123 bp, Homo sapiens
atcctgtgtcatttattcttgaggaaaagacatggaagtataattttagacccattcctatggcaagaaaccctcataaatcattctgtctactcttccttccactcccgatgtcgcctaggcaactttacaggtacactgtttctgctgtactgggcatctggctctgctgaggagtggagctgagcacattctttcctcagttgtggtctgggaaactatactggcgcaaactgtattggtgggaacaatgcagtgttcagtcttcatggcaccttctcccttgctggagggaggccatctgtcaaccttccctgatatcatgaaggaccatccaacgcccagtcacacacaaaccttaataaccctcaaggacaagtggagcaagatctcagacgatctgttcccttttagttacaggaaacttgataatgaagatctccaccctggtcaagaacagaggaaagacctaatgcttaaaacaatacttcaagaaatgttcaacattccacgagaacaatatccacgaagctggatgcttcctgccctcaaatattggactccaagttcttcagtattgagactcagactggctgttcttgctcaagcttgcagacagcctactgtgggaccttgtgatcgtccagtttctggaatgtggaaattgctcaatcaacagttgctgactgaagggtggccagaaggaggtggcctgctgagacccaagggactggcacagtggagggctgggatgaggataaagcagctcaaatttggcagctcaaagctgtggcaagatccagaggtacaagcaacaaatggaaatgctgaaaagcttcaaaggaggagggcaaagatccccgtgagtaacagagctgacttccctaacaagagtagtccgtgtttaactctggcaccttcgagagcatcgaaaaacactagaaaactgtgttcagatgttgtgcatgacttcccagaatttacgacagagcctatcaaggaaaccatgaaagagaccgcagatatggcaaaaaggagcaggtggggtggggtgggtaaagggtttcaagatatggatcttggagaaattcaaaagctaatagacaccacaccagaggaataa

SEQ ID NO: 115732 - DNA, 177 bp, Homo sapiens
atggcagaagagtatgagatagccaatatgctacagcaagcttttgagatggtggcaggtactcttgccattgagaattctgcagaaaccttgaaacatcttcagaacatcaccacactgaataaaagtatcattcaaatgacctattatccccagaccatgaatggaactttctga

SEQ ID NO: 115733 - DNA, 249 bp, Homo sapiens
atgggcagttccctcacaacaaagtatctggccccagatgtcaaggttggcagtgccaatgttgaggccctctgggtcctctatcttcacttccaagtgaatgcgggaaattcctggattaaaaactatgcttatgccgaacaatctaaattcaatccccccaaggtgctgaagaagtccagcacagaggtgcggaggagaggccagccctctttggagctcagcagttcagcgtctttggacagctag

SEQ ID NO: 115734 - DNA, 1359 bp, Homo sapiens
atgtatttgtttctcaataggtaacattcaggttgcttccaaattttcagtctaataaagaagaatgcagacatctttgaacctttctcagataaatctcttagcacagattgttaagaagcagaattaccagatcaagggtatgggcacttccaggctgattcgtgttgacaaaacacaaacttggagatttacactcaacacggccttctatgagggcgattatgtcactacttcctcatcggaagcagatattattgtttctcagatacttgcaccaggatggacaggcccaaatttgtggccttattaactgtggtgccctaggaagggaatgaaggaatgttttcccgaacgagtctttctgatggcagaagtggggaagcaggtgctggaggcaggacccattcacttcagctccaggaacacaggtgccatgcacagcaaaaccagctgtgttattgacacttttctcatgtcagactccattctgggtgtggggttagaggcaggcagaaggggtgcttaagccaactcagcctgagttagttcaaacggtgaagccagcaagaggagtggcctgggtaggtaatgcctccctccagggcttcatccagagaaggatcaggggaggctccttccaaatgcaaggctttgggatggttcttgccttgctttttttgttgcaactcttacttcgtggatcttgtcttagcttacttctcgttttggtggaaacaccttgcttttatcatctccagagaataaatctgttctctttaagctcatctctctgggaagaggctgtgttcacgtccagatgtcctgcattgcagggccagacccaaccacagccagcgtgaacacgcttcaaggctgcaggggactggggtatcaggatccagcactgaggaaaagcaggggacccacttggggcactaatgctctgaagtgagtggaataaagcaggtcactcttcaaagacctctgggttccagccaagccaccccagtgctggggaactctgatagccaatcatcacgtctgtgtaattctcccttctcagagagggctgacaggagcgctttcagccatcttatcccacccttcaagtgagctatacgaggaaggaaaatcagaacgggtaaatgacagcaacaatcctggcctctctctgctgagctcttagggtaacattcccctgtgtcctgcctcaaactcaggaagtccaaaagtcactaaatcatcttctccacctcacctgcttaattttcactactagtttcctctttcttcatcttactactgttatttcctttaggggaaagtgaaagcaaagaaaagcagccacatctgtca

SEQ ID NO: 115735 - DNA, 564 bp, Homo sapiens
atgggacgtgtgggagaaaatgatccaatagaaagggagatgctggtgatggatgcaggagaagggaaaattgcagaagagaagtccttggtagatgagaaggagtggggagcttggcctcagcagaaggcgagtttgtgttacaacttgttggaggaaggacttccccctttctcttgtccctttagctttccctttttcgataaacgtctgttgaacacctacccgtggcaggtattgattgggctttgtgctgggaatatggctgcagacaaggcaggaggattcacatctatcctccctcaagcctgcagggacagtactgaacttccccctaaccacagggaagggaaggatagagctacagaaatgatagcaggccaagatcccattggtgtggagtccctgaaatggggtcatgaggcactggataccaagcatatcctgaagtgcactggattgcactgtttagagcctcctgtccctgctggggaggagctttgtacagtaactaccttggttcatggatcttctcacccagtgattctcaaaatgaactggtga

SEQ ID NO: 115736 - DNA, 1359 bp, Homo sapiens; identical to SEQ ID NO: 115734

SEQ ID NO: 115737 - DNA, 1743 bp, Homo sapiens
atgattatctcaatagatgcagagaaggcctttgacaaaattcaacagcccttcatgctaaaaactctcaataaattagggattgatgggacgtatctcaaaataataagagctatctatggcaaacccacagccaatatcatactgaatgggcaaaaactggaagcattccctttgaaaactggcacaagacagggatgccctctctcatcactcctattcaacatagtgttggaacttctggccagggcaatcaggcaggagaaggaaataaagggtattcagttaggaaaagaggaagtcaaattgtccttgtttgcagatggcatgattgtatatctagcaaaccccatcgtctcagcccaaagtctccttaagctgataagcaacttcagcaaagtctcaggatacaaaatcaatgtgcaaaaatcacaagcattcttatacgccaataacagacaaacagagagccaagtcatgagtgaactcccattcacaattgcttcaaagagaataaaatacctaggaatcgaacttacaagggatgtgaaggacctcttcaaggagaattacaaaccactgctcaatgaaataaaagaggatacaaacaaatggaagaacattccatgctcatggataggaagaatcaatattgtgaaaatggccatactgcccaagctgggtaagaattttctttgtataaatggtaaatccaggaaagagtacaagtttttgatctgtcactttcaaaactgccaagcacctcagcatttctatgagctttttagatcttctgccttgtcccaatctgaggacgctgaggaagagcttgcaagaaaagacggtctggagtggacctccaagcaaactccagcagacctgcagcagaggggcttaactgttagaagaaaaactaacaaacagaaaggaatagcatcaacatcaacaaaaaggatgtccatgcaaaaaccccatccaaacgtccctaacatcaaagaccaaagaattaggaaaaactacttcaaatttcatatggaaccaaaaaaagcccatatagccaagacaatcctaagcaaaaagaacagagctggaggcatcaagctacctgatttccaactatactacgaggctacagtaatcaaaacagcatggtactggtaccaaaccagatacatagaccaatggaacagaacaaaggcctcagaaataacatcacacatctacaaccatctgatctttgacaacccttacaaaaacaagcaatggggaaaggacttcctatttaataaatgctgttgggaaaactggctagccatgtgcagaaaactgaaactggaccccttctttacaccttacacaaaaattaactcaagatggaataaagacttaaagctaagacctaaaaccataaaaaccatagaagaaaacctatgcaataccattcaggacataggcatgggcaaggacttcatgactaaaacaccaaaagcaatggcaacaaaagccaaaattgacaaatgggttctaattaaactgaagatcttctgcacagcaaaagaaactattgcgggatctggccagcagcctgcaatgcactggggctctctctttgttcccaggtggatcggcaggtcgagaaataatagacacacacaagatagtgaaagctgggtccaggggggtaaccgccttctggtcacatggtgccgccaatgcactggatataccagcatttattactaa

SEQ ID NO: 115738 - DNA, 615 bp, Homo sapiens
atgtgcaaaagtgtggaacttcctatagacttgttgagtggctttgacaaaaatgttgataatgatatgagcaacaatgtccaggctgaggtggtctcagatggagatgaggaacttgggaattggagcaaaggtgactcttatgttttagcaaagaggctggtggcattttgcccctgccctagagatttgtggtactttgaacttgaaagagatgatttagggtttttggtagaagaaatttctaagcagcaaggctttcaagagaaaagtgtggaggaagagcagagttgcaacaggctgcttacaggctatccaagtgaaagggttgatatgaaagttggagatgaagctccaggttctctaagaccttatgacagtaccttgatggaaaagttgaagtcatattttcaggcttgctttgcttctctgtgcattgttggcactgcgggaccagaaggcagtgaccccctggacccagctttcactatcttgtgtgtgtctattatttctcaacctgccgatccacctaggagcaaagagagccccattgtattgcgggctgctggccagatcctgcaatacattggtatctttacaaatttcttagactag

SEQ ID NO: 115739 - DNA, 668 bp, Homo sapiens
atgcacaagtatgttcgttacagcactgttcacaatagcgaagacatggaatcaactcaaatgtccatcaatgatagactggataaagaaaacatcatacatatacatcgtggaatactatgcagtcataaaaagaaacaagatcatgtcctttgcaagaacataggtgaagctggaaaccattatcctcaacaaaggaacactggaacagaaaaacaaatacagtgtgttctcacttataagtggaagctgaacaataagaacacatggacacagtcagaagaacaatatgcagtggggcctgttggagggcggatcggcaggttgacaaataatagacacacacaagatagtgaaagctgggtccggggcgggtcactgccttctggtcctggggtgccaacaatgcactgaatataccagcatttattattaagtttagtgagggcaggggtaggttagtgagggatttagggtcatttgattatgaggtgagatggtcacatggggatgaagtaattctttaacataacatctgtatgcagaagtacagtatacagagataagaatttacaatatagtgtgtgcatcagtaatttctaacagagccttaaaacagaaacacattctttccataacctatgattagcaagatattaatcagcagt

SEQ ID NO: 115740 - DNA, 618 bp, Homo sapiens
atggaggctgaattttacatggtgattcttacctgcttgatcttcaggaactcagaagggtttcagattgtccatgtccagaaacaacagtgtcttttcaaaaatgagaaagtggtcgtgggctcatgcaacaggaccatccagaaccagcagtggatgtggactgagaatgaaaagctccttcatgttaaatctgcactgtgcttggccatctccaactcttcccgcggcccctcccgctcagccatcttggaccgctgttcccaggcaccccgatggacctgctatgatcaggaaggcttccttgaggtggaaaatgcctctctctttctccagaaacaaggctccagagtagtggtcaagaaggccaggaaatacctccatagctggatgaaaatagatgtcaacaaggagggaaaactggtcaatgaaagcctctgtttacaaaaagtggcaaaatctccaaatttatcagaaaagagtccttttcaggaaggaaggagtccttttcatgaaactccaaagaagcaagggacagtagctgattataagtcaatttttgagaagaatccatgcaaaacaacaattgtggatgacaaagtcttaggacagcaatag

SEQ ID NO: 115741 - DNA, 579 bp, Homo sapiens
atgaccacagagttcaggcaggctcggaaactaagtgaagtggacagagtaggcaccgaagaggacattccgcatcaacagcaaatggctgcaacttctgtgccaattgttgccaatccattttactatcttatcatcacgcctaatgttaagcttgaccaagaagctggactctttacaaagcaagaactcatctacaaggctgaaaatcatgcgggaatgtcaaagcagtttttgcttggctacaaaggaattaacaagaggatgcctccagatgcggtagactgtggatttcccaggctgccctcaaaacatcatgtgatcattactaaaataatggcatctgaatgtcctgagccaactccgaatggaaccccttgtgtcctatctgagaacaggaaagagatcagcaatcatatcagacagtcacagacaattcagaatcctgccagaccttacaatgggaactgcagccattcaattggaaaacttaaatgtggtgagagtatttggatcctgaggtgtcaggagccaagtggtggcattcgactgccaaaggactcacacaagaaacaatga

SEQ ID NO: 115742 - DNA, 502 bp, Homo sapiens
ggggggatgcacatgtcagcagaaatcctggttgtatggtaatgttatcagctgcccttttggagctcagcttgaaagtgtgactaaagctcctctggctgctataaagctagtactttagacttaaagcattgtaagcagatgcctcagagtggaaagttgcccgggcctggccgggagctagtggagcaagttacaggaagaactagtgcctagagctggggggtggagagagcacttgtgcctcaccctttgcctgtcagttgttcagcgtgtaacagttccctgcttcttaggttctttctgtacccttttataagggtgtatccccttttggtaacttactgtttgttaatttgtagtgttccctgccagtaagcttgtaacactctattgactcaccttcgggtgggagggtaggaaagggagaggcctgcctcctaaacctgggaagatggggagagagtggtaaacctgagagcccaaaaaacaaaccaaaaca

SEQ ID NO: 115743 - DNA, 544 bp, Homo sapiens
agaaaaaactggctgcttctaagtgcgaagccggctgggcgggctggtgccagaaagggtgtgtcttcactgccctaagatggcctttaaggtatacttttgagggctttcttgggccactttccgtaaacacaggatgcaccgatggcaactggagttgtcatccgatggtggggagaggcgtgcagattttttttgaagggacgagccctgaaggaggataggcagacccaccagggcctcagggtacaagaaacccgaaaaaggactggaggctgcaggcaatacggtggtaggaatctctgccggtttccagcgtcgcggaagcaccaaagggcggtccctgaaggaaacgaggggtcttggggctggagagcggcgcggagcgtggtgggaatatcgtcacaacgccgctgtcctacatttctgtagcgaagacttgattacccctagctattacccgtgcaggagactgggccctggaccccaaatgagccaaagtctagttgagaaaaatttacacagaataacctcggagttcatg

SEQ ID NO: 115744 - DNA, 729 bp, Homo sapiens
atggctgctatccagccccagcagcagcacatcactgcaggagcagcagttctctgcagaggagcctgttggctggcagagagccctcggcagctagaagaagtcagcacagcacaaatgttcaggctccctctcatcacagaaggccgaaaagcccattttattttgcaagacttcaaaaacgtaaaaatgatcatcaaccgcgaacaaagtccttcacctgagaagtttaggaggcaggcctctccctttcctaccctcccacccgaaggtgagtcactagagtgttacaagcttactggcagggaacactacaaattaacaaacaggaccgccctttggtgcttccgcgacgctggaaaccggcagagattcctaccaccgtattgcctgcagcctccagtcctttttcgggtttcttgtaccctgaggccctgggctcgtcccttcaaaaaaaatctgcacgcctctccccaccatcggatgacaactccagttgccatcggtgcatcctgtgtttacggaaagtggcccaagaaagccctcaaaaggcccaggaggtccgcagtgggtgcggtacggtctcggaactgggctcccccagtcgccgccgacccggcaccagaagtcgtgggcggaacggcttttccagcgcttcggcgatctcctctgggactcagggatgctggagggggctggcgctcgggtgtgattgcagccagcgcctga

SEQ ID NO: 115745 - DNA, 192 bp, Homo sapiens
atggtcagctataatccaaacacaccattgagtatcacagcaaaaacagactgccgacagaggcatttactctggattctcggcggcagtcctgctgctgttgtcattgcttgcacagaagcatcaaaatttgcagaactgctgtcagcagctcggaaaaattccaggaataagagtggagcaatcttttaa

SEQ ID NO: 115746 - DNA, 474 bp, Homo sapiens
atggagggactggtggaggaagcacttatgtttccaaaccagtcagctgggctcatgaaacagatgacctggaaggagatatttcaacaacttggaacagtaatgatgaagatgtgtatagggcacctccaattgaccgttccatccttcccactgctccaggggctgcttgggaacccaatatcgactggagccatcagtgcagtgcttttaccacgtgaacccagcaatccagagaagttgaaaggttttggttatgctgaatttgaggacctggattccctgctcagtgccctgagtctcaatgaagagtctctaggagaatttgagtggacgttgctgatcaagcacaggataaagacaggaatgatcattcttctggctgtgatagaaatggggattatgacaaaacagatacagactgaagggctcgtcctgccacagacagctttgatgactactcacctagaagag

SEQ ID NO: 115747 - DNA, 2828 bp, Homo sapiens
gattagctgccccagcagaatcaatgttgtctgggtgatgaacttatggttggattagccaatcttcctataaagcctccatagctggatccactatcagcataactaatatttgttatccatttagtgtacaacattgaacttgaaacagccaagggtaaatagtaactaaagttaacatgccattatacatgcaatttacaacttagaggagtacttaaagaaatacaaggaaaagctttccctctgccaacatggcggcctcagcaaaatagatagaataagaaggggaagactatctccctaacagactttctggctgaggatgggggtactggtggaggaagcacctatgtttccaaaccagtcagctgggctgattgaaacggatgacctggaaggagtatgtttcgaaccacttgggcacagttaacgatgacgatgtgttatagggcgccctcccaattgaaccgttcccatccttccccactgctcccacgggctgcctcgggaacccaatatcgaccggagccgtcttccccaaatcgcccaccctacactgcttttctagggaaacctaccctatggatgttacagaagagttcaattaaaggaaatcctttccgaggatttaaatattaagtgcaagtgccgtttacccacgtgaaaccccagcaatcccagagaggttgaaaggttttgggttatgctgaatttgaggaccctggattccctgcctcagtgccctgaatcttcactgaccagtctctaggtaacaggagaattctgagtggagcgttgctgatcaagcacaggatagagagagggatgatcgttcttttggccgtgatagaaatgggggttctggcaaaaaaaagtacagagtgggagggctggtctctgctacagacagctttgatgactacccccctacgaagaggtgatgatagctgtgggagacaagtatcgagttgggttttatttcagaccggtttcgggatggggtatcgggttgggtttcgggaatggccccgccaggaataggattcgatatggtggccgggatcgctatgatgaccgaggcagcagagactattgatagaggctatgattcccggataggcagtggcagaagagcattttggcagtgggtatcgcagggatgatgattacagagaaggcggggaccgctatgaagaccgatatgacagacgggatgatcggtcgtggagctccagagatgattactctcgggatgattataggcgtgatgatagaggtcccccccaaagacccaaactgaatctaaagcctcggagtactcctaaggaagatgattcctctgctagtacctcccagtccactcgagctgcttctatctttggaggggcaaagcctgttgacacagctgctagagaatgatgatttagaagaacggctacagaaggaacaagagaagttgcagcgtcagctggatgagccaaaactagaacgacggcctcgggagagacacccaagctggcgaagtgaaggaacttcaggaacgggaacggtcgaggacaggaagtgagtcatcacaaactgggacctccaccacatcttagcagaaatgcacgaaggagagagagtgagaagtctctagaaaatgaaacactcaataaaggaggaagattgccactctccaaccttctaaacctcccaaacctggatcagcccctaaaggtaatgccagccccctccaccaaaggaggaatgcttgggtgaagccgaagttcttaaccctcctgcttcgatctcaagagctcaagacacagaggcaggcagttcccttacaagtgggtgggggggaaaagttaggttcccagcttcaaccatctggaggaaaggaccaggaaggaaaaggatgaaaataatagtagatggggatgaatgccccccaaagggcccaaactgggaaactcctagcccgtggtccagggaggaccgggagggtaacagagacccactgggaaggaagtcagataggaaagatgggcaaaaaaggattcaagacttccagattcttgcacctgaagccaaagaaacctgaaggaaaattccagctttccaagttcagtttcttgcaagcaagtattgctgctctctctgtttgatggtgaagatgaaattgagggagaagattatgccgaatagacctctacatcctgtgcttttctcctagtttctctccaccctggaacattcgagagcaaatcaaaacctctatccagacaagacaaaataaaactcaacatctcctgaagacctttcttacctttttttaaaaaaaaaaacaaaaaatggaaattattttgcatgctgctgcagccttttaaagtattgaagtaactggagaattgccaatacagccagagagaaagggactacagctttttttaggaggaaaagttgtggtgcgttatgtcaccatgcagtttgccagtgtggattagtgcctaggggtcttccatttagcagaaatgggtaatgacagtgatattaatgcctgggaacctggttggggccagtaggggagggaggtagaaggaaaagtgtgagattttctaccttttagtttttattcctattgtgggcatatatgaattctcaaacattatctgaataaattttccactcttggaaaggtagatttagcctcaagttgttctagtctccaggaggctgccagcccctcctcttatttaattctgagttttgggggccagcctagagggaattcctttttttttttttttaaccccccaggggggtagttgggaatgagacta

SEQ ID NO: 115748 - DNA, 1462 bp, Homo sapiens
tggagcccaatgaacaatcctttttgaaagctgcctatgaaactccaacatgcagctaaggtggaaagccattgtactagaggtctacccttactcccgtgctgctatatcctgtactgatagtactttgcatcctgatgccatcatcacattgacttcttcagctctgccccgcctcgcctctctgcggcaacgcccccctcttctcgcgacaccaaccagtcccacagctcagctgcgcccccttaaggcattgccccttcctcacccacagctccgcctacccccgccccgcgaccgctgggcttgtggccaaagcctaggttccaggaaacacctgcttgtttttgagaaattttatgacaaggtacctgaaaatgtaaaagcgactttggaactggataacaggcagaagttggaacagtttggagggctcagaagaagacaggaagatgtggaaagtttggaacttcctagagacttgtggaatggctttgaccaaaatgctgatgttgatatggacaataagatgtggcttaaaggggccaacatagagctcaggtcattgcttcagagagtgcaagccccaagccttggtgggttacatgtggtattgggcctgagggtgcacagaagtcaagaattcaggtttgcaaacctctgcctagatttcaaaaaatgtatggaaatacctggaggtccagacagaggggtgctgcagggatggagccctcatggagaacctctgctagggcatgaggaagggaaatgtggggtacaagcacccacagagttcccactggggtactacctagtggagctgttagaagagggctaccatcctgcaggccccagaatggtagatccattgacagctttcaccatgcagctgaaaaagctgcagacaatgccccctcgtgaaagcagccaggagggggctgtaccctgcaaagccacaggggaggagctgcctaagaccatcggaacccacctcttgcatcagcgtgacctggatgtgagacatggagtcaatgaagatcattttggagctttaagatttgacttccgctctggatttcagacttgcattgaacgtttagcccctttgttttgtccgatttcttctatttggaatggtattcccttcaaattgtcttctattaaaatctctgaatccaccaacactcaggcacttccagtagaagtgggacaatccgtgcttcacactctgatgctggtgaacatgtatagagcttactatgctcagcactgttacatgaatttatatgtgttaactgatcaagtctttagaccactcaaggtggggctgaaagaacaggttctgttccagactttctggactgatgtccaaaagaataccaagctgatccacagaggagctactactatccctgaagcagctgctagtactgctgccacagctgcctctcacagtgactga

SEQ ID NO: 115749 - DNA, 432 bp, Homo sapiens
atgaatcatctagaaggaggaccagctggaagatggaagcaggactcttcaattggaaccaacaacgcacctgctattagttctcaaaatgcagaatgttccctacttgcagatactgtatcaaaattgatcttcctaacagacctgcatttgcaatgcctgtcttctgcacatcaacatcagtgccatgggaaactcgctatgttggtcagtttccacatcgcagcactgtcctggctgaggaaggacggagccagtcctcaagccctcagcacagctgatcctattaggaaggagctgaagagccaaggccagtgttctggaggagctggcacgaaggctggtttcccgtgcaatgtctttgagaggatggcgtggggagaagatgctttacagaaaatgagccctctgccctttctggtgtcaatttag

SEQ ID NO: 115750 - DNA, 404 bp, Homo sapiens
gcagcgcccagcaacaagacagagctgtcctggagtccgcggctggccgcgtgagtaggtaggtcgcgcgcgggtaggcgaacgcgaactgctgggctgcaggcgggcccttcaggacccggcagcgcgagagggcagccctggagggacccagctgcagggccagggcgccatgacctttcgtagtgggggcggggacgcgctgggaaaggccgcctgtcttgtgccagccgcctcacgcccccagtctcccattttgcagatgacctcgcgagaggtcacgccgcaagtcggcaaccgggcaggaattggaatccgcgtctgcctttttcccccaagagacccagaatcctggcagccggtttcaaagctgttgtacgtacaccatacctcggggttcagaa

SEQ ID NO: 115751 - DNA, 1917 bp, Homo sapiens
atggctgattctaacactaagcaggaaatatacaagatgcagcccgaagcatcttttggtgtctgccagagattaaagaaatcctcaaaaatcccagtcgtgggcagagtattacccgagtgtctgtgcttgcatttatgtcggacgaacgaggctgcggggaagaagatggcatctctgcgcttcgccaaggcattctttgtggaccacaactcccgcaccaccactttcattgatccccggctcccacttcagagcagtagacccacaagtgcgctggttcatcggcaacacctgacaaggcaacgcagccacagtgcgggtgagagtgcctaccgcatgtttacaaacaacacgtgtttgaagcacatgatcaccaaagtccggagggacacccaccactttgaacgctaccagcataaccgcgaccttgtgggattcctcaacatgttcgcgaacaaacagctagactgccgcggggatcctctagagtcgcatccgactgatcaaatgctcagctacaaccttggcagaaggctcccagctgaccacgtgagtgggtacctccagtttaaagtggaggttacgtcttctgttcatgaagaaatgctgttttctcattcagatgcctctccagaagctgttggcacaatacttggagtcaattctgtgaatggagacttaggtagcccttccgatgacgaggacatgccagggagccatcacgacagccaggtgtgctctaatgggccagtttctgaggacagtgctgccgatggaacccccaagcattcattcaggactagctccactctggaaatagacacagaggaattaacctctacgtcttcaaggacctcacctcccagaggacgtcaggattcactcaatgattacttagatgctatcgaacacaatggccactccaggccggggacagcgacctgctctgagaggtccatgggtgcctctccgaaactgaggagtagttttcccactgacacaagactcaatgccatgcttcatattgattcagatgaagaagatcacgagttccagcaagacctgggttacccatcttccttggaggaggagggaggcctgatcatgtttagcagggcatccagagctgatgatggaagcctgacatctcagacaaagctggaggacaaccctgttgagaatgaggaagcctccacacacgaagctgcttcctttgaggataagccagaaaatcttccagagcttgcagagagctccttacctgcaggcccagccccagaggaaggtagatcagccacaagtggcgcagacacagggacttccgatgcatcaggaggaagccgaagagccgtcagtgagaccgagtctctcgatcagggctctgagccttcccaggtgtcctctgaaacagaacccagtgatcctgccaggacagagagtgtgagcgaagccagcaccaggcctgagggagagagtgacctggaatgcgctgacagctcctgcaatgagagtgtgaccacgcagctgtcctctgtggacacacggtgctcctctcttgagagcgcacggtttcctgaaaccccagcctttttcttctcagggaggaggaagacggagcctgtgcaagcagagcccacccagcagtggccctgccgaagggtcgcaggaatccgtgtgcactgctggttctttacctgtggtagcaggagccctatgacagatcagctgcgaacaatgcagaagaaagggaaacataatttttctggaggacccaaagtccagatgcaagccagaccaagccccacggctgtcttacctgcaggtgtgtgcagcaccagaagccccaaaacagtgttcacatctccccatctggccgggccacactcactccctgctgtggcccagattgcctga

SEQ ID NO: 115752 - DNA, 375 bp, Homo sapiens; identical to SEQ ID NO: 85467

SEQ ID NO: 115753 - DNA, 1250 bp, Homo sapiens
gggcgggagcggtgactgctcggcgggcgcggagcggagcgcgaagcagaggcgccgccgctgtcccggagcaagccatgccgcgcttgtctctgctcttgccgctgctgcttctgctgctgctgccgctgctgccgccgctgtccccgagccttgggatccgcgacgtgggcggtcggcgccccaagtgtggtccgtgccggccagagggctgcccggcgcctgcgccctgcccggcgcccgggatctcggcgctcgacgagtgcggctgctgcgcccgctgcctgggagccgagggcgcgagctgcgggggccgcgccggcgggcgctgtggccccggcctggtatgcgcgagccaggccgctggggcagcgcccgagggcaccgggctctgcgtgtgcgcgcagcgcggcaccgtctgcggctccgacggtcgctcgtaccccagcgtctgcgcgctgcgcctgcgcgctcggcacacgccccgcgcgcaccccggtcacctgcacaaggcgcgcgacggcccttgcgagttcgttcctatcactcgtttttataactgctttcctcagccgttaattcacaggcaattctctttgtctccagacaggagacagagtgagaccctgtctaaaaagaagaagaagaaggaggaggaggaggaggaggaggaggagggggaggaggagaaggaagaagaaggatgcaaaagcaatttccaacacaccattaactttaaagaaatctcagagggatttgggaagattttttcattccagccatcaatgatcgatataattgacgaggcctctacactgcacgttgcccaacacgctgtggtgctggatgccagggtggctgagttgctgtccaatgcagctcctgtggtcgtcgttcctccccgaagtgttcacaacgtcaccggggcgcaggtgggcctgtcctgtgaagtgagggctgtgcctaccccagtcatcacgtggagaaaggtcacgaagtcccctgagggcacccaagcactggaggagctgcctggggaccatgtcaatatagctgtccaagtgcgagggggcccttctgaccatgaggccacggcctggattttggtgtcagacctgcatcattgtctgaaggctctccccacctactcctactccagcaccctttctccttcacaggtgtttctcctaatacatctcttgcacattggaccctatcctggtgcctgcatcttggaggccccaccctag

SEQ ID NO: 115754 - DNA, 3126 bp, Homo sapiens
tttttttttttttttttttgcatttgagaccggtgatttttaatattttcttaaaaaaatacaaaggaaattaactctgtaggtcaatacaactcagggaaagagggaaaaatggaatttcagagcaaaggttgtttaggttatcacattcccacactcctaatacccacaaaacaagaatttcactccatgacacagaggaacattgaatggtagctcagaaatgttgatagctgaggtactgaaactaacaaaaggattttggttgtccttgattattctgtcctgtgatgaataaaatctacactaaaggacaggtaaggggaaacttatagcagaaaaaagactaagatgtaccaaaccacagcagtacaaacccactcccttggcagacatgtgctttctaaaaagaatgggggcagtaatcagggtagcctggaacctactagggctactggtcacttcccagccccatcccccaaataaatagtggtgggaagtgtaatagtggtagtagtatttgatcccaccaagaaaggctttcacccccattcaaggcaaacattgccatggctagatgaagccctggcaggtaataagatggacttgtaaaatcacaggttcttctagtttatccccagttatactggaactccccacattgatgtcatcttctctcatcccaacatttgttcactcttttatgctgtctccagtgcgaaaggacctcggggaattaaaaagatccttcaaataatatacccttctcagtcttccaggttatgtaatacttcagtgctgttctaggttcactcacaatcaaattccagtttaatccacttaattctaacttcaattctgatatacaaatcctgacctccaaaagaagtgtcagatgagtctctctctcccttgtccccaaagttttgtggggctctcccttttgtttccctctagaatggaactgtgttgcccctagctacctgtatatgagaaaaatgtagttgttcctggaaaaaaaaaaaaaaaagacttggattttaccaagtttacttaaactggtatctttccaatcatctaggctggatattgcccatatctagtaggctatactcaccttagttctttgcaacatatgaggcacaacgtacatatagtacaccaagcatgtggtaagttagaaatgacaggaaagtgctccccaaagcagtgggagaggcaatgtggtctctcacatccattcaatgtgcattctttttcctggaatatctgttacccacccttctcaggaacaagaaccaggacgacggggagtatgtgtcaaaataagtacaatcatcaactgcactggtgccctgtaatcaccccggtgcacgtaagtgagaaaacagacattcttggaaaggatttttgattctccccactaactgtccactggactggtcactagctctggatggtgctcccaacaatggtcacttctcgcggagaacacaaacaccagcatcacagcgctgggttcccatggatgtcacgacttcccagctgtcgatgatagggtcataacattcaatgctacttagcaggggaattaccatcatatcctgcaattgcatagagtctcccccgaaggcactgtgggcccctacatagcatccgtgggagtgggtcatactgggtgacagttgtccccaggaatcagtgccgaatgtttgtatgcttccaacggaagaaaggtgggctgtaccatcaaatccccccaccacataaatatggtcattccagcagggctactcctgcaccagaacgcttggtggccattggtgtaaacattaagtccaatgtcctgtatgagggtcgtatttctcaactgaatttaagatattcaagccgtcatatcctcctagacagtagatcactccactggccactacgagtccggcaccttcccgggctgtctggcatatctcccagcatgctccactggtcaatgtttggatcataggcgctccatactggtgtgacgcctgcttccattcaaagcctccagagacataggttcatatctaggcgagcccttgtcctgggtccctgcatctgactccgaagttcaggcctcagatgaaacttctttgcttcatcaaccagatccctgcattgtaaactacagcggatgaaaggctcagcatctattacatctgtgatatacctggggggttagtaggggcaatccgcacattctgtagcaggttaggcaaggattcttcccgctctttcttggcatgcttcacccagttgatgacagcctcaaagactgggctcttcagaatccacctgaatttcggtcggcacttgattagcttttccacctctccttgacttcaggaagaatgaactctttcatgctgtaccacttcaggaaaatgcttctggctaaaaacctcagctgcttgcatcaggtcaacacaattgtgggtttcagcaaaatccctaatacccaggcaattagaagggtccaactgactttctaagaactcacagcaggcttgtttcacacctttcaactgaagcagacaggctgcaggaagtatttcctgtacattctccactgtcacatgtactgtttctgtgtacacaaagtccaataaaatttccatggtagaggcaagtcaaaccttggatgtcaaacaataaggtttccccttctctgagagctcactagtgaacatggcacaagaaagtaatcactacaggcagccagcacaatccgatgggcagggaagtctttctgctctactctcaatgtcacatcacagagggtattgctcttcctgagggagttcattgaattgaggatggatttagcatgagtatttgtcattatgtctttgggggccataatgcctcccataaagcagtgcggagaaagaacaaaaataggtccttggattctgcaactctgcttctgaacccacacagccgcaccgggcccgtccccagcctgtggggatggagtgcggcgcggggctagcaggcggctcgggaggagccgaagcgccgcccagacccggaggcttctggaggctctggagccgttccgggtctggcccctgcggccgcaagctt

SEQ ID NO: 115755 - DNA, 474 bp, Homo sapiens
atggaaatcttgacaacatgtgacaaaggacttatatttacaggtaatactagaaaatcagaaactagtaccagcgaatgcacttgtccgctggatattaactgttccctttcccactctcctccgagcccttcagatgaggaaacacagcaccacactgacagtctgcatgtcagaccgaggaaaggatatttactgtgcatctaccatataccagatatagtcgctgtgatggttaatattcagtgtcaacttgattggattgaaggatgcaaagtattgttcctgggtgtgtctgtgaaggtgttgccaaaggagattaacactggaatcagtggactgggaaaggcagacccaccctcaatctggaaaagtcaagaacaagatggtgttcttaaagagaccgacaactgccaaaatggagtcaccttcggactgctactggctaaacgaatctctctccttccttcttaa

SEQ ID NO: 115756 - DNA, 1298 bp, Homo sapiens
tttttttttttttttttggggccaactgaattcaacaagtatttattgagtgtctattatgtgctagatactgagacacatcagagaacaaaaccaaaagccctgcccttgtcgggcttacagtctagcacttaccgccagttaacctgcaggctacctggagccccgggcaagtcaccgcacctctgtgccctcggtcctcagctgcccaatgggagaataagcagacctggctcaaaacatgaatcatgtgccttggtgtaactgcaagatgcccaaactgcatcccccacaacccaccacgtaggacagcagacaggggcctggaagttgatttttaatgataaatgtacaatgaagggtagggcagaggggctaagcctaactgtcctggggtgcctgtggtggtggtaaaatggcctaacacaaactgttgctgctgctgctgcttcttggtgcgtcgccttgctggcgagggtccttggccttctctgtaagctgccagtgccgtctcctctgcccttctcccttggcttccattggctgtcctcaaacaaatgttttggaaggggccgtcgcccttgcagcttaacccaagatatattcaaaaacccttccataatccttggtcaacgttgcttttgaatcggggcaaagaccaaattccctggacagctctggaagacaccaaattaagctaggaggagaccccaggcttcccggcggattttcagtcccagcccactgttgtcaagagttcacaacagtaaaacacatcgtttcctccaccaccattcagccggggcgtggttggatgttcccaggtgaaggtagtcatggtctgattctgtgggtccacaatagagtcctccaggacgttacacccgagtgagcaacattggcaaggaaaataagtcgctcgggcccagcgtgggcattcctgttggtctttggtcaggagtcgccggggacagcagtttctggtcaggggtcacctcccggtgtactatgtcttccgtcaagacatgtttgctatagggattcgggtacccgctgccagaaaggcgggaaacactttggtcccaggaactccggagcacgctctggcccaggaaatacttcaccatcgtcccggccgaagcgggctcagcacccgcgcagcatcaggggtgcggagcctgggaggcacgcgagggccgggccgggccggggctcggcgcacacccgccagccaggctcgtagctcagctcaccaccgcaccgcgcccaagcagctgccgccgccgccgccgccgcca

SEQ ID NO: 115757 - DNA, 465 bp, Homo sapiens
atgcacattgatgattcttaccaagctcagtctgtcacaaagcctattctgaaatgcttcacgtccaagtctacaatgggctttcacagcgttatgaatcccatgcaagattttgggtatgagtgcgcaatacgaggtatgattggcttctgcacctgggtggcctccgcactgccttgtacaactacatctttgctaaaagtaccaggggagcttcatcctgaggctagaggacacagatcagactccgttgtgcctggggcagcggagaatattgaggacatgctggagtgggcactgaggggcttcccgggaggctcgtccatcgggcagcgacagaacgaaaagagcagccgtcgccgaccccaggcctgccgacaccggacccagttggccctgggccggggaggcgccccaggaaggaatggggacccgggatcgcaccctcagtgcgcgatcagctga

SEQ ID NO: 115758 - DNA, 633 bp, Homo sapiens
gtcataaggccaccattcaagaagttcagcaaaggtgttgcattctttcctttacatattggagaccatgtctttattgaggaagattgtgtggtcaacgcagcacagattggttcctatgttcatgttgggaagaactgtgtgattgggcgccgatgtgtgttgaaagactgctgcaaaattcttgacaacacagtattacctccggaaactgtggttccaccattcactgtcttctcaggctgcccaggactcttctcaggggagctcccggagtgcactcaggagctgatgattgacgtcaccaagagctactaccagaagtttttgcccctgacgcaagtctagcatctctgcctcatgtcttgaatctgcttgagctctaagatgaacctggggacaaagtgagccagtcagcacctacaaagagcttttgtgtctttgacatctaccaccctcctccttttaaaaaatttctttagaatttctcaatcttcaaggctctaagtgcttaagaattcactaacagacagaccatctggagggagctgtcttcaaatgctgtgcttacaccttatctatgaacagtcactttgtaccattatctgtggaacacagaatcatctgttccca

SEQ ID NO: 115759 - DNA, 1908 bp, Homo sapiens
cgtgagcggccggaagtagccggaatctctgaaagactgtccgactgactctgacaggatccggggctgagggaaggaggcggcggccatggagttgggcgagctgctctacaacaagtctgagtacatcgagacggcatctgggaacaaagtcagtcgccagtcagtgttgtgtggaagccagaacatcgttctcaatggcaagaccattgtgatgaatgactgtattatccgaggggatctggcaaatgtaagagttggacgtcattgtgttgtgaaaagtcgtagtgtcataaggccaccattcaagaagttcagcaaaggtgttgcattctttcctttacatattggagaccatgtcttttattgaggaagattgtgtggtcaacgcagcacagattgggtgctttgctgatggtctggaaaaactgtgtgattgtgagtatgatgacttggctggcaaagcagcttcactttcccttcagctcccatccctcacttcggtgggaccctgtttctgtgactaagcaggggaagaaaagtcgtcatcaaaaagaggattccctttcttggagtaatagtgcttatttatccttggatgatgatgctttcacggctccatttcatagggatggaatgctgagtttaaagcaactactgtcttttctcagtatcacagactttcagttacctgatgaagactttggacctcttaagcttgaaaaagtgaagtcctgctcagaaaaaccagtggagccctttgagtcaaaaatgtttggagagagacatcttaaagagggaagctgtatttttccagaggaactgagtcctaaacgcatggatacagaaatggaggacttagaagaggaccttattgttctaccaggaaaatcacatcccaaaaggccaaactcgcaaagccagcatacaaagacgggcctttcttcatccatattactttatactcctttaaatacggttgcgcctgatgataatgacaggcctaccacagacatgtgttcacctgctttccccatcttaggtactactccagcctttggccctcaaggctcctatgaaaaagcatctacagaagttgctggacgaacttgctgcacaccccaacttgctcatttgaaagactcagtctgtcttgccagtgatactaaacaattcgacagttcaggcagcccagcaaaaccacataccaccctgcaagtgtcaggcaggcaaggacaacctacctgtgactgtgactctgtcccgccaggaacacctccacccattgagtcattcacttttaaagaaaatcagctctgtagaaacacatgccaggagctgcataaacattccgtcgaacagccccggatcctgtcagagtcagtcggtcagtctttcagagattccggctacttccggccgctcctccacttccgctccaggtggcccactgggactcatcgacagcgcggctctcctttaggcggcctcgctccactgctcggccgtctacggctgcgcgtgcgcaggccgaatggtggatttaattggccggagtttagggcgcgcttggcccgcggccaactgggtcccggtgtcggcaggcctggggtcggcgacggctgctcttttcgttctgtcgcctgcccgatggacgagcctcccgggaagcccctcagctgtgaggagaaggaaaaggtgccgggggggcgccgatgtgtgttgaaagactgctgcaaaattcttgacaacacagtattacctccagaaactgtggttccaccattcactgtcttctcaggctgcccaggactcttctcaggggagctcccggagtgcactcaggagctgatgattgacgtcaccaagagctactaccagaagtttttgcccctgacgcaagtctag

SEQ ID NO: 115760 - DNA, 612 bp, Homo sapiens
atgaagcatggaaaggaggaagggcaagctttctgcagtgaggacagtgcctgccagagaaaaccagatcctggggaggggtttctccagaaagagaaagtcaaagctgcagggcatccttcgttccagagctggcaccttggaaggcccttggtcactgaaggcagtgatgatggtaacagcagtaaatcatcatttatggctgatgagggaaggccagggagggcaggtccatcttcagtggcattgggcctaggctgggatgctgagttatccactggagcatcagcagtacaggcaggcacagaggcagtggatccatcggaggtggcaggtgtaggatcgtctgacgatgccctgtcccttgcctcatgctccggcagggtacaggctcgcacctggggcctcatggagcatctctctaagacctctgtgtcctggtcattgaatgggcacttgagtcacccagggccattggaacaaagaggaagaatcaggccccacgatgttttgggagagtgtttagcacaggaaaatgcacagaatacatgcacgacacgggggcactgtcagtgtgggagcaatggtttacaacctccagccctaatctga

SEQ ID NO: 115761 - DNA, 496 bp, Homo sapiens
gagacagtctctctctgtcgcccaggctggagtgcagtggcgcaatctcggctcactgcaagctccgcctcccgggttcatgccattctcctgcctcagcctcccgagtagctgggactacaggcacccaccaccatgcccggctaatttttatttttttgtatttttagtagagacggggtttcaccgtgttagccaggatggtctcgatctcctgacctcgtgatccgcccgcctcggcctcccaaagtcctggggttacaggcgtgacgaccggtgcccggttgcattctgttattttttaaaaggaaaagatggctgagtttttaaaaaataataacaaaaacatataagcagcagctaggatcataagaaaacccaaggctggcaattgaaaagacacgtgcaggagccggctggagtccagcgctcctcttctcttctgttgatgcggtgcttctttagcctcgtgccgaattcttggcctcggggcaaa

SEQ ID NO: 115762 - DNA, 2932 bp, Homo sapiens
gtaatgcagagataataaaacttcttaggtccataggtcttataataatttaataacctaaacatggtatacaaattcctccaaacccaataacataattatagtttcaaaaagttccccaaactttcaagttagattttattgctttgatgagtggctttaaatatgaaaagtcttgcctgtgaagggcaatccttttcccgtggactgggatctatagaaatacagaaatgtgcccaggggttcatctccctaataaccatcattcacatttctcaacctccctaataaccagccaccatgtgagaaggatccacagttactgtttatgactataattaactagtacctgggactggtcagtggagttggttgcaacctgatgctaaggatgtcaaagttgtctcggcctctgttcccagccagtaagtaattccctggcctcgggccataccccctaatcttggtcagctgattatgacaggcagacagcacagtaaataacactatatattaagaaaacccaaagcatatgtatcaatggtatatacccaacagcatcctaggaatggagagtctgtagcaagggcctccaatgtgaaggtcaacacagtcactgtgatgcgtgtatttccattttgtaaagcatgatctctggtggtcatttttatcttcctaacttattggaaaagtctcctgttttgggggcccgcccctggtcacagccagactgactcagtttccctgggaggtcccgctcgagcccgtccttcccctccctctgcccgcccccagccctcgccccaccctcggcgcccgcacatctgcctgctcagctccagacggcgcccggacccccgggcgcgggatccagccaggtgggagccccgcagatgaggtctctgaaggtgtgcctgaaccagtgccagcctgccctgtctgcagcatcggcctgatggggtggtgactgatccctcagggctccggagccatgtggcccaacggcagttccctggggccctgtttccggcccacaaacattaccctggaggagagacggctgatcgcctcgccctggttcgccgcctccttctgcgtggtgggcctggcctccaacctgctggccctgagcgtgctggcgggcgcgcggcaggggggttcgcacacgcgctcctccttcctcaccttcctctgcggcctcgtcctcaccgacttcctggggctgctggtgaccggtaccatcgtggtgtcccagcacgccgcgctcttcgagtggcacgccgtggaccctggctgccgtctctgtcgcttcatgggcgtcgtcatgatcttcttcggcctgtccccgctgctgctgggggccgccatggcctcagagcgctacctgggtatcacccggcccttctcgcgcccggcggtcgcctcgcagcgccgcgcctgggccaccgtggggctggtgtgggcggccgcgctggcgctgggcctgctgcccctgctgggcgtgggtcgctacaccgtgcaatacccggggtcctggtgcttcctgacgctgggcgccgagtccggggacgtggccttcgggctgctcttctccatgctgggcggcctctcggtcgggctgtccttcctgctgaacacggtcagcgtggccaccctgtgccacgtctaccacgggcaggaggcggcccagcagcgtccccgggactccgaggtggagatgatggctcagctcctggggatcatggtggtggccagcgtgtgttggctgccccttctggtcttcattgcccagacagtgctgcgaaacccgcctgccatgagccccgccgggcagctgtcccgcaccacggagaaggagctgctcatctacttgcgcgtggccacctggaaccagatcctggacccctgggtgtatatcctgttccgccgcgccgtgctccggcgtctccagcctcgcctcagcacccggcccaggtcgctgtccctccagccccagctcacgcagcgctccgggctgcagtaggaagtggacagagcgcccctcccgcgcctttccgcggagcccttggcccctcggacagcccatctgcctgttctgaggattcaggggctgggggtgctggatggacagtgggcatcagcagcagggttttgggttgaccccaatccaacccggggacccccaactcctccctgatccttttaccaagcactctcccttcctcggcccctttttcccatccagagctcccaccccttctctgcgtccctcccaaccccaggaagggcatgcagacattggaagagggtcttgcattgctatttttttttttagacggagtcttgctctgtcccccaggctggagtgcagtggcgcaatctcagctcactgcaacctccacctcccgggttcaagcgattctcctgcctcagcctcctgagtagctgggactataggcgcgcgccaccacgcccggctaatttttgtatttttagtagagacggggtttcaccgtgttggccaggctggtcttgaactcctgacctcaggtgattcaccagcctcagcctcccaaagtgctgggatcacaggcatgaaccaccacacctggccattttttttttttttttagacggagtctcactctgtggcccagcctggagtacagtggcacgatctcggctcactgcaacctccgcctcccgggttcaagcgattctcgtgcctcagcctcccgagcagctgggattacaggcgtaagccactgcgcccggccttgcatgctctttgaccctgaatttgacctacttgctggggtacagttgcttccttttgaacctccaacagggaaggctctgtccagaaaggattgaatgtgaaacgggggcacccccttttcttgccaaaatatatctctgcctttggttttat

SEQ ID NO: 115763 - DNA, 4281 bp, Homo sapiens
gaattccgtttttttttttttttttgagacggagtttcgctcttgttgcccaggctggagtgcagtggtgcgatcatggctccctacaacatctgcctcctgggttcaagcgattcttgtgtctcagccacctgggtagctgggattacaggcaccggccaccgcacccagctaatttcttatatttttagtagagtgggggtttctcatatacattctagtccctaattctgactgcccattttcttaaagtaactgtaaatttaggctgagtcttaagttctaatacagatggtaattcaatttctggcatattcaaggtgctagtctctgtatatcagagttgcagcctaatgcatcagggctagttgtccaaatgcttggagatggcaggtggcaaccacagataaggcaggcctatgtcaaactcaagagtgaatgtttttgctaaagtatttatatttttaaaatgttagtagtaaaccatgttgagcaaacgaaacatatttgtgagcataagtcaacccatggacctcagggctgcaattctttcatggaaatcttctcatgtaatcttcataaaatctctgcccctcaatttgctatgagcttgttctggtccttatctttccaagaaccttagaagttggagtgacctaacaacaaatccacatgggcagaggtccagggactgagctctgaaggatcctgaaagaaaacaatgctgggagcactgctctgaggagtacaaaagtgtaaaagagaaatgaacttaatcacaaaactgaagattgcactgaagaatacttaaaagtcctttttaaaccactcaggtggagagaatgcaattatctggcaccaactatgttctaagaacataattctccccaagattttgaagaacatatttaattcgtacatctacaatgcaaattcatctttcattggcctctataatacccagctttcccaaatgctcttccacagcacaaaaagtaacatcagtttgcaaataaaaggtgcaagaaggtgtacagtacagtcgtgaaaagggcaatatatacatgcatataaaagagaattaacaaacaaaaccttgatttctagagaacatggaagttataccagacaaggagaatgtaggggaatctcatatttatagtacccttacctatacatgacaaagtttacctccataaacaaaaacattagcagatgctgctaacattctgcaagtaataaattcctacttatgcatctgtggatattacactattaaaaggcacatttatttcttgatgcatgtctttgctaatgtcctaaatttgggttccaggtgatctagaaactccagtccctcttcttcctgccgatcgctgcagcaacctactgagccggccagagaacctttgccttcatagttatacgaacaaacgtagtcttcacaatgtttatgctcctcatcttgtccacacaaatacaccttcttttactgtttaatttttaatcagagtgtgtcctctaatggattcttcgccaagccgaggttgggtgaaactctgccagtccgtgtacgcatatctgccagtatctccctgccccactcccttgacggactccaaggtctgatgtccacctcctttgttggaatccaaagtgtagcctcctttgaccatctcaaaactttgctgtgttttgattccctggccaccaacagtaccaacagacatgcttgtgtcacaaatgttggatgtctgcatggggagtctaatatttgcttccgttacttcttctccaggtccttcagtatttgatacaattaaattttgctgggctatgtcttctggaaaacatttcttgactgttctcttagcagtgacacagaaacatgtaaacagaatacataataacaatacagaacccaacaccatagcaagaatagcccatcttccaagtattacatttggtctaacgtctcttgtacttttatccttcattctacactcagatggagttgaacagtcacatactctcactgttaacatatgtgttgcaactaaaccatgcctgtcttttatttgaataggcacagaataatagttataatcaagattttgccgttgacgaagaatggcagttttaccatccttttcttctatgttccagtttttactggcagaattatccagaaagaattgaaaaggtggtccattttcaggtccatctggatctacaggtttcagaacagcaaaatcctcattattctgacaaatggtcacttctttgtcaatttgaggtgcgtgatcgttgtaatcatccaaatgaactactaatgttccagtgcaagatcggccaactgcatccactgcaacaactgaaatattgtattggttgttttttacaaatttggattctctatctagtacttttagagttctcaagtcgccagtgtgttgattaatttcaaaccagttatcttcatcccctaacttctgataccttaagccttcaccactggatatttccgggtccagtgctttgtatccaaggagttcttggccagctgggaagccatcttgactctgaataactttcactggagggtggcattcagggccctcatcactgtctataattttaacggtgacagttgtagtgcacattgtaggagtttgtgagctcgctgctttagagaattgtgcctcgttaatgacaccaacttgcaaaataacttggcgattgacttcatagttcaatggcttgacaacacacagcactccttcatttgtatttggatctgtgctaattatgaagtttccattttcatttccttgtaagattttgtatacagcctttgagtgaggagtgtttggcaaatcctgatcctgtaccttcattcgcaaaatctccacgtcaattctgttttcttctacttctgtaacataagaagtttctgtgaaagatggtggattgtcattttcatcctcaagtgaaatagtaattgttcctgtattaaataaaccgaaaggctgaccacccatgtctcgcacttccattattaactggtaagtatcacatttttctctatccagaaaaggtgtagttgtggtgatgacaccggtatctgggtgtatggagaaatgctttggatgatctgggatttgttgtaagattttatatttcagacgagtatggagagtgtcaggttcgtcaaggtctgtggcggtcacttttcccactgaagttccggatcggcaattttcaggcacagtaaagatagtcactctgtgttcaaaatatggggcgttatcattatcatcttcaattttgatgatcaaagggagtggatattctggtgcatagccatctgcagttgttgcatagccatataacgcaaactgttcgtatttctcacggtcaatgctccttgtacaaaagatatccccagtgtctttctctatgtaaaacaaattgaagggttctttgtccacgcctggcccacttatggaataaaagatggtgtaattctgtgcagcatcagattggatctgctgaacgtgttgtggaaatggacccaacgagttctccatcaatgaagctggaataggagcccatcgtctcttgctgcgcttgagggctgtgtctttggtatgtctcttcttaggagacttgttttctcttgctgacagtacaacttttatctcttgttgttcccgtctctgaccatctgaaaggaaaatggaaaaacttttcctttcagaagacaaaatgaggtcatgtgttgtgtaaattgagccatcttctagaattctgaaggcagggtcactggaccggattaggctggccgacttgagacactcctccagattcactttgcctacaagtgtttcagcctgaagatgagaaggaactcgaagataaactttctgacaagcatcgcaaagtaatgttaaaaccaggagagagaaaaggagctgcttacagaagatgctccctggggcagcagaggccagagccatcagaagcagtcccaatggccagggacggtggccagataacagggcagcctgggatgcacagagcggctaagaagacgctggcacttgcacagggtattctgctgccaccttgatgcagctgagcttggtttggaagacagtccggaggcaagtgataaacagtaggaggagcaacgggagaatttctttccccctattccctggccagtctccttccttccagttcaattacgtctaaatgcaaagaggctttcctacaagt

SEQ ID NO: 115764 - DNA, 1512 bp, Homo sapiens
agcctagcactctgacctagcagtcaacatgaaggctctcattgttctggggcttgtcctcctttctgttacggtccagggcaaggtctttgaaaggtgtgagttggccagaactctgaaaagattgggaatggatggctacaggggaatcagcctagcaaactggatgtgtttggccaaatgggagagtggttacaacacacgagctacaaactacaatgctggagacagaagcactgattatgggatatttcagatcaatagccgctactggtgtaatgatggcaaaaccccaggagcagttaatgcctgtcatttatcctgcagtgctttgctgcaagataacatcgctgatgctgtagcttgtgcaaagagggttgtccgtgatccacaaggcattagagcatgggtggcatggagaaatcgttgtcaaaacagagatgtccgtcagtatgttcaaggttgtggagtgtaactccagaattttccttcttcagctcattttgtctctctcacattaagggagtaggaattaagtgaaaggtcacactaccattatttccccttcaaacaaataatatttttacagaagcaggagcaaaatatggcctttcttctaagagatataatgttcactaatgtggttattttatattaagcctacaacatttttcagtttgcaaatagaactaatactggtgaaaatttacctaaaaccttggttatcaaatacatctccagtacattccgttcttttttttttttttttttttttttgagacagtctcgctctgtcgcccaggctggagtgcagtggcgcaatctcggctcactgcaacctccacctcccgggttcacgccattctcctgcctcagcctcccgagtagctgggattacgggcgcccgccaccacgcccggctaattttttgtatttttagtagagacagggtttcaccgtgttagccaggatggtctcgatctcctgaccttgtgatccacccacctcggcctcccaaagtgctgggattacaggcgtgacatctagcgctccggccacattcagttccttatcaaagaaataacccagaccttaattcttgaatggatacgattatagcccactatttaagtaaaaaaatattaggaaaagggttaacttaaatagatcttaggcaaaataccagctgatgaaggcatctgatgccttcatcggttcagtcatctccaaaaacagtaaaaataaccactttttgttgggcaatatgaaatttttaaaggagtagaataccaaatgatagaaacagactgcctgaattgagaattttgatttcttaaagtgtgtttctttctaaattgctgttccttaatttgattaatttaattcatgtattatgattaaatctgaggcagatgagcttacaagtattgaaataattactaattaatcacaaatgtgaagttatgcatgatgtaaaaaatacaaacattctaattaaaggctttgcaacac

SEQ ID NO: 115765 - DNA, 2215 bp, Homo sapiens
ttcaatgctctacatgcacttatatttcatttaattctctctgcaacctgagatggtatagccacctcattttacagagttgaaactgaggctcagagactgaaagttaagcctgaggttgcagtcaataagaggcagagctggaactgaaacctacctgtgtctgaccaccagttcgtgttctgacggcaggctagtctgcatcacagagtgtggagtagatggtgcatgcctgctaggatgggctaggtatcactgtaggtaagaaacagccccaaactatggaaatgtacaccactgaaggctcttttcctgcccatgctgcacatcctccatggctctcctgtgccctgtgccccacatgccctcatcctgccacgagaataaaggagcagcctccatatgggagctgtcagctgctctaagagatgaaggagagggtggccagactcaatggctcccaactcttttgcctcgaggggacacgcttcacttccactcacatctcttggggcaaagcaaatcccatgggtacatccactttcaagtggcccaagagagaacctgaaatactcggtggactccattaaggctgacatatggtgtcagcctgcatgggagactgtggaggggcagaggaggcgagcggggaactgatggcaaatgacaggaggactaagccaccgcagatttgctttatcctcagccaggtggagtttgtcccagagctgcacaaaatcatcaccagcatgatgaaacagagtagacttcagaaaaagcagtttggtcagatgtaatcagcagtgaactcagaatcaattgagtggccttggagtcagtaaatctctgactgcctcagttaccccatatgatagttttgaggatgggaactttgagagagttgatttggaaggatatcaagagtaaaaattccaacatttttagttcctttaagttaaatccaggcactgtctttcctgcaagtctcctgttcctttcagattgcacaggttcgagagtgctcagattagggctggaggttgtaaactattgctcccacactgacagtgcccccgtgtcgtgcgtgtattctgcgcattttcctgtgctaaacactctcccaaaacatcgtggggcctgattcttcctctttgttccaatggccctgggtgactcaagtgcccattcaatgaccaggacacagaggtcttagagagatgctccttgaggccccaggtgcgagcctgtaccctgccggagcatgaggcaagggacagggcatcgtctgtggggatagtgggggtagtgggggtagtggtcagccagatttggtgactctacttgctcaccagatgatcctacacctgccacctccgatggaaccaaagcctctgtgcctgcctgtactgctgatgctccagtggataactcagcatcccagcctaggcccaatgccccttaaaatggacctgccccctggggacccaggagtcctacccctcagctgtccccaggagtgcccagaccctcatttttatccaggacctaggagccctacccctggccttccctcttcacccgtaaatgatgattttctgctgttaccatcatccctgccttcagtggccaagggccttccaaggggccagctttggaacaaaggatgcccttgggaggtgatgacactcaggtacacgggtgctcaacagattgcttcctcctatcctcaagacggtctttgcatgcatgcagccattggcactcccattgtgtggaagaaaaccagcccagggtcacgcagctggtcagcagcaacatagctggtctcaaatataaggtgcctgaccatgcctccatgaggggccgcctccaagggaggttgatcctggctttggggagcctttcctgggctgcacgaataacctccattgttcgagaccccaaactctgctcacatcttcctttccctatctctgcttgggctatgatcacggtgactctagcagcccttcatccaccctatagtactctctgccattcacaatatacaaaaatgtgtcttcaacccccacttacttggtctctccttttacaaccaccacaaccgaaatctagggcttttttttttttttttttctttttgagacagagtctcattccagcctgggtgacagagtgagaccccatctcaaaaacaaaacaccaaacaaaaaca

SEQ ID NO: 115766 - DNA, 14533 bp, Homo sapiens
acaaaaataagaaatctcatgaacagctgtcagctctgaaagggagcttctgtcggaaccagttcccagggcagagcgaagttgaacatctcacaaaagtgacgggcctcagtaccagagaggtgcggaaatggttcagtgatcgtagataccactgccggaacttgaagggctccagagcgatgatacctggagatcacagttccatcatcattgactctgtgccagaggtgtccttctccccatcgtccaaggtccctgaggtaacctgcattccgacaacagccacactagcaacccacccttctgccaaacgacaatcttggcaccagactcctgacttcacaccaaccaaatacaaggagagagcccctgagcagctcagagccctggagagcagttttgcacaaaaccctcttcctcttgatgaggaactggaccgcctgagaagtgaaaccaaaatgacccgacgagaaattgatagctggttttcagagagacggaaaaaagtgaatgctgaggagaccaagaaggctgaggagaatgcctctcaggaggaagaggaggctgctgaggatgagggtggagaagaggatttggccagtgagctaagggtctctggtgaaaatggctctctggaaatgcccagcagccatatcttggcagagcgcaaagtcagccccattaaaatcaacctgaagaacctgagggtcactgaagccaatggcaggaacgagattccagggctgggtgcctgtgaccctgaggatgatgagtcaaacaaactggcagagcagctcccaggcaaagtgagctgcaaaaagactgcccagcagcggcacttgctgcggcagctctttgtccagacacagtggccaagcaaccaggactatgactccatcatggcccagacgggtctgccacggccagaggtggtgcgctggtttggagatagcaggtacgcactgaagaacggccaactcaaatggtacgaagactataagcgaggcaacttcccaccagggctactggtcattgcccctggcaaccgggagctcctgcaggactattacatgacacacaagatgctgtatgaagaggacctgcagaacctctgtgacaagacccagatgagctcccagcaggtcaagcagtggtttgctgagaaaatgggggaggagaccagagccgtggcagacacaggcagtgaggaccagggccctggtactggtgagctcacagcagttcacaaagggatgggtgacacctattcagaggtgtctgagaacagtgagtcgtgggagccccgtgtccctgaggccagctcagagccctttgacacatcgagtccccaggctggacgtcagctcgaaacagactgaatttgatctgattaatgtgaaggactggccagtctgggaaaccgcctgccacgtggaagagccaaacccgactctctgctgccacatgccgttcccatgcccggctgctgggcacctgggagagcttccagaatcctcgcagacagcccagagcctgccgctaccctcggcctgcccaccaccaagcaagcagcaagcaagatggggttctcatcagttcttcctcccacaatgtaggacctttcctttaccttccaatggataaaatagttcagagttcatagtcatattcatagacacagaatcaagcttttaacatatacatccacctctatatgttaaataaaacatcagattatcaacactgtcattacgtagaaactttggttagccaagcagtgcattgtcagttacgtcatctctaaaaatgacctgtgtctgttctctggggattgctgggtcacaggtgcccctcaccttccacagtcaggcagggaagttataggcacaaagctacgtctggaacccctttgtgccccctttgtgttcctcaaggaagcagtacctttgaagagatctctgctgcattaagtgatgaccggctacgtttcatgtcaggcttgctttgccttgtgggctactcagtgcagaacctgctgtaaccctcagttcaaaaaatggactggcaatgtgattagcgttggatgctttaccattctctttagttgttaccgtaattctgctttttcatgggagtttgaatcatggaccataacttttcagttatcagatcaactaaagaaacatttgttgttaagcctaatgtgctgacctatgtgcctgcattttttttttaatctagacatgtttggagtgagagaaagatggaaaaaagacatggggtagggacgtaagtggaaatctatagccacagcctgaagctttgaccactgcggttttcagagccctttctccacactcatttcagagcctcctatggtttgggaaggaataacacactggcccattagtaagggtgaaggctggagggatttgttgacttcttggaattatcagaggtagggtggtctttagcacaaagacttgcatgcagagatccctggcagaacacccagagtgcccgtggctcccaccccagggtctggccggtgtgctggatgcatgcccaagggtgctgggcatcactggtccttgtgaggatgcttttaaagttttatatttatgtccccaaacttggaaacaagaactctactttagcctaaccctcatgtccttttttgaattgagaaaattacaggaaatggtgcctttgaaaattagaaaacttgcttacagagctgttctaaatggtaaatcctcaatttccccaagaccggttgctctgagagtagctggtaaagaggggcgaactaaagacctgtccacctgtagctccgctcatttcttagaaaccacctgcttcccagagtgccaagccacaagtaccaggcttcgtgggcacagacacctcctgggctgggcagagtgacagtgctagaagaccccagagagagggcaagggctttgggcaagaagcactggtggtgttttagggaccgtccttctcccctacccagggaactggacctggcagggcaccgtgctcatgtggctccaaggacaagcatggcggtggccccttctgccttccaggagaggtcttgcttttgaaactaaaatcatgttcttctaaagtgtcatcttctgccctccctgtcccaatagggaccacatcttatttgtctcaaacagggacttgtgagtacttggcaagttttgcagcctatttttgtattcttaatttggggagtaaagatgtttggtctcaaaaacctttgaggaattgccaagaatggcgagtgattgctttccttcagagaacagacacttggaatttctccttttagtgtttatatacgtgcagattaatttatatatatatatatacacacacacatatacagtataaatactcatttgattctcgtaaaacgcgcatctggcgtgtgcagttgagaaacttggtggcacatgggtgttgggggagtagcctgtgttggagggacaccagtgcactaggcagctggggcggcccaggctgaagccatctccgggtgtctgagaaaccacccagtgcctcacctccagatcctgctggcatcacctccagagccctgcatgcactggctgaagagttggtctgtggagaggattttcttggttacttgtattcacggttaatttacaacccaaacagcaaaacacagttggtggacaagttcatgcaggacctacagtgacccagccatgggcactagctcatctttcaggtggaaaagtacagtgctgcctgccctggtatgtttttcttatagatgttagccctgcccaacagccagggctacactacaaaaggcaagaatgcccatgtaaggagcccagcagtctggacagatccttcttcctctgctgttggatgagagtgagtgagtatggtctggaccttatccttgaaagatgatcaaaagcgatgatgagggaggcagtcatcacgcaggtgcttaaagggacattgtaggaggtactcaagggtttgggggcaaaaccctgaatccagccagtcgtgcacagagacacacccacactagcccagtggcagtgggggatgtgggatggcagcagccaggtatgtagccctgtcacaggacagctcactgtggttttgcacactgcctaagggttaaattgtgttgttgccttcagtagaaggcatttgtgggctgcagagttgagagttgggtgaggttagtctctcctgaagaaaaagcctataaaaagtggctaatcttatcccttttctctgtatgcagttggactcgtcagagatagtaaaatcatcttttagtgtttttttgttgctgatgtcttgtacccatttgttttttacatggggttgtagatcgagttctcaaaggtgaaaccagatgatcattctgataaaggaaatttaaatttgatacatatgctttgtatattttgattacttgttttcgtttttgactataaaggagctttttttcttgctcagagtttacctgggagatttcaccagtttgactcaccatttgcagatgtgcttttgtattaaatttaaattttcacatatcacatccattctcaaggtagttatatgctggagaagaaaaatcctctagacacatgaaggcccacatagtcaagtcttccagggcaaagccagcagcccacccaggtcaggtagccagcagggctcagttcccctcactccagacacggaccctcctcttcagggtctcttgacccagcttccttctctccttttacctgagagcacagacctctctcagccagcctgcccagaccacggggggctactcccatgtagtttggggagcacttgatctcagaaaagctccattgtctgagcaaatgggcagttgtggagctcaagcctttctcctgtgctcaagtcccttccccaagcaaggcttcaacctcatctacccaccatgtagttttctctggccatttaagtggggcggcagggacatggttgggccatgccacaccagggctggtgaggcaaccagttttgattttgacagagtggctggaggaaaagtggcaatcaaggtgctgcttggtttgctctgagtgcaaatggaaccaacaggtttctgctgcaatctgtgtgttcccagtgccaggtcacaccaggaggggtggggcagggctaaccaagtggtctctgaactcaccgagcgtctgcacttggttgtgaagttaatgggagtacagagagcgtctggccttggagaggggttgagagcctcctttttggttcttcattcctgagctcttgcctgcccacaaatctgacctctttgaatggggacgcagtccttcaacagagaagtttctatggcaaagaagtttctatttagctctagatccagcagagtcatccattctaactgccctgaagtctagagcaggggagggaacccagaggctggggatgagactaggcagaccctggttaccatatggacaaggacaggggaaagcacccccttcctcaatttctgaaagttctatctttgggttcgcaggactttgaggatgataaagaacatataggtactagcttgttgttgctggtccaaagcttccacagccctgagaatttggctttcgtggctgctctggcagctgagcgaagggaggaaggcagccgctctggtggggactctaggcaccttccctgctgtccacttggataggcggtgagccccagggtactgagaggagcctgagcatttacctgccattagtgcctcttccttcaggagactggcttgaaacgtgtgttcatgtgcgcgtgcacacacacacatgagcaactgtatgtgttaatgaatagtttttcttggttaatgctttttaacttctgttcctttccgtaagtggatgattcaaaattaacgtgacttggctgggcgcagtggctcacacctgtaatcccagcactttgggaggccaagggaggcggatcacctgaggtcaggagttcgagaccagcctgatcggcatggtgaaaccccgtttctactaaaaatacaaaaattagccgggcgtggtggtgcgcgcctgtaatcccagttactcaggaggctgaggaaggagaatcacttgaacccgggaggtggaggttgcagtgagctgagatcgtgccactgcactccagcctaagaaattgagcaagaccctatctcgaaaaaataaaataataacataaagaaatgatcacaggcagaaactgtatgcacacaccgagtgtggaaaagccctcttgtggaagtcagttatttgtgtacatcagaaaattctggaaggagagaaaccttgtgaaggtactaaatatgacaacatcttcagtaacagaggatgtccccctgtacccagaatggtgcatgctgtggagataccctgcaagtagaccgaatgtgagaaagccacaggagtacatgggcctcgcggtgcatcagagttcctgccagagaggcccacaggcatgaacatggcagagtgtgaaagtcgtctgcgggaagccaggactctatgccagaaacttcacactggggagatatcctcagtgcaatcagtgtagaaatgcctctactaagaactgcttctgattctgaatcacagagttcacagtggagaaaaccacatgaatgtaaaactgtggaaaagttttcagctagaagccagagaattcacactgggagagacatgagaaaacagcaaatgcaggaaaactttcccttggagatcagagctcactgatctcagagttcatacaggagaagagccctatacaatcacgagggtggaaccgcctttggcaagaaaacacgccccattacccatgagagagctgcacaggagagaaaccctatggaataaataattctggaaagcattcagcaacaaatgaaacgtcctaatgtgcactatagagaagccctaggaacacaacaaatgtggagaaggagagtcagtagcgcaacagaaatgtttctcagaggagaagcttttaagttaattacttaaaacctgcagaagcacctagtcccacggtcaaaaccaactgcgcaccagagaagctgcatgggaaagtttgtatgttggataaagtgtggttcaccctcaaaactagctccagacatcacagactagagaatgtatactgatcttaaacagtggtcaatttaacaaatgtaaattctactcccagggacataaaattccataacttaaaccaagctttttgtaaaaactatcagtgaaaaacaaatgtgcgtgcatctgcagcccaagcctcttcctccccaggcctggcgctcagcttgcaaatggacttcccagtacctatgaggaatgaagggtttccatacccgtcctgagccatccacttgggattcaccctcaccacggccatgactctctgtcactgctcccaacctggagctcctaaacccatccccaacccgaacacaacacaaatgcacccctgctccttgttctcacatcactaacattacacacgtgtatctgaatttcttcaggtttgggggtttttttggtgtttttttgttttgtttttttgagacggaggacggagtctcgctcttgtggcccaggctggagtgcagtggcacgagtctcggctcactgcaacctctgcctccccgagttcaagcgattctcctgcctctcagcctcccgagtacctggtagctgggtttacaggcatgcaccaccgtgcccagctaactttttttggtatttttagtagagacgggggtttcaccatgttgggccaggctggtcttcgaactccgtgacctccaggtgatcccaccccgcctttggcctccccaaagtgctgggaatttacagggcatgagccaccatgcccaggtttcaagtttccttttcatttctaatacctgcctcagaatttcctccccaatgttccactccaacatttgagaactgcccaaggactattctgactttaagtcacataatcgatcccaagcactctccttccattgaagggtctgactctctgcctttgtgaacacagggttttagagaagtaaacttagggaaaccagctattctcttgaggccaagccactctgtgcttccagccctaagccaacaacagcctgaatagaaagaatagggctgataaataatgaatcagcatcttgctcaattggtggcgtttaaatggttttaaaatcttctcaggtgaaaaattaccataattttgtgctcatggcagatttccaagggagacttcaagcagaaaatctttaagggacccttgcatagccagaagtccttttcaggctgatgtacataaaatatttagtagccaggacagtagaaggactgaagagtgagaggagctcccagggcctggaaaggccactttgtaagctcattcttggggtcctgtggctctgtacctgtggctggctgcagtcagtagtggctgtgggggatctggggtatcaggtaggtgtccagctcctggcactggtagagtgctacactgtccaacacccactctcgggtcaccacaggtgcctcacacatctgcccaattgcatggaagccattgtcctctgtccaggcatctggctgcacaaccacaattgggtggacacctgtgccaagggtgaatgatgaaagctccttcaccacagaagcaccacacagctgtaccatccattccagttgatctgtgggcatgttggtgaagggcccatagcaacagatttctagccccctgaagatctttctgtcctgggattctcttgctcgctttggaccttggtggtttcttccattgaccacatctcctctgacttcaaaatcatgctcattcagcatttttctttctttaatagactgggtcacccagaaatagctaactacccattttcctcccgcaattcctagaaaatatttcagtgtccgttcacacacaaactcagcatctgttttcataacaacatgagtagtctcttcagtaattagattagttaaagtgatgtggtgttttctggcaaacttgtacacgagcataaattcttctggggtcaggccagacaccaccatggacattcttttgttgaccctttctgttgaagctgtcaattctggcttctccctgctcacactttcttccattgcattatacccagcagtatcagtagtatgagcagcagctggactctgggcagattctgcaactttcaattggggaactttcaatgcagaggttgaagatggtatgttgccaacacgagctgactctggggctctgtcttcagaaggatcagattcagggtcatcagagaagaggctgattccagattccaggtaaggggttccctctagatcttgccttggcaagtaagatgtttccgtcaaatcgtgtggcccagactcttccagctgttgctcctccacatcaacaaccttaatgagctcctcttgagatgggtagtttctattctgaagactcccagagcaactgtgcatgtaccacctatcatctaatgatgggcatttagaaggggatgacctttccactcctggttctttatttttactggtagaactatctgcagacacctcaaacttgtcagcagaaaggccttctggattctggcttatagggtattcactacttttctgtgaagttaatactgctttttctgatgtgctttgttctggatttcgcaggtcctcaagggcagaagagtcacttatgatggaagggtagctgttagaaggctggctcccatgctgttctaacacagcttctagttcagccatttcctgctggagctttatcaggttatgttgcatggtatccctctgctgagtggttaaaatgtcactctgagaggatagccctgagcagtcttcagagacgcttgtttcactctcacacccagatgctgcttcacctaagtttgaatccatgctttgctcttcttgattattttcttccaagcccgttcctctttcttcatcatctgaaaccaattccttgtcactcagaccaactccctggctttcagactgatgcctcatttgtttggaagaaccaatcaagaaaggatcctgggtgtttgtatttgcagtcaagtcttccaattcactgcactgtgaagaaaacaagctagcagaacattttgtttcctcactaaggtgatgttcctgagatgcctttgccaatattacctggttactgcagtcatttaagctattcttcaatgataataaattctcctctgtgttcttagacagacactcggtagcaacggtgctatgcctagtagactgagaaggtatattgtttactttaccaaataacaagtgttggaagcagggaagctcttcatcctcactagataagttctcttctgaggactctaatttcttggcccctcttcggtaaccctgagccaaatgtgtatgggtgaaagggctaggactcctgctaagctctcctttctggacgcttttgctaaaaacagcagaactttccttaatgtcattttcagcaaaactagtatcttcctttatttcaccatcatctaacaggtcatcaggtgtctcagaacaaacctgagatgcatgactacttcccataggctgttctaagttatctgaaatcagatatggagagaaatctgtattaacagtctgaactacttcttcatattcttgcttttttatttcaggatgcttacaattacttccaggaagactttgtttatagacctcaggttgcaaaacccctaatctaagcatagcattcaattttggccctctgtttctacctagttctgcttgaatgttttcatcactggaacctatttcattaatactggagcccacttcattagtactggaacctacttcattaatattgcttgagctggcttctttaaaaacattttctctaatgttattacggctaattgtgctcactgtacttggaatgttctcatttcccatttctctttcaggtgacattgaatgttcctcaaagttttcctctagcagatttttcttacatttagttttaacaaatgacttgatgggaaaaagtggtggtatacgatatgggttttgtaaaagtccatgtttatttggagtaatgagtccagtttcgttgcctctgaactgagatgatagacaaaacctagagcctcctttgatactacatttggcattatcaactggcttatctttctgaccaaccacaggaaagcctgcagtgatattaactgtctgtacaggcttgatattagactcattctttccttgattttcttccttttgttcacattcaaaagtgacttttggactttgtttctttaaggacccagagtgggcagagaatgttgcacattcctcttctgcatttcctggatttgaaaacggagcaaatgactggcgctttgaaaccttgaatgtattctgcaaatactgagcatcaagttcactttcttccatttctatgcttgtttcccgactgtggttaacttcatgtcccaatggatacttaaagccttctgtgtcatttctattatctttggaacaaccatgaattagtcccttggggttttcaaatgctgcacactgactcacacatttatttggttctgtttttgccttccctagagtgctaacttccagtaacgagatactttcctgagtgccataatcagtaccaggtaccaatgaaatactgctactctctacagatctttcagtttgcaaaaccctttctccacttaacatgagatctttggggtcttcagcattattagacactttaactgtttctagtttctcttctttttcttctcttggaaggctaggattgacaaattctttaagttcactggtatttgaacacttagtaaaagaaccaggtgcatttgttaacttcagctctgggaaagtatcgctgtcatgtcttttacttgtctgttcatttggcttgttactcttcttggctccagttgcaggttctttaccttccatgagttgtaggtttctgctgtgcctgactggcatttggttgtacttttttttctttatctcttcactgctagaacaactatcaatttgcaattcagtacaattaggtgggcttagatttctactgactactagttcaagcgcatgaatatgcctggtagaagacttcctcctcagcctattctttttaggtgcttttgaattgtggatatttaattcgagttccatattgcttatactgctgcttataggttcagctttcgttttgaaagcagattctttttcgagtgattctattgggttaggatttttctcattctgaatagaatcaccttttgttttattctcatgaccactattagtaatattcatcacttgaccattctgctccgtttggttagttccctgatttatcatttcaggagtcttttgaactgccaaatctgctttcttgataaaatcctcaggatgaaggcctgatgtaggtctccttttacgctttaatttatttgtgaggggacgctcttgtattatctgtggctcagtaacaaatgctcctataattagattttcagttacatggcttaagttggggaggcttgccttcttccgataggttttcccaaatattttgtcttcaatattactctctactgatttggagtgaactctttcacttttacatattaaagcctcatgaggatcactggccagtaagtctattttctctgaagaaccagaatattcatctacctcatttagaacgtccaatacatcagctactttggcatttgattcagactccccatcatgtgagtcatcagaacctaacagttcatcacttctggaaaaccactcattaactttctgaatgctgctatttagtgttatccaaggaacatcttcagtatctctaggattctctgagcatggcagtttctgcttattccattcttttctctcacacaggggatcagcattcagatctacctttttttctgtgctgggagtccgcctatcattacatgtttccttacttccagcccatctgttatgttggctccttgctaagccaggctgtttgcttttattacagaattcagccttttctacattcattctgtctttagtgagtaataaactgctgttctcatgctgtaatgagctggcatgagtatttgtgccacatggctccacatgcaagtttgaaacagaactaccctgatacttttctggatgcctctcagctgcacgcttctcagtggtgttcaaatcattattactgggttgatgatgttcagtatttgttacatccgtctcagaaaattcacaagcagccttttttgcagaatccaaactgatttcatccctggttccttgaggggtgatttgtaacaattcttgatctcccacactgcaataagttgccttattaacggtatcttcagaagaatcagatcccaattcaatgtagacagacgtcttttgaggttgtatccgctgctttgtcctcagagttctcacagttccaaggttagagagttggacactgagactggtttcctgcaaggaaggattttcgggttcactctgtagaagtcttttggcacggtttctgtagcccatactttggatgatagaaacttcatcttttagatgttcaggagagttattttccttttttgcaaaattatagctgtttgcatactccaaacctgtgtcaagctgaaaagcacaaatgattttcaatagctcttcaacaagttgactaaatctcgtactttcttgtaggctccttttggttatatcattcttacataaaggacactgtgaaggccctttcttctggttgagaagtttcagcatgcaaaatttgcaaaatatgtggtcacactttgtggagacaggttccttgatcaactccagacagatgggacactctaagattttctgcatagcattaatgacattttgtacttcttcaacgcgaagagcagataaatccatttctttctgttccaatgaaccagccggtgttttttgttttgttttgttttgttttgttttgagacagtctcgctctgtcgcccaggctggagtgcaatggcgcgatctcggctcactgcaacctccgcctcccgggttctagcgattctcctgcctcagcctcctgagtagctggagcggcaccacgcccggctaatttttgtatttttagtagagacggagtttcaccacgttggtcaggctggtctggaactcctgacctcatgaccagccgacgtttttaaagacatagtgtccccctcaaggcatattccagttcctatcacgaggattcccccacggacactcagtgcccccttcctgatcctcagcgcttccctcgcgacctacaaactgcc

SEQ ID NO: 115767 - DNA, 472 bp, Homo sapiens
  misc_feature (1)...(472): n = a,t,c or g
tggggangnnnnnaatcgagatccatagcccgtgtggtggaattctttctctgctgtggatgccacttttggaatacgccaggaacatgctaaggacctggagctctctaccctggacccgttttcgggtttgcttgctctctctctctctctttctctgggctaatcgtttagaggacagtcgctcctgccaacctaatcccatgagcctgactaccttgccgggccacaggctcaaagaagcagtgtggctgccagcaccctcacgcaccatgagtcctcaccttgaccctaatcaacttgggattctcctcagagtacttagaaaggaaaaggaagacggtgactaccctgacatgatggccacccacccgagctccaggtatgaagcctgctcctctggaattactctagcggccccgccgacccacggcccacgacccaccgacccacgaatcggcccggcccccgn

SEQ ID NO: 115768 - DNA, 735 bp, Homo sapiens
atgctaaggacctggagctctctaccctggacccgttttcgggtttgcttgctctctctctctctctttctctgggctaatcgtttagaggacagtcgctcctgccaacctaatcccatgagcctgactaccttgccgggccacaggctcaaagaagcagtgtggctgccagcaccctcacgggctttggcatcagttaaaatgccaacctcttgggaggatcagcctcttaaatctcccatcgtgaaagcaggttctgatagagggacaaagagagaggaggaacatgaaatcattctagagcctgttccacttcttgcccagaccctggagatggtctcccaattggtccgcatgcagctggcctctcttccctccaatctttcaacaccctgcaccatgagtcctcaccttgaccctaatcaacttgggattctcctcaaagtacttagaaaggaaaaggaagacggtgactaccctgacatgatggccacccacccgagctccaggtatgaagcctgctcctctggaattactctagagaagcctgagaaattgcggagtgggaaggtgaaggaagaagttgactcccttattgggtcagcttttcctgtcacacctcaaggtggttggcaaaggcagagctggtttggcaaggaccgggaccagaagagggatgaacaggtgtctgcaacagattcctttgaagaatactttaatggccttatgccataa

SEQ ID NO: 115769 - DNA, 677 bp, Homo sapiens
tttttttttttaacctatctaaatttaagttatttatttaagccaatctccttgcccaacaaggcaaaagggatggggagacccaagtatacccagtcattcattttgatacaaagtaaagaaaggttaaccttaaggtcccccaaaaaactttttctgggtccaatgtgccaagagtaaacggtcccaaaacccagtgcttgttgggtgcccctggtgccccgggtaagtggtcccaaaattctctttaattccatccttccgtaagcccagttgggaagtggaattccacaatgaggggttatggaatcagagtatcggttacccattcttccccaagggaaacgggcttggtgcctgatggcggagatggggggtaggccgatgaactccgggtctctccgtgctctcccgtgggtgcggactttcagggtacacatttcagcattgctgacttgccaccccgggggaagcgcgaccgaagaaaggtgaagagtcttccacatggcgaagctgagaccctacttcgccatggggcgccagctcgyacatagggccgcccccagctggtggggcggaacccgacgccaggcaagccgaagaaaccggaggacaccaccaactaccgccatttttgatctggactgccgcaagcgccctcgtgccaaaatcttggg

SEQ ID NO: 115770 - DNA, 453 bp, Homo sapiens
atgaatgaaagccagcgcagatctagtatcctctgcccggttaatacctgtctgaaagccgcgggccctgccccagcagcggatgccaagagcgcgagccagaggtcacagaagctcagcggggagcggggctcgcacaatgcagccagccaaaccatcaaccaaagggtataccaaagaaaatttcagaaacacaaagtctcaaaacttttacttcccaagtaccttttctcaaagcagctgctggaggatatgctccaccaaagtgaggaagtaaaacgagaaagaggaagaaacaagctccagaaaacaggggatgcgacacaggagagaagcagagggaatttccaagatgatggtaaagggaagtcacaggatgacaattgtgaagcaggccaagagatcaataagttcagactagaacaggaagacaaaggactccaaccaagatga

SEQ ID NO: 115771 - DNA, 379 bp, Homo sapiens
  misc_feature (1)...(379): n = a,t,c or g
cccagagcctgccttcatctaggatggctcctctgggcatgctgcttgggctgctgatggccgcctgcttcaccttctgcctcagtcatcagccagggcaggctgtccctgcaggatcccacgtacggctgaatcttcagactggggaaagagaggcaaaactccaatatgaggacaagttccgaaataatttgaaaggcaaaaggctggatatcaacaccaacacctacacatctcaggatctcaagagtgcactggcaaaattcaaggagggggcagagatggagagttcaaaggaagacaaggcaaggcaggctgaggtaaagcggctcttccgccccattgaggaactgaagaatgactttgatgagctgaatgn

SEQ ID NO: 115772 - DNA, 627 bp, Homo sapiens
tttcgtcggaggccgaaggtccctgactatggctccccagagcctgccttcatctaggatggctcctctgggcatgctgcttgggctgctgatggccgcctgcttcaccttctgcctcagtcatcagaacctgaaggagtttgccctgaccaacccagagaagagcagcaccaaagaaacggagagaaaagaaaccaaagccgaggaggagctggatgccgaagtcctggaggtgttccacccgacgcatgagtggcaggcccttcagccagggcaggctgtccctgcaggatcccacgtacggctgaatcttcagactggggaaagagaggcaaaactccaatatgaggacaagttccgaaataatttgaaaggcaaaaggctggatatcaacaccaacacctacacatctcaggatctcaagagtgcactggcaaaattcaaggagggggcagagatggagagttcaaaggaagacaaggcaaggcaggctgaggtaaagcggctcttccgccccattgaggaactgaagaaagactttgatgagctgaatgttgtcattgagactgacatgcagatcatggtacggctgatcaacaagttcaatagttccagctccagtttgga

SEQ ID NO: 115773 - DNA, 369 bp, Homo sapiens
atgcgccctgacccggagcgccccgcgacgcggggccggcattcggccgcgacggccgtgccaggctcggcgcgtatccgcgttaccaccccctatttcaagtgccacgcaaaggccttatctgttaaagggatatttaccgagatatttacagtgctgcctggatggcctgccaaaactgcaacactagctgccaccagcattgctgcccataaaggagcagagtgcagcagtgggtacggcaggatacagcaagagctgaagacccttgtgatctctggcaacaaaggaatttctgccttacctgcatcagacaaccttttgaaatcagtaggaccatccctgaagcagctggcacagaagacctga

SEQ ID NO: 115774 - DNA, 543 bp, Homo sapiens
ctatggagcagtctgtccctcctggctcatctggggcaatatgagagcaaatggggctagaacaaaactggatgaaaggagaaactctggggctgctgaattcacatgccgatggtgctggcccaggagttggagaagcttcaggaggatccatccaggggaaggtggaacagttgcaggcccagctgctgtctcatgcaagaggtgatccagcagcgaagagacatatataaggtagcaaatggctgctgctttactcccctctccaaattttgcccgagaatctctcctgtgacccaccctcctttgtggctgccctgatggaaggggctcaggagcaacagccttcatggtgcccaccctctgggccagaacaacggatgccccacaactgagtttagtgcctccaagaaccacaggtgagggttctctgaggcactgtgaagaatctgatagtcgaactgaatgaagccaagtccagtctttacggaaaaatttacacaacacttccaggtgggcagattcaaagacaggatgaatcat

SEQ ID NO: 115775 - DNA, 885 bp, Homo sapiens
tttttgtattttcttcactccactgttacattttctgtttgtatcataatgccattttttttctttttaccatatgacttcctggtggaaggtggaaacccagcattcagatgatcatttgaaacatcatcttcccctgtttgttagcttgggatctggccgtcctgcagtctttccgtgtgttgatggttgtgtgtgaagattatttgtgcatcatttagtctgcatttattcatcttgtgagctgaggattctgctaagcaccccagagatggatggaggctggcagggattcgccttcatcctgtgattcagcaatgcaggctcctccacccgtggtagcgccgtgtcaatacgtagcttctcaggtcgaaggccgtggcggcggcacttttgcccatgaattgctcgctgtggagtacgcaggctggatttctcccgcgtttcggctgaaggtaaaccagccatttatcgactatcgaaccggaagattacaacctgctattccgcagagtctccctgaagctctccgtttggctgccgacctggcagagcaaaagcaacggctggagcaaaaaatgcttatggatgcacctaaagtcgaattcgctgaacgcgttgctaccgccagcggggttctaatcggcaactatgccaaagtgctcggcctgggccaaaactatctcttcacctggttgcgtgataacggaattctgatcgcaaccggtgaacgcaggaacgtccccaaacaagaatacatatctcgtgggtatttcacccttaaagaaaccgtgatcgatacaagcaatggaagcaggatttctttcacgactcgtataaccggcaaaggtcagcagtggctgatgaagcgattgcttgatgctg

SEQ ID NO: 115776 - DNA, 597 bp, Homo sapiens
atggttcagagggatcaaggggcctttaaaacacatcacaaggccaaccccagtgtctggccaggtgagcaccagactcatactggactcaacgtcattcctcggatttctgggcttggaaacaaggaccacaatgctcagtcgctttctggtcacatcagcttaagactgccagtggttctgtttcttgatattttggtatctgtggggatcctggaaccaatttctgtgagattttttctgatgatcatcaaacttgggtttttacatcatttaggcacttattcatccactcagtgtgctagacgcttcaacaggcaccagccaaagtgtgaaaaccaaattgtgcatctacctctccttaaccagctgcaggcctcctcacttcttgccacagcaaagcagcagcagcaaaaccctttgctagaagaaatgggaagcctgcggccttgtgaagaaggtgcttgcttcgtctttgccttctgccatgacaacatgaacattgtcgggaacatgctgctttccagacagacatatcctccagttcacctgctccttttacctcctcacaagtgtcattatgacctgcagagttaa

SEQ ID NO: 115777 - DNA, 339 bp, Homo sapiens
atggaagttactcgagtgaacaaatgccgagaattttctatggttttgtttggtctagggggcaaggacaccatactgttcagcgaccccactcttcctagtggacagaggtcgagatccccactgctgaagtttgtcgagcagcccactgagaacaaagcagatcccaaggatgggaaatcttggcacattgcctggtatatgggaagtctgcgaagcagtagaatagagagaaaagctcctgctttaccagatagacagttctggaggcagggtgttctggaagggatcaaagacccatatagagacccagataagccaacaggtttgagaacctga

SEQ ID NO: 115778 - DNA, 675 bp, Homo sapiens
atggacgatatcccgcaagaggcccggcagtaccggcataaccaagcctatgcctacagcatccagggtgacggtgccgaggatgacgatgagcgcattgttagatttcatacacgggtcaccgtcgacagcgacacacttgcatcggatgcagcccggttaacgtgccggcacggcctgggtaaccagtgcggatgttcgactccaaacatcaaagccaacgagaggttcaggttactcctccttgaccccaaacatccagtgagtggagactggcctgttcacagagtaaaatatgtcgtctctaattcggcaaagacggtgatgactgtatatatgcaggccaattccgtaagtaaagtttcatgtaaaactaattaccggatattccaaccaccccctgtgcaggccagccgcatgcacaagggacaggatttattccccactggaagcaactggaaaactggaaaaaaatatacaaaacagcagttctcaagacattgtgtgccggcaacaaaggacagtgatgctggagagatgagaaataagcaagtctgggaccacggtcccactcgtatcgtcggtctgattattagtctgggaccacggtcccactcgtatcgtcggtctgataatcagactgggaccacggtcccactcgtatcgtcggtctga

SEQ ID NO: 115779 - DNA, 699 bp, Homo sapiens
atggctaaagctggaaatcatcatcctcagcaaactaacacaggaacagaaaaccaaactctgcatgttctcacttataagagggagatgaacaatgagaacacatgtacacagggagggggacatcacacaggtacctgtgcacaacatgcagaggtgatcgactgtgtgcctgccctgggggactctactgaacattgctctcttcggtacctttcctgcctctattgttcaggggcagcatgtctcctgaacctggccctcttctacctctatggaacagatttacctttggagagatttacagctgaaaatggacagtggggtggcattggtgaaaggcaacacagaaataaacttcggatactgctctatggggaattcctttgtggcaaccaaaacagctgtccactggtaggcttagcttcaactattaattcagctgtggcacaggagcaagcttcagagatgcgctctgtggaagggttctctcgatccctggaattttggtgttacattctcagtctatattgggtatctgctctcctgaagaatctttgctttttgcacacagagccgctgaaaacgactgaagagagcaagggatttcctgggacatctggctctggaggtgagcgacagcagggaatgacgtcagggacctgggagactgatcacctggatggtgactttttatga

SEQ ID NO: 115780 - DNA, 1017 bp, Homo sapiens
atggatcccagccccaaacctcacgccataaagccccgaagaggcgggttgggggcgggggccggggcggacttccaggggcgtggctgcgcgcctgcgaccccggaccgtgccaatctcgccgccgccccaaaacctgtgggaaaccccagtcctgccacccactcctcctggaggacgcagacaggatctgctctgcaggagcccaggccggccgatccgcgtcccggccacaaagttgcacttcgagagcccaaatcacccgcagacaaaacccatctttgggaacaaagtacccgcttgcaggcgctcttcccgggctggaaggctggcgtgcggaaacggacacacccacccgtggggcccgcctctagctaccgcgggaccaccggttaccgagccagggacccggctcccccagttctccggagcggctggggagctccagccgactcgcagtattcccggagcaggcaccgcaggaccctggctccacgcccctcggacgctttctcctcagatgccgcccggcgggccggggtccccctggcgggctgcgcgggcgctgcgcgagctaaaccaaacctggccggaaaagacgcggccaaggcccgctccgtccacgcttcccgccggcccggcaaggggttccggagaacggcttgggggggcgagaaccatgggcgggggaaatggaagacagagggaactgaagcacgggggtcttcgatgagcagtgcggatgttcgactccaaacatcaaagccaacgagaggttcaggttactcctccttgaccccaaacatccaagtaaaatatgtcgtctctaattcggcaaagacggtgatgactgtatatatgcaggccaattccgtaagtaaagtttcatgtaaaactaattaccggatattccaaccaccccctgtgcaggccagccgcatgcacaagctgaggacccctaaaaaacagcagcccaccctaaggtgtataccccagactcacatgtcactcgactaa

SEQ ID NO: 115781 - DNA, 727 bp, Homo sapiens
gaacctggccctcttctacctctatggaacagatttacctttggagagatttacagctgaaaatggacagtggggtggcattggtgaaaggcaacacagaaagatactagcagaggacagtcaaggacaccagttaacaaatgcaatggcagtgaaaatggattctgactctccactcagcaaaataattggtgtcccaagtccttcaagtttacttctttcctctgaatccgcccggcgggccggggtccccctggcgggctgcgcgggcgctgcgcgagctaaaccaaacctggccggaaaagacgcggccaaggcccgctcggtccacgctttccgccggcccggcaaagggttccggagaacggcttgggggggcgaaaaccatgggcgggggaaatggaagacagagggaactgaagcacgggggtcttcgatgagcagtgcggatgttcgactccaaacatcaaagccaacgagaggttcaggttactcctccttgaccccaaacatccaagtaaaatatgtcgtctctaattcggcaaagacggtgatgactgtatatatgcaggccaattccgtaagtaaagtttcatgtaaaactaattaccggatattccaaccaccccctgtgcaggccagccgcatgcacaagaaaaaaggggaacgtgtaaccctagaaattgatggagctgaaatggatcttcaagtaaatatcgtggtttga

SEQ ID NO: 115782 - DNA, 798 bp, Homo sapiens
tcagtgctctcagaggattcttcttctcttttctaatctccaaatgttggtgctccttgggcttgatttttttgtcctcagccatcccctcgcctaaaaatgccccagaagcctgtcaacatctggatccatatttccatttgggagccccctggagccctggactggtctccataatttctcaccttgtgctctggagctgtgccttcagctgtttcttctccatctgcattgggatgtctcagcttttaccactggacttggggtctaccttacagacctggcccctttccagggctccccagctctgaaaatggcattgccatctcaccagtaaggcaaaccagaagctcaggggtcatcctgaacgctgccctcttccagcccctcttcattccatccagcaccaagactaaccagaatatgcagatcatgtccaaatcctgtccactacaacaaagcttccgaactagcctccctgtctacccatgctgctctaatgatttctccacagaacagccagagtcccaggcagattacagcaacataccagggcagaatgtcataaatggagccatatgttcctgtcagtacaaaatggaaccatatggcgttcataaaaatggctctgagggtggaaagaagaactggatcctatttggccagtctccacctgaaagtcaatccttccaggcctacattgggtcccctcttagaccttctcttctagcagctgacacagtccacggttgtgtatcgctggcattatctgctcaatgttgtgccctttcccattag

SEQ ID NO: 115783 - DNA, 1128 bp, Homo sapiens
atgaagggtaactggaactctcataggttgctggtggaagtgccaaaatggacccccttgtgggccttcatcaacatccttagcgggcttgtctttctgcatccagtgcctatgtctggcgaggtccaggactcagccccaggcctcttctccttggcattccctcagggacctcacatcaacacatctggatgggctggcttcaagtctgaactctgccacctccttgttgtgggcaagtttctcaacctctgtgtccgcaggccccacaaagtcaactttgaattgtggccattacccctccctaatccacttgcttctccaagtcccagtgagatcgtcataagacaaatatctgcctgtggctcttacctgctcaaaacccttccacggcatcctattgcctacaagattaagtccaagatgttgagcatctttttcgtctccttgtttcctccattggtcacactcaactacagatgcttcttgacttatgatggggctacatccaaattaacccactggctccccagctctgaaaatggcattgccatctcaccagtaaggcaaaccagaagctcaggggtcatcctgaacgctgccctcttccagcccctcttcattccatccagcaccaagactaaccagaatatgcagatcatgtccaaatcctgtccactacaacaaagcttccgaactagcctccctgtctacccatgctgctctaatgatttctccacagaacagccagagtcccaggcagattacagcaacataccagggcaggaaactgttcttgatgagggtctagtggcccctaattactacatccagtgggctctcggtccctgtctagctggcctttctcttttgtctgttggctctcttttggaagtgctccacatccccagttcctgtcagtacaaaatggaaccatatggcgttcataaaaatggctctgagggtggaaagaagaactggatcctatttggccagtctccacctgaaagtcaatccttccaggcctacattgggtcccctcttagaccttctcttctagcagctgacacagtccacggttgtgtatcgctggcattatctgctcaatgttgtgccctttcccattag

SEQ ID NO: 115784 - DNA, 402 bp, Homo sapiens
  misc_feature (1)...(402): n = a,t,c or g
ccggcagaagctgagcctgagcaccaagctcaagcaggtggaggacgagaagaattccttccgggagcagctggaggaggaggaggaggccaagcacaacctggagaagcagatcgccaccctcctttaccgaggacagcctgcctctgccacagcaaggctgtcggggtcaagctggaaaggccagcagccttccagtggcttctcccaacactcttggggaccaaatatatttaatgggtaagggacttgtcccaagtctgacagccagagcgttagaggggccagcggccctcccaggcgatcttgtgtctactctaggactgggcccgagggtgggttacctgcaccgttgactcagtatagtttaaaaatctgccacctgcacaggtatttttgaan

SEQ ID NO: 115785 - DNA, 519 bp, Homo sapiens
cggaattttatcatttattacaagaaaggggaaaaaagaaaaccttattttgctttcaaaaatacctgtgcaggtggcagatttttaaactatactgagtcaacggtgcaggtaaaccaccctcgggcccagtcctagagtagacacaagatcgcctgggagggccgctggcccctctaacgctctggctgtcagacttgggacaagtcccttaaccattaaatatatttggtccccaagagtgttgggagaagccactggaaggctgctggcctttccagcttgaccccgacagccttgctgtggcagaggcaggctgtgagtgcttctgcctcatctcctggatctgggcctcgtgggtcttggcctcctcctccagggtcttcttcaggatgttcacctcctgctcacgttttgacctgagctcctgctgggcagctgtggaatccagcgtgtcctccaactctgttttcagagcctctagctcttccccaaggtcccgtttctgcttctcagctt

SEQ ID NO: 115786 - DNA, 6432 bp, Homo sapiens
atggtacgattcgtggtgcatccggccggtggatttaggatactaagcagtgcgccaggtgtgagggtagactgcgagatccccacaaagacagcatctgtgacactgtgctccctgtctgggaaacgggcagctctttgggagcaagaccgagaagatcaatccatcttgtgcactggtgaatctggagctggcaagacggagaacaccaagaaggtcatccagtatctggcgtacgtggcgtcctcgcacaagagcaagaaggaccagcgcaccatagctgtcatgtcccatgcggaacctgaccccggcacggtggatggggactccgctctcacggagccctccacgctctgtggtccagaccagatgcagatggccggctgccctcacctgccaccgccgtgccagtcagaagcagtgccggggagttctcacgttggagtttttcagaggcagggcaggctcggcagcccaggtcgctgcccggccttcactgcgtccctgggttccttgcagggcgagctggagcggcagctgctgcaggccaaccccatcctggaggccttcgggaacgccaagaccgtgaagaatgacaactcctcccgcttcggcaaattcattcgcatcaactttgatgtcaatggctacattgttggagccaacattgagacttgtatccttgtgcttgtgttgctccttaatatttgcaaagatcttttggagaaatctcgtgctatccgccaagccaaggaagaacggaccttccacatcttctattatctcctgtctggggctggagagcacctgaagaccgatctcctgttggagccgtacaacaaataccgcttcctgtccaatggacacgtcaccatccccgggcagcaggacaaggacatgttccaggagaccatggaggccatgaggattatgggcatcccagaagaggagcaaatgggtacagggctggccctcctatggtcgagtgtggggcagaggaaggctggcctgctgcgggtcatctcaggggttcttcagctcggcaacatcgtcttcaagaaggagcggaacactgaccaggcgtccatgcccgacaacacagctgcccaaaaggtgtcccatctcttgggtatcaatgtgaccgatttcaccagaggaatcctcaccccgcgcatcaaggtgggacgggattacgtccagaaggcgcagactaaagagcaggctgactttgccatcgaggccttggccaaggcgacctatgagcggatgttccgctggctggtgctgcgcatcaacaaggctctggacaagaccaagaggcagggcgcctccttcatcgggatcctggacattgccggcttcgagatctttgatctgaactcgtttgagcagctgtgcatcaattacaccaatgagaagctgcagcagctcttcaaccacaccatgttcatcctggagcaggaggagtaccagcgcgagggcatcgagtggaacttcatcgactttggcctcgacctgcagccctgcatcgacctcattgagaagccagcaggccccccgggcattctggccctgctggacgaggagtgctggttccccaaagccaccgacaagagcttcgtggagaaggtgatgcaggagcagggcacccaccccaagttccagaagcccaagcagctgaaggacaaagctgatttctgcattatccactatgccggcaaggtggattacaaagctgacgagtggctgatgaagaacatggatcccctgaatgacaacatcgccacactgctccaccagtcctctgacaagtttgtctcggagctgtggaaggatgtggaccgcatcatcggcctggaccaggtggccggcatgtcggagaccgcactgcccggggccttcaagacgcggaagggcatgttccgcactgtggggcagctttacaaggagcagctggccaagctgatggctacgctgaggaacacgaaccccaactttgtccgctgcatcatccccaaccacgagaagaaggccggcaagctggacccgcatctcgtgctggaccagctgcgctgcaacggtgttctcgagggcatccgtatctgccgccagggcttccccaacagggtggtcttccaggagtttcggcagagatatgagatcctgactccaaactccattcccaagggtttcatggacgggaagcaggcgtgcgtgctcatgcatcctgttgtttctggcgtgtccaggttagcagctgctacctttggccttgttttacttcacgttctttctaaagaatcagaaagctttggctgcagaataaaagccctggagctcgacagcaatctgtaccgcattggccagagcaaagtcttcttccgtgccggtgtgctggcccacctggaggaggagcgagacctgaagatcaccgacgtcatcatagggttccaggcctgctgcaggggctacctggccaggaagactccttaccgtgtgacccttgtggggacagcacccagagcctgcctgtccctaaagaaccctgtgattccaggggagcaggccatcctcgagtccagactcatctttgactccctggggaatgacggctcccctgctgcaggacagcggctagcatttgccaagcggcagcagcagcttaccgccatgaaggtcctccagcggaactgcgctgcctacctgaagctgcggaactggcagtggtggcggctcttcaccaaggtcaagccgctgctgcaggtgagccggcaggaggaggagatgatggccaaggaggaggagctggtgaaggtcagagagaagcagctggctgcggagaacaggctcacggagatggagacgctgcagtctcagctcatggcagagaaattgcagctgcaggagcagctccaggcagaaaccgagctgtgtgccgaggctgaggagctccgggcccgcctgaccgccaagaagcaggaattagaagagatctgccatgacctagaggccagggtggaggaggaggaggagcgctgccagcacctgcaggcggagaagaagaagatgcagcagaacatccaggagcttgaggagcagctggaggaggaggagagcgcccggcagaagctgcagctggagaaggtgaccaccgaggcgaagctgaaaaagctggaggaggagcagatcatcctggaggaccagaactgcaagctggccaaggaaaagaaactgctggaagacagaatagctgagttcaccaccaacctcacagaagaggaggagaaatctaagagcctcgccaagctcaagaacaagcatgaggcaatgatcactgacttggaagagcgcctccgcagggaggagaagcagcgacaggagctggagaagacccgccggaagctggagggagactccacagacctcagcgaccagatcgccgagctccaggcccagatcgcggagctcaagatgcagctggccaagaaagaggaggagctccaggccgccctggccagagtggaagaggaagctgcccagaagaacatggccctcaagaagatccgggagctggaatctcagatctctgaactccaggaagacctggagtctgagcgtgcttccaggaataaagctgagaagcagaaacgggaccttggggaagagctagaggctctgaaaacagagttggaggacacgctggattccacagctgcccagcaggagctcaggtcaaaacgtgagcaggaggtgaacatcctgaagaagaccctggaggaggaggccaagacccacgaggcccagatccaggagatgaggcagaagcactcacaggccgtggaggagctggcggagcagctggagcagacgaagcgggtgaaagcaaacctcgagaaggcaaagcagactctggagaacgagcggggggagctggccaacgaggtgaaggtgctgctgcagggcaaaggggactcggagcacaagcgcaagaaagtggaggcgcagctgcaggagctgcaggtcaagttcaacgagggagagcgcgtgcgcacagagctggccgacaaggtcaccaagctgcaggtggagctggacaacgtgaccgggcttctcagccagtccgacagcaagtccagcaagctcaccaaggacttctccgcgctggagtcccagctgcaggacactcaggagctgctgcaggaggagaaccggcagaagctgagcctgagcaccaagctcaagcaggtggaggacgagaagaattccttccgggagcagctggaggaggaggaggaggccaagcacaacctggagaagcagatcgccaccctccatgcccaggtggccgacatgaaaaagaagatggaggacagtgtggggtgcctggaaactgctgaggaggtgaagaggaagctccagaaggacctggagggcctgagccagcggcacgaggagaaggtggccgcctacgacaagctggagaagaccaagacgcggctgcagcaggagctggacgacctgctggtggacctggaccaccagcgccagagcgcgtgcaacctggagaagaagcagaagaagtttgaccagctcctggcggaggagaagaccatctctgccaagtatgcagaggagcgcgaccgggctgaggcggaggcccgagagaaggagaccaaggctctgtcgctggcccgggccctggaggaagccatggagcagaaggcggagctggagcggctcaacaagcagttccgcacggagatggaggaccttatgagctccaaggatgatgtgggcaagagtgtccacgagctggagaagtccaagcgggccctagagcagcaggtggaggagatgaagacgcagctggaagagctggaggacgagctgcaggccaccgaagatgccaagctgcggttggaggtcaacctgcaggccatgaaggcccagttcgagcgggacctgcagggccgggacgagcagagcgaggagaagaagaagcagctggtcagacaggtgcgggagatggaggcagagctggaggacgagaggaagcagcgctcgatggcagtggccgcccggaagaagctggagatggacctgaaggacctggaggcgcacatcgactcggccaacaagaaccgggacgaagccatcaaacagctgcggaagctgcaggcccagatgaaggactgcatgcgcgagctggatgacacccgcgcctctcgtgaggagatcctggcccaggccaaagagaacgagaagaagctgaagagcatggaggccgagatgatccagttgcaggaggaactggcagccgcggagcgtgccaagcgccaggcccagcaggagcgggatgagctggctgacgagatcgccaacagcagcggcaaaggagccctggcgttagaggagaagcggcgtctggaggcccgcatcgcccagctggaggaggagctggaggaggagcagggcaacacggagctgatcaacgaccggctgaagaaggccaacctgcagatcgaccagatcaacaccgacctgaacctggagcgcagccacgcccagaagaacgagaatgctcggcagcagctggaacgccagaacaaggagcttaaggtcaagctgcaggagatggagggcactgtcaagtccaagtacaaggcctccatcaccgccctcgaggccaagattgcacagctggaggagcagctggacaacgagaccaaggagcgccaggcagcctgcaaacaggtgcgtcggaccgagaagaagctgaaggatgtgctgctgcaggtggatgacgagcggaggaacgccgagcagtacaaggaccaggccgacaaggcatctacccgcctgaagcagctcaagcggcagctggaggaggccgaagaggaggcccagcgggccaacgcctcccgccggaaactgcagcgcgagctggaggacgccactgagacggccgatgccatgaaccgcgaagtcagctccctaaagaacaagctcaggcgcggggacctgccgtttgtcgtgccccgccgaatggcccggaaaggcgccggggatggctccgacgaagagcccatccgaaggtcatcatcctcaaagatcaaagataaattcatgaagataaggaaaaaccagcacaaaaacgctgaaaattccaaagaccagaatgtctcttctccaaatgattgcaactcctctccagcaagggcacaaaactggatggagaatgaatttgacgaattgacagaagtaggcttcagaagatgggtaatgagaaactcctctgagctaaaggagcatgttgtaacccaatgcaaggaagctaagaaccttgatgaaaggttacaggagctgctaactagaataaccagtttagagaagaacgtaaatgacctgatggagctgaaaaacacagcatga

SEQ ID NO: 115787 - DNA, 404 bp, Homo sapiens
tttcgtccgcctcgtgcgctcgccccacccggccgccgcccgagcgctcgagaaagtcctctcgggagaagcagcgcctgttcccggggcagatccaggttcaggtcctggctataagtcaccatggcacaacaagctgccgataagtatctctatgtggataaaaacttcatcaacaatccgctggcccagaccgactgggctgccaagaagctggtatgggtgccttccgacaagagtggctttgagccagccagcctcaaggaggaggtgggcgaagaggccatcgtggagctggagcacaatgggaaaaatgtggaggtgaacaaagatgactcctctaagaggaacctccctcaaatcttcaaggttgaggaaatgggtcagctgacgcgcctttaacg

SEQ ID NO: 115788 - DNA, 421 bp, Homo sapiens
gcgcggggacctgccgtttgtcgtgccccgccgaatggcccggaaaggcgccggggatggctccgacgaagagcccatccgaaggtcatcatcctcaaagatcaaagataaattcatgaagataaggaaaaaccagcacaaaaacgctgaaaattccaaagaccagaatgtctcttctccaaatgattgcaactcctctccagcaagggcacaaaactggatggagaatgaatttgacgaattgacagaagtaggcttcagaagatgggtaatgagaaactcctctgagctaaaggagcatgttgtaacccaatgcaaggaagctaagaaccttgatgaaaggttacaggagctgctaactagaataaccagtttagagaagaacgtaaatgacctgatggagctgaaaaacacagcatga

SEQ ID NO: 115789 - DNA, 385 bp, Homo sapiens
tgtacttaattcctggcagggaaggacaaggggtgagttggagagagacatgccaggggctagcagtttgcagtgatgtcctcttcctgcatccaggagttgggtgcgagtgtctgtgtgtttgtgatgctttaagcctgacacacgtttcataacgagtgctcagtattttgtataagtaattgacacggagacagaacccatggcactgagggctatgtgggctccccctgcattgcagagcgcctccgcagggaggagaagcagcgacaggagctggagaagacccgccggaagctggagggagactccacagacctcagcgaccagatcggcgagctccaggcccagatcggggagcttaagatgcagctggccaagaaag

SEQ ID NO: 115790 - DNA, 417 bp, Homo sapiens
cgcaccatagctgtcatgtcccatgcggaacctgaccccggcacggtggatggggactccgctctcacggagccctccacgctctgtggtccagaccagatgcagatggccggctgccctcacctgccaccgccgtgccagtcagaagcagtgccggggagttctcacgttggagtttttcagaggcagggcaggctcggcagcccaggtcgctgcccggccttcactgcgtccctgggttccttgcagggcgagctggagcggcagctgctgcaggccaaccccatcctggaggccttcgggaacgccaagaccgtgaagaatgacaactcctcccgcttcggcaaattcattcgcatcaactttgatgtcaatggctacattgttggagccaacattgagacttgtatccttgtg

SEQ ID NO: 115791 - DNA, 512 bp, Homo sapiens
tcgagaatttaatcatttattacaagaaaggggaaaaaagaaacccttattttgctttcaaaaatacctgtgcaggtggcagatttttaaactatactgagtcaacggtgcaggtaaaccaccctcgggcccagtcctagagtagacacaagatcgcctgggagggccgctggcccctctaacgctctggctgtcagacttgggacaagtcccttaaccattaaatatatttggtccccaagagtgttgggagaagccactggaaggctgctggcctttccatctcaggctgcaggagaagaggcttattcggcaggtttggcctcagccccatccgctttgccatctacctcttcgtcggagccatccccggcgcctttccgggccattcggcggggcacgacaaacggcaggtccccgcgcctgagcttgttctttagggagctgactttgcggttcatggcatccgccgtctcagtggcgtactccagctcgcgctgcagttcccgccg

SEQ ID NO: 115792 - DNA, 483 bp, Homo sapiens
atatgagatcctgactccaaactccattcccaagggtttcatggacgggaagcaggcgtgcgtgctcatgcatcctgttgtttctggcgtgtccaggttagcagctgctacctttggccttgttttacttcacgttctttctaaagaatcagaaagctttggctgcagaataaaagccctggagctcgacagcaatctgtaccgcattggccagagcaaagtcttcttccgtgccggtgtgctggcccacctggaggaggagcgagacctgaagatcaccgacgtcatcatagggttccaggcctgctgcaggggctacctggccaggaagactccttaccgtgtgacccttgtggggacagcacccagagcctgcctgtccctaaagaaccctgtgattccaggggagcaggccatcctcgagtccagactcatctttgactccctggggaatgacggctcccctgctgcaggacagcggct

SEQ ID NO: 115793 - DNA, 7736 bp, Homo sapiens
gccgctccgcgattcccgggtcgacgatttcgtggcgcgcagatcaccgcggttcctgggcagggcacggaaggctatgcaaggctgacctgctgcagctcccgcctcgtgcgctcgccccacccggccgccgcccgagcgctcgagaaagtcctctcgggagaagcagcgcctgttcccggggcagatccaggttcaggtcctggatataagtcaccatggcacagcaagctgccgataagtatctctatgtggataaaaacttcatcaacaatccgctggcccaggccgactgggctgccaagaagctgctatggcctgcctccgacaagagtggctttgagccagccagcctcaaggaggaggtgggcgagagaggccatcgtggagctggtggagaatgggaagaaggtgaaggtgaacaaggatgacatccagaagatgaacccgcccaagttctccaaggtggaggacatggcagagctcacgtgcctcaacgaagcctcggtgctgcacaacctcaaggagcgttactactcagggctcatctacacctattcaggcctgttctgtgtggtcatcaatccttacaagaacctgcccatctactctgaagagattgtggaaatgtacaagggcaagaagaggcacgagatgccccctcacatctatgccatcacagacaccgcctacaggagtatgatgcaagaccgagaagatcaatccatcttgtgcactggtgaatctggagctggcaagacggagaacaccaagaaggtcatccagtatctggcgtacgtggcgtcctcgcacaagagcaagaaggaccagggcgagctggagcggcagctgctgcaggccaaccccatcctggaggccttcgggaacgccaagaccgtgaagaatgacaactcctcccgcttcggcaaattcattcgcatcaactttgatgtcaatggctacattgttggagccaacattgagacttatcttgtggagaaaatctcggtgctatccgccaagccaaggaagaacggaccttccacatcttctataatctcctgactagcggctggagagcacctgaagaccgatctcctgttggagccgtaccaacaaataccgcttcctgtctaatggacacgtcaccctccccgggcagcaggaccaaggacatgtcccaggagaccttggatgccatgaggattatgggcatcccagaagaggagcaaatgggcctgctgcgggtcatctcaggggttcttcagctcggcaacatcgtcttcaagaaggagcggaacactgaccaggcgtccatgcccgacaacacagctgcccaaaaggtgtcccatctcttgggtatcaatgtgaccgatttcaccagaggaatcctcaccccgcgcatcaaggtgggacgggattacgtccagaaggcgcagactaaagagcaggctgactttgccatcgaggccttggccaaggcgacctatgagcggatgttccgctggctggtgctgcgcatcaacaaggctctggacaagaccaagaggcagggcgcctccttcatcgggatcctggacattgccggcttcgagatctttgatctgaactcgtttgagcagctgtgcatcaattacaccaatgagaagctgcagcagctcttcaaccacaccatgttcatcctggagcaggaggagtaccagcgcgagggcatcgagtggaacttcatcgactttggcctcgacctgcagccctgcatcgacctcattgagaagccagcaggccccccgggcattctggccctgctggacgaggagtgctggttcccccaaagccaccgacaagaagcttcgtggagaaggtgatgcaggagcagggccacccaccccaagtttccagaagcccaagcagctgaaggacaaagctgatttcttgcattatccactatgccggcaaggtggattacaaagctgacgagtggctgatgaagaacatggatcccctgaatgacaacatcgccacactgctccaccagtcctctgacaagtttgtctcggagctgtggaaggatgtggaccgcatcatcggcctggaccaggtggccggcatgtcggagaccgcactgcccggggccttcaagacgcggaagggcatgttccgcactgtggggcagctttacaaggagcagctggccaagctgatggctacgctgaggaacacgaaccccaactttgtccgctgcatcatccccaaccacgagaagaaggccggcaagctggacccgcatctcgtgctggaccagctgcgctgcaacggcgttctcgagggcatccgaatctgccgccagggcttccccaacagggtggtcttccaggagtttcggcagagatatgagatcctgactccaaactccatttccaagggtttcatggacgggaagcaggcgtgcgtgctcatgataaaagccctggagctcgacagcaatctgtaccgcattggccagagcaaagtcttcttccgtgccggtgtgctggcccacctggaggaggagcgagacctgaagatcaccgacgtcatcataaggaaacagacctgctgtatgtgctaccaggccatgaatgcatttcccaagccggatgcagctgcttaccgccatgaaggtcctccagcggaactgcgctgcctacctgaagctgcggaactggcagtggtggcggctcttcaccaaggtcaagccgctgctgcaggtgagccggcaggaggaggagatgatggccaaggaggaggagctggtgaaggtcagagagaagcagctggctgcggagaacaggctcacggagatggagacgctgcagtctcagctcatggcagagaaaattgcagctgcaggagcagctccaggcagaaaccgagctgtgtgccgaggctgaggagctccgggcccgcctgaccgccaaagaagcagggaattagaagagatctgccatgacctagaggccagggtggaggaggaggaggagcgctgccagcacctgcaggcggagaagaagaagatgcagcagaacatccaggagcttgaggagcagctggaggaggaggagagcgccccggcagaagctgcagctggagaaggtgaccaccgaggcgaagctgaaaaagctggaggaggagcagatcatcctggaggaccagaactgcaagctggccaaggaaaagaaactgctggaagacagaatagctgagttcaccaccaacctcacagaagaggaggagaaatctaagagcctcgccaagctcaagaacaagcatgaggcaatgatccctgacttggaagagcgcctccgcagggaggagaagcagcgacaggagctggagaagacccgccggaagctggagggagactccacagacctcagcgaccagatcgccgagctccaggcccagcatcgcggagctcaagatgcagctggccaagaaagaggaggagctccaggcccgccctggccagagtggaagaggaagctgcccagaagaacatggccctcaagaagatccgggagctggaatctcagatctctgaactccaggaagacctgaagtgcgagcggggcttccaggaataaagctgagaagcagaaacgggaccttggggaagagctagaggcgctgaaaacagagttggaggacacgctggattccacagctgcccagcaggagctcaggtcaaaacgtgagcaggaggtgaacatcctgaagaagaccctggaggaggaggccaagacccacgaggcccagatccaggagatgaggcagaagcactcacaggccgtggaggagctggcggagcagctggagcagacgaagcgggtgaaagcaaacctcgagaaggcaaagcagactctggagaacgagcggggggagctggccaacgaggtgaaggtgctgctacgcgggcaaaggggactcggagcacaagcgcaagaaagtggaggcgcagctgcaggagctgcaggtcaagttcaacgagggagagcgcgtgcgcacagagctggccgacaaggtcaccaagctgcaggtggagctggacaacgtgcccgggcttctcagccagtccgacagcaagtccagcaagctcaccaaggacttctccgcgctggagtcccagctgcaggacactcaggagctgctgcaggaggagaaccggcagaagctgagcctgagcaccaagctcaagcaggtggaggacgagaagaattcccttccgggagcagctggaggaggaggaggaggaggccaagcacaacctggagaagcagatcgccaccctccatgcccaggtggccgacatgaaaaagaagatggaggacagtgtggggtgcctggaaactgctgaggaggtgaagaggaagctccagaaggacctggagggcctgagccagcggcacgaggagaaggtggccgcctacgacaagctggagaagaccaagacgcggctgcagcaggagctggacgacctgctggtggacctggaccaccagcgccagagcgcgtgcaacctggagaagaagcagaagaagtttgaccagctcctggcggaggagaagaccatctctgccaagtatgcagaggagcgcgaccgggctgaggcggaggcccgagagaaggagaccaaggctctgtcgctggcccgggccctggaggaagccatggagcagaaggcggagctggagcggctcaacaagcagttccgcacggagatggaggaccttatgagctccaaggatgatgtgggcaagagtgtccacgagctggagaagtccaagcgggccctagagcagcaggtggaggagatgaagacgcagctggaagagctggaggacgagctgcaggccaccgaagatgccaagctgcggttggaggtcaacctgcaggccatgaaggcccagttcgagcgggacctgcagggccgggacgagccagagcgaggagaagaagaagcagctggtcagacaggtgcgggagatggaggcagagctggaggacgagaggaagcagcgctcgatggcagtggcggcgcggaagaagctggagatggacctgaaggacctggaggcgcacatcgactcggccaacaagaaaccgggacgaagccatcaaacagctgcggaagctgcaggcccagactaatgactgcatgcgcgagctggatgacacccgcgcctctcgtgaggagatcctggcccagggcaaagagaacgagaagaagctgaagagcgtggaggccgagatgatccagttgcaggaggaactggcagccgcggagcgtgccaagcgccaggcccagcaggagcgggatgagctggctgacgagatcgccaacagcagcggcaaaggagccctggcgttagaggagaagcggcgtctggaggcccgcatcgcccagctggaggaggagctggaggaggagcagggcaacacggagctgatcaacgaccggctgaagaaggccaacctgcagatcgaccagatcaacaccgacctgaacctggagcgcagccacgcccagaagaacgagaatgctcggcagcagctggaacgccagaacaaggagcttaaggtcaagctgcaggagatggagggcactgtcaagtccaagtacaaggcctccatcaccgccctcgaggccaagattgcacagctggaggagcagctggacaacgagaccaaggagcgccaggcagcctgcaaacaggtgcgtcggaccgagaagaagctgaaggatgtgctgctgcaggtggatgacgagcggagtaacgccgttcagtatcaaggaccaggccgacaagtcatctacccgcctgaagcagctcgagcggcagctgcagcaggccgaagaggaggcccagcgggccaacgcctcccgccggaaactgcagcgcgagctggaggacgccactgagacggccgatgccatgaaccgcgaagtcagctccctagagaacaagctcaggcgcggggacctgccgtttgtcgtgccccgccgaatagcccggaaaggcgccgtggatggctccgacgaagaggtagatggcaaagcggatggggctgaggccaaacctgccgaataagcctcttcttctgcagcctgagatggatggacagacagacaccacagcctccccttcccagaccccgcagcacgcctcttccccaccttcttgggactgctgtgaacatgcctcctcctgccctccgccccgtccccccatcccgtttccctccaggtgttgttgagggcatttgcgcttcctctgctgcatccccttccagctccctcccctgctcagaatctgataccaaagagacagggcccgggccagggcagagagcgaccagcaggcttcctcagccctctcttgccaaaaagcacaagatgttgaggcgagcagggcaggcccccggggaggggccaagagttttctattgaatctatttttcttcagactgagggctttttggtagttgggagcccccgcagttcgtcagcctccctgacgtctgccaccagcgcccccactcctcctccttttctttgctgtttgcaatcacacgtggtgacctcacacacctctgccccttgggcctcccactcccatggctctgggcggtccagaaggagcaggccctgggcctccacctctgtgcagggcacagaaaggctggggtggggggaggagtggattcctccccacccctgtcccagggcagcgccaactgtccgctgtctccctcctgattctaaaatggtctcaagtgcaatgccccctccctgtcctttaccgaggacagcctgcctctgccacagcaaggctgtcggggtcaagctggaaaggccagcagccttccagtggcttctcccgaacactctttggggaccaaaatatacttaatgggtaaagggaacttgtcccaagtctgacagccagagcgttagaggcggccagcggccctcccagggcgatctttgtgtctactctaggactgggccccgagggtggtttacctgcaccgttgactcagtatagtttaaaaatcggcccacctgcacaggtatttttgaaagcagaaataaggttttctttttttcccctttcttgtaataaatgataaaattcccgagtctttctcactggcctttgtttagaagaggagtagcttcgtccctcactgggtctacactgggtttgccgaatttcacttgtattccctaactgttttgtatatgctggcattgaggacttacgggcaagaagggcatttttttttttttttaaagggaaacaaactcttcaaatcatgcaagtgattattaaaagctggcatatgccctacaaagctctggaattcagggtccccgttgctgtgcacaaaaggagtgagtcgaaactccccaccctacccccttttttatataataaaaagtgccttaagcatgtgtttgcagctggtcaccacctacatgtaaagctggtttacagatggtttttccactggagcatcacaataaagagaaccatgtgctaaaataaacagaaaaagaaaacacagacaagcgggggggggcgtttttaaagatcccaatttaactaccgggggcgctgggctttaaacttttttaagtggggaccctaaaataaattggctgggggccctattaaaaggctgagggagggaaa

SEQ ID NO: 115794 - DNA, 1197 bp, Homo sapiens
atgatccctgacatcagcaaacgcaaattcccagggtggacctggccagggagaaccccaaatgagtatttacttcctcacctggcctacatcttgtctataatctcacctttaactctagtcacaccaacagcttcaggcgagagaggaagaaacattggagaaatcaagttcaccagtgagggggacacttggtgtggcataaaattaatcattccttctcccccttccataccaaacttccaggatgcaagaatcacttccagagtggccccctcagaccttcttccacttagagccaaaattcagattagaattaagggacagggagttgatttgaaactgtttgcagagttttttctgaggtcatatgtttattgggaatcggggtcctctgggaatgctgctccagacctcctgcagattctgttgtgtttctccacttctggactccacacaaagcagtatacatgtatagtagcaagaactccctttgtgttagcaattccaaattggggtgagggagtaacaggacacagttgggatgggaaaatggaggaattcctacaggacgctgagccaagtagaaaagtggaaggggaagcccacatgtatgaaaaaggagaccaaacacaagaggcagccttgctttgtaacaactcgtgggaactgatccagtcctgcaagagtgagaactcactcattcacgggagagggtgttcatccattcctgagttgaacctggatatcaagaagaaggataatggctacccggtccccaaaaaagtccaaaatcaagatgtcagcagggccgtgcaccttctgaatgctttagtggcaaatccttccttatctcttccagattctggtggctgtaggctttccttactgtacatactcaattttgtgccttgtatccgagaggtgaacaggatgaggcgctatagctcatacaaactgtgcctgaattcaacagtctctggagttgctggcctaaagagggctacatttttggatggggagcctgcaatggcagcacgaacatccacgttagtagataaaagcaaggatccccaagcctggggcagtggactggtaccagtcagttgcctctcaggagcagcaggcgagcaagcattaccacctgagctccacctcctgtcagatcaactgcgtcagagtctcataggagcatga

SEQ ID NO: 115795 - DNA, 729 bp, Homo sapiens
atgatccctgacatcagcaaacgcaaattcccagggtggacctggccagggagaaccccaaatgagtatttacttcctcacctggcctacatcttgtctataatctcacctttaactctagtcacaccaacagcttcaggcgagagaggaagaaacattggagaaatcaagttcaccagtgagggggacacttggtgtggcataaaattaatcattccttctcccccttccataccaaacttccaggatgcaagaatcacttccagagtggccccctcagaccttcttccacttagagccaaaattcagattagaattaagggacagggagttgatttgaaactgtttgcagagttttttctgaggtcatatgtttattgggaatcggggtcctctgggaatgctgctccagacctcctgcagattctgttgtgtttctccacttctggactccacacaaagcagtatacatgtatagtagcaagaactccctttgtgttagcaattccaaattggggtgagggagtaacaggacacagttgggatgggaaaatggaggaattcctacaggacgctgaggcctatcagagaggagctgctcctaaatgtcgaattcttccagccggtggcaaggtgttaacctcagaagatgaatataatctgttgtctgacaggcatttcccagaccctcttgcacatggaaaatgtgctgtcagccaggtatcttga

SEQ ID NO: 115796 - DNA, 4029 bp, Homo sapiens
atgaaggacactgcccccgtgctagagggcttgaaggaggaagagatgactaaggaggagatcagcatcctcagcaatgcctgctctaagctgcaggaacagaagaagtcactcaccaggaagaaggaggagctggagctgctgaaggaggacatgcaggactacagcgaggacttgcaggagctcaagaaggaactttcaaagactggtgaagaaaaatacatggaaggatctaaagccagcaagagattgacaaaaagggtgcagcagataatcgggcagatcaacggcttgatctcgcagctggagatggaccagtgggccagcaagctggccccggccaagggcgtgcccatgggggagaacgtcatcagtgttgccgagctcatcaacgccatgaagcaagtcaagcacattcccaaaagcaagctcaccagcctggccgcagcactgaatgaaaataaggatggcaaggtcaacgtcgaccacctcatcaaggtgattgagctggtggacaaagaagatgttcacgtctccaccagtcaggtggccgagattgtagcaacactggaaaaagaggagaaaggggaggagaatgaggaccacatggactctgcccacacggagctggctgctacgcccaccctcagaggcgtcaggagacacagcctggccccctcagggctgaagatgcctccattcacctgtggaccttgctttctagatttcagcatcaatagacctgtcttcctgcatgcttttagttggatctgggtcactgtggagacagagcgatctcctggcatctcaggtatgcattatctcaccgcccctctgctgcccttgattagtcacagacgccaagcccagcaatccctctactccagttttgcccagctattgggaatcttggacagcttccttaggcccctgtgcatccaggcgtctgagctgattctggatgcagtggcagcagccccagcactccccgaggaaagtgagtggctggagactacccagctccagcagagtctgcacaccagggcggaggccgaagcgccccgcgcccctggcttgctggggtcccgggcccgcttgcctctgaagccgagtatctgggacgagcctgaggaccttctcgcagggccctcctcagacctgcgggcagaagggactgtgatctcgagccccaagggtccaagtgctcagagaatcagtccccgaaggagaaacaggaacactgaccagagcggccgccaccagccatccctcaagcacaccaaaggtggtacccaagaggctgttgcaggcatctcggtagtgccgcgtgggccccgaggtgggcggcccttccagtgtgccgactgtgggatggtcttcacctgggtcacccacttcatcgagcaccagaagacccatcgcgaggaagggccctttccgtgccccgagtgtggcaaggtcttcctgcacaactccgtcctcactgagcatggcaagatccacctgctggagccaccgaggaagaaagccccccggagcaagggcccccgggagtccgtcccacccagggatggagcccagggcccagtggcccctcgcagccccaaaagacccttccagtgtagcgtctgcgggaaggccttcccctggatggtccacctcattgaccaccagaagctccacacggcccacggccacatgacacaagctgtttctcggaagaccctggacacctgctccgaagccaagcacgggatggggcttcccagggtctcagctgagaagcagcagttccacagcacagcctgtccccactgggggctcctggctctatcctatgccttaattgctgaacagtctccactgccatacttgaccacacccagcatacaacaggtcctacagagtgaagggatgagtgactcaatgagtgaggggaagtccctgtggagacaccgggacaccattgtgggctgcagtttccagccggggaagcctccctcgacctctgaggggagagcagggccagccgttcctgccagaagccagggcatgacccctggggtgcgcgtctccacagacccggagcaagtgacgtttgaggacgtggtagtgggcttcagccaggaggagtgggggcagctgaagcctgcccagaggaccctgtaccgtgatgtaatgctggacaccttcaggcttctggtctctgtgggacattggttaccgaagccgaatgtcatctccctgctggagcaagaggcagagctgtgggcggtggagtctagacttccccaaggcgtgtacccagacttggaaactagacccaaagtcaaactgtcagttctaaagcaaggcatctctgaagaaatatccaacagtgtcatcttggtagaaagattcctgtgggatggtctgtggtactgcaggggtgaggacactgagggccactgggaatggagttgtgagagtctagagagcctggcagtgccggtggccttcacgcctgtgaagacgcctgttctggagcagtggcagaggaatgggtttggggaaaacataagtctgaaccctgatctcccacatcaaccaatgactcctgaaagacaaagcccccacacatggggaacacgtggaaaaagggagaagccagacctaaatgttttacagaaaacctgtgtaaaagagaaaccctacaaatgtcaggaatgcggaaaggcctttagtcacagctcagcacttatcgaacaccaccggacgcacacaggagagagaccttacgaatgtcacgaatgcttaaaaggcttccggaacagctcggcacttaccaaacaccagagaatccatactggggagaaaccctataaatgcactcagtgtgggaggaccttcaaccaaattgccccactgatccagcaccagagaactcacacaggtgagaagccctatgaatgcagcgaatgtgggaaatccttcagttttaggtcctccttcagccagcacgagcgaactcacacaggcgagaagccctacgagtgcagtgagtgtgggaaagccttccggcaaagcatccacctcacccagcatctgcgaatccacactggggagaaaccctatcagtgtggtgagtgtggcaaggccttcagccacagctcatccttgaccaaacaccagcgaatccacacaggggagaagccctacgagtgccatgagtgtggaaaagccttcacccagatcacaccactgattcagcaccagaggacccacacaggagaaaagccctatgagtgtggtgagtgtgggaaagccttcagtcagagcacactcctgaccgagcatcggaggattcacacaggagagaagccctatggatgcaacgagtgtgggaaaaccttcagccacagctcctcactcagccagcatgagcggacacacacaggagagaagccctatgagtgcagtcagtgtgggaaggccttccggcagagcacacacctcacccaacaccagcgaatccacacaggggagaagccctatgaatgcaatgactgcggcaaggcattcagtcacagctcgtccctcaccaaacatcagcgaatccacactggggagaagccctacgaatgcaaccagtgtggcagagccttcagccagcttgctcccctcattcagcatcagaggatccacacaggagagaaaccctatgaatgtaaccagtgtggcagagccttcagccagagctcccttctcatcgaacaccagaggattcacaccaaggaaaagccgtatgggtgcaatgagtgtgggaaatccttcagccacagctcctcgctcagccagcacgaaaggacgcacactggggaaaagccctatgagtgtcacgattgcggaaagtcctttaggcagagcacccacctcactcagcaccggaggatccacacaggagagaagccatatgcatgcagggactgtggaaaggcctttacccacagctcctcccttaccaagcaccagagaactcacactggataa

SEQ ID NO: 115797 - DNA, 558 bp, Homo sapiens
aacagtctccactgccatacttgaccacacccagcatacaacaggtcctacagagtgaagggatgagtgactcaatgagtgaggggaagtccctgtggagacaccgggacaccattgtgggctgcagtttccagccggggaagcctccctcgacctctgaggggagagcagggccagccgttcctgccagaagccagggcatgacccctggggtgcgcgtctccacagacccggagcaagtgacgtttgaggacgtggtagtgggcttcagccaggaggagtgggggcagctgaagcctgcccagaggaccctgtaccgtgatgtaatgctggacaccttcaggcttctggtctctgtgggacattggttaccgaagccgaatgtcatctccctgctggagcaagaggcagagctgtgggcggtggagtctagacttccccaaggcgtgtacccagagattaagggacatttccagtttttgcttctttcagacttggaaactagacccaaagtcaaactgtcagttctaaagcaaggcatctctgaagaaatatcca

SEQ ID NO: 115798 - DNA, 622 bp, Homo sapiens
ggcgcggactttaggaggccgggtgtgcaggtagaggccggacacgagtagaggctagatgtgcaaatagaggccgggcacgagtagaggccgggcaccagtagaggccaggtgcgcgagtagaggccagttgtgcgagtagaggccgggcacgagtaggggccgggcacgcaagtaggggccgggcacaaggaggaggctgagcgcgagtagggacggggtgcaaagaggaggccgggcgtgagaaggccgcgcgcgaggaggccgggcacgaggtggaggacacgcgcaaggaggccgagattctcaccgggtctgtggagacgcgcaccccaggggtcatgccctggcttctggcaggaacggctggccctgctctggctggccctctgggtaaccccgtctccaacactctcagactgtctgccttggctgccgttcaggtgcggaggtgaggcccttctcgtagggtgaacgatgtacatggtggttctaggggcccagatctcagtcctcacaggaggtgtgcatgctttctggctactgggggcattgtggacagtcaggctcttccctacttcacccaccttggcgtctgtgctaatcaagggcagcagagggg

SEQ ID NO: 115799 - DNA, 2834 bp, Homo sapiens
atggccaccggcggcggcgcggaggaagagaggaaacgggggcggccgcagcttctgccccccgcgcggcccgcggcccggggcgaggaggccgacggcggccgcgagaagatgggctgggcccaggtggtgaagaatctagccgagaagaagggcgaattccgcgagccgcggccgccgcggcgggaggaggaaagcggcggcggtggagggagcgccgggctcggcggccccgcgggcctggcggcgccggacctcggcgacttcccaccggctggccgcggggatccgaagggccgtcggagagatccggccggcgaggcggtggacccccgcaaaaagaagggcgctgcggaggcgggcaggaggaagaaggccgaggcggcggcggccgccatggcgaccccggccaggcccggcgaggccgaggacgcggccgagcggcccctccaggatgagccggcggcggcggcggcaggcccgggcaagggtcgcttcctcgtccgcatctgtttccagggagacgagggcgcctgcccgacccgggacttcgtggtaggagcgcttatcctgcgctccatcggcatggacccgagcgacatctacgcggtcatccagatcccgggcagccgcgaattcgacgtgagcttccgctcagcggagaagctggccctgttcctacgcgtctacgaggagaagcgggagcaggaggactgctgggagacttttggtggtgctgggggcgaggcaagtccagcttgaagacgctcttcatcctcttccggaacgagacggtggacgtggaggacattgtgacttggctcaagcgccactgcgacgtgctggccgtgccggtgaaagtgaccgacaggttttggatctggaccggggagtacaaatgcgagatcgagctgcgccagggggagggcggggtcaggcacttgccaggggccttcttcctgggggccgagaggggctacagctggtacaaggggcagcccaagacatgctttaaatgtggttcccggacccacatgagcggcagctgcacgcaggacaggtgcttcaggtgcggggaggaggggcacctgagcccttactgccggaagggcatcgtgtgcaacctctgtggcaagcgaggacacgcctttgcccagtgtcccaaagcagtgcacaattccgtggcagctcagctaaccggcgtggccgggcacctaaacacccggctgcctgccagggtgaacacacaagccagcttatccctcttaaagtgcccaaaactttttttttaaaaccattttttatcgtttttgaaggagatctttttaaaacctacaagagacatctctctatgccttcttaaaccgagtttactccatttcagcctgttctgaattgggtgactctgtcacaattaacggactgcgggagaactgtagcgtgcagatgtgttgcccctcccttttaaaattttattttcgcttttctattgggtattcgttttgattcttgtactttttctctctctccttgcccccctcccgccctccccgccccataccttttcttcccctggaattttcaccctttgggcctgccttgctcatctttatgccccagcactaggtacggggcccaacacgtggtaggcactccatacagtgtttgactgaattgaaaacattgttgactgtggcttctatcagagtgtctaccttttgcagctctttcccctccctcatttaatttggctgcttttaatctacgtgggtctgaggaatttgtgaaaccagtgttgttaggaagtgtatataatctggaatcaatgaagctctggaatgggtgggccaagggcttcttcttatgggcacaaaggatggcatgggactttcatggacagctcttttgggtgggctcagaaggccatttttttatagaatcatcggaatctagaatattcctgctggaaagaacctgagagttggtttggaccaattccctggttttccaggcagatgaaacagggcccaaagaggttaaattgacttgggtgaaaatcacatatgcttgtctggtgcccagagccaagcctatagtagacgtcccctgaccccaaagccctggtgctcattccactacctcgtcacacgttcacaacaatttcctcaaccacttgagggcccagaaagtcttgatctctccagaatgatcagcccagaggaatgctgagaaatcacctggaggagggagcagaaagagaaggtttttaaggaggggcttctgaatacttggggagatacggaacggaccagggacccacactccaggggtgcattcgttgctccctggggggcaccactttctgggattaccagtgtgcccaggtccctttgggaggcccttaccccttcccccattccattgcccacccagtgagaaaatggggggtggcccctgtgttaaaggaaacctaccgaaaggttttacatttgtcacctttaggcctcaattagctacgaaccttaggagaaggcagcctagcttggagctcattgtgcaacttcctgatttttcaggagaaagatgggattttaaacccaaaatttatggagtgagttgtttaactcttaaaatgtacttggggagatagggccaagcggagaggtcatgggccaacttaagtgttatccgagtagaaaagacagtacactgcttttcttttaagtgtttgccttttcctttgctatatgttttgctatttccttgtggcttagaatgtacccattgattgttaaaagttttgttctgaataaatatttatcttttgtattgct

SEQ ID NO: 115800 - DNA, 2393 bp, Homo sapiens
atggagcctcttggcgtaagcgcggttgggcggggcattcctggattggcccactccggcgtcgcagaacgcttggcgtatcgtccttcagccaatcagcgtggagctgctgcctcgccccgcctcacgccggcgtcctgggggcgcggagagggcgcccaggttcaccgcgctctcagcgcgcacttccgggcacggtcagggcgtgacgtcgggaggagggcaggctcttcccgtgggttagttgattcacagcatccccagaaagtcagtcttgtcgtcgtcattcgccctttaccggtgacgaaatacaagcccagggaagcgcagtcactgaccaagacacgccgctttttggatgcctcctatgcctggcgggagtcttgtctgagctggcaccaccacacggcccacgacatcttcgcagggaagcctgtggaccctctgccaggctccacaagaggtcaggacagtgcaggtgaaaggaaaggggtcaacaagtactatcctccagacttcaaccctgagaagcatggctctctcaaccgataccacaacagccacccgcttcgggagcgggctcggaagctgtcacagggcatcctcatcatccgattcgaaatgccatataacatctggtgcgatggctgcaagaaccacatcggcatgggtgttcgttacaatgcagaaaagaagaaggtgggcaattactacacaaccccgatctacaggttccggatgaaatgccacctctgtgtcaactacatcgagatgcagacggaccccgccaactgcgactacgtgatcgtgagtggcgcccagcgcaaggaggagcgctgggacatggcggacaatgagcaggtgctgaccacagagcatgagaagaagcagaagctggagacggacgccatgttccggctggagcatggcgaggccgaccgcagcacactcaagaaggcgctggcgcacactgagccacatccaggaggcccagagcgcctggaaggacgacttcgccctcaacagcatgctgcggagaaggttccgggaaaagaaaaaagccatccaggaggaggaggagagagaccaggccttgcaggccaaggcgagcctgaccatcccgctggtgcccgagacggaagatgaccgcaagctggcggctctgctgaagttccacaccctggactcctacgaggacaagcagaaactcaagcggaccgagatcatcagcccgttctgggttcccttttgccccggaatccgcctccaacagcaaggtcagcggcgtcctgaagaagctggcacagagccgcagaaccgcgcttgccacctcccccatcaccgtcggggacctgggcatcgtgcggcggaggtctcgggacgtcccggcagagcccccagcatgcggccgacacccccaagtctggggaaccgcgggtaccagaggaggctgcccaggaccggcccatgtcccccggagactgtcctccggaaacaacttgagaccccaaagtgcagcagcccgagggggcaggaagggagccgtcaggacaagcccctgtcgccagcaggctcctcccaggaggcagctgacacccccgacacgcggcacccctgcagtctcggctcctccctcgtggcgggactactccgactcggagagagtcgtggagtgggttcggccacgtggaatccgcgtcctgggaacccgtggaatccgcgtcctgggaacccgtggaatccgcctcctgggaacccgtggaatccgcctcctgggaacccgtggaatccgcctcctgggaacccgtggaatccgcctcctgggaacccgtggaatccgcctcctgggaacccgtggaatcgggttggatgcgcatctccctctgagttgcgctgggcttggctgctgcaccatgaccctggaggcgatccgctactcgcggggctccctgcagatcctagaccagctgctgctgcccaagcagagccgctacgaggcggtgggctcggtgcaccaggcctgggaggccatccgcgccatgaagtttcctgaggccttcctagaagccgagcagatgccagcatcatgctccctgtacgggctatggaaccatggctgtaccgcaggtggcaaagcaggtctcaacagcaaacaaaagaccccagttttggcacttgggaagcagtctggtttgcagactgtgaagagcatgcaactggatggaacggcagacgtttctgagcacaaagaacatccacacatccattatgcacccgctgacaccatcaaaggagaatctccatcttttgaccccattttggaaactagcaggctgtcaatatctgttaaagggctgaacggtttctttgccaaacacgacttcaactggtag

SEQ ID NO: 115801 - DNA, 2329 bp, Homo sapiens
aattcatagttccttcctgtggagaagggtctgaaatgggaatcagtggtagaaggggctggtctcctgggcagggcttacatccactgagtcctaagattcctttcctgatctgcacctacgcctggtctgtatggtggaatttgtcagctggaactcagaaacaacaacttgaaaaaaataataataattagaacatatttgcataagatagctatttactctggaaaccaacaacttttgagatttcccttgccctgtggacgcccagctcctgtcatccttccttaggtcctgcagtacagtcttcccctgaatgccaccggggacccagggggactccacccccctaaagcaagcacacacatacttcacagttgatgagttgctgggtcttttgagtcccagctcataaaaccctccctttactccaccaagcccgacgacccattgacttgaggaaggggatttctacaagtctcaggattttagaaagtctgtaaagccatccatgcttccagaaagcaccgatctgttgtagttgcaaaaacaactctgtaatttgttggagggtctcaaactgacagcccagccgagacttgggtgggaagcccctggatctgttctccctgacttgcgggggggagcagccactaaggactttatcaggaagcccacatggaggctcccccaggcttggggccacctggtgaagggcccttttgctcctggcagcctgaggcacagctgcctgtattgtcctcatctgttctgactgaaggatggaggtgctgaataaattaggcctcaggcctctaccaccagagagctggagaatgggttccacgtcatttcaagggactggaattttttatgttcagggagcattgggaatcttcttctttccagggaggaatttagccctgcaaggttaggacttgaagagggaaggtatttaataactgggcgaggatgggtgtggtggctcacacctgtaatcccagcattttgggaggctgaggtggccagatcccaaggtcagaagatcgagaccatcctggctaacatggtgaaaccccatctctactaaaaatacaaaaaaaaattagccgggggtgtgtggcgggtacctgtagtcctagctacttgggaggctgaggcaggagaatggcgtgaacctgggaggtggagtttgcagtgagctgagatcgtgccactgcactccagcctggccgacagagcaagactcttgtctcaaaaaaatatagaattaaactaaattaaaaaataaatggaaccacccagcccatcccctacccacctgtcctgcattttttttctccttatcactgtctcaccactagaggccagctccaccagggcaagggtttttccctgcctgccacttgtatgccgagtgtccagaacaaagcctagcacaaggaaaagaaaaaagccatccaggaggaggaggagagagaccaggccttgcaggccaaggcgagcctgaccatcccgctggtgccccgaaacggaagatgaccgcaagctggcggctctgctgaagttccacaccctggactcctacgaggacaagcagaaactcaagcggaccgagatcatcaagccgttctggtttcccttttgcccccggatccgcctccagcaagcaaggtcagcggcgtcctgaagaagctggcacagagccgcagaaccgcgcttgccacctcccccatcaccgtcggggacctgggcatcgtgcggcggaggtctcgggacgtcccggagagcccccagcatgcggccgacacccccaagtctggggaaccgcgggtaccagaggaggctgcccaggaccggcccatgtccccccggagactgtcctccggaaaacaaactgagaccccccaagtgcagccaacccgaggggccaggaagggagccgtcaggacaagcccccttttcgccagcaggctcctcccaggaggcagctgacaccccccgacacgcggccacccctgcagtctcggctcctccctcsgtggcggacttactccgactcggagagtgacttgagcgatccccatcctggagactggacccgctctagaggcccggacacacccaggaggcccctcacagactgcagacccccggctcgcccaccagccctgggagagctcagatgccgcatccttccccagaccgcgccttcctgcaaccgtggagttatttatttggtcctggtgagggtgtttgtgccttgtgagactccggtacattaaagacctgtctcttcttccctgtcaaaaaaaaaaaaaaaaaaacc

SEQ ID NO: 115802 - DNA, 637 bp, Homo sapiens
gaacccattggcccttggaactgggcccatccatgtccagtgggaaggagggcgaggcccagttcccaaaaaaaaaaataaatatatacaaggcagcagtcacaacaaaaacccccttaaatgcgctcccacaaaatctctcgccccacactagaaaatatcagctgaaactcctgcgggatggttccgagcaatcgcgaggcctcccgtgcggatggctgcggtggaagggcctgttgttatttgaggagactcagggcaggccagaaggcaactcttcatgctagtcttgagttaaagatccacccgcggctctgcctccgccccttggagatctgccctcggaactgcgttgctctggcgcccgaactagggtgggctggtttcagccagaccgccaaaaaacgtggatgctaaacacagagggaagagccagctcccattccctctctgagccttagatttttttgaattccgagagaggtcaggccggggtccccttcttgggtgagcgtccagccctttgaagttcaaacactgagaagccgataggcagctggctggcgtcacaggatcgagccgaggactgaaggcgcctcctaccgggaatccaccgcctccagacgaaaataggctg

SEQ ID NO: 115803 - DNA, 477 bp, Homo sapiens
atgagggactgctgtgatgggctagacgaccagtgctggtgggaggaccgaggcccagagagaggtgagacctgccaaggtcctaaatttccctgtggcttcatagagctagccatacctgctctgcccactgtgaagggtggcaggaggatggaagacgaggtagtgcttctggaaattcgagatgccaagtccaagcctaggtgcctccctgcctccgaggagcctcccctgatgtcctggtcaccgcggcgctgtgctgtggccaccagcaagaccggcggcaccaaggggccccctagcggcccgaggagttgctgcagccacctgggcccagcatgtccttcccagacacccgcggatgtaggacctttcttggggacccagatcacgtgccaggcactgcgctgggtgccaggccagggaaacaccatctcctggcagccctgtgaggatcagaaggcccctggtgtgtga

SEQ ID NO: 115804 - DNA, 416 bp, Homo sapiens
cccagagcagaccaagacaccctccaacggcctattccctacatccacaatgacaaatgtgttttaacttacaggacagtaagcacgctgttgagaaaaatgtggagaccaactcaagaggacaaattactgatagattagtacagtctgaggtagctgtcacagggtaagtgatggcaccggtgttacctattggccatttctggccccaggatgaattcctgacctttcagaactcagcacgggaacagctctagcaggctccctcatcacacccccgccatactgaatatctgtggttcttgaatggcaattctttttgactaaaaccccctcctctcctcagtcagcaggccgaaattgatgtccctctcttgcccccaacctcctgtctctcttatgttcccactcgtgcc

SEQ ID NO: 115805 - DNA, 809 bp, Homo sapiens
agtgccttcttctccctcctcccacctcccgccttggcaccaccaagtggccatcagctgaggggccgagggggtgtcagtggggaaacatgggactctattgtgaagcattagcacagatggaccccaggaccgtctgttgcctgctcctgacagacagcatctgttgggggcgggagggggagacgcaaagcggagaggcaatgatgtatattccattcattccattgcttatccccaaagggacccagcaaaagggcatcttgcacaacctcctctgtgaaggagccaccccagctatcacagagggttacctaatggacatgtctccttgcctgaaacctggagaagtggatgccacaggtgtggcacagcccctgtgtctaacagcctgtggagccagtcatccttcagctgacgtggaggcagacttccccagtttatgtagggcagtccacctccaggcctccaagcagaaagccctagagaaccccagagacagtaagcacgctgttgagaaaaatgtggagaccaactcaagaggacaaattactgatagattagtacagtctgaggtagctgtcacagggaaaaaacgtgagaagacaaattcagacaaagcccaagaaaaggatgctttgtgtcttctgtcccttgcatgccagacccgccctctaggaacacaaagcaacagtctcaggaagacccaggatgttgggaacagcattcctcttgctggggtctgctacagctggtgtgagcacgagaccctgaccttagaacatccaccccattcccaactcccctga

SEQ ID NO: 115806 - DNA, 1098 bp, Homo sapiens
atgctcgctcctgaagtgggcaagactggagggggcaagtgggatcctagaggcaagtccggaggctgcggcaagtctccagccacactggagcaaacccggataccctatcatttcatgcaaatacctcagtatgtgtttcaaaaagatcaggagtttgctgaggctctgcctgtgctgcctcacccttctctccctggagaaaggcccctccaagaggctgttgcttttctttgttggcttctggtagatgtgctcctgaaggcaactgtctcaaaggtgggaggaggcagcgcacttgccagtgtggctcgggttatgaaagcacaggcttttagtcccctgctgaggatcctgcacaaagcctctacttccagcttcagggccaggaaagactcagcccacacacccagttgcctcttgaccccttcagggccagagagagcaggtccactcactcaggactcatgtcagccttctccccacgactccttcagagccccagctctccttgaacccagctccgcactgagcacagcagtagcctcccttagaagaagggaagagagactagagccagagcagagggtaggtgagctaggttcactgggggagcgccagcatgaaccctcagacaatcacgacttccaaccaaagtccaagcaggagcagcttcagaaaacactccagccttctggtggtccacattgttcttccttactgttgatggtattttggtggaaacagtggagaaaaactgaaccactgaaagctgaaagaacaggttacaaagaaaaagaaatttcaaccaaatgtagcagtagtccgagcggccagctttctcagtcaagtgcagcaggacccgcctggccagaggatgccagaccagaggccacctggtcagcaaccttgttgtcttttgacccaagatgcaaaaacgatagcatagaagagccatgttctgggctgctgcagtatgctgggggtccactccagtttccagtcaccttggattttccagcccctgaaggtgtcaacagggaagcctacaaaatagcaaagatggcagcctgcccctccctctgggagctccattga

SEQ ID NO: 115807 - DNA, 486 bp, Homo sapiens
atgccgccggatgtctgccagccgggccgggacgctgcgtcagagccatgcatggcccgcttgtcctcaccgctcctttgtgaccgtcaaataaggccctccatggatgtcacaagactgtcaacattttcaagggcctcgtgcatgaaaataatttgtcaagtgcagaagctacatcatgagcagactgtctttggaacaagctgtggaatggaccgtggaatgaatgcaggcagccactctgcctccaagatcagcacagaaagaacccccagctccctgcacctggtctcagagactttgaactcaaacagacatcgcacatggaatgacacgcaagccctgtcccagataagcctgtcaatccccaatgcctccaggaagccagaggagccccctacacagcccacagagggcagagaaatgagtccgtcctgtggccctgatatcatcccatggagccagcacaccctgtggtccaactga

SEQ ID NO: 115808 - DNA, 374 bp, Homo sapiens
gatgcagaaaatgcgattgtgcatatgggcggtcagtggttgggtggtcgtcaaatccgaaccaattgggccactcgtaaaccacctgcacctaaaagtacacaagaaaggtccacaggctcagaaaagatggaacgagtgactgtggagaagggtagaacatgggcctgcccagagcgcgaaggcagatacagaagagctgcccgtgaaggatgcaggtctgagcctcagccgagcgtggctgggcgaaatggaagcctttctctcctgctgcctctcctgctgcattttaccccgggagatgaaggttttggagacgttagtgacacatggatgttatcacagtgtacagctgtgacaggagtagcagaaag

SEQ ID NO: 115809 - DNA, 427 bp, Homo sapiens
  misc_feature (1)...(427): n = a,t,c or g
ggaattcggggcttgagtggtgaaagagtgtcctgcttcctccgagagcttagctgggganaaagctgggagcgactcgagctgaggacgtggaagggcccgctccggacactgcgctccaaccaggaggagcaggaggaggaggaggatgaacaaaatggccgccgccaccagccaggcaggaaacagggcagagcgcaggcgcgacccgccaggtcaccgctcaggccagccgcgacagcctgcaagggggacgaccgaggggagagaaaaaagggccgccgaggaaaccctgggacccgctcacgacggatcacgtcgtcgctgtgggcctctggccggccgaagcccagctagctccgggagagatcgggcaaaaagagaaacgtcgtgaagccgaagtctctgggaattgtggtcctggaaa

SEQ ID NO: 115810 - DNA, 660 bp, Homo sapiens
atggggcccacgttcagctccctgtggttctcagagtctcaccggatgtctgccgcgctgcaggtgctcagcacagcccgccgacttcctggtcgtcgcacgtcctcacgtatgactacactacccagaagtctcctcttcacgtcccagcgcgggaccacaattcccagagacttcggcttcacgacgtttctctttttgcccgatctctcccggagctggctgggcttcggccggccagaggcccacagcgacgacgtgatccgtcggtccacaggctcagaaaagatggaacgagtgactgtggagaagggtagaacatgggcctgcccagagcgcgaaggcagatacagaagagctgcccgtgaaggatgcaggcctcagggagatgtgtcaaggaaccacagtcagtgcggctgggcgccctgctcagccaggagtttgtctgcagagcaggcctcttccccagagcagcggcccagcctgttggagagtagccaaccaagcgccgcagggcgcaggtggctcgtggcgcgggcgcgcgccgtcgcattgggtcctactggcttgtgtgcctgtggctccacgccgggcgcggagtctaccagagagaagaaaacccggagtcacttactcgacgacatctatgcagggcagtaa

SEQ ID NO: 115811 - DNA, 409 bp, Homo sapiens
agcaaagcaggagctggccaagctgatgcggattgaggacccctccctcctgaacagcagagtcttgctgcaccacgccaaagctggcaccatcattgcccgccagggagaccaggacgtgagcctgcacttcgtgctctggggctgcctgcacgtgtaccagcgcatgatcgacaaggcggaggacgtgtgcctgttcgtagcgcagcccggggaactggtggggcagctggcggtgctcactggcgaacctctcatcttcacactgcgagcccaacgcgactgcaccttcctgcggatctccaagtccgacttctatgagatcatgcgcgcacagcccagtgtggtgctgagtgcggcgcacacggtggcagccaggatgtcgcccttcgtgcgccagatggacttc

SEQ ID NO: 115812 - DNA, 452 bp, Homo sapiens
cgcgcattacgtggtctggcgataacgcgctgcgtccgctcgggcggaactacgtttcccggcatgcactgcgggccgccgggcctcagggaagagtcgcgcccccggggagggagcagcactggcccattctgcagatggggacatcgagtcacgggctggctacgaactcctcgggggcgaaggtggcggagagggatgggttccaggacgtcctggcgcccggggaaggctcggcgggacggatttgcggtgcgcagccagtgccgttcgtccctcaggtgcttggcgtgatgatcggggccggagtggcggtggtggtcacggccgtgctcatcctcctggtggtgcggaggctgcgagtgccaaaaaccccagccccggatggcccccggtatcggttccggaagagggacaaagtgctcttctatggccggaagattatgcggaag

SEQ ID NO: 115813 - DNA, 739 bp, Homo sapiens
catcccggcggcgcaggcgcagaggagagcgagctgcaggcctacatcgcacagtgccaggacagccccacctccggcaagttccgccgcgggagcggctcggcctgcagccttctctgctgctgcggaaggtgtttccacaccggtagccagctgtgccctgaggtggaagaggaccggccacccaggaattttccaagtaacgactcggagtctccgggattcctatctcccggcccccgaatttccattaatattctagcgatgtcagaaacatcctcagcttcccagaaaaatcccagactccgggctaccagatcggccgtccagctggaatcaaccgatggaggctccgctgcaaactggaatgcgcgcattacgtggtctggcgataacgcgctgcgtccgctcgggcggaactacgtttcccggcatgcactgcgggccgccgggcctcagggaagagtcgcgcccccggggagggagcagcactggcccattctgcagatggggacatcgagtcacgggctggctacgaactcctcgggggcgaaggtggcggagagggatgggttccaggacgtcctggcgcccggggaaggctcggcgggacggatttgcggtgcgcagccagtgccgttcgtccctcaggtgcttggcgtgatgatcggggccggagtggcggtggtggtcacggccgtgctcatcctcctggtggtgcggaggctgcgagtgccaa

SEQ ID NO: 115814 - DNA, 776 bp, Homo sapiens
gagatcagctgatgccggagggtttgaagccgcgccgcgagggagcgaggtcgcagtgacagcggcgggcgatcggacccaggctgccccgccgtacccgcctgcgtcccgcgctcccgccccagcatgacagccccggcgggtccgcgcggctcagagaccgagcggtttctgacccccaaccccgggtatgggacccaggcggggccttcaccggcccctccgacacccccagaagaggaagaccttcgccgtcgtctcaaatactttttcatgagtccctgcgacaagtttcgagccaagggccgcaagccctgcaagctgatgctgcaagtggtcaagatcctggtggtcacggtgcagctcatcctgtttgggctcagtaatcagctggctgtgacattccgggaagagaacaccatcgccttccgacacctcttcctgctgggctactcggacggagcggatgacaccttcgcagcctacacgcgggagcagctgtaccaggccatcttccatgctgtggaccagtacctggcgttgcctgacgtgtcactgggccggtatgcgtatgtccgtggtgggggtgacccttggaccaatggctcagggcttgctctctgccagcgggactaccaccgaggccacgtggacccgggcaacgacacatttgacattgatcccgatggtggttactggtgagtgggcaggacgaggcttcactgttgggagcctgagctgctgggattaaaatcaacagctgtggctgggcacgg

SEQ ID NO: 115815 - DNA, 562 bp, Homo sapiens
tcagatgccagcatctacgtggtgcaggacgggctgctggagctctgtctgccagggcctgacgggaaggagtgtgtggtgaaggaagtggttcctggggacagcgtcaacagccttctcagcatcctggatgtcatcaccggtcaccagcatccccagcggaccgtgtctgcccgggcggcccgggactccacggtgctgcgcctgccggtggaagcattctccgcggtcttcaccaagtacccggagagcttggtgcgggtcgtgcagatcatcatggtgcggctgcagcgagtcaccttcctggcactgcacaactacctgggtctgaccaatgagctcttcagccacgagatccagcccctgcgtctgttccccagccccggcctcccaactcgcaccagccctgtgcggggctccaagagaatggtcagcacctcagctacagacgagcccagggagaccccagggcggccacccgatcccaccggggccccgcagcatggacctacaggggaccctgtgaagccctggactcatcatcaataaacactgttacagc

SEQ ID NO: 115816 - DNA, 2860 bp, Homo sapiens
  misc_feature (1)...(2860): n = a,t,c or g
atgaagaggaagaccttcgccgtcgtctcaaatctttttcatgagtccctgcgacaagtttcgagccaagggccgcaagcccgcaagctgatgctgcaagtggtcaagatcctggtggtcacggtgcagccatgccaactctactaccctctccccagctcatcctgtttgggctcagtaatcagctgctgtgacattccgggaagagaacaccatcgccttccgacacctcttcctgntgggctactcggacggagcggatgacaccttcgcagcctacacgcggggcagctgtaccaggccatcttccatgctgtggaccaggtgctggtgggcggcagtacctggcttgcctgacgtgtcactgggccggtatgcgtatgtccgtggtgggggtgcccttggaccaatggctcaggcttgctctctgccagcggtactaccaccaggccacgtggacccggccaacgacacatttgacattgatccgatggtgttactggctggcaatgtcaccatccacttccggctgaagaccattaacctccagagcctcatcaataatgagatcccggactgctataccttcagcgtcctggagacaacagcttccggctcctgttgacgtggtggtcatcctcacctgctccctgtccttcctcctctgcgccgctcactccttcgaggcttcctgctgcagaacagtttgtggggttcatgtggcggcagcggggacgggtcatcagcctgtggagcggctggaatttgtcaatggctggtacatcctgctccgtgtgctcaccatctcgggcaccatcatgaagatcggcatcgaggccaagtgcgtcctgccaacaccctgggccccaggtcccatccctgctgtcagtgctatccggggccatatcctcccccaggccccccaaaggaagggctgggcagataggttgacgcagctcccacccgcagaacttggcgagctacgacgttgcagcatcctcctgggcacctcgacgctgctggtgtgggcacccactggctccatgaccacaccggctgtgccctcggcaaggccccgcccctcccaacccctctgggtgcccacagctgacctgagttgtggccacaccctcaacgaggcccctctgccccaacccagatcctcatcgccacactgcgggtggccctgccagcgtcatgcgcttctgctgctgcgtggctgtcatctaactgggctacgcttctgtggctggatcgtgctggggccctatcatgtgaagcctcttcatctacatggtgctcagcctcttcatcgcgctcatcaccggcgcctacgacaccatcaagcatcccggcggcgcaggcgcagaggagagcgagctgcaggcctacatcgcacagtgccagggacagccccacctccggcaagttccgccgcgggagcggctcggcctgcagccttctctgctgctgcggaaggactccgggcaccagatcggccgtccagctggaatcaaccgatggaggctccgctgcaactggaatggtgcttggcgtgatgatcggggcggagtggcggtggtggtcacggccgtgctcatcctcctggtggtgcggagctgcgagtgccaagtgagcacccgaggggcccctcttgggaggctaaaccccagccccggatggcccccggtatcggttccggaagagggacaaagtgctcttctatggccggaagattatgcggaaggtgtcacaatccacctcctccctcgtggatacctctgtctccgccacctcccggccacgcatgaggaagaaactgaagatgctcaacattgccaagaatggttttcttccagggtacctcactgaggatcctgcgcatccagaaagagacgcccacgctgcagcggaaggagcccccgcccgcagtgctagaagctgacctgaccgagggcgacctggctaactcccatctgccctctgaagtgctttatatgctcaagaacgccggtcagtgttggggtgcagggtgctgggccacttcgagaagccactcttcctggagctctgccgccacatggtcttccagcggctgggccagggtgactacgtcttccggccgggccagccagatgccagcatctacgtggtgcaggacgggctgctggagctctgtctgccagggcctgacgggaaggagtgtgtggtgaaggaagtggttcctggggacagcgtcaatagccttctcagcatcctggatgtctcaccggtcaccagcatccccagcggaccgtgtctgccgggcggcccgggactccacggtgctgcgcctgccggtggaagcattctcgcggtcttcaccaagtacccggagagcttgccccggcctcccaactcgcaccagccctgtgcggggctccaagagaatggtcagcacctcagctacagacgagcccagggagaccccagggcggccacccgatcccaccggggccccgctgcctggacctacaggcttgcagggtggcccccgctccgacttcgacatggcctatgagcgtggccggatctccgtgtccctgcaggaagaggcctccggggggtccctggcagcccccgctcggggccgccagaccagcagcatcttcgaggcagcaaagcaggagtggccaagctgatgcggattgaggtgggcagccgaggggagctgggcacgggcgcaagggaggcctggctgcgcccatctcaacccccctacctccccggacccctccctcctgaacagcagagtcttgctgcaccacgccaaagctgcaccatcattgcccgccagggagaccaggactccaactcctag

SEQ ID NO: 115817 - DNA, 893 bp, Homo sapiens
gtgagggtggcccatattcctattgctgcagcagaaattgctgccatccctgacagaggagggcacctgagtgttggaaagcggaaactcacattttggtttttctatggagtgttgccattcagggatgtggccatagaattctccccagaagagtgggagtgcctggactctgctcagcagcatttgcacagggatgcgatgttagagaactatggaaacctggtgtctctggctgcaggagatcaaagccttccaggagatgcagctgcttcagctgtctgcagacaattatcaccttcagcctgtggggcaattttgggtctgcctccagttaatggagtggctccagtaagactgagagatttgtgaaaaatcaaacttccgcccaagaagccggcatttcagacctgactggccagtgtctcaaagacgtggatggtgaccagctctctccagaacagatggcgctccagctttgtgggagaaactttcaaggtaggatagtgactctgagaccaagattcagcaccctggtgaggctgtgcctatcttatgggaacactgtttgcagtggagatagagctctcatggacggatcctgtccaatgttaagactgtgtctcgtgtatttggatgcaactcacaagaggttgtattgtgccatatatctgtgtccaaattataagcacaatgatgaatcttttactgggagtcaagatatgtgcaggatggtgaaacttatcactggacctttccacagtgttattgtcacatatacctttgtccaacatccaatagatgaaaaaagatgcaaagaagacacatttgctttttatgcacacatcacttccagtcactatgttgagcagagtcagtgtgaggacaattga

SEQ ID NO: 115818 - DNA, 764 bp, Homo sapiens
ctttctatcaggggagggaggctgtgctctcactggcttcttgttagaagttctgcctgccctacagcctgcactgagggctctcatcactgcttctgagatcttaatgggggtcaacgaagatgtgggcttctctgagtttagaccatccatctgccaaggaaaaccaagccctgagactgatagagatgagagaagagaatggtgatgtccccaagacagagcaggcaggaagtttgaagcctctgagggatacaggaaaatctaacctcaaagagaagaagcccctggcaagcatcatttacttcctgtatgtatttgatgctctagggcaggggtccccagcccctgggctgcagacccgtacctgtctgtggcctgttaggaaccaggctgcacagcaggagcttcagggtacctggatatctcacatgttagctcagtactccatggctcatgtcctgggacagaaagccaggtggaattcatatcaccttttagacttagccttagatttcaagtggtgtcatttctgtcacattcatttggtgaaggcacttgtaaaggtcttcccacattcaagagatgagagctccttgactccaccccttgatggagcatcgacactatatagggaaaagagcgtgtgggaagaggaatatattgatgcggccatctttggaaaatacaatcctgctacacagataaagcatttggctgagtataatgagttaggcatcacgatgagtcctagaataagatga

SEQ ID NO: 115819 - DNA, 438 bp, Homo sapiens
agtcagtcatgtccatggagaggttctgggactgcaggtcgtccatcactcagctctgatgccacttggcctgaggagcactggatgtgacttgatttgcagtcatttcaaggaatcatagagttgattggattttaaaattgggcttcagctaatgaatacatgtgcaatccagagtcaaaggcatgtgctgagatgtgatttcatggccatccggctccgggggagatgcggggctggccgcgcgtcacaaagaggagcccggcgcaatctggcaaaacccaactttccaccaggctcgccagggccgccagatacgtcaacagaatccatctttcgaagggcctggaaggcgccgggttttccgggccggggcagaacggcagatccggagactgcccggtgcggtgcctgggacgaaatcgtcgagccggtaaa

SEQ ID NO: 115820 - DNA, 1163 bp, Homo sapiens
catggatgatgactgttgaatgctaaggctccatggctgagcgatgcctagtgtactcccctcaagaacacgaggagcttagaagagagaagcaggcctcatctggggcccaacacactggtggtctggctcagaaattgggcaaggataatcctaggggtgaagagcatcagagaattcacgcaattttgcccatttttcctttcttattcagggatgaatctggctgaccttcgtggaccctactctgtctcatgcagcctggcttctcacgtggcttgtacagggctctccatggatttgggcaaaccctcgtggcctcaagtgacagtcacatgactccaaccccaaccccactcttccctctggcttccttccctcctcccctacagtgtttccttcagttcccaaatcaactttctgcactggaatccttgtctcaggatatgcttctgggggaacctacgacacttgtcattgccagccccaaatctgcttctcttcctagggacctctatctcagtgaccacgccccccccgcctcctcccaccccttggtgtatatagtaaaggccgggcgccgcacgcagacacacactcgccaggacacaggcgcacacacgctcacgcacaaccagcagcggcggcggcgacagcgactcggtgacagcggcgacggcggctcccaccgcggcgcacccccttcaggcggccggcggcgaggccagaccggagagttccagcacactcgaccaccccgctgccccggcccggaaaacccggcgccttccaggcccttcgaaagatggattctgttgacgtatctggcggccctggcgagcctggtggaaagttgggttttgccagattgcgccgggctcctctttgtgacgtgcccgggtgcccatcatctcattctttccagactcaaagcctttccttcatggctcacaatgttgatgagcctcttgagtctgccacttcactgtcctctgatgtcagaaggagttggttttgtttcacatggcagaagcagactgtttactggagcacaggaagaatccgacattctggcgaaaaataattcattaacagccagggtattaccagttccctggaaaagctcctccagctgcactgtagcaactgttctttttcagcag

SEQ ID NO: 115821 - DNA, 360 bp, Homo sapiens
atggctgagtgggctgcagtgaaggctgttggaagctggaagttgacagcaggccaaagacatgtcttagataaaggccgtgttttcagcatgaacgaccagagaatctaccaaatagaaacgatactcaacgtcaaattatgctgcctaatgaataagccctgctcttctcttgctagtcccaagtcggagcagcctccttgtctatggcggcttctgccattccctccaccctccatcactgaaactgctctgcctgatactgtcatctccaggctcaaagcgcttcaatgcttctccactgctctccggagaagcatggcacccatggagcaggacagacaatgcccttcccattga

SEQ ID NO: 115822 - DNA, 512 bp, Homo sapiens
catctgcaaatatatcagacctaaaacaaaaatatcaaaaactcatattaatggttattggattttttccccctctttttggtgtacatacttggaaggacgcatctgtcacaggaaaatttttgtgaagcactcatcttctgacttgcccatgaattccttgttttaagcagtcaaggcaaacagtgtgcttctcaaattttagcacgcgtaacagttgcttggagagcttggtgaaacagagattctggagtcctccctctgaagatttgagtatcatccagataaacaaagtacagatgtaccagcaggaacagtggaggaatgtgtacagaagttcatcgaaattgatcaagcatggaaaattctaggaaatgaagagacaaaaagagagtatgacctgcagcggtgtgaagatgatctaagaaatgtaggaccagtagatgctcaagtatatcttgaagaaatgtcttggaatgaaggttggattttttttttctcttgacaacatt

SEQ ID NO: 115823 - DNA, 405 bp, Homo sapiens
atgaccttatttggaaaaagggtctttgcagatgtaattaaggtcacactgatgcaagaggtgggcacccatggccttgggcaactcggcctctacggctttgcagggtacagctcccctcctggctgctttcatgggctggctttgagtgtctgcagcttttccaggtgcacggtgcaagcttatcatccagataaacaaagtacagatgtaccagcaggaacagtggaggaatgtgtacagaagttcatcgaaattgatcaagcatggaaaattctaggaaatgaagagacaaaaagagagtatgacctgcagcggtgtgtgtactgccttgcacaaactcaacgaaagttcatcgatgatgactattgtcaaaatggcaaagcagataatagactgagttaa

SEQ ID NO: 115824 - DNA, 415 bp, Homo sapiens
cccacgcgtccggttaagtttagcagataaggcagtttatcacagtgtccgttcactcagacagcataagtatgtgttgataaaataatcttaaatacaagaactttagtaaagaaataagccacttcattaacattgtaaaatagttttaagatataaagtatgaaaggaattttacagtgtataaattttctgactttccaattagcaattataaatttttattgacaatcttattttgaaaaccccggagttttcaaatattctgcatttatgttgaccattttaccaagatgataaaacatgcattattttctccattttataatttttacagggggaacagcgaagccagatgatttattagttattgccggtgaaaatacagagatcctttgaaacatttgtctctcct

SEQ ID NO: 115825 - DNA, 273 bp, Homo sapiens
atgcggctgctgcgggacgcaccaggcctagtcgcccgacagccgcccgaggagcagcccagccaccccagggcccggaggaccaaccgcttcgacaccgccccgggcggcggcagtgttggccggcgaggcgaggaggccgggccgccacgctcattgaatcagaaactcagtggtgggattcagcgatttgtatttgaacaagccccagggggaacagcgaagccagatgatttattagttattgccggtgaaaatacagagatcctttga

SEQ ID NO: 115826 - DNA, 1515 bp, Homo sapiens
aaataataaagaaattgaaaacaatacattaatataccataacactaaaaagagcaggagcgagagatgagaaagggaatccagcccgctctggagcagtacctggtgaccgccgggggtggggagggggcggctgtcgtcgccgccgccgctgcagcctccatggacaaaagggcactgctagccagccccggcttcgccgccgccgccgccgctgccgccgccccgggcgcgtacatccagatcctcaccacgaacacttccaccacctcctgttcctcctccctccaaagcggcgccgtagccgccggccccctcctccccagtgcccccggcgcggagcagaccgccggcagcctcctctacaccacgccgcacggaccctccagcagagccgggctgctgcagcagccaccagcgctgggacgcggcggcagcggcggcggcggcggccctccggcaaagcgaaggctggagctaggagaaagcggtcatcagtacctctcagatggtttaaaaacccccaagggcaaaggaagagctgcactacgaagtccagatagtccaaaaactccaaaatctccctcagaaaaaacgcggtatgatacgtctcttggtctgctcaccaagaagttcattcagctcctgagccagtcacccgatggggtattggatttgaacaaggcagcagaagtgctaaaagtgcaaaagagaaggatttatgatatcaccaacgttctggaaggcatccacctcattaagaagaagtctaaaaacaacgtccaatggatgggctgcagtctgtctgaggatgggggcatgctggcccagtgtcaaggcctgtcaaaagaagtgaccgagctcagtcaggaagagaagaaattagatgaactgatccaaagctgcaccctggacctcaaactgttaaccgaggattcagagaatcaaaggttagcttatgttacatatcaagatattcgaaaaattagtggccttaaagaccaaactgttatagttgtgaaagcccctccagaaacaagacttgaagtgcctgactcaatagagagcctacaaatacatttggcaagtacccaagggcccattgaggtttacttatgtccagaagagactgaaacacacagtccaatgaaaacaaacaaccaagaccacaatgggaatatccctaaacccgcttccaaagacttggcttcaaccaactcaggacatagcgattgctcagtttctatgggaaacctttctcctctggcctccccagccaacctcttacagcagactgaggaccaaattccttccaacctagaaggaccgtttgtgaacttactgcctcccctgctgcaagaggactatctcctgagcctcggggaggaggaaggcatcagcgatctcttcgatgcttacgatttggaaaagctcccactggtggaagacttcatgtgtagttgattatgcttcgtgtgaactctccttaaaaaccgatatttttttatcatggaa

SEQ ID NO: 115827 - DNA, 1122 bp, Homo sapiens
atgagaaagggaatccagcccgctctggagcagtacctggtgaccgccgggggtggggagggggcggctgtcgtcgccgccgccgctgcagcctccatggacaaaagggcactgctagccagccccggcttcgccgccgccgccgccgctgccgccgccccgggcgcgtacatccagatcctcaccacgaacacttccaccacctcctgttcctcctccctccaaagcggcgccgtagccgccggccccctcctccccagtgcccccggcgcggagcagaccgccggcagcctcctctacaccacgccgcacggaccctccagcagagccgggctgctgcagcagccaccagcgctgggacgcggcggcagcggcggcggcggcggccctccggccccgggggccaaaaataatcggggctctggagagaggagggtcccggccgcacggatatcgggccccaagcggggatggaggcgtcgggggcggccgatgcaacggattgcgaggcggcggcggcagcccgggtgctgcggccggcagctgaaaaatggctccaggaagctgctgctgacaatgaatgaagggatacggtttacgcgccaaggacaggtgccggcagcgctctgggtcattttcggcgaggaccgctttcgctggagcgcgacgatgatcggcctgtcgcttgcggtattcggaatcttgcacgccctcgctcaagccttcgtcactggtcccgccaccaaacgtttcggcgagaagcaggccattatcgccggcatggcggccgacgcgctgggctacgtcttgctggcgttcgcgacgcgaggctggatggccttccccattatgattcttctcgcttccggcggcatcgggatgcccgcgttgcaggccatgctgtccaggcaggtagatgacgaccatcagggacagcttcaaggatcgctcgcggctcttaccagcctaacttcgatcattggaccgctgatcgtcacggcgatttatgccgcctcggcgagcacatggaacgggttggcatggattgtaggcgccgccctataccttgtctgcctccccgcgttgcgtcgcggtgcatggagccgggccacctcgacctga

SEQ ID NO: 115828 - DNA, 1185 bp, Homo sapiens
atgcaactgtctctggatgccactatcattacatctctgtggcctcaaatgggtccattgcagaatcttgctatcttcagtgaccttaaagatgtttttgcttctggagaaggaaccagctgcatcaacggtgatctgctgacttcatacagtactccgtctgctcccacctcgcatcccatggcccagtgtccccccctttgttgccgggagttacagatcctaaaatgtgtcaagcgcagccccgccgatcccctgcgctccgagcacgccgcagggacccccggccgccaacgagcctccaaggccgactgggggctagcaccccaacagtcccccggtttcaacccctcagagccccccacaccccagttcactactccctcccccacccccttctccatccggggcgtgaccccttcctacgcccgagaaagaggaagcttcgagttggaggggaagggagagtggggcgcgcccacgaccccgcgcggtgcgagcccacctcccgccggggctggggacggtggggagggagggtattaccggagggccgccgccgccgccgctgccgccgcgtcccagcgctggtggctgctgcagcagcccggctctgctggagggtccgtgcggcgtggtgtagaggaggctgccggcggtctgctccgcgccgggggcactggggaggagggggccggcggctacggcgccgcttggagggaggaggaacaggaggtggtggaagtgttcgtggtgcctagaactatgtctagcacattgcaggttctcaataaatacttttactgcagactacacagtcgggcaatatatggatatagatattctgagtatgccaaattagtttctgactcgggagccttcataattgctattcctctgccagaatatcagcccccagataacccaagaaaaactgaaactggagaaacaaggcttggccataaaaggagctgtggccacactctgccccacatggacccatcggccacccttacccagaagtcgggaagtaaaaaccagtccaaagtgagaaaatcaacccgccactctccggaagctgcacagactttagatggagagcgccatgacacatacgtcccgccacgtttatttgcgcatgctcagcgacggtggcccgaagagatcaaattacatcattgctga

SEQ ID NO: 115829 - DNA, 471 bp, Homo sapiens
aattttttttttttttttttttttgaagctgaggcagctttattgaaaggaaggccagtgagtgggactcacatttgatctgccccagagtggcgctgggaggttaccgagaacacagtcccgaggtgggggaggccctcagagtcacacctccaggctggactgagaggagctgggcttgtgacccatggggctcttgcccatcacagtgccagcgccagggggtggccagtggcgaaccacgtgccggtagaaggtggccaggtagtcgaagtagttgatgttgagtttccgggcgatgtaacggcccaagtattccatttgctcgtagtgctccgacagctgcaccagcaccaggggctccaacctgtggccgccgaggaccaggtggaagaagcaccttccgtgggcatcggagctgagcgccaggcgcacgtagaccagatgcaaggggccctggcacacggtgcg

SEQ ID NO: 115830 - DNA, 1050 bp, Homo sapiens
atgagtgccgctgtgggcagtgggcggcggcagcggacgagcggccaggctgaccacctctgcctgactcagatgcctaagggccgggccggcaacctgcccacgacctccatcggctggcgcttccagctctggttcctaggactcacctgcccggagcgccacctggccagacgcctcaagaacaatagcttctacccatttgtgcaacaggagccaaacagtgcccccaatgctgggcggggcggggctgggctgggcttggaaaggcggggcgggggaagaaggagaacggccccgaggcctgaatggggcggagccagggccggggggtcctcacgcgccgcgccacccccagtcttcgtgctcgaatactacctggacacactgtggaaggggatgctgctcttcatcatcagcgtggtcctggtcagcttcagctccctgagagaggtgcagaagcaagagacctgggtcttcctcgtgtacggcgtgggcgtgggcctgtggctcgtgatctcgtcgctgccgcggcgccgcctggtgctgaaccacacgcgcggcgtgtaccacttctccatccagggccgcaccgtgtgccagggccccttgcatctggtctacgtgcgcctggcgctcagctccgatgcccacggaaggtgcttcttccacctggtcctcggcggccacaggttggagcccctggtgctggtgcagctgtcggagcactacgaggtctttgggtggggccgtttccgcacgcagagggtaaatacaacacggtcttcggtgctgggggccgtggagagggcgccggggcttcgggcaggacgggggatgcagcctgttgagcgccacctgctcccacagcaaatggaatacttgggccgttacatcgcccggaaactcaacatcaactacttcgactacctggccacctcctaccggcacgtggttcgccactggccaccccctggcgctggcactgtgatgggcaagagccccatgggtcacaagcccagctcctctcagtccagcctggaggtgtga

SEQ ID NO: 115831 - DNA, 762 bp, Homo sapiens
tgagaagggaagctactttttcattgctgaagtccttgggcagtgggtaagaagaaaaggtaggaaggatgatggtgaagaatgcacttctctaaataggaatgagaatggctgaggccatttccctccttctgggtatcctgccatgaaattgagtagacctagggctcagtggctggaccagaatcaggaggactgatcagatgagggcccttggtttgggccacatttggtggggtatgctacagaatggagacaagacctcatgagctcataggggataatgtctccagacaagggcctcatccttcccatagttgcaagcatgctgcccatctagaattctacaacaaaggcaggcacaaaaacagtgagagggctcaggcagggaaaggtgtccactgggcacagctcatcattattgagtgtctggctgggtattatgatgtcagaggcatcagccacagaggatgttacccttcggatgcatacctcaatctgcctgaaaatcatggaattctggagatggaagggacctcagagattttctggttctctctgttctggttgacccagggcttcggtagacagctttgtcccagtgatgcctgggcatcccgaaagcagggtgagcttccaaccagagtgcagaaatacatggctgacagcaaggaagagaagtcctacaagtcccaggccagccaccagtattcctccacctcatcggagaggaatgtgctggcatgccgcaagttggtctga

SEQ ID NO: 115832 - DNA, 390 bp, Homo sapiens
atgctggactacttcaagggggccaaaaagtacaattttaccctgcaggcagaagtggggaaggaacaagaagaagaaaaagatttggagaataactccagcggttcccctgcagctccacatggcactccttggaaggaaaacctgtttgtatggctgggggcttcacgtgaggattcagaccaggatacagaaccaatcagaggcctgtcagtccagaagtccttccagaacaccagcagtcctgcattcatccatgtgctgaccacagtgcccactagagctccccgtgcagtcagagattcactgaagcctctgtcagacgtcatcatgaaatgtaccctgaaaagactcttgcacaggacaccctgctggcaacacgtggggtga

SEQ ID NO: 115833 - DNA, 867 bp, Homo sapiens
atgtttgaatttagggggaaaggccatcatgagaaatatgatgttggtaattttaacttttctttagtgcagtcatttaaagctgacaacaggtcacctagctggagagcggcagatttgccaccccacactcaccccggcagagtggaaaagcaactcttgaacaatgaaatgagtgaatgtggagatgaaactcaagaagcacagtttgaaaaccacagaatgagtggaatgcaagcctctgcttcttcaggtgaggattcagaccaggatacagaaccaatcagaggcctgtcagtccagaagtccttccagaacaccagcagtcctgcattcatccatgtgctgaccacagtgcccactagagctccccgtgcagtcagagattcactgaagcctctgtcagacgtcatcatgaaatgtaccctgaaaagactcttgcacaggacaccctgctggcaacacgtgggtctgtatgatggtgtctttaaaataaattcctgtcaacatccccgaggtaacccagaggccctggaggttcaactttctacctattctgaaatcctaaaccaattttcaagagaaggtgatgacagaaatgactcaccatattcaaggattttgatgaaggaccagtggtccaatagaaactggaatgtgcattacacttgggttgcatcttacagctgcagccaaatgtcaggaggatcagagattattggcagtgactgtggtggagctacggagttgaaagcccagtggggtggaaaagagtgcacagacacaccattgccagcagcagcagctctgttcaacaatcacaatgccaggaacagggcatcatcgaaaggctcttcctgtgactga

SEQ ID NO: 115834 - DNA, 667 bp, Homo sapiens
acaattctgcttattctctcaaagagattctaagatgcacctttagaactattaatagcaacctgcattttttttaatttatacttcagaatcctttaagaacctggtgttcctgagtggtcctgaatcatataagttggtaatggaagctgtaatgaccaagtcccctaaacatactatgtctttgccacgtgtgctgtgacttctctgtgggtgatttaatttatttggatccacctctgagtgagcgcacaagtgatcaggtgcttcaaagcccaacagaccagctcctcttcctccggatccctcttttgatcctgccccaggaaaagggatgcattgacactctccctgcatgcaccctggcgagaagcccacctgaaagtcactgtggttaaagatattggtggaggtaccccaggagcactgttacaaatccttcttgttttggcatctcgtacaacattattaagacacagctgagagttgatgggtgtgtaatgcatatgccaaggaaatgtcactaatcccaaagcaatcaaaaaggagacctcaaaccagatgttaatttgttctttgtgtaacaatgtaaccaaaatattgatgataaaagtcataatttaagattcagaataaatgggtttgatgtctgaaaaaaaaaaaaaaa

SEQ ID NO: 115835 - DNA, 1436 bp, Homo sapiens
atgctggcagaagaacacaccaacagagggacacccgcactctggctggtctcacaacccgcaggacaaggcagagtttggctggggcaatcggaggaactccagggaaaaaccatctcccttctggctcccccatcggcggagagctacttccactcgataaaactttgcactcattctccaagcccacatgtgattcgatccttccggtacaccaagagctcagagttctacagagtcaccactgaacaatatcagaaagctgctgaagaggtggaagcaaagttcaacccttatgacaatgtaagtggcatcagtgttgcctgtgccccatctcccttctcaagtgtgaaccgtttaaggcaggatgacttaagtcatcccaaagaaaggaaagttcacacaatttgtaaagatcttcccgaattctacctacctgataggcaagttataagcatcacttgcctgtcggaggctccacgaaatgctctggagcctttgagaggaaaggaccctgcctgcccctcagaagggagccaagaggaaggacagatggccatggggacccccccagtccacggaccactgaccatcaagaatgttgctatgggtttctctaggaagaactgggaccaccaggccctgataaaaggagtctatacaagatgtgaggatgagctggcagctgtggaggttacagaccagcacgtgtacagagaaatcgccatctttcttttagttcccagtatggctcctagtaggagaactcgttacttctccctcatttcaggcaacctgagcaccagtgaaactgtgactggcatttgcagggacctaaaaggtctgccttgttcccccacatatacactggctaatacggtgctgatgagaagtggagaagctaccccagtggcttctcagggggaaaggtttgagcagctgatggtgtttggcagatgtgacaagcactgggaatactgcccttttggagcttctggtctaatgggagaaataactgatcatccaaataacttgacaatggcaattgtgaaaagtgctgtcaaatgctatgagagcatgtcccatgggaatcgactgtgaggcattggagacaacctcttaaagctgatataaaggctaaaatagtaggcattaggggaagggcagcagggccaatgcatgttaagacgctgaggaaggagctgagctcctttggggttctgaagggaaatctattgtgagaaagtgtcgtaaagagagatggaggcaggggttacatcttgtaggacctagtaggtcataatcactattttggatgtatcccaagagaggtaggaaatcttgaagagttagggttgtaacctagaagttgtgagaccagatttgtggtttaaaaggggcactctggttgttgttgttttgataatgaattgagg

SEQ ID NO: 115836 - DNA, 338 bp, Homo sapiens
ccctgatccatgggctatgcatttcccattttccttggggatggtcatccaggcaaccagaatctccaggagtttgggagctggcactgctttatggatgatttccaccatgctgccacagttaaatccattctcttctgtcttggaattctgagtgatggttccatggagttagttcaacttatcccacagcttctcataaagaggtctctgtagctgctgccctggtgcaccccagcaccgccttcacaagcccgttccgaccacgggaggctcatgttgtcagcatctcttcatatcaggaacacagcaaggacgtcttttctcaccagttccat

SEQ ID NO: 115837 - DNA, 1449 bp, Homo sapiens
atggccgtggctgagagcattggagagtccatgtgtggccgcctggccggctgctgtcttagttcctccacgtggcacttgttgagcacctgtctctggctggaatgccgggtgccagaagaaactctgcaagtaaaactcaaccatcccaggacactggaaaatcaccactgtgatgggccaactctggttcccagtgacatttattcttcagggactgactctccacccccgaaaaatggtgtgccctgtatcaccaaaccatgtgggcagtgtggcctcattgggtctgggggtcttgttgtcctggattctgaaggaaaggagagagccgttaaagaaagcacgggcagcatagcctgtgctggagtctcctgggatccagaccaggaacacacatttttaacaagatccccagatgattctggggcacaccacgttcgagaaccgctagatgaagggctctctcccatctttgcagggctaatatatgaccaggctttggtgggaaaacagcccaggcacacgctgcctgtcatgtccctctgtgggcagaggccaacaaggatccagacctctggactggaaaggcagatgtggaagaagtggaagaactgtgacatcctccagcgttttgtcctacagggctggctgtctctttcccctgttcagtgcccatggatcagacacaggctctgtattgacgacgctgaaatcacttctcacaaaattggagaccgtgatcacattcacatggaaggggccttttggatctgcatccatctaggtcgtgctactcacggcctgtgcgatacattttcatccatggtgaatatttcaaccagaaccacacttcaaacctggacacacaacggcaagctggcctacatgcagaattccaagacagaagagaatggatttaactgtggcagcatggtggaaatcatccataaagcagtgccagctcccaaactcctggagattctggttgcctggatgaccatccccaaggaaaatgggaaatgcatagcccatggatcaggacttcacaggactgccacaagcgacactgaatggagagataaaaagatgataaaagtcacaggctacaatcctgttgggctttgcggctgtgggtttccagagcgaccgtccctgcaggcccctggacctgccaccttgtcagcagacccctggttttcctgtcacctatctggccatgttgcatcttcattgcctgcttgtctctccccctcacctaccatgaactggtcttctgagggcaggggctgtgcatccttcactctggagccctcagcactgactcggtgcacagagcccagagaaacagacatcagccacccaagaactgttcccacaagatctgttcccatagacccagactatacttcccatgctggtatgcctgatgagtgcctgcatctttaa

SEQ ID NO: 115838 - DNA, 402 bp, Homo sapiens
atgaacagtgaatgcggctaccgtgcattgctgctcaggaatacatctcaagaactcaaaatacctaactctaaaagcaaagagactgccagtgataaaaattcagatgaacagcaaatcaaacgagcattcgagttaaatggccacactttcattattgttcttattattcacagtctgcattactaccacaacagtggcaccgttaagcaatccgtcatttgggccaaacggtcaggggtggaggaaggaggagaggtagaacaacagggtaaactgaaaacaatcaatcaaaaaaagacagaaaaaaagcaccgagccagtttcacaggctccgttgctccaaagccatcatttcaaggttatggctttaaaattatggaggaggcagctttcacctga

SEQ ID NO: 115839 - DNA, 525 bp, Homo sapiens
gcccttgtgcggagccctgccaaggattagtcccagcctgctcctccattggcccttttgaccaactcccagtatgatgggcagatggaaagagagtggcttgtgacgctctccacacaatgaagaaagaaacatgccttctctcctcaacacacagcagctccctgtcatgaccccctgctgccgttacaaagtcattagcatctactgtgcccctgggggtgagggaaagccaaaccccggaacaatatcatctctgctaaagacacaaaacttttgcttatggcacaggcacagagaattctggataaacaggctcagggttttctggcacccagtgagtggctacctcagaaagtcaccttggtttgacaaggggcccatgagaaggatggagtttggggcatttttctcttaatcctcacaagttatggggagaaagagctactattctggaaattctgcccccaaatttattcttaaaaaaaaaaaaaaaaaacttatcgataccgtcgacctcgaccc

SEQ ID NO: 115840 - DNA, 417 bp, Homo sapiens
atgccttctctcctcaacacacagcagctccctgtcatgaccccctgctgccgttacaaagtcattagcatctactgtgcccctggggcaccttgtttttctgttgggtcgttccaagcagaagcgagaagtgaaatgctaggccaggatgggtgtatggaggaccacagtgttctgggtgctgcagcagacactacagagggcacagaagaggctcatgcagttcagcccttgtggcgctgccagggcattgtccggggaagggggtcagagcacagcatcaagccaggccgctgctctacctttatgaatgacctccccaatgtggacttcatcccagttctgcatgtggcccctttgtgtgaccctcatgaacacattctccaggtttatccccagcagtcctcctacacatga

SEQ ID NO: 115841 - DNA, 384 bp, Homo sapiens
atgcttgtcccagtcctgatcctaagcccctgcctcgttggcattgagccttgggaagtgtcaccccacaccaactccaccagctcctacgaaagcacccccaaatcataccctctaggcaccgcagcaaaagcagcttcagggcaatcccccagcacaacctcaccccttcctgagactgctccctccacccttcatgaacgggggctggaaaatgtggtctgctctgataaggatttgcgtcaggctactggctactcagcagccgagaagagcaagcctccaggcctctgcacgcgtgccttctgcccggaagccatccctgatgcccaagactgggttaagtgccagcccctgggctccctcagtgccttgaatttctga

SEQ ID NO: 115842 - DNA, 738 bp, Homo sapiens
atgttagctggttgccatgatgtcttcatttgtccatcgctgcccctctgtgagcaggcagccatcaggacagagagtggcatgctggacaggccgactctgacaaggagcaagaggaaacaaactttccaaagatgtgctgcatcgattcctgagtggaagcacaggggagctgcagggagtgcagccctggcagtgtcagggttccctgcagcaccttctgtccctaatgctgagcagctgtcagagggagtgctgcagagagctgcccgctgcctgctcgggaaatcctttgcaaacttccccagtcacagagcattagagcggagcccagagccccatgattatgcacgtggagtggcagggtcagcgatgagaaattcggcaagttggctagcccagcctccttcccaacagtctccgccaacacccaacattgacagcaccagctctcaggagaatgctctggtggcagcacccacaagctctgtggtcacggctttccctgcctgcaggcagcaagtcatggtaggatcagaggagggctcggggccagcttccccttccctgaaccatgtctattgtaatctgacttctggccccattgtaggacaagccgcagataaaacctctcagacaccgagttatagaaggaagggctttattcagctgggagcattggcaagctactgccttaaaatccaagctctccgagtgcacaatttctgtcccttttaa

SEQ ID NO: 115843 - DNA, 280 bp, Homo sapiens
tgagcactggcaggcctgggggtcatttttcaaaatgcaccctcaggtgttgtaacattcatccagaatggagaacccacaggtcatctgtttcacaaggttccttattactcctgacagagaacaagagctttttaaaaattttgttgcagtagaaaacacaggcctacataagcagatggctctcagttctaatgtcatattggaacttctgccatctgtcagtgaagagcatctagcattcttgcaaagaacagctgtttacatccagactgcttag

SEQ ID NO: 115844 - DNA, 327 bp, Homo sapiens
atgtattatagccagaccacttgctacaagctttatagttccttatttaattctcatagcaactctgaaagtcaagacctacgacatttccattttacagatgaagaaacgggcttaaaaagcctaagtcacatgctcaaagtcacacaactagtgagtggtggagatgccttccagttagaactcactgaatccagggagagcggtccattgaggagccagggaattcagggtctcaaatattcactaaatctgctgctggtcaaagacactaagaagaagaaacaggacaaacaacccttgactgtccatgaagttgaaggctaa

SEQ ID NO: 115845 - DNA, 1257 bp, Homo sapiens
atgggactgaactctgcagacacagagagaagactagatcacagactagtgagtgagaaaagagccaaaatcaggtacttacaagaaggttcatgcttcttaccaaggcttacagtggacataggagagacaacctgggtccttccaggttctccagcaccctgggaagatcaaagtagccagagtccaagaagcactggtgcttccccaccaagactggcagcagataagtgcatcctggatggagcctctggagtagcttggactgtgtccagagttggttccttctggtgggttcttggtctcactgacttcaagaatgaagccttggacgtcaaggtgaatgttacagctcttaaaggtggcacgtctggagttgtttgtttttcccggtgggttcatggtttccctgacttcagcaatgaagctgcagaccctcgcgaaaagttctccaagtccccactcgacccaggacgtccagctggcttcacctctcaggactacaggggctccgaatccagagggaaaacacacagaaatgactatgctacaaggcagactgtgataagagctataatagaagcaaaacaacatgcattgggggaacagggaatgaacgatggctcccacctggtgaggaggggtggtttgcggaaaagcttgatggaaacaggattttcaagtcccatggacctgggaaaggtatcacttattgcaggtacagcaaagtctatacagaagaaaggaaaagctaagagttgggttttgaatcaaagccttatgagctctgacgccggcactcttagccgctgttatgtggcacataaagatgggaaggacaagagaggtgggcatggtgggaggcacgaggagtggagagtgcctggacgctggaacatgtgtggagaagctgtaagagggaagcagagtcacacggtcaggttcttaggtcatgctgggaagtgtgggctttatctggatgctgaacatcaaccagaacatttcaaggaagtcatggtagagccttggaaatctgcattgcaaacaagttcccagatgatgatgatattgctgcttcgaagaccacactttgataaccactattctggtaaagaagtaaaatccagagatgctacaaatcgagacaagaaatgtgataacaaaactcagcacgattctcgacaacaactcaggtctgtcaccatccatgtaactgtggggttcatgatcctacattttggctgtcaacaggaataa

SEQ ID NO: 115846 - DNA, 416 bp, Homo sapiens
ggtttgcgacagcagcaaacagcagtggtggacagtgagcgaaagctcagctcaagccgtaacaaacacggaccagaagagtgtgcagttgcaagatttaatagagtgaaaacagagctcccatacaaagggaggtgacccagagagggtagccgttgccagctcgaatgcctgggtttaaatcccggtcattgtccctcccgctgtgctctcagacaatagatgattggctatttctttacctcctgtttttgcctaatgagcgttttagtgagctctctttactacctgattggtcgggtgtgagctaagttgcaagccctgtgtttaaaggtggatgcagtcaccttcccagctaggcttagggattcttagtcagcctaggacatccagctggtcctgtctttcaatatgtt

SEQ ID NO: 115847 - DNA, 893 bp, Homo sapiens
tcgaagctgtaaaactacaaatggagcccaagatgcagtccaagactaagatctaccgcagacccctggaccggcctgctagcccacgatctgatgttaatgacatcaaaggcacccctcgtgaggaaatctcagctgcacaacctctactacgccccaattcagcaggaagcagttagagcggtcgtcggccaacctccccaacagcacttaggttttcctgttgagatgggggactgagagacaggactagctggatttcctaggcccactaagaatccctaagcctagctgggaaggtaaccacatccacctttaaacacggtgcttgcaactcagctcacacccgacccatcaggtaagaaagagagcccgctaaaatgctaattaggcaaaaacaggaggtaaagaaatagccaatcatctattgcctgagagcacagcgggagggacaatgatcaggatataaacccaggcattcgagccggcaacgactaccctctttgggtcccctccctttgtatgggagctctgttttcactctattaaatcttgcaactgcacactcttctggtctgtgtttgttacggctcgagctgagctttcgctcaccgtccaccactgctgtttgccaccgttgcagacccatcgctgacttccacccctccagatatggcagggtgtccgctgcgtttctgatatagcaaggcgcccattgccgctcccaatcgggctaaaggctcgccattgttcctgcatggctaagtgcccgggttcgtcctaatccagctgaacactagttgctgggttccacggttctcttccatgacccacggcttctaatagagctataacactcaccatgtggcccaaggttccattccttggaatcc

SEQ ID NO: 115848 - DNA, 150 bp, Homo sapiens
atgctcatctggttggatgtgtttctggcttccaaagaaatatcagctgatgctccggaattaccctacaacgtggtggtagtcggcaagaagcctgactggttgctttctatctcttgccagttaaggcctaaacctgtttctgcttaa

SEQ ID NO: 115849 - DNA, 430 bp, Homo sapiens
atggctgtggcaggggtcccggcagtttccttcaccagtccctgtgagccagcccccgcgctgtccagatcccagacctctcgcgggccggcgcagccttctaagggcggtcctggggtcctgggctcaaagtccagccttggccgcggccccacgggtacgcttgtgggccttccgtgctccaggagccgccagactctgcccggcgcggaatggaggtgtgaagccgcagaagctagggaggggctgacaaggaagagtcggttgcccgtggttccctacgcaactctgtgggtgcggggagtcgaagccttctgcactccaaggctcctggcatcgtccccgcgccaccccggcgtaccctctgatggtcgctgacagcttcacaggggaagatcgagactgacccttctcccgctacacatcccta

SEQ ID NO: 115850 - DNA, 344 bp, Homo sapiens
ttaatggaaggcattctggcttcacatattatcacatgctccatcatttcacctagatagacgacaaaagctttcctgggaacattaaagacataataaatgtgtgttcacttacagagctttggatattttctgagctgtgtcagtcagttctgctgtcctttgctttggtcattggcctcagtctcttctatctgcgcgtcaccattgcttggatctgagatgattcttttgctcagttgttgttggatgtctgactcaaactgaatcactggtggctgcatcaaaagagaatgagaagagcctagataagtggaatgacattctgtttaaattattttagc

SEQ ID NO: 115851 - DNA, 318 bp, Homo sapiens
atgaacacgagaaactgctcagtcctggctttaaacagtcctgtaatcacaacagccctgggtagacaggaaaacagcatcgacagatgttccaaggggttcatctgtcagacgcctgtccagaagggagggtggaatcctatccttcttcgcttctccccctgctgtgctgtgaatttgccttcttcagccattcactcattcatcagcaggtatttcctgagcacctgccaggtgtggtacacgctgctggagacatggagcaaacaggcaggaatggcccagccctgccctcacctaaaggtgttgaaagtatga

SEQ ID NO: 115852 - DNA, 618 bp, Homo sapiens
atgatcattgtggagggatttgggctggaaggaggtaatgttcagaggggcagcaaatcttctcttgaccagtgggcagaactgtggggtaagaactacgttttgatcactgagggtaaaacatgcagattgaccaagaaagaaggttgtttcctacgctctaaagagctgtccctctttaaagtaacagttaaacttacaaggagattaagtaattctgtggaaggggaacctgaggttcaggcagcagcagttcaaggttacacaggtggtcagtggtggagccaggatttgaactcaggtctcttggaccccaaagacagtgtttttccttctgccctggagcgtgcttcaggcccaggggatgtaggaatggcggccccttttcccctaaatcgggtggggcccttcttctttggcattgtctaggtgatgtccccacactcctgtccctgacttccttgtaccttttcacccgagtgcttcactccacctctcagcgatgtggctaccctctgattccagagactcacaaacatgagtcaaagggttgctgggtctttatttgctacaggtggtggatattgtcctcaaaaactggacggggacagggggcga

SEQ ID NO: 115853 - DNA, 379 bp, Homo sapiens
gggggatgattgaatagagctggactaaattggtctaactaggacacttgaaggcttgtgaatcagttcacacgatcagtgtgaaaagcgggtatgaagacccagatgctggtgtgtacgtgtgcatataagccccaacagctagaaatcaagcctttctggcttccgattgttggagaagtggaaacagttaatggagtatgcaatgagattctgccagaaacggagtagaaaaactgtggctcacccgggacccagtctttccccaggttccccacagatgagctctgaatctgttataattgactcaccacgacctgcacgtacacatggaattcctcatggcatccttagatcttttttgccacatccttttgct

SEQ ID NO: 115854 - DNA, 378 bp, Homo sapiens
atggttactaaataccattgtttacaaaaagtagccaggtgtccttgggaagctgctgactcaagggttaagggacaagactccttagaccccaagtgtttgagtttaaataccgattccctcacttgtgtgagtagcagaggaacactgagtaaagaagaacaagaagcagaagtggaggaagcagaaaacaagaggcaggaaacaagaggtctggaaaggaaaaagctagaaatcaagcctttctggcttccgattgttggagaagtggaaacagttaatggagtatgcaatgagcatttaaagtttgtggaactaaaccagagggagacctgcagcaaaatccgaattcaaatgaaccaggtggaagcaagttag

SEQ ID NO: 115855 - DNA, 384 bp, Homo sapiens
atgctggcatcccccctgtggctccaagcgctgagcttggcggcggggacctggcggccccggctcggctcgggacaggcaggaaactcagaaatgagagcagggttcttgcctggtgcaggcagccaggtccgagcacagctgcaggacagattaccaaagaccactgaaaccaaaggagccctctggccacacactgagctatgcgggatgtggagcatcgccccaggtgcagagaaccaggagctacagatagattctccccttctggggcagttgagcaatcaggtgtggagggaagatggctatggtaaggcctttaggttacggactcttagctccatggggatcactgaagaggccaatgagaatgttctgatttga

SEQ ID NO: 115856 - DNA, 4615 bp, Homo sapiens
atgaacgtgaaactgaaaagcaaagtaataccatcaacacttggcaaaatagaacctctccgctgtcagcgccagaaatacttacctgctgagaaaaggaaaagcacaacactgactttaccccgcgacgcttttaaaaaatccaaaatacccagcgcgatggggatgggattgcatcaaagctctcagagcacagctgcaaagggtaaagcaaagctagagctctactctggacctatcactctagacagtttctctgtgaggggcagttttatacacatttcaggtggcagaataaattcaatccttgtttctccatcttatcgagtagtagaagttagttacattctctttgaactcatcatgaattccatgaagactgaagaaaacaagtcatttagcgctatggaagatgaccagaggactagacctgaagtttcaaaggatactgtcatgaagcagacacatgctgacacacctgttgatcattgtctatctggcataagaaagtgtagcagcacctttaagcttaaaagtgaagtcaacaagcatgaaacagcccttgaaatgcagaatccaaatttgaacaataaagaatgttgtttcacctttacgttgaatggaaactccagaaaattagaccgtagtgtgtttacagcatatggtaaacccagcgagagtatctactcagccctgagtgctaatgactatttcagtgaaaggataaagaatcagtttaataagaacattattgtttatgaagaaaagacaatagatggacatataaatttaggaatgcctctcaagtgcctgcctagtgattctcattttaaaattacatttggtcaaagaaagagtagcaaagaagatggacacatattacgccaatgtgaaaatccaaacatggaatgcattctttttcatgttgttgctataggaaggacaagaaagaagattgttaagatcaacgaacttcatgaaaaaggaagtaaactttgtatttatgccttgaagggtgagactattgaaggagccttatgcaaggatggccgttttcggtctgacataggtgaatttgaatggaaactaaaggaaggtcataagaaaatttatggaaaacagtccatggtggatgaagtatctggaaaagtcttagaaatggacatttcaaaaaaaaaagcattacaacagaaagatatccataaaaaaattaaacagaatgaaagtgccactgatgaaattaatcaccagagtctgatacagtctaagaaaaaagtccacaaaccaaagaaagatggagagaccaaagatgtagaacacagcagagagcaaattctcccacctcaggatctaagccattatattaaagataaaactcgccagacaattcccaggattagaaattattacttttgtagtttgccccgaaaatataggcaaataaactcacaagttagacggaggccgcatctgggtaggcggtatgctattaatctggatgtccaaaaggaggcaattaatctcttaaagaattatcaaacgttgaatgaagccataatgcatcagtatccgaattttaaagaggaggcacagtgggtaagaaaatattttcgggaagaacaaaagagaatgaatctttcaccagctaagcaattcaacatatataaaaaggacttcggaaaaatgactgcaaattctgtttcagttgcaacctgcgaacagcttacatattatagcaagtcagttgggttcatgcaatgggacaataatggaaacacaggtaatgctacttgctttgtcttcaatggtggttatattttcacctgtcgacatgttgtacatcttatggtgggtaaaaacacacatccaagtttgtggccagatataattagcaaatgtgcgaaggtaaccttcacttatacagagttctgccctactcctgacaattggttttccattgagccatggcttaaagtgtccaatgaaaatctagattatgccattttaaaactaaaagaaaatggaaatgcgtttcctccaggactatggcgacagatttctcctcaaccatctactggtttgatttatttaattggtcatcctgaaggccagatcaagaaaatagatggttgtactgtgattcctctaaacgaacgattgaaaaaatatccaaacgattgtcaagatgggttggtagatctctatgataccaccagtaatgtatactgtatgtttacccaaagaagtttcctatcagaggtttggaacacacacacgcttagttatgatacttgtttctctgatgggtcctcaggctccccagtgtttaatgcatctggcaaattggttgctttgcatacctttgggcttttttatcaacgaggatttaatgtgcatgcccttattgaatttggttattctatggattctattctttgtgatattaaaaagacaaatgagagcttgtataaatcattaaatgatgagaaacttgagacctacgatgaagagaaagcccggcccaggccagcctaccggcgactaggatgctttcgctttcgctctcgctttccaatactcgggactggggaaaccgggagaatagaagcaggcaaggaccgccgtgggcacggggtcagtgagacagggtcctgctcgcggcgtcaaggaggagcgctgtgggtgtccccagcgcagccaatcggcttccgaagtagctggagctctggagcctttgcttcctcaaatacgagcgggaactgcgttgagcgctggattccaggccgagtgctggcgaggcgcgcagctgtcagaaaagagatagaaactcaccaaggccaagaaatgcttgtgcgtggcacagaaggaatcaaagagtacataaaccttggaatgcccctcagttgtttccctgaaggtggccaggtggtcattacattttcccaaagtaaaagtaagcagaaggaagataaccacatatttggcaggcaggacaaagcatcgactgaatgtgtcaaattttacattcatgcaattggaattgggaagtgtaaaagaaggattgttaaatgtgggaagcttcacaaaaaggggcgcaaactctgtgtttatgctttcaaaggagaaaccatcaaggatgcactgtgcaaggatggcagatttctttcctttctggagaatgatgattggaaactcattgaaaacaatgacaccattttagaaagcacccagccagttgatgaattagaaggcagatactttcaggttgaggttgagaaaagaatggtccccagtgcagcagcttctcagaatcctgagtcagagaaaagaaacacctgtgtgttgagagaacaaatcgtggctcagtaccccagtttgaaaagagaaagtgaaaaaatcattgaaaacttcaagaaaaaaatgaaagtaaaaaatggggaaacattatttgaattgcatagaacaacgtttgggaaagtaacaaaaaattcttcttcgattaaagtagtgaaacttcttgtacgtctcagtgactcagttgggtacttattctgggacagtgcaactacgggttacgccacctgctttgtttttaaaggattgttcattttaacttgtcggcatgtaatagatagcattgtgggagacggaatagagccaagtaagtgggcaaccataattggtcaatgtgtaagggtgacatttggttatgaagagctaaaagacaaggaaacaaactacttttttgttgaaccttggtttgagatacataatgaagagcttgactatgctgtcctgaaactgaaggaaaatggacaacaagtacctatggaactatataatggaattactcctgtgccacttagtgggttgatacatattattggccatccatatggagaaaaaaagcagattgatgcttgtgctgtgatccctcagggtcagcgagcaaagaaatgtcaggaacgtgttcagtcttaaaaaagcagaaagtccagagtatgtccctatgtatactcaaagaagtttccagaaaatagttcacaaccctgatgtgattacctatgacactgaatttttctttggggcttccggctcccctgtgtttgattcaaaaggttcattggtggccatgcatgctgctggctttgcttatacttaccaaaatgagactcgtagtatcattgagtttggctctaccatggaatccatcctccttgatattaagcaaagacataaaccatggtatgaagaagtatttgtaaatcagcaggatgtagaaatgatgagtgatgaggacttgtgagaattcagtctactggatttaagggaatggcttatggagttgttatttcataggcattgaaaatggttttctaaactccaaaatggtcatcttatcaataataataatattgaccatttcctatctgccaggcatttttctaagcacatgaagaaattagtcctaacaacactatgagatggactataacttgcccaaattttttttttttttttttgagactgagtctcactctgtcgcctggggctggagtacagtggtgcgatctcagctcactgcaacttccacctcccagggttcaagcgatta

SEQ ID NO: 115857 - DNA, 443 bp, Homo sapiens
tttggtaaaatagctgttatcctctgtcagaacacaaacaaacaaactttgagaggggaggaaggaaaccgtctagctcagggctcacttaggagagggatgagattagaaagttcaacacactgcttgtgcagcggagataaagtcaagaccctagcacccacttataaatatctcgttatattaaaaaaaaaaaaaaatgtccagggcccacctggctctgctcctgcacagaaagggttcatcttcactttgtgatgctgggccccacgctcgctggtggagacctcgaagacataggcggtgcagacagcagttcctgggtgtctctgtttgtcaccacctggaggatagtgaagttttccaggacgctgttcatcatgtatcgctcaggcagctgcgcaacttgtgcaagaaattcacaggtactcgcacatgggcga

SEQ ID NO: 115858 - DNA, 2432 bp, Homo sapiens
  misc_feature (1)...(2432): n = a,t,c or g
tttttttttttttttttggtaaaatagctttatcctctgtcagaacacaaacaaacaaactttgagaggggaggaaggaaaccgtctagctcagggctcacttaggagagggatgagattagaaagttcaacacactgcttgtgcagctggagataaagtcaagaccctagcacccacttataaatatctcgttatattaaaaaaaaaaaaaaaatgtccagggcccacctggctctgctcctgcacagaaagggttcatcttcactttgtgatctcacaggtcatggagtgagggtggtagagaggggcagaaatttcagggggaggggtggctgggaaaaagtaaaggggacaagccaatgtgtaactagcgctctccaagacatgcagaggagtgggggtggcctgtcaggggctgaaaagaaaagccagtgctgtacctggggggttgtctcactcctgtccccacaatccctgatactccggagtgatctgtcctttcagacacccactgtgaggtcccaatatcggggtttatcctttcctcagtcccagcctgttcagctctccaaccaagttttgggggcccctctaatgggggggatggcctcagttgcttaggcctctgaggtcaacccctttacatcacagccctctccccaaataagaagcatgaggtgagctggaggaccctccctgggaggagggtgttctggggggtgagccagttttggggtcccccttcagtccctgaccaggcggtaaatgtgatgctgggccccacgctcgctggtggagacctcgaagacataggcggtgcagagcagcagttcctgggtgtctctgtttgtcaccacctggaggatggtgaagttttccaggacgctgttcatcatgtatcgctcaggcagctgccgcaacttgtgcaagaaattcaccaggtactcgcacatgggcgagcgcagcaggcggtacacaaatctgccgtcctccagctgggcccgttccgtctccaccttctccaccacctgcttgccaaaagagcagaccttggaggaacaggtgagggtcatgtgttccaggctctcatactggctgctcactccgtagaagccaccactgctgatgctgccaccggcccctgcctcctcaccacttgggccccagttcaggtccgcccagaacttgaccaggaagaaggcatgggggggggccacgatcatatagctctcggaggccaccctttttctcagggaatttgtcgtagatctgccggacgtccacactctcgagcggcggcgctccggggctggggcagtgctggctgatgtgcacgaacaggtgcctctggtaagaatcaactgcatctggcggttccacgaaggctgagaactctaccagctgcaaccgggcggtgcccaggccccgagcctgccaggctgggggcgatggggtaggtgggggcaggggtgagagggcttgggggggctcgtaccctgggaggtcagtagatgggggagtcagtgacaaggtgaacggtgtctgtgagaatggcttcacatctggaacattccaggggggcccagatcctccagaccaaaactggaaaagctcagaggcctggaccacctgaggaccagtgggacccagtttggcctgcagagaaggcgcggagatgagctgggcagaggacatggttgccattgtctggaaagccttgtccttggaaacctggtccacgttcagagccttcaacttggactggatttcccttgatttccttcgggccaaaacctggatgtgactagaaacctgttttcgagttcgggtcttccccgttctcagcttgatgtagcgggcgatcagttcattccgaccatacatcttgccttcatcagacaaaattattttccggcggccgcagggtggatagatggccagggcctcctggaagctctgctcaatgtctgggctccacaccccctctgcatccgggcccccgtcacccccagccccctcactgccgccggtaccctcctcactgccttcctcactgcccgtccagccgctgccatcgtccagggcggccccagcccggggtttcccccatctgggcctggaggaacacagaactcagcaagcttcccccaaaccccaccctcaagggacttgaagctgagagggctgggactctggaccactgggtctgagggaggaggggctggggacctggactcctgggtctgagggaagaggagctggggggtattcctgggtctgagggaggaggatctggggcctgaactcctgagtctgagggaggaggggctggggcccggactcctaggactgagggaggaggatctggggcctggactcctgngtctgagggagcgggggctggaggcctggactcctgngtgtgagggag

SEQ ID NO: 115859 - DNA, 480 bp, Homo sapiens
atggcagcaccaggctatgagctcaaggatctgtccaatctcaaaccctatgtgggatctgggaaccatccagttacagcatttggttggaattcaattcagtcagaacttaagcacctgctacaagctcgtcacaattctgatggccagcagaagcaaggggagcctgaccagagccatcgccacctgccaagtgcaaggaccccaggccctgtccaggaggctgtgggtcagctccgggagccagctggaattcaaagtagtcgggctgcttggagaaacgtgcaagatgcaaatcagacaccatgttctgcacatcccagtgctaaaaataactgtggcgccccctctgacccttcctccaacaatgcagagcctcagagaaaacagtgtgcaattggagggagactgcttgtcttccaggccggctccagcaatgccatgctgtacatctctgagccagtccctcgacttctctga

SEQ ID NO: 115860 - DNA, 240 bp, Homo sapiens
atggcagaaggcaaaaggctgcagcttgcacatcaggagacctgcttgccagaggtggacctgtttggaccctcagtgtacaccaatggcttggtctcccacaggggaatggacccagggaagaggactatgcaggccctaaaaattccccccagagctatgaccatcaaggggcagccaggggagatgtcactcacggtgttgctcaacctgatgggaatctccagctttgcagcctaa

SEQ ID NO: 115861 - DNA, 904 bp, Homo sapiens
atggctgcagcccaggagatcaaggccgcagtctggtgccccggcgccgacagcttgcgccagccggcgggagctagcgggcagcaagggggccggacaggctccactgggcggagcggccctggcggcggttggaacctgaaggttccatcgcacttacttcctgttttgggtccgggcactttggaagaaccaggatggaagctccaaaaaataccaggatggaggaagcagccacgggcgagagtggctgcagctggagtgagcgagcgcgacgagccaccggaaacggagctgcggccgcgccccgcccccagctccccgcacgctgcccctcccgctcgtctgtcccgctggcggcccagcgtgctggctgtacgcgtcacttccggctgtgtcggcgcgcgaaaaaaggtcctgggttggaatgtttgtactggtctgtggcggtggttgtcggctgtcctgccaggaaaactcggcactgactatcccactgctgatgctgtaaaagaggtccttctgctatgacgcaactgtggttcctctggttctggggacacttaggcctcgcgtgccgattttcatagttccctgtggctccgagctgagggagccgcggtgtggaacggagggaaccagtgatctcagtgctgaagaaaacagggagaaccaaagagaagtgaaggaatgtgtccaagggctcccaagttggcggtggaattagaattgaagcctcagctccaaagcctgtgttctgaactacccggttgcagttcacaaaatacactttggcagtactttcataacgaaaacaaatgattacaaccagtttacaaatgctttgctttactggaggatcgacatgtttgactaattttcaaaaataaatctcagaagcagc

SEQ ID NO: 115862 - DNA, 366 bp, Homo sapiens
atgtaccacaataaacaatgtgggatgaaagcacttggcgagcccaccaaatttgttattggttttgaacttcgtggtgggagaaatcttcatcggcctcatctctcggtccacgtccaacaagcagaagggacacctcactttcagggtcaaaatttaataggaattgccaaattgccccacattggtcttatcaattcacagtccatctatggagtgagaccatgccgtgctgacttctcagcaaagtggcagctggatctcttggcatacatttacctcagccgcactcttcagtgctctgcatccaggctacgcggaggctgcatgttacaggagccgtgcatccctgaagacttggaataa

SEQ ID NO: 115863 - DNA, 776 bp, Homo sapiens
ttttttttttttttttactttaaggctttatttgttaagttactgcatagagttgcaaaagcatcgacaacatatttcctcaaaatgtagagtttacaagttttctgagctccctgaagtttgcaatctattccagtctcagtgtcctctaattttacatcaatcttctaatgatctaaattgcccattgcatgcagctatcttttcatgtttgatttggttaaaggaaaaatcgcctttcctttgggaaaatgcatattgttagcgaattgtgaaattgtgaggaattgggctgtaattactgaatattggctctccatgaacatgttgctaaaacgtgggaagatgtgccagagaaattgtctctctcctcagtagtccatcgttacagcaacaattgtggaaatcagatgagatgtggaaccatttttgattgccttaaatggcgcatttgtatatgccagcaagaatctatgcttctatgtaaattgaaaaagggaaatgaaacagtctgtggatgtggactctctcaggttgaacaaggaacatctacaggaacacctgacgaggctgcacccttggcaggaagaacacctgacacggctgaaagcttggtggaaaaaacacctgatgaggctgcacccttagtggagggaacatctgacaaaattcaatgtctggggaaagcaacatctggaaagtttgaacagtcagcagaagaatatgttaggccatgtgtctctataacagctattgaactctgcattgtacagtga

SEQ ID NO: 115864 - DNA, 876 bp, Homo sapiens
atgccagcatcagagcagccaggcatcagagagccagccttgactactcgccgggcctcaggggctgagccttcgtcccaggacaagggagtggccagagcttggctggccccgttccagatgaggactgtgataccagtcaggtcaacgagcaccgatagaggtagggcccaatataggaccgtgtctcacaatggtgcagacccgcagtccaacacacaggaaggatgcttgttgctaagtcttagacacgggaactggaggagggttgagggcccccagcagtgggaaggcaggcatggcatgcagacggtggacgcggactcaagacaccaactctcatcactacaggtccgtggtttggaaagtcccagcaccattccagagaaggaaacaggcccagggccagggccaaagccatcaagtcctgggcagagggcgggagcgttcagtgagagcagcacagaggttaaagagctgctcttttttgagatcttcgctctcacttcctttccaggcagccagttcagcaagcagtgtgagaacggactgatatgtctaggaaggacagcaacaacagaatccacttttgctatcggctttaaaccaaactatcctctgctgaacaggaaaattgaaacagaaatagagaatggaaaaaaagaggtgactaaaacacacttaagatcactggctctgaggaaatcagctgctatgttgcaagaggtcctagggcacagctcttgtggcaaggaactgaagccgtctgttaacaacacatgcatgagtttggaagcagatctttcagccccagccaagcctttagacgactgcagctccaaagtgtgtcttaacagcgaccttatgagaccctga

SEQ ID NO: 115865 - DNA, 939 bp, Homo sapiens
atgtcattaccaagcctccgctgcacaccacggaaaaacagccttcagaaagagctgctctgggcaaacagcggcaaattatccattgttaaccttgggctgcctttaaaagaaaacattttaagaggaaagaaaagcaaagacaaaacaaacaatggtcattttttcgatatgcttcgtgatctgctcaagaacgttgatcttaaagggttcgagcctgatgtacgtattttgcttaccaaatacagcaatagtaatggctctcagtccccgtggatggaggagcaaattcgggatgcctggggaagcatggttctaaaaaatgttgtacgtgaaacggatgaagttggtaaagatacttcgttatcgacaccagctgccccgatggtggattcgttaattgcgcgcgtaggagtaatggctcgcggtaatgccattactttgcctgtatgtggtcgggatgtgaagtttactcttgaagtgctccggggtgatagtgttgagaagacctctcgggtatggtcaggtaatgaacgtgaccaggagctgcttactgaggacgcactggatgatctcatcccttcttttctactgactggtcaacagacaccggcgttcggtcgaagagtatctggtgtcatagaaattgccgatgggagtcgccgtcgtaaagctgctgcacttaccgaaagtggggtgctcctaccccaagcccagatatcagagaagccccagggcaggaagggagaggtagaaagcctagtccaaggagcgactccctctggctgcacctacacaaagctgactgaagcctgctcagaacaagtcgcagcaatagcagctgaagcaaaatatggggcccagaagatttgtagtgtccaacatagtacaacatccaagagggttattgtgaagatgaaaggaaaagggcaaatgtaa

SEQ ID NO: 115866 - DNA, 1173 bp, Homo sapiens
atgatgtggggaaaggttcttccaggggaagaggacccaagagatgagaaaaaagtacggcccattggaagtgaggagcgcctctgcctggctgctgtgcaatcttccaagtgtgaagtgacagcctttctgcaggtgtacccaacagctccgaagagacagcgaccatggagaatgggccatgatgacgatggcggttttgttgaaaagaaaagggggaaatgtggggaaaagaaagagagatcagattgttactgtgtctgtgtagaaagaaggagaaggaatatggaaatcatgagttgtttcttaaagcttccaccagaagtgacagttcttacttttgctcatgttctgctgaccaacgttaaggtctgtgccggagcagggacttttcccaacaccagggctggttccactcacacaatccagaaatacaaggatgataatgccactgcagcaacattcaacagctggaagatatctcagctagagctcagactgttcccaatgtgcatgaggaagcagaatcccacaccagccctgactgcagctgttcgcctgtccccactgcccagtgtgttgacttctcattgccatcacagcttccccgaccctgactcagctcgcaagacgtttcagctacaatacccatatccaattggcagctttcttttgtgtttcttcatttctattcacccaagcaagaccctgattggctcagcttatctctgtgctggtacgggggtaaggaaaaagacaataggtgctgatctgggtgaggatgaattttttgggaacccagagatggagaatggccataaaggaaataggcatggtggggtgtggggtgtgggggagtatgcacaaagtatgtacacaaccagacctgcagcaacaaataagcaaggttacatcattcacccacaaaaagtcaatgtcccagccagtaattttgaaaaggagaattcattacgagaatcaaagaagaagcaaggccaaaaagcacttgatctggggaggcagaatcgtgccctaagaagtgcagtagacttcaaccttagtgaaaatcccacttcttttattaacagggcacctcatttttctaagcctgcagtatgggggataaagcctgtatcccaagtagagagaatggataagacaatgtgtctgtga

SEQ ID NO: 115867 - DNA, 717 bp, Homo sapiens
atggatgatcttcgacttacaatgggcttacctcccaggaagcccatcaatagtggaaaatatcaagttggaaatgcatttaatatatttaacttactgaacatcacaggtatctatgcaggacctaattcttacccttgtgggaactggggttcagggggaaaagcacaaattctgatactctggctactgcttttgcttgtgttgacttctcattgccatcacagcttccccgaccctgactcagctcgcaagacgtttcagctacaatacccatatccaattggcagctttcttttgtgtttcttcatttctattcacccaagcaagaccctgattggctcagcttatctctgtgctggtacgaggagagctgtcatagctcaatgtatgctaagtgtaaagtggatgctacgaggaaagctggaaaattcagataaaaagctttctggaaggagattggccttggaggacgtgctcctaccccaagcccagatatcagagaagccccagggcaggaagggagaggtagaaagcttagtccaaggagcgactccctctggctgcacctacacaaagctgactgaagcctgctcagaacaagtcgcagcaatagcagctgaagcaaaatatggggcccagaagatttgtagtgtccaacatagtacaacatccaagagggttattgtgaagatgaaaggaaaagggcaaatgtaa

SEQ ID NO: 115868 - DNA, 420 bp, Homo sapiens
tcagcattttttgcactggtttttcctcatcttcgtggatttatctgcctttgatctttgaggctgatgacctttgggtggggcttttgtgtgaaggtcctttttattgatgacgttgttttttcttctaacaggcccatcttctgcagtgttctggagattcactccagaccctttttgcctgggtatcaggtgcaggctgaggaggcagtttgtcctatagcagtgcttaagccttgtgctgagagaatcctttttatcaggatcaactgctctcttcagagctgtcagacacaaaagtttaagcccgttgaagctgtgcccacagccaccccttcccccaggtgttctgtcccagggagatgagagttttatctgaaagcccctgagtggggcagctgcctctctttcagagatgcc

SEQ ID NO: 115869 - DNA, 847 bp, Homo sapiens
gtgggaaaagtccccaaagaggcaactgagacagcaagaacctttaagctgtgcagcagacactaatgctgagctattttcagtagcagtcagcatcctggccagattacagagtaaattcacaagagagaatattaaagccaaaattatgtcaactgtgtctcaagaaggtgcttttaacaggatgaagtggattgggggagaaaggcaggaagctgaaataatgtcagagcccgatttgctgatggatgtgccgctccttacgaaagatgaaaaccagaagattcgactagccagcttatcccaccttcttttacctgctgccattcgattggaaggtgcccaccgacatcgagggctctgcaggaatcatggtgccagcatctgcttctggaagcttacagtcatggtggaaggcgaaggggagcagacacatcacagggcaagagctggagcaagagattcagggagatggaccgaaaatgctgacgccaatgccaaggaaaaaagtgtcttgaaaaagcagccgtggacgtggagttaccaaatcatccgaagtggctcctggaccgggtggaggagccaggctgcagaaatgcagttcatcgcaggagttttcctgaacagagaaaagtctccacagaatagcaaaaatagcaaaaactcgaagtcaaggacatctgagtttctggttcttgagcctttagactccaggacttacacaggtggctgctccctaccctgccaacccatgacccctctggccctgggttctcagacctttggccttggactggaaattacactattgatttccctggttctcaggccttcagacccaggctga

SEQ ID NO: 115870 - DNA, 315 bp, Homo sapiens
atggagcagagtagatgcctgtgggacatatcggggggcaaatttgattgtgcttgggctagagtggaaaagttcagtgttttattcgagacaattgactcagagaaaagaacaactcacacagagaccagaaagagattcgtgctcagtaacaaagagagagtaatacagacttgtggagtcatggtcttaggtctgtgtgacgtgtttgatgctctgcaaggtgatgaggttttccgagttctgctgctttcccctttgccagcatatactgcttttgttgaggaatcaaggtctccggtggtcgccaagtga

SEQ ID NO: 115871 - DNA, 374 bp, Homo sapiens; identical to SEQ ID NO: 92352

SEQ ID NO: 115872 - DNA, 1190 bp, Homo sapiens
  misc_feature (1)...(1190): n = a,t,c or g
atgtggctgtgggaggaccagggcggcctcctgggccctttctccttcctgctgctagtgctgctgctggtgacgcggagcccggtcaatgcctgcctcctcaccggcagcctcttcgttctactgcgcgtcttcagctttgagccggtgccctcttgcagggccctgcaggtgctcaagccccgggaccgcatttctgccatcgcccaccgtggcggcagccacgacgcgcccgagaacacgctggcggccattcggcagggttccccgatcttctcaggacggccttcccacttcctcattcgtccacaaggcacactcccggcccttgatcgctcccagtgtctagggatctccggacttgaggttttatatttacagaagacagcagatatgtatatagtttctgtgcgcctgacgctaaggttacatacagccaggaacaaggcagctaagaatggagcaacaggcgtggagttggacattgagtttacttctgacgggattcctgtcttaatgcacgataacacagtagataggacgactgatgggactgggcgattgtgtgatttgacatttgaacaaattaggaagctgaatcctgcagcaaaccacagactcaggaatgatttccctgatgaaaagatccctaccctaagggaagctgttgcagagtgcctaaaccataacctcacaatcttctttgatgtcaaaggccatgcacacaaggctactgaggctctaaagaaaatgtatatggaatttcctcaactgtataataatagtgtggtctgttctttcttgccagaagttatctacaagatgagacaaacagatcgggatgtaataacagcattaactcacagaccttggagcctaagccataccaggagatgggaaaccacggctatgatactttcctnggaaacatttttaatatttggttatgattggacattttgctcgattggagcatgcataatatcttgtggtacctgtgtggaatttcagctttcctcatgcaaaaggattttgtatccccggcctacttgaagaagtggtcagctaaaggaatccaggttgttggttggactgttaatacctttgatgaaaagagttactacgaatcccatcttgggtccagctatatcactgacagcatggtagaagactgcgaacctcacttctag

SEQ ID NO: 115873 - DNA, 870 bp, Homo sapiens
  misc_feature (1)...(870): n = a,t,c or g
atggagcggctccgcccactggcgctgcgaatcccgatccctgattggctgggcggccgactccctctctggatgtgtctgctgccgccattgtgcggcgctggtcccctcagagggttcctgctgctgccggagcccggcgggtccgggactcccgtccgtgccggtgcgggcgccggcatgtggctgtgggaggaccagggcggcctcctgggccctttctccttcctgctgctagtgctgctgctggtgacgcggagcccggtcaatgcctgcctcctcaccggcagcctcttcgttctactgcgcgtcttcagctttgagccggtgccctcttgcagggccctgcaggtgctcaagccccgggaccgcatttctgccatcgcccaccgtggcggcagccacgacgcgcccgagaacacgctggcggccattcggcaggcagctaagaatggagcaaccaggcgtggagttggacattgagtttacttctgacgggattcctgtcttaatgcacgataacacagtagataggacgactgatgggactgggcgattgttgtgatttgacatttgaacaaattaggaagctgaatcctgcagcaaaccacagactcaggaatgatttccctgatgaaaagatccctaccctaagggaagctgttgcagagtgcctaaaccataacctcacaatcttctttgatgtcaaaggccatgcacacaaggctactgaggctctaaagaaaatgtatatggaatttcctcaacttgtataataatagtgtggtctgttctttcttgccagaagttatctacaagatgagacaaacagatcgggatgtaattaacagcattanctcccagaccttg

SEQ ID NO: 115874 - DNA, 1824 bp, Homo sapiens
ggactacaggcctgtgccataccaggaggagaggctaagtcggctggtctgtagagactgaagccacccctccttctaggggctcaggcccagggagatccaaattctgtccctgaggctctggctggagttattggagatcctgcaggaaagccccgcctttcaatgagagcctcctaatgctgttgcttcttgtcagccatcttggcccttcccccagcccccgtccccgtcccccatccccgtcgtccccagtccccacccccgtaccccggacccccacccccgtccctgtgagacaattaatgtctgttgtttaagccactcagttcctggtactttgttatggcagccctagcaaatgactacactgatcctcacctgacactaccttctgttaattgttctttggcttcaagcactgaagccaaaggcaggatgccgctaccctatggaaacacagcagaccaagcccagagaactttggtccttcaatttcccccttgctccacccctcttgtgagcaggacctggagcctggaggtcaaggagaggctaggagcagcgacctatggcgctctgggaaggagctcccggcttgcctatgggtgccctggggagagcatcacttctctccgaggactcaaagacagtctccgttcctcactcttcaaagaccacctccttttctagaggtgggctccccgaccttgattatccgtagacttagatgggggttcctccgcccctctctgtcctcctgccaccacagccaggctggacgcagaaccgcacggaagcctccccaactcctgcctctgggagtgctcctgcctgcttcaaggaatctgggcagcgggaccctctgggttttctctccactacccccctctttcttccccactcggctcctctcccccctcgcgcccacagcgtttggtgttgattcgagcgggaagaggggggtgggtgggatcggtgggggagaccatgacctccagctacgggcacgttctggagcggcaaccggcgctgggcggccgcttggacagcccgggcaacctcgacaccctgcaggcgaaaaagaacttctccgtcagtcacctgctagacctggaggaagccggggacatggtggcggcacaggcggatgagaacgtgggcgaggctgtcccgcacgcggggcggcggggctgggctgggaaaaggtcttagcggggtgcaaactcagagagccagcgctgtttgggaaagcagcaggttaaagatgctgagtcgggttggaagggcttctctcgggcagcgtatgacggcttgagggaggctgcaattgtatccccatgcccccaagtctgtaacagaccggtcaccctgttcatcccaggtgacatgttcgtggaaccggggggccctccagcattctatgattttcacaaaacgttgcctatttcagactctcaaagaatagacatacaaatcaaactgcacatagaaacaattggaaacaggagggccaaggccagcggcctcggccagcctagggaacaagccagccgtggtggccctcagatactgcaggggaagagggatgaaaattgtaccggttgtttgtggtgatttcggtttattttacatgcagaagtaggggcccgggttacctccttctcttagaattttggggaaattgatagtccagtgactcctacccacttttgggtgaaggacgatttggaatttgaagtgtggggagacaggcctgtgaagtccgaaggactcactgggtctccagatcccccaactctggaatgcagtgaatacccaccc

SEQ ID NO: 115875 - DNA, 477 bp, Homo sapiens
atggtgagacacccaagctggcagagtgaagaatgcaggaaccggaacagtcaaggactggagttgagtccagtcacttggcccctgcaacttcaaaattcagtctcctccactgcatttaggcttcccaattcagtgactgcagttcccactataatttctgacccacagcgatttatcacagagtatcacagagcccctcaaggatgctggggctccccacacaaatttgtttctcacagtcataatgcaagggctcaggcccagggagatccaaattctgtccctgagcctctggctggagttattggagatcctgcaaggaagcctgactcactgaagaaggataggtcagagttatacctgaagagactctctggccacaaccagtgtgttgggctgtggagacaagttttgggaccaagccatccagcctccctggctccagcaggggaagagcacagcctggagctgtag

SEQ ID NO: 115876 - DNA, 424 bp, Homo sapiens
  misc_feature (1)...(424): n = a,t,c or g
tatatatgaagggtaatgtattaacgagtatcgactcatatgatcacaaggtgaagcnnnnnnnnnnnnnnnnnnnnnnnnnnnnnnnnnnnnnnnnnnnnnnnnnnnnnnnnnctcaaaagtagggaagctgacagtgcatacttcagtctgtggcaaaaggcctgagagcccctggcaaaccactggtgtaagttcaannnnnnnnnnnnnnnnnnnnnnnnnnnnnnnnnnnnnnnnnnnnnnnnnnnnnnnnnnnnnnnnnnnnnnnnnnnnnnnnnnnnnnnnnnnnnnnnnnnnnnnnnnnnnnnnnnnnnnnnnnnnnnnnnnnnnnnnnnnnnnnnnnnnnnnnnnnnnnnnnnnnnnnnnnnnnnnnnnnnnnnnnnnnnnnnnnnnnnnnnnnnnnnnnnnnnnnnnnnnnnnn

SEQ ID NO: 115877 - DNA, 793 bp, Homo sapiens
atggctagaataaagcaggcagaagttggaaggactaggcttgatgagtcttccggcttccatctttctcccctgctggatgcttactgccctggaacatcacactccaagttgttcagcttttggactcttggacttacaccagtgatttgccagggtctctcaggccttcagccacagactgaagggtgcactgtcggcttccctacttttgaggttttagggcttggactggcttctctgttcctcagcttgcagatggcctactgtgggacttcaccttgtgattgtaggaaggaggaaactactgcccttccccctaccctctattcaggtcacttttcaagaggcactgatatcactggacaaatgtcagaaaatcagatcagaagtggcctcattgatgagtataaatgtaccgctagtggctccattgtctatggagataagtgtttcaaggtcctttattttgaggatttaacagaaaagctggttcactgttttggtgaaggaccttgggagaaagcttccatgaggtaccagaacctagagcttagagacaggcagacctggcttggcctcctggttccaccacttacattctcaggactctggatcaatgctggccagcctaactgaagggagagcagacaagccctggatgggagaaccaacagctcagagacggaattctaacatgaacaaagatcattcacagattgatgaagcttttgttgttcttggcattgagcataaagaaaagaagaggcctatagttgtaaaagtttcctaa

SEQ ID NO: 115878 - DNA, 324 bp, Homo sapiens
gtaaccggacgcgagcgtaaggattatcgcatccaacacgtatatcaggcggttggcaaacaaaatttggatatcatcaccgtggtcgaaacgtcaccgtgcatagcgcaatcaggtggcctcacctccctcaggctcagtgtcctcatgggaaggatggagacgctgaaggataagaccctgcaggagctggaggagttgcagaatgactcggaggcgattgaccagctggccctggagtcccctgagtcttcccatccgtacagcgcatgttctcagaggatggcggtggaaccttctagcaccaggcaagttacagcttaa

SEQ ID NO: 115879 - DNA, 669 bp, Homo sapiens
tactctgccacaaggcacctgggctcttaaatgaccaatacacatgtgctatactggtgccaagaaagaagggtgttttgtaggaaagtcaaggtgagaggaggtgcccaggacttggctcctttctttgaagggtgacggtgtaaattctccatggctgggatcctactgatggatggaggcatgtcgatctcatcatttcacagagtggggagctatgggccacaacgtgcctatcacacaagtccttcctcacgttagctggacaccagctgttctgacacttgtcagcacatggggcacccggaagttcatggtgttctgcaaagaacgccacaaaacagtgagctcaacttcttgaaagtcataatgtgttgctaagatccgatcccagatcctaaaaataatatgaggtagcggccattgaacagaaaaaatttacatcttaaacttgaagataagtacaagtgaacctttttctaccactgttgttcagttttattatattgacaagcacctctgcccaccctgtggggtaaaactgtttgaaagtgtttatgaaagttttatataaatattggttgatcaaatgtacaaaatatgcatgatggcaccatattgtgtataatagtgacaaatacagtctatgtgggtggagaaacctcgtgc

SEQ ID NO: 115880 - DNA, 312 bp, Homo sapiens
atgactgagactggagattggttaaaagtttgtattcttaggccgggcttggtggctcaagcctgtaatcctagcactttgggaggccgaggtgggcggatcacgagactaacacggtgaaaccccgtctctactaaaaacacaaaaaattagccgggcgtggtggtgggcgcctgtagtcccagctactcgggaggctgaggcaggagaatggcgtgaacccgggaggcggagcttgcagtgagtcgagatcgcgccactgcactccagcctgggcgacacagtgagactccgtctcaaaaaaaaaaaaaa

SEQ ID NO: 115881 - DNA, 418 bp, Homo sapiens
  misc_feature (1)...(418): n = a,t,c or g
actttttttttttttntagtagagatggggttttgccaagctgaccaggctggtctcgaactcctgacctcaggtgatccacccgcctcagtgtcccaaagtactgggattacagtattatcactttcttttttttttgagacggagtctcgctctgtcgcccaggctggagtgcagtggcgcgatctcggctcactgcaacgtccgcctcccgggttcacgccattctcctgcctcagcctcccgagtagctgggactacaggcgcccgccgccacgcctggctaatttttttgtattttcagtagagacggggtttcaccgtgtcagccaggatggtctcgatctcctgacctcgtgatccgcccgcctcagcctcccaaagtgctggggatacaggcgtgagccaagcgcccgtc

SEQ ID NO: 115882 - DNA, 447 bp, Homo sapiens
gagacagagtcttgctccatcacccagactggagcacagtggcatacttcatggctcattgcagcctcgacctcccaggctcaagcaatcctcccacctcagcctccctagtggctggcttatttttgtattttttgtagagacagggtttctccatgttgcccaggctggtcttgaactcctgggctcaagtgatctgcccacctcggcctcacaaagtgttgggattacaggggtgagccaccatgtccagccttaaatctgtgtgggttttttttttttttttttttttgaggcagtctcactctgttgcccaggctggagtgcagtggcacaatcttggctcactgcaacctctgcctcccaggttcaagtgatctcctgcctcagcctcccatgtagctgggacaacaggcacctgccaccacacccagctaattctgtatt

SEQ ID NO: 115883 - DNA, 5397 bp, Homo sapiens
tgtttttctcacaatttcatggattatgggtttgggacaggaagaccacaaagataaagggccattttcattatatcatattaaaggtacatgtgatcaacatgacatcactgtttatgttaaccttgatgatgaccttgttttcatctggtttctccactataagttactcctctcctcacttcccatttccagactctgctctctggaaggaagtcactgtgtgtagcccatatttaagtgatagaaagtaatgttctacctccttgaaccaggggtattatccacataaattatttggaattcttctgcacaaaaaacttacctcttctcctctacatattaatttattcaatcacttacatatatcagtgtagactcatagatacttattttgtactttagcttataatttggcttttctttctttctttttttttttttttttgctctatttgttacaactttagctgtgggagctctttcaggtggctcttgtgtcccttttactccctcagtgtgtgtgtgtctgtgtgtgtgtgtgtgttgagcattttcttactttctggcactgaaagatatatctggtataaaagacaaacgatacacctatctacatggggcacttactgtgaatagaacttgcaggactggaagttgctttcggtgagtcattgagtgagtggtgggtgaatgtgaaggctcagttcattactgtacactactgtagactttataaatactaaggatacacacgaaatttattttaaaaaactatcttcaataattaaccttggcttattgtaacttttcattttataaactttttaattttttgaaactttttactcttttgtaatcacacttagcttaatcacaaacatgtatagctgtacaaatttttttctttttttctttttttttttttttgagacagggtcttgctctgtcatccaggctggagtacagtgacgcgatcatgggtcactgcagccttgacctctctagctccagtgatcctcccacctcagcctcttgagtagctgggaccacaggtgcacgccaccacacccagctaatttttgtattttttgtagagacaagttcttcctgcgctggccaggccagtttcacacgcctgggctcaaacagtcctcctgcctcaatctccccaagtgctaggattgcaggtgtgagctgccacatctggctttttactttgtatccttattctataagctcttttcttttcttttttcttttttttttttgagacggagtctcgctctgttgcccaggctggagtgcagtggcgcgatctcggctcactgcaagctccgccttccgggttcacgccgttctcctgcctcagcatcccgagtagctgggactacaggtgcccgtcaccgaattttttttgtatttttagtagagatggggtttcaccgtgatctcgatttcccgacttcatgatctgcccgagggattacaggcgtgagccactgcacccggcccttttctttttttttttttttttttttttttgagacggagtctcactctattgcccaggctggagtgcaatggcgctatcttggctcgctgcaacctctacctcctgggttcaagcaattcgcctgcctcagcctctcgagtagctgggattgcaggcatgcaccaccacgcccggctaattttttgtattttagtggagatggggtttcaccatctctaacttgaactcctgatctcaagtgatccacccgcctcggccttcaaaagtgctaggattacaggtgtgagccaccgcgcctggcctatacgcttttttctgttaaaaaatatttttaagtttttaaacttttgttaaaaattgagacagaagcaaacacattacttactaggcctacacagagccaggattatcagtatcaatcccttccgcctccacatcatgtcccactggaaggtcttcggggcagtaacggacatggagctgttatctcctaacatgccttcttctggaatacctcctgaaagacctgcctgaggctatttaacagttaactttttttttatatgtaagtaggagtactctaaaataacaatataaaatgtagtacaataaaataaataagccagtaacgtagttgtttattatcaagtatgtactgtacataattgtatatgctagacttttatacagctggcagcacagtaggtttatttataccagcacctccacaaacatgtgagtaatgctttgcacttgaccttctgtcagctatgacatccctaggttgcaggatttttcagcttcattataatcttatgggaccatcttcatatgtgagtggtctcttgacccaaacattgttatgtagcacatgactgtaaattttggaatcaccttgtcagtatttacaaaatagctttctgagatttagtggcaggatctcagctcactcctacctgcacctcccaggttcaagcgattcttatgcctcagcctcccaagtaactgggattatagacgtgcaccaccaagcatggctaatttttgtatttttagtagagacagggttttgccacattggccaggctggtctcaaactcctggcctcatgtgatctgcccgcctcagcctcccccagagtgctgggattacaggtatgagccactgcgcctggccaaaattgcctaaatttttaaaatcctaaattggtgttgaattttgtcaaatgctttcctgcattgattttgatgatcacttgatttttctccattcttttgttaatgtgctaaattatgttgcttaatttttgaatgaaaaaataatcttacattcctgaaataatttcggtttggttgtgatgttttattcattctatttcgtgctgaattcagtttgctaatattttgtttaggaattttgcatctatgttcatgagacagatcggcctgtaattttacttttttgtaatgtccttgtcaggtttaggcctcaaagttatgttgactttataaaatgaactgtgaagtatttcctcttttttatgctttagtttgagtaagattgattttttttaaaacttatgtcgtccttaaatatttattagaattcactagggaagttatcttggcctgttactttctttcttgagtaaattttgttttcattctttttttatagttaagtatattgagttagaatgcatacacaaacaaatgcacacaacttaaagtccagttctatgaattttgactaatgtataaacctgtttaacttccactgtaagcaaaatatagtgaattttcgtcaactaaaaagtccccttgtacccatttaccttcagtacctatccctaccccagccacaggcaacaaatgattttcatgtgcttatttgccatctgtatacctctttggttagttttctgtttatatcttttgcccatttatttttttttttttttgagacagagtcttgctatgttgcccaggcaggtcttgagctcctgggcttaggggatcctcccgcctcagcctcccaagtagttgggactacaggcacacactactactcttggtttgcctatttttaaatcaggttgtttgttttcttattattgtgttctctacactgtaggatattctacctttcctagaatttcatgtaaatggactcagacatactgttgtgtctggcctcttttgttcagtgtaatgtttttgagcttcatccttgcatgttatgtgtatcagtgattgattcaatttttattgctgcatagtattggattgtatagctataccacaatttgtttattcattctcctgttgatggaatattggttgtttccagtatttagctattattattattattttttttttttgagacggagtcttgctctgtcaccaggctggagtgcagtggtgcaatctcggctcactgcaacctccgcttcccaggttcaaacgattctcctgcctcagcctcctgagtagctgggactacaggtttgtgccaccacgcccagctaatttttatatttttagtagagacgggatttcaccatgttagccaggatggtcttgatctcttgacctcgtgatctgcccaccttggcctcccaaagtgctgggattacaggcgtgagccaccgcgcctggtcttttttgtttgttttgttctttttttagacagagtctcactctgtagcccaggctggagtgcagtggcatgatctcggctcactacaagcctgcgcccctcaggttcaagagattcttgtgccccagcctcctgagtagctggggttacaggcgtgtgccaccatgcctggctaatttttgtacttgtagtagagactgggttttgccatgttggccaggctggtcttgaactcttgacctcaagtgatcttcctgccttggcctcccaaagtgttgggattacaagcgtgagccaccacacccggccagggatgtcattttttataactagccataaactttagctttgaagtaaaactatttctagcaagtgattcttacctgatattttttgttgttcttgcccatattttaattgggttgtgttattatggttctctatgtattctagatttaagtttttgtatatggtgtgaggcaagtgtcaagtttaattttttttctacaaacatcctgttgttccagtaccttttgatgataagactgtcttttcccccattgaattatcttaacgccctcatgaaaagcaattggccatatgtatgtggatctacttttggactctcaattctgttccagtgatttatatgtccacccttatgtcaataccacattattttgattattgctgctttatagtaagtgacatcatgttgcctgaaatcacgttttccacctttattcttctgttgatggttgctttggcaattaggggtcctttgcattttcgtagacattttagaatcaacttatctattgctactaaaaatgcttgattgggattgtggtaaatctagaaactaatttaggaagaatggtcatattaacagtttcaagtttcagatccatgagcatattttcactctccattaggtcttttaaaatttatcctagcagtgttttatggtttttactgtagaggtcttacacattttgttacatttgttgctatgtgtttgaccttttttgatactagtgtaaatggaaattttttcttttatgttctagttgttcattattacactaaatcatctttgggtgactactaaacattctattgaaaatttgtgaatggcgtgaacccgggaggtggagcttgcagtgagccaagatcgcgccactgcactccagcctgggcgacagagcaagctccgtctc

SEQ ID NO: 115884 - DNA, 3085 bp, Homo sapiens
  misc_feature (1)...(3085): n = a,t,c or g
cctgacagcatgtgtgaaatccctctttaagatgggcctcctccgaggagctgtgaggggtgagggtgaaatccctccttaagacgagcctcctntgaggggctgtgaggggtgagggtgaaatccctccttaagacgggccctccggccgggcgcggtggctcacgccctgtaatcctagcactttgggaggccgaggtgggcggatcacgaggtcaggagatcgaaaccatcctgactaacacggtgaaaccacgttctctactaaaaaatacaaaaaaaaattagctacccgtggcggcgggcacctgtagtctcaactatttgggaggctgaggcaggagaatggcctgaacccgggaggcagagcttgcagtggagccgagatcgcgccactgcactccagcctgggcaacatagtgagactccgtctcaaaaaaaaaaaaagaaaaaagaaaaaaaagaaaacactgcccaactggctggccgcagtggctcaggcgggtaatcccaacacctttgcgagggccgaggaagctggatcacttgagctcaggagtttgagaccatcctggggaacacggtgaaaccccgtctctactaaaaaaaaaaaaaaaaaaaaaaaaaaaaaaaaaattagccgggcgtggtggcacacgcctggtaatcccagctaaccctggatgctgaggcagggagaattgcttgaacctgggaagcggaggttgccagtgagctggagattgcgccactgcactccagcctgggcaacaagagtgagactccgtcaacaaaaaaaaaaaaaaaagaaaagaaaaaagaaaaaccgactttcattaaagcctcctgcagaaattcgcataagtaacgaggagccaaatgttaatcaccaagacaatggggaaaatgtctccaggacatgaaagaccttcacatcttcacagcagctctttccaccacaggctcaaaagcctagtatggaaaaatcatttcctggagcagggccagggccacctgctgtgtgcagcctagagacgtgatgccctgcattccagccactccagccatggcttgggtgggagacaccatggtacagctcaggccatgtcttcggaggttgcaagtcgcaagccttggcagcttccacaagctgtggagcctgcagatgcacagaagtcgagaattcaggccaggccgtggttgtctttccaaggcggctcagcttgtgctttgcttggagagagcggagggcagcagcacagtgacagcgtctgggacctcagaccagtttccacagccacttatgaaagcagacggctccatgggctggaggaggtgggacgctctggaaagaactcgggtgcaagtgggaaagaaaatcgagctgagcagcgggaagtcgaagtcgccccagcagtttcgccctgcggagaggagccttgctgtttccaaatctctcctgctgaagagacattggagctagggcggctagtttcacctggtaattgtgacaccctgtctcctcgagctgcaggcttttatgcttgtcatgttcgaagtttgataccttgcagatcaacatcctattctaaagatgatagtgtcaaaccaagtggaacaaagaaagaagatctggatgacaaagagaaaaaagatgaaactcctgcacctgtatatagggccaagtcaattctggagagctggggatgttcacggaacgccagacaccaaaaggccagaagcatgcccctgcaggaccagcacttggctctggccatcctgctggagctggctgtgcagagaggcacgctgagccaaatgttgtctgccatcctgttgttgcttcagctgtgggacagcagggcacaggaaactgacaatgagcgttctgcccagggcaccagcaccttgcttttgtccttgctgcaaacgttccagagcatcatttgcagtaaggatacgcccccctcttacggtcaacatgcaccttttgtctggccctctgagccccagtgagagtttcctgaggtacctcaccctccacaagacaacgagcttgccattgatctgcaacaaacggcggttgttgtcatggcccatttagaagatctggctacaccctgtagatgcctctgccgtgtagctgtccgacgtctcataagcctctcccacaaccactctcgcaagcagcaggaaagccctgctcctctcagcattgcccttgacactcctgtgttttctgcccagaatgctccctcatgcaatttcaggactgctgccggtgtgaagcctttcttctcccagaaccacaccatcaccagtgagaacccattgggaccgagcctggggagcatcccgcaagcccgcttcctcctgatgatgctcagcatgctcaccctgcagcacagcgcaaacaacctcgacctcctgctcaattccggcacgctggccctcactcagacggcactgcgcctgattgttcctaagaagccagaatctacggctgatgaagaaaaaattggaaacgaagagagtgatttagaagaagcctgcattttgcctcatagtccaataaatgtggacaagagacccattgcaattaaatcacccaaggatgttgatttgatcccaccttttaatcggatgctgctggaagtcacctttggcaagctgtatgcttggactgttcagaacattctaaatgttctgatggatgccagtgccaaatttaaagagcttgtgcagtcatgttctagtaaagccctcagagaccctctccttcacctgtgctgcctctggatttctgatcataaccagtacttcctcctggagctggatctgccagcccctagggaaggagctgaagtgggtcagctgggctacatgtgcaatgagtacaccaccatggatttttatacaaaagacacagagggggaagtcattgtgaggccagacacaaacctccctgcagggaagctcaggacaccagggggtgctcaggtcaccaaggggcgctcaggacacattaaggcaggtgcaagaggggaaaaaagtgctggagatggttatgcagacatacacgtag

SEQ ID NO: 115885 - DNA, 1077 bp, Homo sapiens
tcacccagtcatctcagacccgtcttggctttttctctctatctttccattcaagcccacgttgtggtctagacatcctttccattctctctgcttggaatggtcatccctctgatagcccttagtcactccacacccagatctctgcccaaatgtcacgttgtccaacaggctttccctgacactcacatcactgcatttttgttctttatagcacttgttctgctctagaattgtcttgtttgcctgctggtttattttctgcctcctccattaggaggagctccataaggacaagaacttgtctcattttttgatttctttgctcccataatttaacacagggcctgaaacataaaatgcactcagtgctcttgccttggctgttccctctgccggaactctttttctccccgatgttcttgtgactgcttccttccggtcatcaagtctcagctgagagatttcccaagcagagagaaaggcactccagggatatggaaagcttgttggcaaggcctggtgtgggaaagagccccaagtcttcctccaaccctgcactacgccggaagcgcctcgcggaagtgcctcctgcgctggctgaggatgggtggccctgagactcgggctctgagctctggggctgctttgctctaggcgtgccccctctatgctgttgccctgcgcctcttgctcggggcaaggaaacagaatgctaatgatgatgagtccaggtttcctgggtgtggaaccagccagatagatggattccagcgccacatcctggtccagcctccagacctgccactgcgccaagatggccgcctcccctgactcaggaggcttgagcttgggggagccagccttggtggaggtaaatctctcctgtgagtggggggtgcgtctctggttccctgtcccatcagcaccctggggtggggcctgccgccagctgaccccaggacctgggttgcaagaacccttgccagccactagcctggcatcttcaagcccagctgatgctgaggcccagaatgagtcctcagagatcccctggcgaacactcagtgaatacat

SEQ ID NO: 115886 - DNA, 444 bp, Homo sapiens
atgatttcctttaatggaaggaaaaacaggcatatggaggttaaatacttaggataccgagctgtcaagctgagtttgctgaatgaggacagggtgcttgatgtacttgcaaccaaaagagtcacaccgaggacaaatgccgacacactgtggttggccaatttgcatgatgaaaagaacctgaatccatgcccgctgaatatggactccaacggtgccctaggggatggtggagccaccagatggaaggagcctggtgatcccgagaaggagagatgcctcgctgacctgaacatctttccagaactgttaaatgcaatggcaggtctttcggggtgggggtggggcactgatcagaactgcctggaagctcaagtacccactatacctaggctcaggcaggccagagattcccagagaacgagagagaagaacaaggcttga

SEQ ID NO: 115887 - DNA, 831 bp, Homo sapiens
ctacacttttcccacggatttctgcaatctgcagatcagaagattcctttgtgtgcttataccaccagggccttgggtcccaaacacaaaactgggcagacctacggcagctgcaccagtcagtagcagttggggcaggcactgagctgcaggagtttttacatactctggtggctcccagaactccagggtggcagaagagccgtccactcccatggaaagggggctgaagtcagagagccaagtagccttgctcagtaggtcccacaaccacagaatcccacaagctaagacccactggcttggaatccctgctggacagcacaacagcctggagtctgcggaagatgaccaagttctctttcctgcctgctgacaagggggagtccccaagcacagcacgccagctccactaagcggaagccagacagcttcctcctgatcccatgcctcctgactgggtgagacctcccaacaggggtagccagacacctcatacaggagagttctggctggcatcaggtcggtatccctctgggacaaagcttccagaggaaggaacaggcagcaatctttgctgttctgcaggctccactggtgatacccaggtgaacaacgtctggagtggacccccagcaaactgcagcagacctgcagaagagggacctgattgcatggggctgctacctcctccaatagcaacagctgcttctcttcacgaacgcctagggcaggtagagtctctgcttcttgagctcctggacaaaagacagaccgtctaagaccgctagcggttggctgagggatagtttcctctaccaagaaatgcat

SEQ ID NO: 115888 - DNA, 264 bp, Homo sapiens
atgccgaaaaatagcttcgacgaatgctcacttcacggcatctcatacggcacgagaagggagcgagccaaagagcgaagaggattttgtggctatttttgtcgcagttgttctagtgtggtggttcgtcagctggggctgatcctgctcccaggggacaccgggagatgtctggtgacgtttgtggttgtcatgactgggggacgggtgatgtctggggacatctgtggttggcccgatggggatgctcttggcatggagtga

SEQ ID NO: 115889 - DNA, 422 bp, Homo sapiens
ctgggcctgctggagcgcgcgctcccgggccgagcgccgcgcgccatgctggccaagttgctgtgcgaccaggtggtcggtgcgcccatcgcggtctcggccttctacgccggtatgagcattctccagggaaaggatgacatatttttggacctgaaacagaaattctggaacacctatatgcaaactcagtcgtggctttggagatcactttaagcttgtctccagctggcacactaaggaggcacccacaatcagccactgcgggcgaggagggcacgaggccaggttcccaagagctcaggaacatggagctgatccaggacacctcccgcccgccactggagtacgtgaagggggtcccgctcatcaagtactttgcagaggcactggggcccctgcagagcttccaggcccggcct

SEQ ID NO: 115890 - DNA, 360 bp, Homo sapiens
atgctgtctctgttcccagtgctggggaatgcagagaactggggactgaaggaagagcaggcgttcagctccagcaaactatatctacaggaatccatcaccacttatgacaggctctgccacatactgaagccctattcatttgcacccaacatcatcattgcgtccagtgcctcaccacttggtgagacccttgaatattcaaaccagcgtctcactttctccatgaatatcatcgccattcacccagttacccaaaccaagagcccgaacaacatctttgagtccttctccatcacaccctacattcaaccaattgccaccttctcttttatatacctccttaagtcacggccttaa

SEQ ID NO: 115891 - DNA, 831 bp, Homo sapiens; identical to SEQ ID NO: 115887

SEQ ID NO: 115892 - DNA, 675 bp, Homo sapiens
atggagggagaggaggaggacttccaggggtggcgaattgtgcttttcttgaaggatgaacagttcatcaagggagcacaggctagttggaacaagccagaggcgggcaatgctggtgctagggacatgagcaggggtgaagaagcccagcagggcccagcacaggcacctgagccagactcggcggcctcggagagacttcccagaggagaacgggctacacgtgggcctggagttccatgccctctgtgcagggaaatcaacctgctcctgtcacttcggatgtgggaacagggtccgccacccagacctcaccccaaccctgccacccctgccacccctgccacggctgtagccctgaccacaggccggttgtccccagcccgaggagactccggggtgcgtctgcctcccaagaaagccaggttctctgggaaccagactgggcagggtccagttggccacacctctccacagttgccaccccttgctggagctctgggcttggaggcaagcacgcagtccccaagaaatgggcgcagctggtaccagcatcctgcagcttcactcgctgcagcctgcaaggctggccttgcccgcggccccagccaccctgcaggacatgcagccacgggtccttgtcctcatattcactctcctgtgatgatctcatga

SEQ ID NO: 115893 - DNA, 1194 bp, Homo sapiens
atgagcaggggtgaagaagcccagcagggcccagcacaggcacctgagccagactcggcggcctcggagagacttcccagaggagaacgggctacacgtgggcctggagcccacttccctgcaccgggaacattcagggctggggagggtttctgcggactctccttcatcactaatagctctcggtccacccagggctaccgcccccgtcataaacaagcccacatttgtctcacagcccatcagatgctggggcaacctgtctacgcagggctgcaggaatccagcaaacaacctccacaaagcaaggagaggcccccaaaccctgacatcatctgcagagccgctggccctggggagcggcagtgctctgggggcctcgagcgatgggtgaatgtcccatggcagaggacagaatgcagctgcctcgtgggccagccagagcctgaactttgtctccggcagaacaacacaggttctgaggagggacccccggctaccacccgacctcaaacacacttggaaggcagtacaccgggggcagcagccagggcctggggcctgggcctcccagaggctggcgctctcctctgccattgttttgttaattgtaaaatgggcaccattaacaatatccacgaccgcaagaggatgaaggcgattgctgtgcagaaccctctggtgtcagagcggctggagctctcggtcctatacaaggagtatgctgaagatgacaacatctatcaacagaagatcaaggacctccacaaaaagtactcgtacatccgcaagaccaggcctgacggcaactgtttctatcgggctttcggattctcccacttggaggcactgctggatgacagcaaggagttgcagcgggcaccatctgtggccttagctttattggcatctgttgggggacagagacaacccaaggggaagggcgaggagctgcttgagttcccagtgagggtggcctctctgctgcccgcgttgttctctgaagtttccactcatatggagactaaactagaacgactgtcaccaggcatggtgcttttgctcaagttatatctcactgaatccctcacagctcggaagatgggccgggagccctgtccccttgcagctgtgttgtcccagccccaggccatgctggagcacggaggtggctcagcactcaccgccttctga

SEQ ID NO: 115894 - DNA, 1259 bp, Homo sapiens
gcggaaccggaccggaattcctggcacgacccacgcgttcgatggtgggggaggaacctcagcagcatatgcaggagccgctgggcagcgactccgaaggtgttaactgtctggcctatgatgaagcgcatcatggctcagcaggaccgaattcagcaagagattgctgtgcagaaccctctggtgtcagagcggctggagctctcggtcctatacaaggagtatgctgaagatgacaacatctatcaacagaagatcaaggacctccacaaaaagtactcgtacatccgcaagaccaggcctgacggcaactgtttctatcgggctttcggattctcccacttggaggcactgctggatgacagcaaggagtttgcagcggtgagaagggtgggcactgggcaccgaggcaggtgggtgtctacctcctccccgggcgagtaggatgtgtctcgagtagggtgtctccctccttcccgggcgatgggctggactctggccttgccaggcggggcagtgctgtctcggccctggcgtctgggctggtcgaggagcccatgctgggcccgcctttccatcccacccccaggttcaaggctgtgtctgccaagagcaaggaagacctggtgtcccagggcttcactgaattcacaattgaggatttccacaacacgttcatggacctgattgagcaggtggagaagcagacctctgtcgccgacatgctggcctccttcaatgaccagagcacctccgactaccttgtggtctacctgcggctgctcacctcggggctacctgcagcgcgagagcaagttcttcgaggcacttcatcgaagggtggacgggactgtccaaaggagttctgccaagcagggaggtggagcccatgttgcaagggagagcgaccaccattcacatcattgcgctggcccagggccttcagcgtgtccatccagggtgggagtacatgggaccgcggcgagggcggcaaccaccaatccgcacatctttccctgaggggttccgagcccaaggtctaccttctctaccggcctgggacactacgatatcctctacaaactagggctgggttccagcccgcttggttgccctggttgcccccttcttgccagggcgttaggacattgttacagaggtttttctgtggttgtaaatggtcctatttcacccccttcttcctgtcacatgaccccccccccatgttttattaaagggggtgctggtggtgaaaaaaa

SEQ ID NO: 115895 - DNA, 853 bp, Homo sapiens
tgtattccgttctaggcaccagggctgtttaaagatggcggcggaggaacctcagcagcagaatcagtatccgctgggcagcgactccgaaggtgttaactgtctggcctatgatgaagccatcatggctcagcaggaccgaattcagcaagagattgctgtgcagaaccctctggtgtcagagcggctggagctctcggtcctatacaaggagtatgctgaagatgacaacatctatcaacagaagattcaaggacctccacaaaaagtacttcgtacatccgcaagaccagggcctgaccggaacttgtttctattcgggctttcgggattctcccacttgggagggcacttgctggattgacagcaaggagttgcagcggtttcaagggctggtgtctgccaaagaagcaaaggaaagaccttggtgtcccaggggctttcacttgaatttcacaattttgagggattttccacaacaacgttcattgggacctgattgagcaggtggagaaagcagacctctgtcgccgaacctgctggcctccttcaatgaccagagcacctccgactgaccttgtggtctacctgcggctgcttcacctcgggctacctgcagcgcgagagcaagttcttcgagcacttcatcgagggtggacggactgtcaaggagttctgccagcaggaggttggagcccatgtggcaaggagagcgaccacattcacatcattggcgttggcccagggcctcaacggggccatccagggggaggacatggaccgcggcgagggcggcaccaccaatccgcacatcttccctgagggctccgagcccaagaagtcagctttgtga

SEQ ID NO: 115896 - DNA, 426 bp, Homo sapiens
atggcgctggttttggtgggttttagccagcttctttacggcagactgttttatcagcaagtatctgtgaccaacgggaccagcccctttgcctatgactacgacctcacccatattgttgctgcctaccaggagaggaacggtgggtcacaggtagagcccattcagccgctgctcaggactttcaaggttagtgggggcaacagagacaagcagaactggaacccttgtgatgaaaatgtcaaaacccgtgaatgctcaacgatgggagcaaatgtgctgcccaggatttgtctttttcgtcctgatcttcagacccgggaccacccgcacccctccagcatcccgtggtccagcaggctagtgatggttaaatgccatcattatcccaccactggcttggcacccaagtccaagatgccatag

SEQ ID NO: 115897 - DNA, 252 bp, Homo sapiens
atggctgttttcagggaggagagaatggtagagcttggacgtgcagtagggatgtccatactcatgtgtgagaagcccctcaaagtgctgaatggagccaagggtgagaaagacaaggaggactggcttggatgccaattggaagaaattgcaaaattactggacaaggaagtcagattaagcacagaaggggataaagaggcaaacaacaacaaaaaacaaggcaaaacaccctcatttaaagaaaactag

SEQ ID NO: 115898 - DNA, 357 bp, Homo sapiens
atgggttttggaacagttggacaaactgtgaaaagcccagataaacttcgtaaagtgatctatcgcagaaagaaagttcatcatccctttccaaatccttgttacagaaaaaaacagtcccctggaagtgggggctgtgacatggcaaataaagaaaatgaactggcttgtgcaggccacctgcctgaaaaattacaccatgatagtcgaacatatttggttaactccagtgattctggttcttcacagacagaaagcccatcatcaaaatatagtgggtttttttctgaggccttctctgcctataaagccaaattcttctggtcagctcatcagaacatttatttcacaaaatga

SEQ ID NO: 115899 - DNA, 789 bp, Homo sapiens
atggtgagagacaaaactttactccattctaatgtcatccaaactcaagaatgcattcactacattagcctggaaagtggggatctgccaacctcaacagagtcaactaagactgaagaccctattgaaaaacaacaagaaagtcctttagacagcaatgctagcaacgatggatctaaaaactcctacttcatcatgatgaaaaggttaataaaggatcatggcttagcaatgagcagcagtctcctaaaaaatcatctctctccaagggccagggatcataatgacaacaatcagttgaagaaaaaccaggaccaagcaaaccaaagacgcaccagtaaactgcacaggggacagcatgtgatcacaatcaaggtcaagagaaagaaaacaagaaagaaaacgaaggacgaaaacacaaagcgcatgctgatgggcaaagaggctgaactgaagacattgcagactcaggtgccctggagcaatatgggccaagttgggtgggtggaaccgctacggcctcctgagggctcagaagaagagaaattccaggaatgcagccacctgagggaccgctcaggtgacagaacccccgagcaccaccagcccgtcctcagccctcttttactggcagtctgccttatgccggtgccgggcacactcaggagggagcagactccatgcgggggagcctgccgccagtccccctcccaggggagagaggcaagggggctgctgcaggtccagggaaaggctgatgcattgatggtgggagaggaggcagcgtga

SEQ ID NO: 115900 - DNA, 1521 bp, Homo sapiens
cacacaaggtggaatggctacattgtgctaatttatagatagtatttaaagcttcagaactgaatgagatcacttagggagaaaatacagaggggaaaaaaaaagaagagggtcccacgctcaactaagatctagagacttccaaaatgttgaagttgacataaaagctaacagaggagaataagaaggaatagccaatgaagcagggaaaaaatgaatagagttcattaaatttaagagagagaattttaaaggagaaaggaatgataaactgtattaaatgcaggtaaggtcaagtaaagttaggctagagaagcaacgactaaattgagcaagatgaaactgctgatgacctttacaagatgggtttcaatggcatggataaaacaaatgctccatggaagtgaagaggagacaaccaagagacagaaagtccaactgacctacagaagtagatttactgaactcacccatgccatagagaataatgatcgatgtgctaatattattggaagaggttcttgccatttgcaaattatgaagctcaacttagaaaagcaaagtagaaagaaaaaaagggatggatgggggaagagcgttcctcctaggcttttctgcatctctgaagaaaaagtttcagattttgctcagtgtcctttattctcttttcaaactaggggcttcagaggcagcaaagaccttagagtcaactccaccattacacagatgggaaccaagatccagagagggaatgcttttttccaggcagggtcacagtcagcagagcttgggagggttcttgtgaccctgtatgttgctgggcccaaggatccatatcttatccagaaacgtctgcagtgtggatgtcttttcagttctgtgggcacaggcaaacaatcagtggagtgctggcctgtgaatgcaaggggagccagcactaattgtcctcaagacgtggtgagagcggctttctggggtggagactggagggcaggggaatggaaagcgaaggaccctagacctaggaccgggtcaaatccgaagcggaaggaagaggaaacgcaaggtctgcctgccgctcgtccacaaaccactcaaagccgaacaggagaaatgcctttaatgtcgactttgtttccaaccccaccaaagtgccatccttcaggaagtacaaggaggggcttgagagcactcactaaaggggtgatgagtaaaatcaactgggaccttttctggtacttgtcccctgtgtcccctggaggattcaaggaagccttcccaagttcctcccgacaggatagaacatcccacctcagttttccaacggcacactcctccagaaccacactgtcacattgctctatgactgccacttaccaatctccccggaatgagaaggagctacagtgtcacttactggtgcatgcccctgaatgggttaatcttttcttttccttatttcgacagcatgtttaccttttgaaaaggcgagcagaggcacagtatggcactggaggctaa

SEQ ID NO: 115901 - DNA, 345 bp, Homo sapiens
atggagcagaatagaaaatccagaaataaagctaaatacttacagccaactgatcttcaacaaagcaaacaaaaacataaggctgctgggcacactgccattgacctctgcttgacatctccttcctccccctgtcagcagccttgctcagacatcaaccaccagtgtttgcatgtccccatggcaagaacaagggggaagggagtaggagggaaaattaaaatctcctcttactttggcactggagatgcccatacgcagaaagcaaaaaggcacagcatatttaaggaagctcataagaaacagtgcatccagaagtggcgagaattggaggaatggacatga

SEQ ID NO: 115902 - DNA, 3400 bp, Homo sapiens
gttgcttcacagtcttcccttctatctgattcagtggaccaagtaaatgactctctggtaactgcagaggctatttcctggaatgaatcaacgagtgaaacgaataactctatggtgactgaattcatttttctgggtctctctgattctcagggactccagaccttcctatttatgttgttttttgtattctatggaggaatcgtgtttggaaaccttcttattgtcataacagtggtatctgactcccaccttcactctcccatgtacttcctgctagccaacctctcactcattgatctgtctctgtcttcagtcacagcccccaagatgattactgactttttcagccagcgcaaagtcatctctttcaagggctgccttgttcagatatttctccttcacttctttggtgggagtgagatggtgatcctcatagccatgggctttgacagatatatagcaatatgcaaacccctacactacactacaattatgtgtggcaacgcatgtgtcggcattatggctgtcgcatggggaattggctttctccattcggtgagccagttggcctttgccgtgcacttacccttctgtggtcccaatgaggtcgatagtttttattgtgaccttcctagggtaatcaaacttgcctgtacagatacctacaggctagatattatggtcattgctaacagtgaaatacaaactaccatcagagaatactacaaacacctctacgcaaataaactagaaaatctagaagaaatggataaattcctggacacatacactctcccaagactaaaccaggaagaagttgaatctctgaatagaccaataacagaagctgaaattgtggcaataatcaatagcttaccaaccaaaaagagtccaggaccagatggattcacagccgaattctaccagaggtacaaggaggaactggtaccattccttctgaaactattccaatcaatagaaaaagagggagtcctccctaactcattttatgaggccagcatcattctgataccaaagccaggcagagacacaacaaaaaaagagaattttagaccaatatccttgatgaacattgatgcaaaaatcctcaataaaatactggcaaaacgaatccagcagcacatcaaaaagcttatccaccaagatcaagtgggcttcatccctgggatgcaaggctggttcaatatacgcaaatcaataaatgtaatccagcatataaacagagccaaagacaaaaaccacatgattatctcaatagatgcagaaaaggcctttgacaaaattcaacaacccttcatgctaaaaactctcaataaattaggtattgatgggacgtatttcaaaataataagagctatctatgacaaacccacagccaatatcatactgaatgggcaaaaactggaagcattccctttgaaaactggcacaagacagggatgccctctctcaccactcctattcaacatagtgttggaagttctggccagggcaattaggcaggagaaggaaataaagggtattcaattaggaaaagaggaagtcaaattgtccctgtttgcagacgacatgattgtatatctagaaaaccccattgtctcagcccaaaatcttcctaagctgataagcaacttcagcaaagtctcaggatacaaaatcaatgtacaaaaatcacaagcattcttatacaccaacaacagacaaacagagagccaaaccatgagtgaactcccattcacaattgcttcaaagagaataaaatacctaggaatccaacttacaagggacgtgaaggacctcttcaaggagaactacaaatcactgctcaaggaaataaaagaggatacaaagaaatggaagaacatgccatgctcatgggtaggaagaatcaatatcgtgaaaatggccatactgcccaaggtaatttacagattcaatgccatccccatcaagctaccaatgactttcttcacagaattggaaaaaactactttaaagttcatatggaaccaaaaaagagcccgcattgccaagtcaatcctaagccaaaagaacaaagctggaggcatcacgctacctgacttcaaactatacgacaaggctacagtaaccaaaacagcatggtactggtaccaaaacagagatatagatcaatggaacagaacagagccctcagaaataatgccgcatatctacaactatctgatctttgacaaacctgagaaaaacaagcaatggggaaaggattccctatttaataaatggtgctgggaaaactggctagccatatgtagaaagctgaaactggatcccttccttataccttatacaaaaatcaattcaagatggattaaagacttaaacgttagacctcaaaccataaaaaccctagaagaaaacctaggctttaccattcaggacataggcatgggcaaggacttcatgtctaaaacaccgagagaggcactcttatgcattgttggtgagaatacaaaatggagcaaagaccccagtgctttatccacacctccaacaagctgcagtcgaccacaaagaagaaacaagtctgtctcccatgggtcctacccacaccccctgctgttcaccatgaatgatagagtcaacagtgtgaaaacgaccatactgccaaaagcaacctacaaattcaatgcaattcccatcaaaataccaccatcattcttcacagaactagaaaaaacaaggctaaaattcacatggaaccaaaaaagagcccacatagccaaagcaagactaagcaaaaagaataaatctagaggcatcacattactcgacttcaaactatactataaggccatagtcaccaaaacagcatggtactggtataaaaataggcatatagaccaatggaatagaatagagaacccagaaataaagccaaatactttcagccaactgatctttgacaaagcaagcaaaaacataaagtggggaaaggacaccctattcaacaaatggtgctggtataattggcaagccacatgtagaagaatgcaactggatcctcatctctcaccttataaacaaatcaactcaagatggttcacagacttaaatctaagacctgaaaccataaaaattctagaagataagattggaaaaacccttctagacattggcttaggcaaagacttcacaatcaagaacccaaaagcaaatgcaataaaaacagtgataaacagctgggacttaattaaactaaagagccttctgcacggcaaaaggaacagtcggcacagtaaacagacaacccacagagtgggagaaaatcttcacagtctatacatctgacaaaggattaatatctagaatctacaacaaacaaacaaatcagtga

SEQ ID NO: 115903 - DNA, 1584 bp, Homo sapiens
atggtgaatgagacaactttcaccttcacaagcccatggctggagggggcaggtgtttatggggaactctgttgctggagattctctggagttgttgagctgcaggagaaaggagaagtgggaagagactcagtgctcatggaggaccgatcacgtgccagttcctgggtccgcaactgcagagtaattctcaggtgcttcactgtgacccacctttgtcactggccaccacttgcaaagaggcctggaagatttgacaaacagatagagcctccactgggctacaaatctgcacaagtaaaccaagctctggctccgagtgacttctccctgaaagtgaaatggcttggaaaatggaagcaaatcctgtcaccttctgcttctttcaaaacacttattccaactctcaacaggcaatctttcctcatgcccttccctgcaataaattactattgcttcacaagtgctccagctgttgatgtgttagcaaatatctgcgaagggcaggataccttgtgggaaaatgttttcttagacaggatcttactggctggagccctaaaacactgttgtatccgacagcattaccagattttcctacaaatgtctctggcattcgagaggagagtaagccccacagagcctgcttgttcacagagggccttatcagttgttgatgagaccctgtctaggctcacagacaggcagtttcctccagccccagagcccgagcccgctgtggagccagaagaagagctggcagagtcattaggtacttcggtgtctgtagaaagtgccaagcccttggcaaatctgggttcatttaccagggtgggtggaagcagacctcaggcagtaatgctccttcacctgctgctcatctcctgctgtgtggcccggttcctaacaggccacagaccagtttgtggctttggggttggggacccctaccctagagccttcagacagtcatggctaatcagtcaaggagctctttcccatagagccctgacagcatccttctcagcacagggctctgggcagcctctgacagtctgtcagtacatgggaagacctacatctgctcaacccaatctgggcaatggatggcagggaaggcagggcgatgccagaccagaggatggagccctgggtctcttcactttgcgccacattatcacagaaaggtggattagaagttatctccgctctgctttctctcagagctccttggcaacacagccacctcgatataaatatacaccagcaacgtgcgcaacctcatactccacggtgaggcctccagaggccccagggcagataccgccggggagcaaggacatcaggagatccccaggacacaaaggagtgccagcctcaacgcttcaagatgcttcaactccgccactgaagccaatgctgcctgcttcctccggtgacagcagcaaagcaggcagcagtggccttggaggctctggctggacccactgtcatgcattgtcttccacggttactcaggcacctttcctttacctggaaaatatctctgagctcaaacattcaactcacatcttggagccataa

SEQ ID NO: 115904 - DNA, 957 bp, Homo sapiens
atggatacagagattggaaaaatgcagcccaaactgaggaactgctggagccaccggaagctggaagagcagtcatggctaatcagtcaaggagctctttcccatagagccctgacagcatccttctcagcacagggctctgggcagcctctgacagtctgtcagtacatgggaagacctacatctgctcaacccaatctgggcaatggatggcagggaaggcagccccacaggcagcagctgcagtgctccagtccagctgcccctgtggacaagtctgggaatgacccaggcactgcatgctttggctcctataaagtgaaggggttgggccatattctctcaaaagtcccttttaagtgtccagagattcctcagaaaagtcaaatcaagaggtgtaagaaccggagtcaatgccatgattgtgagtcctccccaaccacgtggaactgtgagtccattaaacccctctcctttataaattacccagtctcgggcgatgccagaccagaggatggagccctgggtctcttcactttgcgccacattatcacagaaaggtggattagaagttatctccgctctgctttctctcagagctccttggcaacacagccacctcgatataaatatacaccagcaacgtgcgcaacctcatactccacggtgaggcctccagaggccccagggcagataccgccggggagcaaggacatcaggagatccccaggacacaaaggagtgccagcctcaacgcttcaagatgcttcaactccgccactgaagccaatgctgcctgcttcctccggtgacagcagcaaagcaggcagcagtggccttggaggctctggctggacccactgtcatgcattgtcttccacggttactcaggcacctttcctttacctggaaaatatctctgagctcaaacattcaactcacatcttggagccataa

SEQ ID NO: 115905 - DNA, 1794 bp, Homo sapiens
atgaggccacatggttggaccctaattcatatgactggtgtcctattgaagagaagagtgggacacagacagtttgtagcgcaaatccctattttttcattaaattcttctcagcagctcttggtgtttttcttccttctgagaggagttggcactgataattactcaacatggcagttacctggtttttgtctgttaaaatctaactgtctccatgatgttcaggtttcagtagaacgatgtgtcaccaagaatcttaagcccttgtggctcgattcttcctgccagggtgatcattgggatggtgccaagagctgtggacacagccacccagatgaaagaaatttgggtcctatttctagaatccagagcaaggatgctggtggaatctttcctctcctctcaatggccagtctctggcagacttcttcttcatttgcccaggaaagccagctttcaacagcacaggatttcaagaggtttcatcctgctctggtagtggtagcagagacgcctggcggtagtgatgatggtggagatagtagtgatgatggaggtagtgataatggaggtggtggtagatatggcagtagtgatggcaaaggtggtgttaacagtagtgatgtgaatgttcaaggtggtggtagtggtggtagtaatggtgagagtggtgataattatgaggaatgtgagggggcttgtgatagttatgaggaaggtggtgatggtgatgacggtggtgacggagatgaccttggtagtagtgataatggtgatggtagcagagatagttggatggcggtagtgatgatgatcgaggtggtggtggtaattgtgttggtaggggatggtgttggtaggggtagtggtggcgatgttagaggtgtggatgatttcagaaatggaggaagtggtattagtggtgagacttgtggagtcagaacttcagtcatcaccatggcaatggaatggtgcatagagtcagggttaagaaatagctcacaagccatgagtaatgagaaaaggccaatgtgccaagagaaacagcagaggaagcagaccacgagttccacggagtatgaattctgtgccctaacaccagaatacctgtctccatcaaaattgggtaaccaccaagaatatgatctacatctaaatactaagaaaggtaccacccagaacccccgtgctgtgcagctgcagagagttcggtcagtaaagtgtctccagctgattttcctacaaatgtctctggcattcgagaggagagtaagccccacagagcctgcttgttcacagagggccttatcagttgttgatgagaccctgtctaggctcacagacaggcagtttcctccagccccagagcccgagcccgctgtggagccagaagaagagctggcagagtcattaggtacttcggtgtctgtagaaagtgccaagcccttggcaaatctgggttcatttaccagggtgggtggaagcagacctcaggcagtaatgctccttcacctgctgctcatctcctgctgtgtggcccggttcctaacaggccacagaccagtttgtggctttggggttggggacccctaccctagagccttcagaaccagggctaccaacaggagatgtgaatacgaaactgagctcctgagagcaatggggatggctggatcccaaaatcgtagagggcaggtggcagcgcttaactatcagaagcaatgtgggcacaattattacaataagcagcaaaggcagagtggtggccttgaggacagaccaacggagagatga

SEQ ID NO: 115906 - DNA, 594 bp, Homo sapiens
atggcaatggaatggtgcatagagtcagggttaagaaatagctcacaagccatgagtaatgagaaaaggccaatgtgccaagagaaacagcagaggaagcagaccacgagttccacggagtatgaattctgtgccctaacaccagaatacctgtctccatcaaaattgggtaaccaccaagaatatgatctacatctaaatactaagaaaggtaccacccagaacccccgtgctgtgcagctgcagagagttcggtcagtaaagtgtctccagctgagtcagcccatctatatctacaaaaatcccccagagattttgattgcaatggagctaaacttacagatcaatttggagagaatgggcaccttgactgtgttgagtgttccaattcatgaatatgatgcttcaactccgccactgaagccaatgctgcctgcttcctccggtgacagcagcaaagcaggcagcagtggccttggaggctctggctggacccactgtcatgcattgtcttccacggttactcaggcacctttcctttacctggaaaatatctctgagctcaaacattcaactcacatcttggagccataa

SEQ ID NO: 115907 - DNA, 615 bp, Homo sapiens
atgagaaagaggaggggctttgagtctcgtgaactaaaaaggatggtgctttatcagcaggaacctggacccagactagtgagtgggttttggaagtggggagaggaagatgggtttagttttggacatgttgagaaacaagtgttgaaaatgttaaaggctgtgctgaagaagagccgagagggaggaaagggaggcaagaaggaagcagccaaagatgtcaaagttcctcctctacccagatgtgctggaagcctgactcctgttcttgagctgccggcgaacagctcggttcattatcggcctttgcttctggaacaaagaaagaaaacaatgaagatgcccctctggggaatttcagtatcgcatctggatgagttcacactacagctgctttgtctgaaccacaggggccagtcttatagcactgtgcatgagtctggaatctttgagaaaccacctcgaggctttcggccaggtcacgagttttcccagctgctttcccttcaactgtctggcgaggaaacagatcttaaggcagagctaggctgcaccatgatgccagcgcgcagtggagccggatgccctctgacccgacaaacttgtaaaagctga

SEQ ID NO: 115908 - DNA, 318 bp, Homo sapiens
atgggtggcgaaaacccacaacagaacaagcacagagatgagtaccccacaactgggcagcagggagagaacaagaaggtgaacatttatgacctactgtatttccgttataaagatgagcaatgcaggattccttccctcttggagcgtacagtggaggagatgaaaaattccactgtgacaagcaagggaggactgagatctggcaaagaaggctcagcagcaacagctagtatagagggtggaaaaccagaagaatatggtgtcccggaagccacaagaaggaagtgcctcaaagaagcaaaaaatggtcaataa

SEQ ID NO: 115909 - DNA, 465 bp, Homo sapiens
atggtcacagcagtaagccttcttcaatttcaggagtccttagagtatgttttccatgtacccaaggacagattcactccagttcgccccacaccaccctgccaagcagcacaggtgctcctgtcaggtctgacttacaagcgttcaggtgctgccctgtcaagcgctatgggtgcaggacccagacgcgtctgggaaactggaacaagagagactgagttgcaatcagtgggctgctgtcagcatcccgacccttctctgcagccactcgtccctgactctctctttcctctcaggagtccaggagacttggggaactgcggctttcacagaacccaggaggcggtccctggtctatctgcaggagccctttgctcttggcattgcagacgtcctctgcacaggtacaaagggctctatgccctttggcatgaagaacgagaacttcaggtgaacacagtgtga

SEQ ID NO: 115910 - DNA, 404 bp, Homo sapiens
ctcttactatatgccaggcactttacacacatcatgtcagtccttcattacagcaggcctatgaggttagaactgtcatcatcaacatgttacagcccaggaatctgaagctaagggaacttaaggctttttaccccaaggacaagatttggccaccaaccaagatggatgggacagttgaagggagtggcaatgttctttctggagaaaccaagatttgcctggtggggcaggtagcagcggagtctcccctgcaagtagcagtgactcagagccccagaatcaagcaccacttaagcctccagggcactcctgctgccctttcagatcagatgcttctgcacagatgtttagcgggccctgagtatgtcgcttcgaggcaaacgagtttcagaaagaattag

SEQ ID NO: 115911 - DNA, 171 bp, Homo sapiens
atgtgtatggagaagttagaaaatgactatgtatggcccgggaaagggaagtcaaaagaagacaaaagaagggaacaaaatgggggcatcagacccctctccgtcctgagcctcctacaagcactgatgaggcagctgctccttgaggtcgctgtaggcttggtcgcctga

SEQ ID NO: 115912 - DNA, 171 bp, Homo sapiens; identical to SEQ ID NO: 115911

SEQ ID NO: 115913 - DNA, 831 bp, Homo sapiens
atggcagaaacattggccatatggatttctaacatggcagcctttgagaagcaactaccttcttccagcacgttgacatacttcccaaggctaaagatgctcatgattgtgaagaattatagctttctctctgcattcatggagaaaagcagagttctaaatcagatagagtgttcagggacactgaacactaggctttgggggggcaatcgtcagcagaggtcccccaccttactcacgtttggcaccaaaacagtgaagcacgtttgcacaggagacgatgagggctcagacattatcagtggtgaccagcacggatggaaaaccacagggtggaccacagaagaccacactgtcctcagtgttcaggacttcaaagattgtataatggaagctgcttttaaccattctctgtttcgacaaggttcggctctaaagaatccccttgttcccacgcctgctgagttgtttgactacacctccgcactgcagtttttcgatatgcttcgtgatctgctcaagaacgttgatcttaaagggttcgagcctgatgtacgtattttgcttaccaaatacagcaatagtaatggctctcagtccccgtggatggaggagcaaattcgggatgcctggggaagcatggttctaaaaaatgttgtacgtgaaacggatgaagttggtaaaggtcagatccggatgagaactgtttttgaacaggccattgatcaacgctcttcaactggtgcctggagaaatgctctttctatttgggaacctgtctgcaatgaaattttcgatcgtctgattaaaccacgctgggagattagataa

SEQ ID NO: 115914 - DNA, 1461 bp, Homo sapiens
atgtgggtgggaaccgcagctacgtgcctcctggtgggtgtgagctcggcgtgccctgcactcggggcagccagctggcgccaccggctcgggcagaaggaagaagcgttgtctgcagatcagttgatccgcgggctttcctgtgtcggaatgccgccgttttccggggacggctgccacccccgtgattcccagccggggctgccggccgtgcacagcaaagtatgtcgctgtgcttccttgtcttcctgtgatgacccatgtgccatcttacacaaatggacaatcaatggagagccttccggacgagcaccaccccctgctccatggtgcctggtcccataccacccaaaggctgaggagtgcgggcacacggtgctggactggcaggcagctccacctgcggcctgtgcaaaggtctgcagcttcactcttgaagccagcgagaccatgaacccaccagaaggaaaaaacgccgaacatgtccgaacatcagaagaagcaaactccggacacatcacctttaagaactgtaacagtcactggacactgaacactaggctttgggggggcaatcgtcagcagaggtcccccaccttactcacgtttggcaccaaaacagtgaagcacgtttgcacaggagacgatgagggctcagacattatcagtggtgaccagcacggatggaaaaccacagggtggaccacagaagaccacactgtcctcagtgttcaggacttcaaagattgtataatggaagctgcttttaagacaattgctaaactggcaagcccgtcaccatacctgttgatctggtttatgattcatgccttaaaaaaccctagagttgtgatagttcctcttactgtttttcatacccagaaagctatacaaaatggagatgcaatgaatggttttatgctgaacagtcttcctaattgggtgttacagctgtgcccttggacgtgttacctgtctggacatcagcctcagaataataatagccctgagcttcaggttaagatatggacacgtgatcaagattccaccaatcagatggtctttgaatctgctagtgacaaaaagaaaggaacatgccaaaatccattctggcagatttaagacacaatgacagctacatccagttcccagaggcagcagggccagtggttctagcatcggcatccaagaacacttgctgatggtgcagatggtgtgagctgcagtgtccaggtgcagtatggctgctatggtgtcctcaatgaatgaatcctgcagtggaatttacagtgttgttcctggctgcacagtcttcaagcctttttctctggatactctaggaattctttgagtttcccagtgtcctttcaataaattcttcttcctaaattaagtagagcctatttctgtggcttgcaacaaagcatcccaaaagatacaatattaaattactaattaaga

SEQ ID NO: 115915 - DNA, 546 bp, Homo sapiens
atggaagacagtagcacagacacagaaaaagaagaggaagaggagaaagatgaaaaggatcaagagcccatttatgccatagtgcccacaattaacattcaagatgagcggtttgttgatttatctgaaactccagctttcatttttctgcatgagagggcaagagttgaggttttggagcctctgcctagctttcaagggatgtacggaaatgcccggatgtccaggcagaagtctgatgccagggtggagccctcatggagaacctctactatggcagttcagggcaaaaatgtagggttggaacctccacacagagtccccactggagcactgcctagtggagctgtgagaagagggccatcgtcctccaggccccagaatgatagatccaccaacagcttgcaccgtgcacctggaaacgccacaggcaatcaatgccagcccatgaaagcaggtgcaggggctgtactctgcagagccacaggggtggagctgcccaaggccttgagagcccacccctgtgtcagcgtagcttggatgtga

SEQ ID NO: 115916 - DNA, 244 bp, Homo sapiens
attagcccgtggtacatttgttcttgggcagttcgatgtggatgaatcttgtgagacagggaagccatgtgacaggggcgaaatcagatactgggctcgaggatcacaccaacttcaagccaccaaggtcaaggaggcaacatcaggcaccttggaagcagatcaatccttggcaaaactgaatttcgttttagctagagcacctttttatcttttacctcatactacaccagggggttcatag

SEQ ID NO: 115917 - DNA, 1043 bp, Homo sapiens
tttttttttttttttttaaggctggggtaaatttcaggaaagccaaagttacaggcaaaattgtaaatcaatagatgggaggttacactttggttctggcctaaaaaggcaggatatcttgaaataagggcttatagtcataggtagattcaaagatttttctcatttgcaatgggttaagagaagcttcgtttaaattttggggacagcagaagagaatattagctcaggattgtagatgtgatccctccaagcccctgagaaagaaattttcaacaaagaacagtggtcagacttcagtcttcagttcccccttctctgaggtctaggtgccagcagatccattcagtaggggtccaggtttcccagtggcaactttctggccggacaggtcaggagcccagctaaaaaggtgagtgggccatcagcctatacaggcaacgagagtgtcaaccgccagattactactgccagttacgaaaaaacggtcctctggaagcgacgttctctgtgcgccacgtaacacgctgcaggaaaggtacactggggggtatcacgtgaccgtcaaccgctggggcgagcaggcgcctagaacccagcgatcgtccatggccagggagcttccagtcacgttcctctctctaataccatcctccgcgcctcacctaagcaagcgccaccttctcgcagcttcctgccccctaaagcctcggaagtcctggccctcccaaggtggagcctttaaatgggaacacctggacgaggctctgatgggaaacggggggggatctcctagagccgaacagcagggtatgcaagcacaagatacccagggacttcacgtgaccccgaggtcctcacgtgaccccccagcagccagcaagcggggtgtcagcgcctccgcaacgcatgtcaggagcccagctaaaaaggtgagtgggccatcagcctatacaggcaacgagagtgtcaaccgccagattactactgccagttacgaaaaaacggtcctctggaagcgacgttctctgtgcgccacgtaa

SEQ ID NO: 115918 - DNA, 1393 bp, Homo sapiens
atggggactccagacagtggaatggaggagaaaacaacagctaaatataagggagaaattccctacgagtggagctgcctaataacagaattgccaaggtccagtctcctgaccatgaagatgtatgggaagagggtattaaataatcatctacctgcagacactggggagctcagtgctccctgtcaggctgtgggccaacacctacctgctgtttggagccccccaccccctccgtacccactcccctgctcctccacacccctgcagctcaactgtgcaagggcagccactgctgccactgtgaggaaattaggggaattatattcatctctggaggagcctgaatgcaaacaatcatcctctgagtgtacccagaagccagggagcagacgccagtcagtgggcaggttcgtgctgaacgctgacaggcaaccagccctgggctccggtgttttgagcaatttgagggttcagtctacggcgccctttactggctatgtgtggatgagtaattcggatgaacagcggggaatggtgggaaaaagggagctgaaaaggacttttctccctttcactaaaacatcaattcataggtcaaagggccagtaccacaagcaaaggagagggcaggcactggtctggaaggcaccaggaactgccaacctgtttcctttcacattccctcagatcttcccaagtgcaggcagccaatgtgtgcccttcctggtcctttctgcagaaggtttcactgggcatgcagacaaccaccacaacttggtagattggccaccatcattcttgctcttcacccagaggcctcctaagcaatggctgcagacccgaaaaccccatgggttcaatagctcagggcctcttagggacaaggttcaggcattattaaccatttccaaactggagtttcagaatgcaactattggaaggaaccccatgggtccccagttcagcatcttcactgccttgtccctcaggcttacacaagctgtcagcatggccctgggggagtgggttcatggtctcgctgacttcaagaatgaagctgtggaccttcacagtgagcgttacagctcttaaggtggcgcgtctggagtctgtcccttctgatgttcggatgtgttcggagttttttccttctggtgggttcgtggtctcgctgacttcaagaatggagctgcggaccttcgcagtgagtgttacagctcttaaagatgacacggacccaaagagggactcctggaaatacttttgccgtcatgaaaaaagcagacttttgttactgctcttctcccttcttcctgccttgaaggcagtcatgattcctgaaactaatgcagccaagggccaggaactattactgttttttgtgactttg

SEQ ID NO: 115919 - DNA, 1572 bp, Homo sapiens
ccgaggaccagctcggtctagggagaccctaacctagcggtgctagaggaattaaagacatagacacagaaatatagaggtgtgaagtgggaaatcaggggtctcacagccttcagagctgagaggccgaacagagatttacccacgtatttattaacagcaagccagtcattagcattgtttctatagatattaaattaactaaaagtatcccctatgggaaacgaagggatgggcccgaattaaaggaataggttgggcctagttaactgcagcaggagcatgtcccttaaggcacagatcactcatgcctattgtttgtggtttaagaatgcctttaagcggttttccacccccaggcaggcccaggtgttctttgccctcattcccagtaaacccacaaccttccaacttggggcgttatgggccattatgaacatgttacagtgctgcagagattttatttatggccagtttatggccagattttggggggcctgctcccaacactctacatatgctccatcttgcagaggcttcattcttggttctctagctaaaaacagtagaaattttgcacacctgggttagaaaaaaaaaatagccattaaacccacccctgttacaggtcactattggtattttgattttgccttcaatccatctgttattgtttacttttaagagtccttgatagttgctttttatgtccagagttttaatttcagtcagaaagagaaataggccttggtgagcatgctttgtcttggctggtgccagaagtctgtactcaaatatttttaaaataatttttagttgaattaacaagttagacctgtgtttagctttctcattgttttcctaaaaatagaagaaaaggttttaaatactttaaccacgaaatactttaaagcaggtttaaaataaactccttcattttgcctgttctattactctgttctcacactgctaataaagacatacccaagactggtaatttataaagtaaagaggtttaattgactcacagttccacatggctgggggaggcctcccaatcatgggcagaaggtgaatgaggagcaaagtcacatcttacatgggtggccagggcaagagagagagcatgtgtgccaggggaattccccctttataaaaccgtcccaatctcatgagacttatgcagtctcatgggagcagcatgagaaagacctcacctccgtgattcagttacctcccactgtgtccctgccacaacatgtgggaattgtgggagctaaaaatcaagatgagatttgggtaggaacacagtcaaaccatatctcctgtatacattcacactagcattttagttttagaactagttctatgttactatctgaattaatttttccacaattttgtaaggaaaaataatgcgttctttgaatttcatgtgtaaatgatatttttagttttgtgtccttttaaccaaccccattctgaaaatctttgtattgacagtgtgttatctctgcataaccatatatgtataagagtgctcaataaaaagaataaagaggaaacaaaaaa

SEQ ID NO: 115920 - DNA, 225 bp, Homo sapiens
agacaaaggagacacgttttatctgtggacccaaaactccggcgctggtcacggactgggaaggcagccttcccttggtgtttaatccttgcagggatgcctccctgattattcaaccacgtttcaaagcggcaagtcccgctattctgggggaggggcaagtacccctcaaccccttctccttcacccttagcggcaagtcccgcttttctggggaaggggcaa

SEQ ID NO: 115921 - DNA, 250 bp, Homo sapiens
agacaaaagagacatgttttatccatgaacccaaaactctggcgccggtcacggactgggaaggcagccttcccttggtgtttaatcattgcagggacggcctctctgatcattcagccacatttcaagggtgtcagaccatgcagggatgcctgccttggtccttcacccttagcggcaagtcccgcttttctggggaaggagcaaaccatcacggacaccgagcttcgggtaactctcacagtggaag

SEQ ID NO: 115922 - DNA, 448 bp, Homo sapiens
ggtaaagacaaaggagacacgttttatccatggacacaaaactccggcgccggtcacggactagggaaggcagccttcccttggtgtttagtcattgcagggacacctctctgattatttacacacgtttcagaggtgtcaatgcaggagggacgcctgcattggtccttcacccttagcggcaagtcccgcttttctggggaaggggcaagtaccccaaccatttctctccgtgtctctaccccttctccacctttctggggggcaagaaaccccccaaccccttctccttcactcttagtggcaagtcccgcttttgtagaggaggggcaagtaccccaaccttgtatctctgcgccccaatcccttatttccgtggcccaacctcttatatctctgcgccccaatcccttatttccgtgccccgacctctcctcgtgccgaattc

SEQ ID NO: 115923 - DNA, 576 bp, Homo sapiens
atggacatgaaaaggggagattctgatgagggatcagaaagaaaagagaagagctatagagaaagcatccatcttcttagagaatacacaaataattgtaaacagaatgttggcaaaaatatggattacaaaggccattctgagacaaaggagacatgttttatccatggacccaaaactccggcgccggtcacggactgggaagacagccttcccttggtgtttaatcattgcagggacgcctctctattcacccacgtttcaaagcatgctttaaaaagattaaagcctcttatcactcgcctgctacagcatggccttttaaagcctataaactctccttacaattccccgattttacctgtcctaaaaccagataagccttacaagttagttcaggatctgcgccttagcaaccaaattgttttgcctatccaccctgtggtgcccaacccgtacactcttttgtcctcaataccttcctccacaactcactattccgtgcttgatcttaaagatgcttttttcactattcccctgcaccccttgtcccagcctctctttgctttcacttag

SEQ ID NO: 115924 - DNA, 396 bp, Homo sapiens
atgcaggatgaaaaccatgagacaaaggagacacgttttgtccgtggacccaaaactccggtgccagttacggactgggaaggcagccttcccttggtgtttaatcattgcagggatgcctctctgataattcacccacatttcaaaggtgtcagaccacgcagggacgcctgccttggtccttcacccttagcggcaagtcccacttttctgggggagtggcaagagcttgctacacatgccagaaatctggccattgggccaaggaatgccagcagcccaggattcctcctaagccgcgtcccatctgtgtcggaccccactgaaaatcggactgttcaactcacctggcagccactcccagagcccctggaactctggcccaaggctctctga

SEQ ID NO: 115925 - DNA, 1222 bp, Homo sapiens
atggctcagaccagctcatacttcatgctgatctcctgcctgatgtttctgtctcagagccaaggccaagaggcccagacagagttgccccaggcccggatcagctgcccagaaggcaccaatgcctatcgctcctactgctactactttaatgaagaccgtgagacctgggttgatgcagatctctattgccagaacatgaattcgggcaacctggtgtctgtgctcacccaggccgagggtgcctttgtggcctcactgattaaggagagtggcactgatgacttcaatgtctggattggcctccatgaccccaaaaaggatcacaactcctcatcagcaaggaaacaaaactggatagacaatgagtttgatgaattgacagaagtaggcttcagaaggtgggtaataacaaacccctctgagctgaaagagcatgttctaacccaatgcaagaaagctaagaatcttgataaaaggttacaggaactgtttcacgtgactcagaaagagagagactctgtttgcttgggcgaaagtaaggaaaaagaacaagagctgctacctggtaatacagagaattcttccagatcctgtccaagaacatcaaggcagtacctctatgagtatgcaagaaccacagtattactgggcttggagacaaaggagacacgttttatccgtggacccaaaactccggcgccggtcacagactgggaaggcagccttcccttggtgtttaatcattgcagggacggcctctctgatcattcagccacatttcaagggtgtcagaccatgcagggatgcctgccttggtccttcacccttagcggcaagtcccgcttttctggggaaggagcaagctgctccttgccaggctgagctaggtcccaattcttcctcagcctctgctcctccaccctataatccttttatcacctcccctcctcacacccggtccggcttacagtttcgttccgtgactagccctccccctcctgcccagcaatttactctgaaaaaggtggctggagctaaagacatagtcaaggagcttgctacaagtgccagaaatctggcagccaggccaaggaatgcctgcagcccagaattcctcctaagctgcgtcccatctggggaccccactggaaatcagactgttcaactcatctggcagccactccaagagcccctggaactctggcccaaggctctctga

SEQ ID NO: 115926 - DNA, 848 bp, Homo sapiens
gaactaaggggctccttccccagttaagggagacaaagaagagagtgaccattcagtgctcaatctcctcccatcgagctggggacccaggaaagaacaaggttggaagcaaagaagtcacaggatgctcgcacattaagatcagctcagttttgcaagattacccatgggttctagaaggcaaagccagtgagtgttgcacttgcatctctgggtctgagacaggcagatacaaagggtgtgagctggaagatggacactgtttcctgtactcacatgtaatagggattgaagaacagaagcagagaggtgtccctgcaatgattaaacaccaagggaaagctgccttcccagtccgtgaccggcgccagagttttgtgtccacggataaaacgtgtctcctttgtctgtctcagaaaatgaaaggaattgaaattaagagaagggagagattgaagagtggaaaggagaaagtgtggttgagggacagagagaggctggagaagagaacgattttgagggcttcagtatttaaaggagaaaagccggctgcaggagaaagagggaaggtatggtcatgtgactcaatccacgtgttgcaagagaaagggagcaggcctcagatatcagtcctctgcatcctcaatcacaggaaatacagtcccaggttctccgtgtggtccttaaagcctccatccatgaagcttgagggaagcaaggttcacaaggtagaaagctacacgaagacagaagaggagttcaaaagatactgggcagtcaccaagtgtgacaaatgcccaccaaatcatcaaaggcccttgttacctctccctaaagacacttcttga

SEQ ID NO: 115927 - DNA, 1161 bp, Homo sapiens
taaaacggccccacccttatctccctttgctgactctcttttcggactcagcccacctgcacccaggtgaaataaacaaccatgttgctcacacaaggcctgtttggtggtctcttcacacggacgtgcatgaaatttggtgccgtgactcggatcggggacctcccttgggagatcaatcccctgtcctcctgttctttgctccgtgagaaagatccacctacgacctcaggtcctcagaccgaccagcccaagaaacatctcaccaatttcaaatccggtaagcggctctttttactctcttctccaacctccytcactatccttcaacctctttctcctttcaatcttggcgccacaattcaatctctcccttctcttaatttcaattcctttcattttctggtagagacaaaggagacacgttttatccgtggacccaaaactccagcgccggtcacggactgggaaggcagccttcccttggtgtttaatcattgcagggacgcctctctgattatacactcacgtttcaagggtgtcagaccacgcagggacgcctgccttggtccttcagccttagcgacaagtcccgctttcctggggcaggggcaagctgctcctcgccaggccgagctaggtcccaattcttcctcagcctctgctcctccaccctacaatccttttatcacctcccctcctcacacctggtcaggcttacagtttcattccatgactagccctccccctcctgcccagcaatttcctcttaaaaaggtggctggagctaaaggcatagtcaagcggctgaagactgacactgcccgattgccttggaagcccccagaccatcatagacgccgagcttcgggtaactctcacagtggaagggtacagcctccctcccggctgccttcgtgggctcatgttgagtgtctcaggcttttccaggagcacggtgcaagctgtcagtggatctaccgttctgggatctggaggacagtggttttcatgtgcgtccgtgtgaagagaccaccaaacaggctttgtgtgagcaacatggctgtttatttcacctgggtgcagttacttcaggccatctgggcgtatacgtgcaagtcacaggggatgcgatggcttggcttgggctcagaggcctga

SEQ ID NO: 115928 - DNA, 723 bp, Homo sapiens
atggaagttcataaacacccgttcaatacattggccctacggcatgagagtggctgtgaattagtttgggcagaaaaacacaggaatcagattttcccatttccgaagtcaacagcttccccaaagcaatgggacacaggacgtcataactcagacgccaaacagcaggagccaggagggagggaagaaaggaacacaatggaaatggagacaaaggagacacattttatccgtggacccaaaactctggcgtcggtcacggactgggaaggcagccttcccttggtgtttaatcattgcaggggcacctctctgattattcacccacgtttcaaaggtgtcagaccacgcagggatgcttgccttggtccttcacccttagcggcaagtcccgcttttctggggaaggggcaacacgctttaaaaggattaaagcctgttatcactcgcctgctacagcatgggcttctaaaacctataaactctcctttcccttcccccattttacctgtcctaaaaccagacaaggcttacaagttagttcagaatctgcgccttatcaaccaaattgttttgcctatccaccctgtggtgccaaacccatacactctcctatcctcaatacctccttctactacccattattctgttctggatctcaaacatgctttctttactattcctttgcacccttcatcccagcctctctttgccttcacttag

SEQ ID NO: 115929 - DNA, 426 bp, Homo sapiens
atgaacactttagcaattggcaaatcaggcaggaatgggtttaacaacggagctggaaatgtagctgaaaatctactccacgatgaaagatcggaatgtggcacaagttcttttcaccgaatagctattttgctcgttaaaaggaaattgtggaatttgtcaggagcccaaacactgacacacacttctgacagcaagtgcctattccaaactatgggtacgtttgccaagcttattcaacaacaacgattagctgcaaagccaggaacttaccgagcacaaaattattggaacaaagcagggaggaggcaggaggcaccaaaggcagcttctccgtctccttggtgccaggttctcctgtctgctgtccggttcacacttgcctttataactaagactctgacagaactcactagcggaacctga

SEQ ID NO: 115930 - DNA, 964 bp, Homo sapiens
tcacaggctgcctgtgccaaaggcagaagctgcagtatcagcttctgtgagtgaggaatccgaggcacacggtaacctcccgagtgttggtacagtgggtggcctatccagatcctcagtcacccagtgctggcttcttagggaatgtgtcattgctgctgttgcagcaggcatacatctgatggtaaccgttctccgtttggagaagggttttggttctgtaagtgggagggaagcgaaacctgtaaacacttgtgatgaagcggtccagggaaggaacactctcaagggctgccagtggggattgttagtttcagcatggaaacttaacttttgacttttgacataggcaaagtttggggaacccagtttttaaatttttgagggcagttaaagtggtttagggctgatgtttttcacactgtccgggggccacatttgtggtaactgagtgacttaggacaagtcactttgtatctcttctgtcccaatttcatcctcggtaaaaatggcgatgctaattgtctgccccaagggtgggtgtgaggattacatgaggtaatgcattgtaaagcatctagcaccaagtgttaactgctattaaataataggtattaggatgtatgcagcttgacagcctgtgtagtaaattaacccacactggctgttttgtgaggggcatcatcctatgcctacagaaaggaataatcattagactaaatattcctagaaatcccaaacggcaggctcttcaaactcaagtggaaatgagacctcatcagagtattctcctgatccagtagagtgtggtgtgtggagtcaaagcctaggtttttgtccatccactcctagttggatgttacctaacttctttgagtatggttttttcgctggtgatatgaaatcagtatgtattttgctgcgttattgtggagcttgaataaaatagtaatgcatataaaaa

SEQ ID NO: 115931 - DNA, 588 bp, Homo sapiens
atgaggttgagggtgcctggggaagtaaaggagctggagggtgaccagagaggatggcgactggttagtagtatggatatcacatacctccaagagtgtggaaatcagttgtacgagtggttacccagatggccatgttcttctggtaaacgtgctaccttcacacaccctttgtgtatctgtgtcctgatctcctcttcttataaggataccagtcatactggattagggcccacaccaaagacctcatttaaccttaattacctctttaaagaccttatctccaaatacagtccacatgttgagccgagactcaagattccactcgcctcctctaaacacgcaggacgacctgaaatcatagcccttaatagagcaagtcaaccaacggtacagatggtcaagctcttgctcatgtgccctccgagcataggctacagaatggcgggcgccgtggacatggttattccgggtggactacatttcccagaagtcaccgcgctagggtcaccctcgagctctagatctttttccggtgtccgagctgctgtagcccctacgtggtttgaacccaagccaaggccttga

SEQ ID NO: 115932 - DNA, 981 bp, Homo sapiens
ggcaggtgcaaaaaggaaaacaaatttgcttgttttgtttctcagatgtcttttctgtcagagtgcatgttctaaaattagctgtggttgcttcttttcacttctttcacgcctttgttgctcttcctctgaagccactggtaaggctttttctgctctcaatgtctgtacattctttctttgtactgctcctttcacagcaggatcttccatttcagtgctaggcttcaaggaaggatgttttgcaggaggtccttctccttttccattgactattctgtttccttttccatgggaaggtccacgtaaaggctctgacactttcttggggacacacttagtagcaacactcaagacttcatcatccaatgcaggcaatgaatccacacacagttcatgcaaaatgctgactgcagattcatcagaaatttcaacatttcttattttcttatcaagagtaggaccaccaagagaattaagaaattcactctcagaagccttacctcgtttctcctttttaagtatcttctttttacgttccaaaatttgttgttgaatttttgtcaaatgatgagaaatagtgtaatcttctgcatctcgtccacacgtctttagtgaagacatcaatattttgcttaagaaggatattgacaataccttgtccagtgcttcaatatttgcaccatggaaatgcagtttttctgccagtgaggtgctctcactatacacagcataatggagagcagtgttgcggtagatatccttaaggtttggattggtgccatgttccagcagaataacagtgcaagcctcttccctgggctgagcccccgctatctgtgctgcttgttcagggcgtctaggtctccactcctgcgcgccaggcagcgctccacccccgcggcgtcgcccttgacagctgccctgtggatcttctgcagttcggagtcccggattcggtatccgaacccgtgtagacat

SEQ ID NO: 115933 - DNA, 1011 bp, Homo sapiens
atgcctgggcggcagcggctaagtctggcagttggccaggcggccaaaggacgggaactggccgttcaccccatcccagtttccacggagaactcaaccaccatggcccctgagaggaccctcaggcctgtcaggcagtccgcacagcagcggcaccagggtgaaaacctgctgctcgataccatcccggttaccatgaagagccagccccggcggcccctgcgttcttggaaggccaagtcattgcaacccctcaagtgggcgggcgatgcacttgaccctgaggacatcaggtaccaggcccgccagctcaggccggcatcggagctgcagctgcagtctagatgtggtgcaccggcagcaatagcgcggatactgaggccagacccccaggcggcaaaatcaggcgacgggccccgccagcagccgctcagtttcatccgtgtggatacagagtgcccagtgccagggcccaggatccagagagatgtacaagaggagcggaccttgagcccagggagcggcttccgggagccgggcagcaaccgccgtgcaggcgcgcgcccaacggcttttcaagtctcactcggtctgagaggtcggaggctgcgagtgtcgctgctgaaggctgtggtggaccgggctggatcgcggattgtggagggccagacggcccagggctctatagaacatgtctacacgggttccggataccgaatccgggactccgaactgcagaagatccacagggcagctgtcaagggcgacgccgcgggggtggagcgctgcctggcgcgcaggagcggagacctggacgccctggacaagcagcacagcccctgggatggggccttgcagggcaccgggcaccctcggagcggcggagccaaaaggactctcagctgttttccatccctcataattccctggctggagcagttggagaatttgagtgatttaactcacaaagttaagcatacacagtgttgtttttccaacgagcacgtttaa

SEQ ID NO: 115934 - DNA, 654 bp, Homo sapiens
atgaatgactttgaagctaggccaatagaaacttttcaaactaaaattcaaagagtgggaaaaacccagaatattcaagactatggaataattgaagaagaagaaagaatggagcaaaagaatgttagaagtaataacgtctgggaacttgccaaaattagtgatagacaccaactcagacatcagagctccaggcctttggactatgggacctacaccattggctttcctggttctcaggccttcagacttggactgtgtctcacttctggctcttttgggtctccagcttgcagatggcagatcatggaacttcctggcctccataataaggtctctccttctgccttatgcccctcagtagaattctttcttctgaagagacaaggactgaggttgctgtggacccatatggattcgctgccggtaacttgcgtaactcggatatctgccactgctaacatatttggtccacatgactcagataccttcctagtggccattgagctccagacaatcctcaccaactcagccctgacgggtagcaaggagccaagatccacccgaccacgaccacccctctgtcagcaggaagcagttacagaaaacagaagtcatccattttggatgacagaccttcatccaaagatttga

SEQ ID NO: 115935 - DNA, 549 bp, Homo sapiens
atggaagaagctacaacaaaatcttgccaagtacgggaactgtttctgacttatcaaagtgtgaacaagaggcacctctttccctcctcatccttttctgagggcgtcctcggaggcgggacagctggggactcacggagtcccgagtccgtgcaggggtggccaggtgagccgccgagtttaggggaggtgaccttgcagaccggccgggagccggaaggagaccatcccggcgagctgcgtgcagggcgcaagggacagggaacggcaacaaggacacagtcggaccaagtcaactcacgcctaccgcctcaccccaaccgccgcccccccaccacttacgcagacatctctttcatcgcttcctgcgtctcccctctccagcgagtgtttatcgctctggagtcctgttcttgctgttcccttctccccctgttcactttcctccggtcgctagtagctcgcttgctcgctcactttcccacttactatggctgaggcatccaaccgagtagtgaaaacaccacaaaaccggctctatttatacgc

SEQ ID NO: 115936 - DNA, 249 bp, Homo sapiens
atggcagaaggcgaaggggaagcaggcacatcctacatggctggagcaggaggaagagaaagcaaagggggaggtgccccacatacttttaaacaaccagatctcgtgaagactcactcactatcgcttctgagccaggagagaacactaagcaatgaaacacaggaggaaaaattaaaaacaccacctttaaattttggaaagtattttggagatacctgtgccctgctctctaaggagttcctgtag

SEQ ID NO: 115937 - DNA, 785 bp, Homo sapiens
tcaggatgtgatcatgtagaatagagtgggtattaattcctaagttactctaataacacgaatgagagtataactggccactttaggatctttaattcattggatcatcactgacacatggcagggtaattattagtatttattcccattttccagaggaagagactgaagcaagctgaccagattgagatcatactcagggggggggacctttagtcaaaccctggtgggcaggtggctttagagctgctagagtagaagttcttcctgtgggctctgtagcatcctgggggaatgagagtatcagaggtacttcacatcctacagtgtgtgggacagctccgcacagagaactgccctatccaaaatgcaagtggtacccagtgaacagaaacagggctgaaggacattggcagaggaggttgtggagtgagtctagtggctttgagagtggaggactgagagtaagagacatacaattaggtgacttgattgacagatatgaaatgcagattcttgagccccattccagtcttcctgaatctgaaactctgggggctattcacccctccataatctgtgctttaacaagccctccaggtgacccagattcacccaagggtggaaagccacctgcagagggagtgggaggggaagctgaaggagacagtgaagaagaaagaaaaggagatgactttgtggttactaggaaaccagaagaggatgtggctcttgtagctggtggtggaggagttgtagggagaaagggctgtggaagacgctga

SEQ ID NO: 115938 - DNA, 1344 bp, Homo sapiens
atgggggtacagccattgggtaaatacagctgttccaaatgggagaaattggccaaaacaaaggggctacaggctccatgcaagtctgaaatccagtggacaatcaaatcgaaaagctccaaaatcatctcctttgacttcatgtctcacatccaggtcaagctcatgcaaaacataggttcccataatcttgggcaggtctgcccctgtgactttgcagggtactgcaacagccacttgcaggtacttggctttatcccgaaaaaagagaggaagaaaaagaatgatcctatagatgaggtgaaggtcaggcaccagatggataccatggcctttagcctgacagtgcccacgttggccttgaagatgcccaacggactggatggaatgtccctctctccacctggggcaagggtccctctccactacctggaaaccgaattggaagacccatttgctttcaatgaggaagatgatgacctaaagaaaggggcaactgtgagaaagaagttgcagagcaagttggcccagaatcggcagcgccagagagagacagagattttaaaagttcgacaagagcactttagtccccctcctgcaccttcacagcagcagcctccgcagcagcactcccacctgtcacctttatctacttctttaaaacctccagcgccaccgcagggttcagtctgcaagtcacctcaacctcagaacaccagcctaccaatgcagggagtggcacccaccacacacactatagcacaagcacggcagttgtctcacaagaggcctctgcccctcctgccatccagtagggctcccactgtggacccacccaggactgaccggatcctcatgaaagccacagccttctctccacacttctcatgtataagccgactgcagagactggtgaaactgtgcacccagaaacatcagttggacactgatctgtttccccatttaggtttggactggtctgaagagagcggagaggaaccagaggactcagagcaggcctcgccctaccaggttgcatggtccatccgggaaaccctcagatatcaaagacatgcgtcagatgatgatgatgcggagagtaggagctccagggtgactcaactttgcacttactttcagcagaaatataagcacctctgccgcctggagcgggcagaatctcgtcaaaagaaatgccggcatacgtttaggaaagctttgctgcaggcggccagtaaagaaccagaatgcactggtcagttaatacaagaactgcggagagctgcatgcagtcgaaccagggctgatgaggaagtcaatgtgctgctctgcgacaacctttaa

SEQ ID NO: 115939 - DNA, 404 bp, Homo sapiens
actgctttatcataagaaaagatgcaggatttgtatggtcttggcctgacttaacagtaaacaacctggtgtcacagtaaacaacttggccaactcacgtcagcctcagtcattgcctgggatgggggagttttcatcatcagcctgaacactcaggctccctgtccagttcccatgcttcctcctgggccttttcactctggcctctggagcagttgttctatgatgaacactccagtgttgatctctttcttcgggctttgaaacccagtcctctctttctcctatagccttccccagtggagtctgatgtttcctctgtaccctacatactacagggctgagaaaaggggctacttccagacaattagcctgaagtgttcacatggaaatatctatgctta

SEQ ID NO: 115940 - DNA, 657 bp, Homo sapiens
tttttttttttttttttccttttcattaaaattttttagtcgtttttatgagataaattattttctaaaattattttttagtacagttttgctatatacccagagctcctgatatatatataccatttttattgtttttgagatattttacaattttagttttgactttggctttggagtgggttgctgagaacatagcagttgtttcactaatccccagtaaaaaccctactaggctattggttttccttcctactcttcaatgcagttagttaacatatttggacttctgaatctattttcaataatttccagttctttcaggcatcaaggttaacactcataggagctgccatgatcctctggagccaggcgctggaggatttcttgaggtgaggtccaattagctgggcatggccacactgggtctcaaccctttttctgtagggtgtctgaagccttggcagtcatctggtgaactcaagcagagctgctctgaagagatgggctggagtctagaggaaaatctggcccaggggctccccagagacacccagaaacctcaaagatttatcggtattggaatatgaaaatactcctgacaccagcggcaaaaaagccttggaagaccacttccacttccggtccgacttctag

SEQ ID NO: 115941 - DNA, 492 bp, Homo sapiens
atggagaaggggatgagttctggagaagggctgccttccagatcatctcaggtttcggctggtaaaataacagccaaagagttggaaacaaagcagtcctataaagagaaacgaggaggctttgtgttggtgcatgcagactggacaacccgagaagccttatgtgaatctaatccagagtatctaaacaaatccaaaaaaccagaaaccaggtttaatcccattttctcacaggtgcttttacaaggaggtgcaggttatcattctgaatccaaagccaaggagtataaacatgtatgcaaacgagcttgtcagaaggcaattgaaaagctgcaggccggtgctcttgcaactgacgcagtcactgcagcactggtggaacttgagagtgaggttctctcagttctcttgatttggaaccttgatgaatttgtgcaggggatattgaggtcttcagaagatcgacttgctgctcaaacttggagaagatag

SEQ ID NO: 115942 - DNA, 414 bp, Homo sapiens
atgggagagggtagggtaacatttacccttcagctcctgcttcagtggacaagctctgggccaggaggtgttacccttccacgtttcagctttgtgcctgtgcagaaggcaatcggcttaccactggcaccttcaccggggcagaaggggatcgtggctcatttgctgagtaaatatggagccttcaaagaatcagtagttataactacactgaacagttactccgtggcctttcgtatctccatgaaaaccaatcattcacagagatgtcaaaggtgccaatttgcaattgacagcactggtcagagactaagaattgcagattttggagctgcaccaggttggcatcaaaaggaactggtgcaggagagtttcagggacaattctggggacaattgcatttatggcacctga

SEQ ID NO: 115943 - DNA, 4492 bp, Homo sapiens
  misc_feature (1)...(4492): n = a,t,c or g
ccgagccctgaggcaggcggcggcggaggagccctcaaggcgagcagcgcgcgcgcggctgccgcgggactgctgcgggaggcgggcagcgggggccgcgagcgggcggactggcggcggcggcagctgcgcaaagtgcggagtgtggagctggaccagctgcctgagcagccgctcttccttgccgcctcaccgccggcctcctcgacttccccgtcgccggagcccgcggacgcagcggggagtgggaccggcttccagcctgtggcggtgccgccgccccacggagccgccagccggcgcggcgcccaccttaccgagtcggtggcggcgccggacagcggcgcctcgagtcccgcagcggccgagcccggggagaagcgggcgcccgccgccgagccgtctcctgcagcggcccccgccggtcgtgagatggagaataaagaaactctcaaagggttgcacaagatggatgatcgtccagaggaacgaatgatcagggagaaactgaaggcaacctgtatgccagcctggaagcacgaatggttggaaaggagaaataggcgagggcctgtggtggtaaaaccaatcccagttaaaggagatggatctgaaatgaatcacttagcagctgagtctccaggagaggtccaggcaagtgcggcttcaccagcttccaaaggccgacgcagtccttctcctggcaactccccatcaggtcgcacagtgaaatcagaatctccaggagtaaggagaaaaagagtttccccagtgccttttcagagtggcagaatcacaccaccccgaagagccccttcaccagatggcttctcaccatatagccctgaggaaacaaaccgccgtgttaacaaagtgatgcgggccagactgtacttactgcagcagatagggcctaactctttcctgattggaggagacagcccagacaataaataccgggtgtttattgggcctcagaactgcagctgtgcacatggaacattctgtattcatctgctatttgtgatgctccgggtgtttcaactagaaccttcagacccaatgttatggagaaaaactttaaagaattttgaggttgagagtttgttccagaaatatcacagtaggcgtagctcaaggatcaaagctccatctcgtaacaccatccagaagtttgtttcacgcatgtcaaattctcatacattgtcatcatctagtacttctacatctagttcagaaaacagcataaaggatgaagaggaacagatgtgtcctatttgcttgttgggcatgcttgatgaagaaagtcttacagtgtgtgaagacggctgcaggaacaagctgcaccaccactgcatgtcaatttgggcagaagagtgtagaagaaatagagaacctttaatatgtcccctttgtagatctaagtggagatctcatgatttctacagccacgagttgtcaagtcctgtggattccccttcttccctcagagctgcacagcagcaaaccgtacagcagcagcctttggctggatcacgaaggaatcaagagagcaattttaaccttactcattatggaactcagcaaatccctcctgcttacaaagatttagctgagccatggattcaggtgtttggaatggaactcgttggctgcttattttctagaaactggaatgtgagagagatggccctcaggcgtctttcccatgatgtcagtggggccctgctgttggcaaatggggagagcactggaaattctgggggcagcagtggaagcagcccgagtgggggagccaccagtgggtcttcccagaccagtatctcaggagatgtggtggaggcatgctgcagcgttctgtcaatggtctgtgctgaccctgtctacaaagtgtacgttgctgctttaaaaacattgagagccatgctggtatatactccttgccacagtttagcggaaagaatcaaacttcagagacttctccagccagttgtagacaccatcctagtcaaatgtgcagatgccaatagccgcacaagtcagctgtccatatcaacactgttggaactgtgcaaaggccaagcaggagagttggcagttggcagagaaatactaaaagctggatccattggtattggtggtgttgattatgtcttaaattgtattcttggaaaccaaactgaatcaaacaattggcaagaacttcttggccgcctttgtcttatagatagactgttgttggaatttcctgctgaattttatcctcatattgtcagtactgatgtttcacaagctgagcctgttgaaatcaggtataagaagctgctgtccctcttaacctttgctttgcagtccattgataattcccactcaatggttggcaaactttccagaaggatctacttgagttctgcaagaatggttactacagtaccccatgtgttttcaaaactgttagaaatgctgagtgtttccagtgtttccactcacttcaccaggatgcgtcgccgtttgatggcttatgcagatgaggtggaaattgccgaagccatccagttgggcgtagaagacactttacaacgacaacaacacaacagcttttgcaggcatctgttcccaacaactatctggaaaccacagagaacagttccccttgagtgcacagtccatttagagaaaactggaaaaggattatgtgctacaaaattgagtgccagttcagaggacatttctgagagactggccaggatttcagtaggaccttctagttcaacaacaacaacaacaacaacaacagagcaaccaaagccaatggttcaaacaaaaggcagaccccacagtcagtgtttgaactcctctcctttatctcatcattcccaattaatgtttccagccttgtcaaccccttcttcttctaccccatctgtaccagctggcactgcaacagatgtctctaagcatagacttcagggattcattccctgcagaataccttctgcatctcctcaaacacagcgcaagttttctctacaattccacagaaactgtcctgaaaacaaagactcagataaactttccccagtctttactcagtcaagacccttgccctccagtaacatacacaggccaaagccatctcgacctaccccaggtaatacaagtaaacagggagatccctcaaaaaatagcatgacacttgatctgaacagtagttccaaatgtgatgacagctttggcttgagcagcaatagtagtaattgctgttataccagtgacgagacagtgttcaccccagtagaggagaaatgcagattagatgtcaatacagagctcaactccagtattgaggaccttcttgaagcatctatgccttcaagtgatacaacagtaacttttaagtcagaagttgctgtcctgtctcctgaaaaggctgaaaatgatgatacctacaaagatgatgtgaatcataatcaaaagtgcaaagagaagatggaagctgaagaagaagaagctttagcaattgccatggcaatgtcagcgtctcaggtagccctccccatagttcctcagctgcaggttgaaaatggagaagatatcatcattattcaacaggatacaccagagactctaccaggacataccaaagcaaaacaaccgtatagagaagacactgaatggctgaaaggtcaacagataggccttggagcattttcttcttgttatcaggctcaagatgtgggaactggaactttaatggctgttaaacaggtgacttatgtcagaaacacatcttctgagcaagaagaagtagtagaagcactaagagaagagataagaatgatgagccatctgaatcatccaaacatcattaggatgttgggagccacgtgtgagaagagcaattacaatctcttcattgaatggatggcagggggatcggtggctcatttgctgagtaaatatggagccttcaaagaatcagtagttattaactacactgaacagttactccgtggactttcgtatctccatgaaaaccaaatcattcacagagatgtcaaaggtgccaatttgctaattgacagcactggtcagagactaagaattgcagattttggagctgcagccaggttggcatcaaaaggaactggtgcaggagagtttcagggacaattactggggacaattgcatttatggcacctgaggtactaagaggtcaacagtatggaaggagctgtgatgtatggagtgttggctgtgctattatagaaatggcttgtgcaaaaccaccatggaatgcagaaaaacactccaatcatcttgctttgatatttaagattgctagtgcaactactgctccatcgatcccttcacatttgtctcctggtttacgaagatgtggctcttcgttgtttaagaacttcaaccttcanggacagacctccatcaagagagctactgaagcatccagtctttcgtactacatggtag

SEQ ID NO: 115944 - DNA, 240 bp, Homo sapiens
atgagtagtattgatctcatttcaattgaaatgggctcattaaggccatgctggctgtggacggccttgcacgacaagacgctggccggcgtccgaggtctgcaggcgggcgcccgagcctgcggtaagcacgtgggcatcacttcaaagcaaaaggagcccttgtccatcactgttgaggtgaggaggaccatcaccaaagccccaggacaggaacgctacatcctctgcctgaagtga

SEQ ID NO: 115945 - DNA, 324 bp, Homo sapiens
atgagtagtattgatctcatttcaattgaaatgggctcattaaggccatgctggctgtggacggccttgcacgacaagacgctggccggcgtccgaggtctgcaggcgggcgcccgagcctgcggtaagcacgtgggcatcacttcaaagcaaaaggagcccttgtccatcactgttgaggtgaggaggaccatcaccaaagccccaggacaggccgttgccctgttcttggtgaactgcttgttaggaccaaaagtggcccacccctttctctgggacagtgcagagcaccggggccagaggctcaaagcacctccaagctga

SEQ ID NO: 115946 - DNA, 447 bp, Homo sapiens
  misc_feature (1)...(447): n = a,t,c or g
tgttgggcaattccgcatgagaataagactgcccttaccgcgtgagagtgcgtggctttttctccaccaggggttaattatgtacagtatatcataagtatgagccgatctttttccagtccattggaaatccgtttatttttagatgcctggatggggtactcattgatgggaatgacaaagggatatcaaaagttgtgtacagatcttgcaatgggagggatcgactcggccctttacaaatgagtgatagtacatggctaacgtcagaaattcataaccctctggctgtgggacagtatgtcaacaattgttccaatgacagagcagctaatgtctgttatcaggaatttgatgtgcctgcagttttccctatagaactgaagcagtatcttccaaacattgcctacagctatgacaaacaaagcccacttcgatgtgttgttn

SEQ ID NO: 115947 - DNA, 389 bp, Homo sapiens
tttttcaagatttctgattgtttattgaaatcatttaagaatagagcctggaaaactttcagtaatgttcctaggacatcttcatctgagataactttgtctttggattcctctggaacatatcggagggtcctgaaaatgggaaaagtttctattcactacccttcaactgataaaagccaaacttacctgcataacttctgggttcctggccttaaggaactataagcttattctcatgtgtgtggagggctggaaactaagttcagaaaagaattgtttgagggagttctagttagctaactcccaacacttcccacccaagtagtcagtacttatgaaaggcccattctataccacatgctgtggggtccttacattattccatt

SEQ ID NO: 115948 - DNA, 387 bp, Homo sapiens
tttttttttttttggcagaagaacacaaatttttattttcttttgttaatagccttgtaaatgtgtaaagggattcagtttgttttattccagttgggtctttgtcttctgaggatcatgattttgaccccactgctgagatgttggtccatgactatgatgatgaaagaactcaaactttggccacttggcttagcagggaaccaccttcaggcctcacatatgtcttttttttttgcctggaatactcttcatgggactggccttctcagacttcaggcctccgctgaagattgctgactgtctttccctgctaccctctggaagtgggccccgagtgttactctgtatctcagggctctatttgtttgttacactcatcaaact

SEQ ID NO: 115949 - DNA, 429 bp, Homo sapiens
ttgcgttcggcactgactggggagcttgtatctgggcaaaaatggaaactttttaaaaagactgcccttaccgcgtgagagtgcgtggctttttctccaccaggggttaattaggtgcttgaacttcctcagaaaagccaatccagggtttattttcatagttcatacaagtacttcacgtggttaaagaagcccatcccggctgtgagaatagcgtgcagtagctcgcgcgttaagaacgggcagaacgccactcaaaagcacgtcgggatggtgggtttcggattggggaccctccgatatgttccagaggaatccaaagacaaagttatctcagatgaagatgtcctaggaacattactgaaagttttccaggctctattcttaaatgatttcaataaacaatcagaaatcttgaaaaaaaaaaaa

SEQ ID NO: 115950 - DNA, 1076 bp, Homo sapiens
  misc_feature (1)...(1076): n = a,t,c or g
tgcaggaattcggcacgagcgaggccgagctcgccagccggatgtgtcgcctgttcttccctgttgcgttcggcactgactggggagcttgtatctgggcaaaaatggaaactttttaaaaagactgcccttaccgcgtgagagtgcgtggctttttctccaccaggggttaattaggtgcttgaacttcctcagaaaagccaatccagggtttattttcatagttcatacaagtacttcacgtggttaaagaagcccatcccggctgtgagaatagcgtgcagtagctcgcgcgttaagaacgggcagaacgccactcaaaagcacgtcgggatggtgggtttcggattggggtacagtatatcagaagtatgagccgatctttttccagtccattggaaatccgtttatttttagatgcctggatggggtactcattgatgggaatgacaaagggatatcaaaagttgtgtacagatcttgcaatggggagggatcgaactcggccctttagaaatgagtgatngtacatggctaacgtcagaaattcataaccctctggctgtggggacagtatgtcaacaattgttcccaatggaccggagcagctaatgtctgttatcaggaatttgatgtgcctgcagttttccctatagaactgaagcagtatcttccaaacattgcctacagctatgacaaacaaagcccacttcgatgtgttgttcttgtcgcacttagggacatcaatcaaggagaagagcttttttcaaactactacacaattgtcagctaactctgtgaatcagaaattattaggttttctactcagctattaattctaagtgttttttgttaatcacttctctgagttctacctgtaaaacaaatattttgagacttaattggaataggaatttcttatgtttttgttgatattatatttatgttccaatttcatgataaaagctacttgcttcattacaatttcaaatttgtaatgcaattccaagtttaattggttttcacctaaatacacaatagcttattaaattaaaacctactctttgaacttataa

SEQ ID NO: 115951 - DNA, 1014 bp, Homo sapiens
atgacacttgtttttttacgtgtaaatattcgcaaaacgcccaaactggtaactttggaacacgggttcacgcagaagaagggctgctgtctggggaggactgaaaccgggttcccgaagtcgggctgctctggggccacggagagaaggggagagacgtcgaggaagaggcagagctcaagtggacggaggatggaacacagaggcggccgggacaaaggggcaggccagacagccgtgacagagaaactaggggtccgctcctgggacgcggtctcgggggcgggttcgcccctgaggcccgtgacccttcgcccgcaaccagggctagcgcttgtgtgcgcccacggaacacccgagcgaccggagaaagaaaaagtggtcaaggggacctccttccactctacgcgcctctcattcagagaggtgaggtcaggaaaggggaaggacaagccccagagcaacagaagtcaggcggtgccaggaacactgagagcgggccaggggaaggcggccgagcgcggccccctctcctcccgggccggggcggcccgaggcctcgatccgccttccccgcgccgtcctggtcacggccccgcggggctgccatgcctggccgtctgctgcggggcctgtggcagcgatggcgccgttacaagtaccgcttcgttccctggatcgcactgaacctaagccacaacccgaggtacagtatatcagaagtatgagccgatctttttccagtccattggaaatccgtttatttttagatgcctggatggggtactcattgatgggaatgacaaagggatatcaaaagttgtgtacagatcttgcaatgggagggatcgactcggccctttaaaaatgagtgatagtacatggctaacgtcagaaattcataaccctctggctgtgggacagtatgtcaacaattgttccaatgacagagcagctaatgtctgttatcaggaatttgatgtgcctgcagttttccctatagaactgaagcag

SEQ ID NO: 115952 - DNA, 2521 bp, Homo sapiens
atggggggctcgcgctttggtttgggggcgagtgtccgattcgagctggcctacgctgcaggggaagagatcggcttcggagttggggctcccgggccccaggggcgaactaggtgctcagaacgcgagttcgttccagaaaagggtgttacgtttcgagttgtttggggcttcggagagccggttgggtctttgtcttctgaggatcatgattttgaccccactgctgagatgttggtccatgactatgatgatgaaagaactcttgaagaagaggaaatgatggatgagggtaaaaacttcagttcagaaattgaagacttagaaaaggttcaacaaaatacccaagaagaggaagagaaaaatccttatacccgggataaggacagtacagtttacctgcagttcagtattgtgacatctgctgagtccgtgtttatgccctggcttgaacaggaaggaaccatgcctctagaagatttactggcattctatggctatgaacctacaattccagcagttgcaaattccagtgcaaatagttccccaagtgaactggcagatgaactaccagacatgacactagacaaacgatggcgccgttacaagtaccgcttcgttccctggatcgcactgaacctaagccacaacccgaggaccctccgatatgttccagaggaatccaaagacaaagttatctcagatgaagatgtcctaggaacattactgaaagttttccaggctctattcttaaatgatttcaataaacaatcagaaatcttgactatgcttccagaatctgttaaatcaaaatatcaagacctactggcagttggaacatcaaggggtggaactgcttgaaaacagacatcaacagcaaagtacctttaaaccagaagaaattctttacaagactttgggtttcagtgttgcccaagcaactagctcattgatttctgctggaaaaggtgtcttcgttactaaaggattggtaccaaaaggcgcagtcgtatctatgtatcctggtacagtatatcagaagtatgagccgatctttttccagtccattggaaatccgtttatttttagatgcctggatggggtactcattgatgggaatgacaaagggatatcaaaagttgtgtacagatcttgcaatgggagggatcgactcggccctttagaaatgagtgatagtacatggctaacgtcagaaattcataaccctctggctgtgggacagtatgtcaacaattgttccaatgacagagcagctaatgtctgttatcaggaatttgatgtgcctgcagttttccctatagaactgaagcagtatcttccaaacattgcctacagctatgacaaacaaagggcgaacgagcagcgccgagcccagtccccggatggggcgcctgagccaatcgcagccgccgccgccaccgccgcggccacaaaacctccttgcaagttcctttcacctggttcattcctccacgtttatcgggacttggcttggtgctccacctcacatttcccaaaaaagcctcctgatgcctccccgactcacagtggacgggggcctgcactgtctgtcatcagatgcagaaatggaggttcagaaagtcaaaatgggggtcacgtagcagaagaggaaattcaggcacgcaaagagacacaaaagatgcagacacagaggaaaagaccatgtgaagaggcagtaagagggcagctgcctgcaagccaaggagagaggcctcagaggaatccagccctgctgacaccttcatcttggacttctaccctccaaagctacacaacacaagaggagcgaccaaaaaggaaaagacaaaaggaacacacgaaaaaacgaagaccaccacccacgcacccaacaaccacaacacatgagaacacacaaggacaacagcaaccacaagacaaggaacaaaaaaaaacagaacacagaaacagagagaagagcaatgcgagacaggcgcgacaaacgagacacaacacaagtaacaaacgagacacgacaaaaaagagcatagaaagaacacaacagaacacacaccaaagcagagaaaacaaaacagcaacaaacacacaaaaaaaaaagaaaacaaaaagaggaaaaaaaaaagagggaacaagaaacgcggaaacaacgaagacgaaccaagcggacgcaggaagcgacgagcacgcagaacagaccacagagagaggacgcaacgaaagacgagagcaagagagggaggaccgatccacaaagagcgagagagcgcacaaagagccaaagggaaagcacgccaagaagaacaacacgaaggaccagacaaaggaaagcaaaccagagcaaatcagagacaacaagaagaaagaaagaagtgaaagcaggagccagaatagacacgacacaggcaccagagaacaagcgaagccaggaaaagaaaacaggaagaaagcaaagagaaaaacggacacgcgaagcaacacgagagacagagcgaacaactga

SEQ ID NO: 115953 - DNA, 517 bp, Homo sapiens
caaacactcacgctttctagtaaaataatagattacatcatttatggtccttgctattttggtcagctacatagggtatattttgcacgccctttcagaacacagtgagggacacattataaataataggacaaaacgtggcatcatctaaatgttctctttcatattgcgaccatatgctgcgaaaagaagcatcgtatgcgtatcattattcctttttccagaggtttgtctttggaaaattttcaaagataggggcagtgattaccatgcagacttactttcttatttacaagatggaagggaagtacatgactttgaactgattcaccttagggacatgattagctttccaaaatgggctgccttctcagagcatcaacagaggagtatcagagaaaacatggagagtacaagagaggagactgcaaaggactcagtgcaaaacttacagggaaaatggaatatatgtgaccaatttattccagagctgacagatttggatgaagtggcttga

SEQ ID NO: 115954 - DNA, 402 bp, Homo sapiens
atgagaatattcaaaggaaaaacatgtcagaggcagagagaagagcagatgcaaaggcctgacacaggaacatgtttggagtgttgcagaagcaaagcagccggtatggttggagcaccttatgccatacaacagtgcccaccactgcgttgtggaggtggaaaacttcttgttcgtgttgggtggagaggaccagtggaatccgaatggtgggggatgagggaaggcaatgaggtggcctgttcagcaggaggagccgccgtgaccatgagcagccagcattcagcagccagggaatgggtgcaccggtctggtaaaggaatctgggctaatgaacaagagcacccaccacaatcccgtgaatggtttctatactccatccatctggtcaaccatagttga

SEQ ID NO: 115955 - DNA, 399 bp, Homo sapiens
  misc_feature (1)...(399): n = a,t,c or g
tccctcnnnnnnnnnnnnnnnnnnnnnnnntnnnnagcanaacacatttcttctgtctttattgtattgcttcaattggcaaatcatgcttgtattcattcatggggtacaatgtggaatgaggaaatcccactacttagcatctccactacctcagagagaccaattccacgtgaggtcccagaagtgttgatctaaacaagttgaccccatagaagtagcaagtagatcgatggtgaccaggggtcagagagtggcagagggagggaatgggaggggggttgtcagttaaaggaccaaagtctcagggaggaggaagaggttttgacatgtagtgcacagcagagtgaccagagtcaatgagaatgtgttgcattttgcaaaacacctgagagagtc

SEQ ID NO: 115956 - DNA, 412 bp, Homo sapiens
ccaatctaaatgcagggagacatttgatatggactctctcaggtgttttgcaaaacgcaacacattctcattgatctggtcaccctgctgtgcactagatgtcaaaagctcttcctccagtccagactttggtcctttaaccgacaaccccccattccctccctctgtcactctccagccccagttcaacatcgatctacttgctacttctatggggtcaactttttcagatcaacacttccaggacatcatgtggaattggtctctctgagatggtggagatgctgagtagcgggatttcctcattccacggtgcacacatctatcgaatcctcacattgtaccccataagtgtacaagcatgatttgccaattaaaataatactaataaagacataataaataccataaa

SEQ ID NO: 115957 - DNA, 522 bp, Homo sapiens
atggtcacgggcagcacaggtgggaaattgcaccagtcacaggcggcctgcaggccagccctgagctgcagggtcctcaaagcgctggcccagacgcggggtcactctcctgagcctcccgaccttcccatgggtcctttggagccctgggttttggagtttgtctttcctaagtgccgctcgcccggacgcggctgctgcaggacctcagccgaccgagtgcggccgcgtcccctgcaggccacccgtcaagggcacaggggagaggcgccccaagccacagagtcgcagagctgccaggagctgacccttcggggagtctgcccttctcaggcctgctccccaccctctatggctctcaattcctcccaagaagaatgttcctctaaaaggaggccgctggccacaaagggagatgaacaagccaagccccagttcaacatcgatctacttgctacttctatggggtcaactttttcagatcaacacttccaggacatcatgtggaattggtctctctga

SEQ ID NO: 115958 - DNA, 415 bp, Homo sapiens
catctccatttggtgttgtgaggattatgtgagctcatgcattcaatgctcttagctcagtggctgtcccatggtaagggttcagcgatgactccatggcagctttctaggggaagacaagagggaaggttggcggagaggaaagaaaggtctgtcctggccagtgttgctcatgggccgaatcagagaatactgaaattcatggtggcatttccaagagggtagagatgattttgaagtacgtaatatatgttgcctttattatttcaccgttcaaaaactttaattctatttctcattgaatttcaagttcctgtaaagcggagacagttcaacccccagtgaattaatgggtctcagctataagtatcaatggaacagctactaacatcacaaaaagagaggcagccagctg

SEQ ID NO: 115959 - DNA, 454 bp, Homo sapiens
  misc_feature (1)...(454): n = a,t,c or g
atgacttccggtcgaccacgcgtccgaggcagatgagcttacaagtattgaaataattactaattaatcacaaatgtgaagttatgcatgatgtaaaaaatacaaacattctaattaaaggctttgcaacacnnnnnnnnnnnnnnnnnnnnnnnnnnnnnnnnnnnnnnnnnnnnnnnnnnnnnnnnnnnnnnnnnnnnnnnnnnnnnnnnnnnnntttnnnnnnnnnnnnnnnnnnnntgcnnnnnnnnnnnagannnnnnnnnnnnnnatgggggcaaaaaaattttttttgggggggggtttaaaaaaannnnnnnnnnnaaaaaaannnntttnnnnnnnnnnnnnggtggtctgtggttgattatatttttttttgttggagagaatggattgttttggtgggggtggataaaaaaaatggagtggggggatgtaaaatatagtgggg

SEQ ID NO: 115960 - DNA, 1798 bp, Homo sapiens
cttcgcgtgcgcccacgcgttcgctagcagtcaacatgaaggctcttattgttctggggcttgtcctcctttctgttacggtccagggcaaggtctttgaaaggtgtgagttggccagaactctgaaaagattgggaatggatggctacaggggaatcagcctagcaaactggatgtgtttggccaaatgggagagtggttacaacacacgagctacaaactacaatgctggagacagaagcactgattatgggatatttcagatcaatagccgctactggtgtaatgatggcaaaaccccaggagcagttaatgcctgtcatttatcctgcagtgctttgctgcaagataacatcgctgattgctgtagcttgtgcaaaaaaggtttgtccgtgatccacaaggcattagagcatgggtggcatggagaaatcgttgtcaaaacagagatgtccgtcagtatgttcaaggttgtggagtgtaactccagaattttccttcttcagctcattttgtctctctcacaattaagggagtaggaattaagtgaaaggtcacactaccattatttccccttcaaacaaataatatttttacagaagcaggagcaaaatatggcctttcttctaagagatataatgttcactaaatgtggttatttttatattaagcctacaacattttttagtttgcaaatagaactaatactggtgaaaatttacctaaaaccttggttattaaatacatctccagtacattccgttcttttttttttttttttttttttttgagacagagtcttgctctatcgcccaggccggactgcggactgcagtggcgcaatctcggctcactgcacactccgccccccggggatcacgccattctcctgcctcagcctctccgagtagctgggactacaggcgcccgccaccacgcccggctaatttttttgtattttttagtagagacagggtttcaccgtgttagccaggatggtctcgatctcctgacctcaagtgatccacccaccttggcctcccaaagtgctgggattacaggcgtgagccacgtgcgcccggccacattcaggttctaatcaaagaaaataacccagactaaatcctgaaatgatacgatttatgccccaatatttaagtaaaaaaatataagaaaaggttatcttaaatagatcttaggcaaaatacccagctgatgaaaggcatctgatgccttcatctgttcagtcatctccaaaaaccagtagaaataaccacttttggttgggccattatgaaatttttaaagggagtagaataccaaatgatagaaacagactgcctgaattgagaattttgatttcttaaaagtgtgtttctttctaaattgctgttcccttaatttgattaatttaattcatgtattatgattaaatctgaggcagatgagcttacaacgtattgaaataattactaattaatcacaaatgtgaagttatgcatgatgtaaaaaatacaaacattctaattaaaggctttgcaacacaaaaaaaaaaaaacaaaaaataaacataaagaaaaaacaccaaaaaaaaaccgggggggcctttgtttagaaaacaacaattctttttgggggggggtgaagcgaaaaatttgtgggggggggacctgaaataaattgaaacactcggctatacaaaaagagggtggggaaaaaaatagttgggatcatctattttattctggcggggaatatctctttttgagggggggagagaatttaacaacaccctata

SEQ ID NO: 115961 - DNA, 522 bp, Homo sapiens
atggtcacgggcagcacaggtgggaaattgcaccagtcacaggcggcctgcaggccagccctgagctgcagggtcctcaaagcgctggcccagacgcggggtcactctcctgagcctcccgaccttcccatgggtcctttggagccctgggttttggagtttgtctttcctaagtgccgctcgcccggacgcggctgctgcaggaccacagccgaccgagtgcggccgcgtcccctgcaggccacccgtcaagggcacaggggagaggcgccccaagccacagagtcgcagagctgccaggagctgacccttcggggagtctgcccttctcaggcctgctccccaccctctatggctctcaattcctcccaagaagaatgttcctctaaaaggaggccgctggccacaaagggagatgaacaagccaagccccagttcaacatcgatctacttgctacttctatggggtcaactttttcagatcaacacttccaggacatcatgtggaattggtctctctga

SEQ ID NO: 115962 - DNA, 510 bp, Homo sapiens
atgcccaggttgattgaatccatggaatgcggagggcccactgtaattctaaaactacttgatatgcattctggggttgagcaagcctgctctaatatgaggttgctaaaaggtgtgcaaaggaagagtcatctttgcaataaaccaaagatgcagcatataagcaacaggccttctttgagagcccaaacccaaattaaggcacgaaattttagcactgtttggagactggagaaagggtacactcgccagcagcttagccacgagagtacactgaacaaacgagacagggtcatttataacctgacatgtccaccctactgccgtgtccagtttcaattggctggaacaggacctcacattttgtatttgtcccgattggctagcaacttagaactttttaaaagaggcaaaggcagaggagaacaaaggaagaaggaagtaacttgtggaatgctgagaaaggtaaaaacaccttcaaataaggaagaggaacaggctatgacctaa

SEQ ID NO: 115963 - DNA, 936 bp, Homo sapiens
atggttgggcccagagaaaagcaccatgagttccccctccagcccacaggactggcatcccagcccccaggcttcaggcctgccctgggcctgaagctttcccggatttgttatgatcagagccactccataccttctgtttactctgtgtggtttcacgggggagtggacgcttattcagccagcgagggcagtatcttcaggtcttcagaacaatctccagatgtaccacctctgttgcttcaggtcctgtggggttacagctttggatctggtcctctgtgctctggtagcactgcttattgccttagtccctccagccttgtggttccagcagcttcctgtgatagtgagatcttcaggaagcttacaatcatggcagaaggcgaaggggaagcaggcatgccacatggccagagtgggagtaagagagatgcggggaggtgccagcacacttttaaactggatcttgaccatcaaaccactcaacatgtcctggtagtagagacagaaggcagattggcgagcaacttagaaccttttaaaacaggcaaaggcaaaggagaacaaaggaaggagggagtaacctgtggaatgctgagaaagttaaaaacaccttcaaataaggaagaggaacaggatatagatatgctttcctgttttgaaatgcatcccgagtgtatctctgagtgcggaatcttgctcgggtaccgagctcgaattcgtaatcatcggggggaggaaggggaggaggagaaaagaaaacccacccaccgaaaaggaagagaattcaccataccaaaaaagttcacactcataaataatgacaggctatataatattaggctctaccattgcacaaatgagacaatggctggaggagtcaccggcattcatgcagaggaggaaattcaagaggtgggtattgaagaatga

SEQ ID NO: 115964 - DNA, 162 bp, Homo sapiens
atggagttagatgatgaatcaagccctggtcttgatgaaaaacttctttttactatggactttggctgtaagagggccacatcatcaaagaaagctgccatggagtcttcgttgaacccttaccatgggacagacactgagctaagagcattgcatgcatga

SEQ ID NO: 115965 - DNA, 427 bp, Homo sapiens
aaggttggctgcagttccggctacctgtgtagtccgagtttccacagccaggtactactccgccagtgaccctggacagtaacaaaacatataaagcccgagcccaaaccccgccaccatcataggtctgtagttactgtggaatcaataagccatggcatctaagaaatttgctgttaaatgtgggaattttgctgtcctcgtggatcttcatatcttgccacaaggttcaaacaaagatacaagctggttttctgaacagaagaaagaggaagtctgtttactgttaaaagaaaccattgattcaagagttcaggagtacttggaagttcgcaaacagcacaggccatcaaatgcagaattcacaagatccaatcccttgtccttaaaaggttatggctttcaaatcacagcctatttcctcaag

SEQ ID NO: 115966 - DNA, 1407 bp, Homo sapiens
atggggccctacagtggcatggggccctacagtgagctctccgtatctgtgttggaatggaatcagacatggaatcaggctgcccagggaaaggagctgtgggaccctgttgagaatccctggcagagctgtcactccgctccctctggtacttggcaggtgtttcagatgatcaatgagtgcatgagagaatgtggggacctttctacatctcttaagagttctgagtctgctccagagatggctttgtggtgtaccgtcctagccaatccttttgtccgtctaaaaatgcagtatcttatatctgttatttgctgcttagaagaaagaattcccctggctgtgcatggaatcattcttttgtggagcctacctagtactgacctatttaacttctctcgatgcttcacgtcttccaactgctgccgggatgcttggacatcccctttcaagtgtgggaattttgctgtcctcgtggatcttcatatcttgccacaaggttcaaacaaagatacaagctggttttctgaacagaagaaagaggaagtctgtttactgttaaaagaaaccattgattcaagagttcaggagtacttggaagttcgcaaacagcacaggccatcaaatgcagaattcacaagatccaatcccttgtccttaaaaggccctctgccttatctcaaggacagagggctttctgtatcccgggttcttgccttggtgtaccggaaatactggatcacacgtgggcttggagaatgggtgcaaggttttactgagtggaggtggctctccgcgagaatttcacgttatcccgctgtccatggcctgccggaatctgctggtgcctgtcagaacaacttcttccgttcctctgctcctcttgttgtccagccgcctggcttgatggaggcctttttgcccttcctccttctgccgtgtgaggatacagcattccttccctctggaggactcagtgttcaaggcaccatcttggaaacagagatcagactctcgccagacctgctggtgcctggtgccttgatcttggacttctcatcctccacaactcagctaactcttactccctgggggacatccctcacccacaaggtggctatccactcaggagtggccttggtagcatgtctttctcatgttgagccacataccattttgcagatagttctggggaatgcagggggatcaccgggcacaggctggtattgtcacacagatcggcatgcagacagatcatgtactctgggcatcgtgtaccaaggtaccttaccgagcgtccacccctcggatgctggctctgggttagatcttccacctacccatggcagatccctgagacagtcctttctagccaggcttcttagcccttcttttaaccattcctaa

SEQ ID NO: 115967 - DNA, 332 bp, Homo sapiens
ctgccagcgcctttaagcccgggctcgcgctctcggaccgtgctttcgccgcctgggagccgtccggcgcagcagtttctaggtccccactgtccccgccgtcccgccccttcgcgtcccgggaaccggttggcttccgagccgcactcgccgatcctccaggcatgccccgctacgagctggctttaatcctgaaagccatgcagcgggtgctggtctctgcatgtgttttgttggaagttggaaaatgtagacacgacccacagagtggtatggtatccagtgagaagggaactgtccgcagtggctttgaaggatatgaggaagcctag

SEQ ID NO: 115968 - DNA, 9486 bp, Homo sapiens
cggaccgtgctttcgccgcctgggagccgtccggcgcagcagtttctaggtccccactgtccccgccgtcccgccccttcgcgtcccgggaaccggttggcttccgagccgcactcgccgatcctccaggcatgccccgctacgagctggctttaatcctgaaagccatgcagcggggttggtacagtaggcttcactagacttagctgcaactcagaatttctcctccagcacctgagtaaatgctgatggtcttgtggagagtggattaagagtacgagctaagttctcaatcccaattaagaagcggaaaatttaaactgtcttcttcaaagtttatcacaaccaccaccatcaagacagcaaaccaaaggacaaagactttgaccctgctgtgttgctctgtgtagtccagttcacgtatggtttacagacttggctggggttactaaaaataaataaaaagttggacacttctgtcattggagcgctattattcacaagttaccagaatgagagctgtactggacacagcagacattgccatagtggccctgtattttatcctggtcatgtgcattggtttttttgccatgtggaaatctaatagaagcaccgtgagtggatacttcctggcggggcgctctatgacctgggtaacaattggtgcctctctgtttgtgagcaatattgggagtgagcacttcattgggctggcaggatctggagctgcaagtggatttgcagtgggcgcatgggaattcaatgccttactgcttttacaacttctgggatgggttttcatcccaatttacatccggtcaggggtatataccatgcctgaatacttgtccaagcgatttggtggccataggattcaggtctattttgcagccttgtctctgattctctatattttcaccaagctctcggtggatctgtattcgggtgccctttttatccaggagtctttgggttggaatctttatgtgtctgtcatcctgctcattggcatgactgctttgctgactgtcaccggaggccttgttgcagtgatctacacagacactctgcaggctctgctcatgatcattggggcacttacacttatgattattagcataatggagattggcgggtttgaggaagttaagagaaggtacatgttggcctcacccgatgtcacttccatcttattgacatacaacctttccaacacaaattcttgtaatgtctcccctaagaaagaagccctgaaaatgctgcggaatccaacagatgaagatgttccttggcctggattcattcttgggcagaccccagcttcagtatggtactggtgtgctgaccaagtcatcgtgcagagggtccttgcagccaaaaacattgctcatgccaaaggctctactcttatggctggcttcttaaagctcctgccaatgtttatcatagttgtcccaggaatgatttccaggatactgtttactgatgatatagcttgcatcaacccagagcactgcatgctggtgtgtggaagcagagctggttgctccaatattgcttacccacgcctggtgatgaagctggttcctgtgggccttcggggtttaatgatggcagtgatgattgcagctctgatgagtgacttagactctatctttaacagtgccagtaccatattcaccctcgatgtgtacaaacttatccgcaagagcgcaagctcccgggagttaatgattgtggggaggatatttgtggcatttatggtggtgatcagcatagcatgggtgccaatcatcgtggagatgcaaggaggccagatgtacctttacattcaggaggtagcagattacctgacacccccagtggcagccttgttcctgctggcaattttctggaagcgctgcaatgaacaaggggctttctatggtggaatggctggctttgttcttggagcagtccgtttgatactggcctttgcctaccgtgccccagaatgtgaccaacctgataataggccgggcttcatcaaagacatccattatatgtatgtggccacaggattgttttgggtcacgggactcattactgtaattgtgagccttctcacaccacctcccacaaaggaacagattcgaaccaccaccttttggtctaagaagaacctggtggtgaaggagaactgctccccaaaagaggaaccataccaaatgcaagaaaagagcattctgagatgcagtgagaataatgagaccatcaaccacatcattcccaacgggaaatctgaagacagcattaagggccttcagcctgaagatgttaatctgttggtaacctgcagagaggagggcaacccagtggcatccttaggtcattcagaggcagaaacaccagttgacgcttactccaatgggcaagcagctctcatgggtgagaaagagagaaagaaagaaacggatgatggaggtcggtactggaagttcatagactggttttgtggctttaaaagtaagagcctcagcaagaggagtctcagagacctgatggaagaggaggctgtttgtttacagatgctagaagagactcggcaagttaaagtaatactaaatattggactttttgctgtgtgttcacttggaattttcatgtttgtttatttctccttatgaacttaaggatatggtgagacactaacttaagacaatactgactggtctttggggaaaaaagttatgtaactgtgcatctctcaggcattgtttacgctgtaggttttagccaaattttacttagcagaaaatcatctaattacaagactttattttcccagagatggattaaagtaaatcttcaacttaagtgaagccaaacctaacagactgaattgtgcaaatgtggttttaaattttgcataccaaagtaagaagagaccaattattctcacagagcacttagagcagaatatatgttaagttaccatgaattaaggtatactgtctgcactgccaagtcttggcagaccttaccctgaagtagaagatttgctcatttctaaagttttttttctgtctctgtaatccctcctaccattaagaaaaacttatttcttagacattgtacaatcagttatgtactgaaaatcgaatgtgcttgtgtgatacttgtttcaggacaagttcatttgccaggttcattttgttagcatgagcctacggattctgatttcccaaagaaagaatgttttcctgtaggtatttttgtaccaccagtatatggaatgttagggaaaaactttgttccagttcctttttttttttctttctactttcaagtttaagtgaaccatactgaaatgaccaacaagtctgcctgtaaagttacatgtcatgattgtgttgttaaatgattatgggggagaaaatgaagtaaatgttgctgatgatccccatatttattgatcatattaaggttgtttatatagtttggaaatgaccagccccctaagcagtgtttgattaacttatgctaatcagatgattactcatatattctgctaattttctagctttattcttgttatttggaaaaattattagccaaatgccttcctaggtggatccagttggaagatatgtccagaaacctgaagaaaaattgacgctgcctttgtgtgctggattgctctacttgattagatcatgatatatcaaggttgaatttttagagggaaaatttaattctgatatcttattgcatccttgataagtttttccctgatttttttttcctccaaagactttccatctggacacagcctccacatttttgttgtagtgacttagagcataaggatgtttcagtgccaattccggccgtcggtaacagaaaactcagtgcatactttgctgttgttaggttgtcaatatagtctttctgtaggatggatagcatgtttgagaggtgccaaacaagaacttttggggttagtagtgtgtcttgtggagggtattacaggactgtgtaattataggactctaacttgacatggcttggcacccacttgcagctagtgggtacagggtacaaaagatgttagagaaaagctctacagattacgtacttctgtgtcttcgtatgctcaacactgtcctttgtcctccatgaaagatgaaggaagcaaattatgtatgtactttctttgaccttctttaatctctgatactttttagattgcatgattttactaggcttgtatttagggaaattactttcataaatacttttgtagattttgaatcaaaactcagtctttttaatttttttgtagtctataaactagtttcattatgatggacttgattagtccaaagttaattttagaaattgtcaggtagcatagtgtcttcccatgatcaggaggctttctgaaggactgagtctgtaaatgaaaaaataatttatgtatgaatagcatgtatttctgaagagcttagagtgcctcgtagaatttttctcaattttattcttgaggtttataatttgggggccaaatagatagagctcatcattttcttgtttggaagttgaggctgcgacatgtccaaggttatgaagtctcttttgggaagaacagaaaccaggtctccaaatctggactcatggtttgttcagatgtgtctggacaaatggttgtcaatgttttgtcctgttttttcaaaggaactgttcttcctttgggacaaccttttggtgtttgggaaagtaataagatcttggatttttcaaattaacattaagttgtaagaactaaaattttctttgaaccacactactgtgtaattcactgataattgacatattggctgggcagcctatctcttccatatccagcgtaaatgaataggaggtgtctgtgattttttttttctccctttatttaacattgagtcctagtagtttggagaattagggtccctctaccttctttctgctcttgtcttagtaagatacataaggtacatcatcttgtgtctgtgtgtatatagcagtaggtcaagtttagagtactaaagtctgtaaataaggaatgactattagcatattcattagaattgtttattcttgccagtataaacatcattttatttagactaaagtccctgaagcttgtctttcttattgctttccagtaaatagataatgtgctcgagtaagtttgtgaattgctgattgcaacttaattcagggaccagtcttcaatctatatttcattagaatgattgtccctggaatgatcatacatggactgtcttaagctagcaaaatgttcatactttacactgactaaatgggtcctaaatgatgacattggtctttagacattaacatgtgtatatttttatattagctcaagctaaggttcagaattgaagcttgatattgactagaatagctaaaagtcaaaatgaggtgaggacactggtcttggaaggtagagaaaaataaatgtcttaccaggtgttaatggtatccccagttcttagacttttgtcttctcaggcaattttcatctcaagatctgatgagaagggcatattacattggtatgcaggatgattattgcatattttgtgggacctctaatttccctggtcatctttcagaatattctgttctgccacccccagagagtaaacacttgagccgatttcttcttccccagctattctttcctgggggtaattatgctttgtctttagattagagaagcatcaagcaatagcaatggtgctgtgtccttcggcctaaattcaatagatctcatctcctagggcttccttttcacttggctcaaaggatccattgtattttggcacaaagagcctggccagggtcatgtagccatagctcttagggatgatacctcaagaaattagctgggacccatcactctgtgaaacttcacattttaagaactgagttgagggggttgttatgcacttctgtaacttgaggctaagcaaggggttaactcttgtgagagccaatagagtgtgtctgtattcgcagtccatggctcattttctttatagtaggcatatggatcttcccctctgactttgaatatcatttggtgtggcctgtgggttattttcattctttaccaccaaataaagcggcttattagctactcagttacttgctactcaaaggttaggtcttccctgttcctgcttggcagtgttaaagcttacagggttaacttatgatgattctcctggctcattttcatcagaggcatgatgactggaaagggatcacatgggtcgttggtggtgacacctcactgtttcctaggtttggatagagagatgtatacaagacctttcctgttaaattacgtgactacagagacttgccaggacaaaatttcctaagaaatcagaaaaatgattaagtgagataagtacctgggtgacacagatattagcccgttggtaaaagacaacaaatattagcttaaaatctgcatatgtagaatcattttcattagatttagagcttgaagcaccttggctctcagctactttaaactcctccccatataaatcagggcaccaataaataagtttcagctttttaaaccctggtttgatgttaagcattataaagtacgaagtttgttaccacagtagagataatttagtagaaaaatgctttgaggcttcagtatttgtaagattttgcattagccagatgctaggttgttgaaggcatttcagtgttgataatagcctgagcagacttctttacaaatgggatctgtttctatatgtgtatatgcccacttaccattcagagagactggtctttctctttgtctcccttcacattgctgtgtcagtcctacacctagtcttttcagcacttagcaaattcaaatttggattttttggtcagcttagttcactttaaggcatattggcatggtgtgtgaaagtgatgtttggccccagtattgaggacttttagatccaaataatgactcattaaatataattatgttttaagtatactgaatttctgttagcttaaaatgttaatcctcaggaatgatttcctcacactttgtgttggctaataataaaagcactgttttatcctcaaaactcctttttcaaaaattagggagagagcagtagtgatcatttatgtgagcccctttgaaatgatggtgtcagagtgcagagaaacaatggagttttgatgccaaaaaggtttttttgcagtaaaagtaaaaatttggaattagttggcatataaaggaacccttttgtactggaacgtatgaggctggattgtgaaaaggtaatctttcgattgctagacttggttaacttagggctgcaaatctttttcttctatcaaggtcacttaatatggaatgtttttgtcagactgtcctttgttggaatactttagctgttcagctactttgactcctaggagagaatttagttaaggttcaaagtaattaactggctttgccagtggtgagtcccacaccattattcacttagtagtcatataaatgtttttatttactctcttcaatgctgagaataaggctttaaattactgattcacctttaaaggaatgttgtgagaattgatgtaatttctgtttctgtttccatctaaacttctttataaaaagagggattagtttttttgttttggggtaagcacctaatttatccagtaaccaacaaccctaaccattggcatatatagtctttcactcagaaataaacaaaaactgtttggtatatctgtatcattgctaatcttgtgcactttactttttgggcagtaccatacatagtctgaggctattgacttaaaccaataactgtactttatgtaatgactcttaaatttggttacctgggttcacagcttgcttgaagagaaaggatgctagaataaagtaagcagctgaagagcgagcaaatcaagacaaaacacagtggtctcagatttttcgtagtgtgggaacagtggttttgctctataccactgaaaagcactataacataattgttgtccatgatactgaagcttttcccctcacttctaggttgtttacattcagagctctatcaataagaggaatacatattacagtgaattcgacaaccgcacaagttggcagtaggtatccccaacctaatttatcttggtaaattcaccctgtttcctagtgctgctggataaaagagtgtttactttttattgctcttagacagagtagtctagataagttttcaatttatcaacatagcctagacttctgtaagtggaatgttcattagtaactcatctttttgttgttataattggaaacagaaacgaggcttattgctattgcagaaatcccaaactggcaaaggccagtatatatggtattccataatataaccagcttttgaaatttatgtgtttggattagtgccttctggttaccagtattgactctgctagtttgcacctttccgttcttaacagaaaatttgtatttgttattcctcttaaattttgtcgtaactagtgaaggaagtaaaaaaaaaaaaaaaaacatgcattacattgacatactttatgtgcagcctttatttaggttcagtgaaaccaggtagttctgtatttgtgttgtagcctaaatgttgtttcttttatatccattaaaaacttaaagttacttatgttctgtgatcttaattttgttgtgtttccattgtaggttgataggtatatcgagaacaggtacgtgacaacagtttatattccatgatagaaagctaaagtccatagaaagcacaaaatcgtgttcacacattagtgtacccacacatagaaagcacaagactaatagtattctctgtatcccacaagtgccagtcataaaggccaccaggtatttgtctcagagttgctatgagcactacagtattgataagcccaagacaatgcggtatctaaactggtcctaatggtaagggacccaaaggaataatctcaataagtttgtaccacattgatggagggagagaatacaaatgtcaagaatgccaaaattatatttgggggttactagctaaaatggggtttgagggctttttactgcaacttgaaactggagaaatagggacagatgtctaggtttttggtgggtggaacaggtgacatatttctgttttaagctgtagtgtgattggggttttttgtaaaaaatcttaaatcttttaggaaatattacctcttaacagtgcccccccaaacatgcagaaagtcatactttaacagggcaaatactacttgtctttgattttttttgtgtacgtttgtatgtgagagatgaagttacctttatttttttcctatacttgactgtgcttcattttaataaaggataatttgatctga

SEQ ID NO: 115969 - DNA, 1440 bp, Homo sapiens
  misc_feature (1)...(1440): n = a,t,c or g
tttttttttttttttttcctacaatcaagtttattactcaaagcaaaagttgtcccatataattaccttggtccgtccatttttatttncccacatggttaccacaggctgaatgactagctcacaatcccaggaggtattataagttttgcctncttccaaaaaatggtgttactcgttgtaaaggggaaaagtcctccaatgacaaagaaattgacactaatgaaaacaaaatcaaggaacgatccactgggtactgcaaggttacagagaagctgtcagtgagcagttccccaccttttcgaaggcaaagggggatccaaggggcttaaaataccttagaaaaatcaaacaggcaccctgccaacacatggcttattttaaagggccaaactttgccaaattcttcccttctcgtccatgctgccccaaaatgtgaaggaatttacatataagggcctaaaatctgggcgaatcttctcacttcttcctcttctttggtggggatataattttttcctgcgagtggggactggggacaatccctttcaacattcttttaagttcctgggtccaagagggtgtttgaacaaaaatcccctcctaaatcaacatctaatatctcggagacaagtgctcccacccatgcctttcaaacagctgcggtgggttgccaataaaaatcccaccaagaaatacccgccctctgttgtgcttgctgacttgtgggcagagatcctattaaggaagcgctcgttcacccccaggttttcccaagtccctcactattgcttctctgtcccatcagggccctctatcgtacgtttcaaagtagcagcagtcctctggccgctgcatggctttttaggattaaagccagctcgtagcggggcatgcctggaggatcggcgagtgcggctcggaagcccaagcggttcccgggacgcgaagggacagtgacggcggggacagtggggacctagaaactgctgcgccggacggctcccaggcggcgaaagcacggtccgagagcgcgagcccgggcttaaaggcgctggcagctctctgcagtcctgagggtctcttcttggccatccatgatcctgtactcttggggttttcctttgtctccttggtccctgtgtctggctcctttttccccttctgtccctgaatgcgctgttcaaaggtggctagttggcagcagtacagcttggtggtcaagagcatggagccaaagccagaccgcctgtgtccaatgactgtgtacccttgaacaagtaactgaactctgtggttcagtttcctcatctgcctcactgacccgggtcttccctcttctactctcgggctcccagagtggtccttctcaaacagcatgttgatcagatcacatttctgtttacgtaaaactctaactgcctcctggaacgaggggta

SEQ ID NO: 115970 - DNA, 690 bp, Homo sapiens
atggggcagacagtctgcaaggagcaagaacttggctgggcaaagctttctagtcatgacatttttctctacaaagcttctgcagatgttgatcccttgtcttctggctttagtattgtggaagcaaaaagcatggccaaaggttccctgtcaccgctgtacccagttgaccaagccaaccctgccgtcactctcaatgccgcgttttccctcaccttccatacagaagcactgggccttgtaaattctttgctcttctacctgcctggaaataaacagggcataggccttgtgtaccccttcagtgaccctctttctgactcatgcaataagaaaaacctacacggcatggtcagtgagacagcccaccgatggctgtggctgcacccggcgaaattccaggtctttaacctcctggaaggcattgttggcagtgccaaaaccatgccaaacatctggtgcttgccctgcatgatcctggatggtttacatttgggaagcattgagtgccgtcgtgggatggggaaagaatggaggcaacgacctttctgtgctgacaaatacaatcccgtcgttacctggaaacctggtgattttccagaacacgtggaggagaatgaagaacttaatagccatttgcctgcaaaatatgccatcatggagcctggtgcttgtgaatctctgggttga

SEQ ID NO: 115971 - DNA, 283 bp, Homo sapiens
  misc_feature (1)...(283): n = a,t,c or g
cnnnnnnnnnnnnnnnncagaaagaaatttattttaaacattggcccaattagttgtttttatcaaaatttagtattatgggatcatgtcctgtcatcttcacaaatgtgagaaagtcttcagggctcaatcccatggttgcagcattggtcattggatgaaagtacaccttttcatgtccacctcggggtgctccacgacctcagtgtggatggccagggcaccgagccgctgctcgagcgccgctcccaactccgcgcccgccgtgtagccgctatcgtgg

SEQ ID NO: 115972 - DNA, 700 bp, Homo sapiens
atggcagcttcctccagggctgcaggcaccagcactacgctgccggcgtcggccgagatccctctgggcagttccgcctcaggcttcggtctgcgcagccgcgggaagccgtgccgtttttccgcccatcgccacgatagcggctccacggcgggcgcggagttgggagcggcgctcgagcagcggctcggtgccctggccatccacactgaggtcgtggagccccccgagctatttacagttgaagaaatgatgcctcatattcaacatctgaaaggagcacatagtaagaacttatttcttaaagacaaaaagaaaaagaattattggctggtgacagttcttcatgatagacaaatttaatttaaatgagcttgccaagcagttaggtgttgggagtggaaatctgcgatttgctgatgaaacagcccatgctagaaaaactaaaagttggtcaaggctgtgccacacccttggcacttttctgtgatggtggagatgtgaagtttgttctggattctgcttttctcgaaggtggacatgaaaaggtgtactttcatccaatgaccaatgctgcaaccatgggattgagccctgaagactttctcacatttgtgaagatgacaggacatgatcccataatactaaattttgataaaaacaactaattgggccaatgtttagaataaatttctttctg

SEQ ID NO: 115973 - DNA, 407 bp, Homo sapiens
ggatcaccttgagatgacaaagccaacctggctcatgataattcatttcagcacattattgacgcaaactagagagcagagaggcaggcaaaccttgctaaccaaacaaatatgctgccacccccaggacatcataagtcacctggggacaggatgtgctcctgaatcccttcagagactggatgtcctcaaaacagcccagttagaaggattgatgggtcgagctagtcacacaaatgaaaatatccatgtggacctcaaccggctgctgttgcttcctaagtcccttagtaattcataaacccaaatccaatgaatgctaaaatgacttgcagctgaagtctcgatcacactgtgctgaaacaacttggatgcataagtaaataaatcctctttcaaagctcaaa

SEQ ID NO: 115974 - DNA, 936 bp, Homo sapiens
atgccggatcggctgggcgcagtggctcactcctgtaatcccagcattttgggagccgaggtgctgtatgagaccacagaaggcctcatgttggaacacagatgggggaatgccaatatacaggctcacacatatagccaggtattggcaatggaccctaggtgtcccagagccctgaatttatctttacccaataatggaccccttgttcacgaactgtggaaaaggaatgcagagcagacaagtggcctgtacccaacaactgacaatggaacactgattagagcccgagagagggactgcattgggcccaagccgcctctgcccagcgctgctctgcacaatgctgatatagcaaatctagaaccatcctccccactcccccctcatctccaaccccgtgagaaagcctctgaagaaagatggcagcgaggtcatcctcaggaaggccctccccaagaaagtaatgtgagtattcaagatgggaaagacaagtcttggggagtgcaaatcaatcgagagaaacaagaacatctgggaaaaaaagttcccaaatccactatgagcaaggttcatgctgtcacatatactgtggctcttgagggtccagatgagaggtctctgacacggcccatgctctacattcaaccctcaggacaaccagtggttggtggtgaaccccttctactccacttagaaggatccaatggctgggagcatctgttgccagcccccagagaccatgcagggaccattctgtcggtccttcccaatgcctgtcaatgtgggacccctgtttgcatgaagccgagcacaaaccttgccacacagtattgcgagcccaacatctgggtgtccctctcactctcccacactcaagcatgcatccgtgtcacacactcaatccatgtcactcctccccacctgaggggatag

SEQ ID NO: 115975 - DNA, 1989 bp, Homo sapiens
atgggcattaaccatgacaatgaccacccatcgtgtgctgatggtcttcatatcatgtctggtgaatggattaaaggacagaatcttggtgacgtttcatggtctcgatgtagcaaggaagatttggaaagatttctcaggtcaaaggccagtaactgcttgctacaaacaaatccgcagagtgtcaattctgtgatggttccctccaagctgccagggatgacatacactgctgatgaacaatgccagatcctttttgggccattggcttctttttgtcaggagatgcagcatgttatttgcacaggattatggtgcaaggtagaaggtgagaaagaatgcagaaccaagctagacccaccaatggatggaactgactgtgaccttggtaagattctgaagcaagggattgtaatggtcccagaaaacaatacagaatatgtgagaatccaccttgtcctgcaggtttgcctggattcagagactggcaatgtcaggcttatagtgttagaacttcctccccaaagcatatacttcagtggcaagctgtcctggatgaagttgactcttaaatacattaaggtggctgcccacccccatggttcttggaacactcgtgtgccctgcttggttgctgtgttgttaacacctacctggctttcctactacatctctgaaaaaccatgtgccttgttttgctctcctgttggaaaagaacagcctattcttctatcagaaaaagtgatggatggaacttcttgtggctatcagggattagatatctgtgcaaatggcaggtgccagaaagttggctgtgatggtttattagggtctcttgcaagagaagatcattgtggtgtatgcaatggcaatggaaaatcatgcaagatcattaaaggggattttaatcacaccagaggagcaggttatgtagaagtgctggtgatacctgctggagcaagaagaatcaaagttgtggaggaaaagccggcacatagctatttagctctccgagatgctggcaaacagtctattaatagtgactggaagattgaacactctggagccttcaatttggctggaactaccgttcattatgtaagacgaggcctctgggagaagatctctgccaaaggtcctactacagcacctttacatcttctggtgctcctgtttcaggatcagaattatggtcttcactatgaatacactatcccatcagaccctcttccagaaaaccagagctctaaagcacctgagcccctcttcatgtggacacacacaagctgggaagattgcgatgccacttgtggaggaggagaaaggaagacaacagtgtcctgcacaaaaatcatgagcaaaaatatcagcattgtggacaatgagaaatgcaaatacttaaccaagccagagccacagattcgaaagtgcaatgagcaaccatgtcaaacaagggaatatctaataagtcgtgtgagtgctacaagccaggcaatagagagcaaagaaaaggccagtccccattggttgaatggagaagcccttctaggaggaatgggcgtggggctggctgtcaaggatccaggcacaggattctacaaatatcatgaggtgaaaatagaaagtgtttggtggatgatgacagaatggaccccttgttcacgaacttgtggaaaaggaatgcagagcagacaagtggcctgtacccaacaactgagcaatggaacactgattagagcccgagagagggactgcattgggcccaagcccgcctctgcccagcgctgtgagggccaggactgcatgaccgtgtgggaggcgggagtgtggtctgagtgttcagtcaagtgtggcaaaggcatacgtcatcggaccgttagatgtaccaacccaagaaagaagtgtgtcctctctaccagacccagggaggctgaagactgtgaggattattcaaaatgctatgtgtggcgaatgggtgactggtctaag

SEQ ID NO: 115976 - DNA, 513 bp, Homo sapiens
ttttttttttttttgcacatgtttgttttctttattgaaagacaatacagaaatgatgaaacaatacctcaagggtcttgaacatggatcaaatgacaagtctttaatgcaatggcacagaagcttctggcatcagcacctgcaagccctgttcagtcatcattcatgatcgccaaatactccttctggtgttcaaccagcttcaggaatacttggtatttcttatcatagtattttttatcctgtagtctcgggaacacaactttcccaactttgctcatttttgccattgcttccagtaatgtccgcatgcatttgcacaaaaaggggattcttgctgaggcctccacataggaaaagagtactgattgagtgccctgctgcctccatggcttctataatgaagcgagtccccaaagcaatggcttgaactgtggccaggtagagaatggcaagatcatcaaggtcctgagacagtttcaatccggtgaccatgccctttagtgtcagatc

SEQ ID NO: 115977 - DNA, 738 bp, Homo sapiens
atgtttgaagagaacctaaatcatatggaaaaagccagacagtcaaagatcctggagaagaccattcctgagagattcagaaaggccttaggcaggaggaaggttggcatgttcagccagcagcaagatggccagtgtgttcccagcatggccagcccaggtaggggagaaggtactagatcttctgctcccaaaattgccaacatcagtaagtctaccactcatggaatccacatcttttccaagggtactgaagaacccatggcttcctttaacctcatttccctggtaactcactccaacatggcctacagccctttggtagctcccaggccaggtcattacagtgagaattgggtgtttcccctggccacatgcaggcctggctgttgccagtgctgccacaagagaagtggtggccatgttggacaggatctgagaacccctggcagctctctcatacatgggccacttggggtctatgggaaacctttgtcttttggatctggacagactctggcagtgctggttgatcccagggattatgatgccagagcagcttcagctgttctgctgtctgattcatggccaataccagttctaacaggtctaacccaaagagtcagccagataggacagggagagcaacggccactatactatgataagaaataccaagtattcctgaagctggttgaacaccagaaggagtatttggcgatcatgaatgatgactga

SEQ ID NO: 115978 - DNA, 611 bp, Homo sapiens
gggcatggtcaccggattgaaactgtctcaggaccttgatgatctgcccattctctacctggccacagtcaaagccattgctttggggactcgtttcattatagaagccatggaggcagcagggccactcaatcaagtactcttttcctatgtggaggcctcagccaagaatccccctttttgtgcaaatgcatgcggacattactggcatgcctgtggtccctgtcgcaagaggtggagtccgttcttgtgtggtgctgctgttctgggtgcctgtgcctcaggggatttcgcttctgtacaggaagcaatggcaaaaatgagcaaagttgggaaagttgtgttcccgagactaccagaataaaaaatactatgatagagaaatacccaagtattccctgaagctggttgaaccccagaaggagtatttggcgatcatgaatgatgactgaacagggcttgcaggtgctgatgccagaagcttctgtgccattgcattaaagacttctgtcatttgatcccatgttcaagacccttgaggtattgtttcatcaattctgtattgtctttcaataaagaaaacaaacatgtgcaaccagaaaaaaaaaaaa

SEQ ID NO: 115979 - DNA, 494 bp, Homo sapiens
  misc_feature (1)...(494): n = a,t,c or g
nggctctgcccaaaggtaagatttagcaaagtggaagaatagatgatatgcttggatgccannnnnnnnnnnnnnnnnnnnnnnnnnnnnnnnnnnnnnnnnnnnnnnnnnnnnnnnnnnnnnnnnnnnnnnnnnnnnnnnnnnnnnnnnnnnnnnnnnnnnnnnnnnnnnnnnnnnnnnnnnnnnnnnnnnnnnnnnnnnnnnntgaagctgacttcttgtgttcttcatgctgacattagaaataggaaaagtcagtcgagtnnnnnnnnnnnnnnnnnnnnnnnnnnnnnnnnnnnnnnnnnnnnnnnnnnnnnnnnnnnnnnnnnnnnnnnnnnnnnnnnnnnnnnnnnnnnnnnnnnnnnnnnnnnnnngtccactccgtgctgcaagagggtgaaatggaacctcggatgttgtacacctttaaatgtccatgttcctntttnnttncgcgcnctactggcncntcagtnnnntncnaggtcatcagt

SEQ ID NO: 115980 - DNA, 596 bp, Homo sapiens
gcggggaattcaagcacagcagtcctgctctggttcttagaactataaactgactacacagctccctggcccgggaaggctatgaaacaggcaacatggacaatttaaaggtgtacaacatccgaggttccatttcaccctcaggcagcacggagtggacaagagatggggtctcactttgtcacccaggctgggctcaaactcttggcttcaagcgatcttctcgccttggtctcccaaagtgcatgggattacaggcttgaactactgtactcgactgacttttcctatttctaatggtcagcatgaagaacacaagaagtcagcttcaaaggcatccagcaatatcatctattctccactttgctaaatcttacctttggcagagccttcattgaacaagattggtacccatataaaagaaggcccgagagaggctagtcttgaccctcctaccatgtgaagacacaacaagggtaccggtctatgaaccaggaaattgggccccttcaccagacacctaatctgctggtgccttgatcttggacttcccagcttctagaacttgggaattaaatttctattgtttataagct

SEQ ID NO: 115981 - DNA, 303 bp, Homo sapiens
atgggcgacccagcccccgcccgcagcctggacgacatcgacctgtccgccctgcggacaggtattgagggcagccctgacctccaagaacttagtctagcagaggagacagataagagaatcaatcacaaaaatgtaattggtgtcacgaaagagtcagtacagggtattgtgggaggagaggattgtgaggggcacttcctggaggtgacattgtctcagtggaggtcgggaggcacaggcacgaggcatccaggtaaagaggaggagagtgatgaacagcatgtggagacccaggagtga

SEQ ID NO: 115982 - DNA, 489 bp, Homo sapiens
atgttgcgcaaatatggtggctcctactatagctatgtggatgcagaaagtaaaggacagtctccagaggacagctggaaacaccattctcatgcagcccacagcggccagcttcagagccaggtgaagttgaacgtggcccccgtggccgtcttccagatgctcaagtcgatgtgtgccgggcagaggatggcgagcgagccccaggactctgcggccgtgtctctgcacacgacgagcgtgcccgaagtcagagccgggcccattgtccctgccccagtggtcgggaggtcgtggttattggcttatctctggtggttggtgctctcccttgtttccatggaaagtgcccggccccaggaggcaggaaaacctcgcccacctcactgccaaccagagctcaggcccaagggaggaagggaccgagtcattactgaggggaagagaggaagctcagatggtgccaagctgaagggaagccagctctga

SEQ ID NO: 115983 - DNA, 629 bp, Homo sapiens
atttgtactttcaagtgctgagtcctggggacattcgatacatcttcacagccacacctgccaaggactttggtggtatctttcacacaaggtatgagcagattcaccttgtccccgctgaacctccagaggcctgcggggaactcagcaacggtttcttcatccaggaccagattgctctggtggagagggggggctgctccttcctctccaagactcgggtggtccaggagcacggcgggcgggcggtgatcatctctgacaacgcagttgacaatgacagcttctacgtggagatgatccaggacagtacccagcgcacagctgacatccccgccctcttcctgctcggccgagacggctacatgatccgccgctctctggaacagcatgggctgccatgggccatcatttccatcccagtcaatgtcaccagcatccccacctttgagctgctgcaaccgccctggaccttctggtagaagagattgacccacattccagccataagtgactctgagctgggaaggggaaacccaggaattttgctacttggaatttggagatagcatctggggacaaggggagctaggtaaaggaaaaggagttgggcgttgctaggctgaaag

SEQ ID NO: 115984 - DNA, 543 bp, Homo sapiens
atggggtttcaccatgttgactgggctggtctcgaacttctgacctcagacagagccgatttatcaagacaggataactgcaatggagaaagagtaattcacacagagctggctgtgcaggaaaccggagttttattattactcaaatcagtctccccaagcattcggggatcagggtttttaaagataatttggcaggccccagtgtgtgaaaaaacgatagttagatgccacgaactaggtggcaatgccttaaccccgagaggctacatgatccgccgctccctggaacagcctgggctgccatgggccatcatttccatcccagtcaatgtcaccagtatccccacctttgagctgcagcaaccgtcctggtccttctgggcccccaagggtgtcccagaagaggtaagagacaggccccagggcttctggatagaacctgaaacaaaaggtgctgaaggtatatgtcagacctcaggaaagacaccaccgaagactggatcacatgtccccactcaggaatacagaattggcacatga

SEQ ID NO: 115985 - DNA, 396 bp, Homo sapiens
gccacgggaactaccaaaactgcccggttgtgaggtcgcatgccacgcactcaagctatggcacctacgtcaccctggcccccaaagtcctggagttccctgtctttgttcagcctctagatctctgtaatcctgcccggaccctcctgctgtcagaggagctgctgctgtatgaagggaggaacaaggctgccgaggtgacactgtttgcctattcggacctgctgctcttcaccaaggaggacgagcctggccgctgcgacgtcctgaagaaccccctctacctccagagtgtgaagctgcaggaaggttcttcagaagacctgaaattctgcgtgctctatctagcagagaaggcagagtgcttattcactttggaagcgcactcgcaggagc

SEQ ID NO: 115986 - DNA, 398 bp, Homo sapiens
tttcccggtgattatagctctcaagtgcaattccatagcttgttcatcatcctggacagctaggatggactgggatgctggacagcagtggccatcaggtcatgtttcatcttctcgagcctgtggagccaaattaattgttcgatcgatttgagaggcagagcagcaatggtgctgtggctcaccacagtcactgcccagggcccaccaggaactgatgtccacttccctaacagccggacctggggaccctgatgtgagcatctgctcgactcagcagcttgtcaggacaggctgggtgaaaagtcctgtccccagggctgtgtgcttgcatttcagactgtccatttctttgtggacagagctcctgtcctctgcacctgtctggtatacagagg

SEQ ID NO: 115987 - DNA, 1011 bp, Homo sapiens
atgggtggaccagggacctgtagccctgggaatgcagccctcgagcctctagatctctgtaatcctgcccggaccctcctgctgtcagaggagctgctgctgtatgaagggaggaacaaggctgccgaggtgacactgtttgcctattcggacctgctgctcttcaccaaggaggacgagcctggccgctgcgacgtcctgaggaaccccctctacctccagagtgtgaagctgcaggaaggttcttcagaagacctgaaattctgcgtgctctatctagcagaggaagtaccaccaacgaccccttgtacagggtcttgtcagtgtttcaaaaggcctgaaggtgtgtttctcagttcctgcaaatacactggacagatgcagcccacaattggcttcagaacacagaaggctctgaagtcagttgggtccatgggcacattgaaggcagagtgcttattcactttggaagcgcactcgcaggagcagaagaagagagtgtgctggtgcctgtcggagaacatcgccaagcagcaacagctggcagcatcacccccggacagcaagacaggtgcagaggacaggagctctggccacaaagaaatggacagtctgaatgcagcacacagccctggggacaggacttttcacccagcctgtcctgacaagctgctgagtcgagcagatgctcacatcagggtcccaggtccggctgttagggaagtggacatcagttcctggtgggccctgggcagtgactgtgcccctgaagaagacagtgcaaccttaccctctatcctgtcttcgccttctcttcctcgaagactttctctgaatagggccatccatcctccaaactgttcccagatccttggttttaaagttagggtgtttgatctgcctgacgttgactgccctccttggctgtccctgctggatgcaatcctcaaccttcaaggcttagtggctcctctgagaacacctttctcaggcatgcatcaggagtcctga

SEQ ID NO: 115988 - DNA, 702 bp, Homo sapiens
atgagagaaggtggactgcagaccaatggcccgctttctggtttaggtggcagagtggctgatgatgccacatttgaaggtaggatacaggagaaagactggggccttgggggtgcacgaggacttctccagttctccaacaatgtttccaggctacaaactgctgctgcttcacacagagaagacagccggctgttagcgagagacttcttattcagaaccttgtatgatgaggctcgtttatccctaatgagaggccagctctccaagggcaagctccatgaaggcagacagtgcgtctccattttgatgaaggcttgcagtcaaggtcctcagtgtgtgttagagaggcatagagctctgcaaggaccacgatactctctggctactgatatggcccatggtcttggaggtgacaacgtgggtagtggactcgtccagggcatgtatccttgtgcaaaatccctttccttgggcgcgttccccccagggccctatccaatgtcaacatatcgtccgtggcactacaggccttccgtgagttcggcccaaggacgtgcgtccttggacatctccgtggaccctcagtgtattccaatcgcggccttcaagaccttcccccaagatgtttctcggggaatttacaagggccgtataggcccaatccggtggccccggaggccttatacaagattcgtttag

SEQ ID NO: 115989 - DNA, 1305 bp, Homo sapiens
atgcatattgaaaaccagccgcatacccagcaggtcaccaatccagaaaaatccatagcccaaggggatatcattgatgaattacagacaagttgcctatcagcaggaatcctggattggattagagaatcctcataccatgctggcttttctaaagaagatctggctctcagagaggaacaaagatgcctgaacacatgcactctccggggcctgctcctgaagctggtcacagagaaggaagacacaaagattaacactaaagaggtagatgaagaaactaaaaagggaaaaagcaatagtaaatttgaaagaaatagcagctgcaacagcaggcatatcaatctctggctggaggagggtttgcaagaggtaaaaatgcagacaaaggctcacgcagaaaaggactgccacactctggatgggaaaagagtgtactctattgtgagggctgtttcttcagttacagaggttggcgaccagttacccagcggtcaccataatgaaaacacacagatgtttccacctgtacagcaagagacacaagacgcaatggcaagacctacaatcttcttaggaaccacacggcacctactgagccagtcatctagctcacaaataatgacatcactcctctgtccacaatgtaagggctggctaagctccttcaacaatccattagccacacattctggacagtgccttttccaagcaaagatggtccataagatggtccatttggaaacacaaaacagagtcttctcaggcatcagattgtccaagcagccttgggaaatgaatgcagtaggacggggccagagggcatgggatcctgacgtaggaaagccacaggaccaagacctggaggaagcagtaagacatagcagtacgattgaaagaaagaaagaaagaaagaaagaaagaaagaaagaggaaatgggagtaattgagattcaaacttttatacagagagagtgtgtgtttgtggacagagagaaagacaggcagagagagagaatacgactcagagccatgcttcttaaaacaggaagaatcattaaaattagcaactcagcactaaacagtgagcagaaccacaaggattccatagccattgagattataccacaggttccctgtgccagcattttcttccacctgctcccctggatgtcagtctacatcatctcaccagtcggcctatgtcatctcactagtcagcctgggcagctgcttcgtgtaaaaatcacatcaccaaagcatttggagcacaagtattattcttcaccaagaagagcaatttga

SEQ ID NO: 115990 - DNA, 461 bp, Homo sapiens
gaattgaccggctgtacgaattcggcacgagctccggatctcgtttttactgctctttgtccttagcctctgtggccctgtgacctgtaggtatttggagatccacagctaggacgccaggaccccctggaagcttagaaatgggatcgttgacatttcgggatgtgaccatagaattcgctctggaggagtggcaatgcctggacatggctcagcagaatttatataggaatgttatgttagagaactacagaaacctggtcttcctgggtatcgctgtctctaagctagacttgataacttgtctgaagcaagggaaagagccttggaatatgaagagacatgagatggtaactaaacccccaggtatgtgagagtgaatacaagaaacaacacaaataagaggtccagaggtccaggagaaagccagttctcaaaatgtgacctgagaagctgtgctc

SEQ ID NO: 115991 - DNA, 834 bp, Homo sapiens
atgcaactctccccgctgagcagattccaggcaggagaggaaagtgacatcatctgcttctgggctcagcaatatgttaccattcatcctgtggatggggtccagctgagtccaggtaaagagtcatcctcatccctgttagctgggagcagggataaggctggatctcacatcccgtgggtgcgggaccagggctcggcaaatgtatacataaaatcacacctgcaagaaggtccagcggttagatttacaattctgcacgtgtccagctttaggtatgagagtcaacacctcctatccaggtatgcagctaatcacgtgcctctgagctgggtccagaaatcagtcactgttcaacttgtttccagtgtacacatgacagtcagacttttcactgtggactgcatctgcgtgtgggttcagaagctcaccagtgtgcttctttcatgtttggaagtgacaatccaattgttggcttggtatgcctcaatggatgaaaaaactgatgaagagaagacacatttggttcttacttaccttcacttccactcactatttgtcagtgtggatagagctgagaacagcatttcctggcaggacagccacttgtcagcaataaacaacacactgaaagaaagatatcggacccggcctctcaccatttctaagcttccagggggtcctggcgtcctagctgtggactccaaatacctacaggtcacagggccacagaggctaaggacacagagcgtaaaaacgagatccggagctccagctggaaccagaaacaacggccccgcacatcccacaagccgccctttccgctccagctga

SEQ ID NO: 115992 - DNA, 417 bp, Homo sapiens
ccgccaccaaaatgcagattttcgtgaaaaccctcggatacgatagaaaatgtaaaggccaagatccaggataaggaaggaattcctcctgatcagcagagactgatctttgctggcaagcagctggaagatggacgtactttgtctgactacaatattcaaaaggagtctactcttcatcttgtgttgagacttcgtggtggtgctaagaaaaggaagaagaagtcttacaccactcccaagaagaataagcacaagagaaagaaggttaagctggctgtcctgaaatattataaggtggatgagaatggcaaaattagtcgccttcgtcgagagtgcccttctgatgaatgtggtgctggggtgtttatggcaagtcactttgacagacattattgtggcaaatgttgtctgact

SEQ ID NO: 115993 - DNA, 723 bp, Homo sapiens
caattgtaatcgactccctatagggcaaaacttttttttttcttcttctttttttaggttcatgtcttttattacctcatacaggtaacttggtctttctggtttgttgaaaacagtaaagtcaggacaaccatttgccacaataaatgtctgtcaaaagtgacttggccataaaaacccccagcacccaacattccatcagaaagggcactctcggacggaaggcggacttaattttgcccattcttcaatccaccttaataatatttccagggcaagcccagctttaaccttcttttctctttgtgcttaattcttccttggggaagtggtgtaaagacttccttcttccttttccttagcaccacccacgaaagtctcaacacaaggatgaaggagtagacttcctttttgaataattgtagtcaggacaaagtacggtccatcttcccagcctgcttgcccagcaaaagatcagtctctgctgatcaggaggaaattccttgccttatcctgggatcttgggccttttacattttctatcgtatccgaggggttcaacctcgagggtgatgggtcttcccccgtaaaggttttgccaaaaagtctgcattgtggtggcggctccacctgaggttgaggaaaaggaagagacaggttaggtcagggatcacaagagaagcgaccatagggtgctaacccgagagcagccgaaggtcgagc

SEQ ID NO: 115994 - DNA, 864 bp, Homo sapiens
tttccgggtcgacccacgcgtccggcttccgggttttgcggggcctttgtctctgcagccgtagctccaggtcttgtcttcactgctgtgtgtcctctgctcctagaggcccagcctctgtggccctgtgtcctgcaggtattgggagatccacagctaagacgcccgggagcccctggaagcctagaaatggccagaaaaactgggaaaaacaggctcttccacttactggatgtttgacaaaatatccttcttgggccaaaaacattgacatcattggggccattgcaatttagagacgtggccatagaattctctctggaggagtggcattgcctggacactgcacagcggaatttatataggaatgtgatgttagagaactacagaaacctgggctttcttggtattgttgtctctaagccagacctgatcgcccatctggagcaaggaaaaaaacctttgactatgaagagacatgagatggtagccaacccctcagttatatgttctcattttgcccaagatctttggccagagcagaacataaaagattctttccaaaaagtgatactgagaagatatgaaaactatggacatgacaatttacagtttaaaaagggctgtgaaagtgtagatgagtgtaagataattcacactggagagaaaccctacagatgtagagaacgtggcaaagcttttaaccacccctcaccccttttttcacataagaaaattcttattggagagaaaccatacaagtgtgttaaatgtggcaaagccttcatttcatcctcaacccttattaaacatgagataattcatagaaactctacaaatgtgaagaatgtggcaaaattttaa

SEQ ID NO: 115995 - DNA, 820 bp, Homo sapiens
ggcacgagtggcccacccacattcctggccctggcaagtcagtctcagaacaaggtttggaaagcacttctgtggaggcaccttaatatccccagagtgggtgctgactgctgctcactgcttgaagaagtcctcaaggccttcatcctacaaggtcatcctgggtgcacaccaagaagtgaacctcgaatctcatgttcaggaaatagaagtgtctaggctgttcttggagcccacacaagcagatattgccttgctaaagctaagcaggcctgccgtcatcactgacaaagtaatgccagcttgtctgccatccccagactacatggtcaccgccaggactgaatgttacatcactggctggggagaaacccaaggtacctttgggactggccttctcaaggaagccccagcttcttgtgattgagaataaagtgtgcaatcgctatgagtatctgaatggaagaatcaaatccactgagctctgtgctaggcatttggctggaggcactgacagttgcaaggtaagaaaaggtcaagagaccaaagttagtcttgtgctctcccttcttggtctcagccccttagacttcagtcccaaagaggcaaattctagaaggatttgtcaacgttagaccccagtctaagtgttgtttagaaactgcctagatctgtccctgaatgcgtattcagatcatctaaggggatgtcttggggcttgagttccagatcggtagcaagggagtattaagtgccgtaactacctcaggccactcaccctcctggggtgtgctggtggccagggactaaagtggtgacc

SEQ ID NO: 115996 - DNA, 2756 bp, Homo sapiens
aacaacatcctgggattgggacccactttctgggcactgctggccagtcccaaaatggaacataaggaagtggttcttctacttcttttatttctgaaatcaggtcaaggagagcctctggatgactatgtgaatacccagggggcttcactgttcagtgtcactaagaagcagctgggagcaggaagtatagaagaatgtgcagcaaaatgtgaggaggacgaagaattcacctgcagggcattccaatatcacagtaaagagcaacaatgtgtgataatggctgaaaacaggaagtcctccataatcattaggatgagagatgtagttttatttgaaaagaaagtgtatctctcagagtgcaagactgggaatggaaagaactacagagggacgatgtccaaaacaaaaaatggcatcacctgtcaaaaatggagttccacttctccccacagacctagattctcacctgctacacacccctcagagggactggaggagaactactgcaggaatccagacaacgatccgcaggggccctggtgctatactactgatccagaaaagagatatgactactgcgacattcttgagtgtgaagaggaatgtatgcattgcagtggagaaaactatgacggcaaaatttccaagaccatgtctggactggaatgccaggcctgggactctcagagcccacacgctcatggatacattccttccaaatttccaaacaagaacctgaagaagaattactgtcgtaaccccgatagggagctgcggccttggtgtttcaccaccgaccccaacaagcgctgggaactttgcgacatcccccgctgcacaacacctccaccatcttctggtcccacctaccagtgtctgaagggaacaggtgaaaactatcgcgggaatgtggctgttaccgtttccgggcacacctgtcagcactggagtgcacagacccctcacacacataacaggacaccagaaaacttcccctgcaaaaatttggatgaaaactactgccgcaatcctgacggaaaaagggccccatggtgccatacaaccaacagccaagtgcggtgggagtactgtaagataccgtcctgtgactcctccccagtatccacggaacaattggctcccacagcaccacctgagctaacccctgtggtccaggactgctaccatggtgatggacagagctaccgaggcacatcctccaccaccaccacaggaaagaagtgtcagtcttggtcatctatgacaccacaccggcaccagaagaccccagaaaactacccaaatgctggcctgacaatgaactactgcaggaatccagatgccgataaaggcccctggtgttttaccacagaccccagcgtcaggtgggagtactgcaacctgaaaaaatgctcaggaacagaagcgagtgttgtagcacctccgcctgttgtcctgcttccagatgtagagactccttccgaagaagactgtatgtttgggaatgggaaaggataccgaggcaagagggcgaccactgttactgggacgccatgccaggactgggctgcccaggagccccatagacacagcattttcactccagagacaaatccacgggcgggtctggaaaaaaattactgccgtaaccctgatggtgatgtaggtggtccctggtgctacacgacaaatccaagaaaactttacgactactgtgatgtccctcagtgtgcggccccttcatttgattgtgggaagcctcaagtggagccgaagaaatgtcctggaagggttgtgggggggtgtgtggcccacccacattcctggccctggcaagtcagtcttagaacaaggtttggaatgcacttctgtggaggcaccttgatatccccagagtgggtgttgactgctgcccactgcttggagaagtccccaaggccttcatcctacaaggtcatcctgggtgcacaccaagaagtgaatctcgaaccgcatgttcaggaaatagaagtgtctaggctgttcttggagcccacacgaaaagatattgccttgctaaagctaagcagtcctgccgtcatcactgacaaagtaatcccagcttgtctgccatccccaaattatgtggtcgctgaccggaccgaatgtttcatcactggctggggagaaacccaaggtacttttggagctggccttctcaaggaagcccagctccctgtgattgagaataaagtgtgcaatcgctatgagtttctgaatgggaagagtccaatccaccgaactctgtgctggggcatttggccggaggcactgacagttgccagggtgacagtggaggtcctctggtttgcttcgagaaggacaaatacattttacaaggagtcacttcttggggtcttggctgtgcacgccccaataagcctgggtgttcttatgttcgtgtttccaaggtttgtttacttgggattgaggggagttgatggagaaattaattaattgggacgggagacagagtgacgcactgactcacctaggaggctgggaacgtggggtaggggatttagcatgctggaaataactggcagtaatcaaacgaagacactgtccccagctaccacgtacgccaaacctcggcattttttgtgttattttctgactgctggattctgtagtaaggtgacatagctatgacatttgttaaaaataaactctgtacttaactttgatttgagtaaattttggttttggtcttc

SEQ ID NO: 115997 - DNA, 633 bp, Homo sapiens
agaaaccttggagattcattttaaggcttatagcctggggcttccaacgatactctgggcagggatggaagcctagatgcctcaccgcaaggagcggccgagcgggtcctcgcttcacacacacggcagcaccggcaccgcggagggaggaaacatgtcccggctgtctctcacccggtcgcctgtgtctcccctggctgcccagggcatccccctgccagcccagctcaccaagtccaatgcacctgtgcacatcgatgtgggcggccacatgtacaccatgcagcctggccacgctcaccaagtaccctgactccaaggataagccgcctcttcaatggcactgaacccatccgtcctggacagtttgaaagcaacattatttcattgaccgggatggggagattttccgctacgtcctgaagcttcctgcggacgtccaagctgctgcttccggatgactttaagatgggagcctcagatgccaaaacgcagatgtgccaactaactataggctcgttgctaagcagagaaacctatcaagtttgtccagcaaattcgattgtacagtgggatggcgtctgctctgcggccttggacagggagccactggtctgtgctgctgtcccctga

SEQ ID NO: 115998 - DNA, 1113 bp, Homo sapiens
atgtcccggctgtctctcacccggtcgcctgtgtctcccctggctgcccagggcatccccctgccagcccagctcaccaagtccaatgcacctgtgcacatcgatgtgggcggccacatgtacaccagcagcctggccacgctcaccaagtaccctgactccagaccctggccgggtgacgtttctcggtatcgcattcacttcgtgggcagggttgtgctggctctgatcggtggcctgcctgctgctgagctttacctcggagccggcagatctggctcgaccgcagctgaagggccacctcctccgagaagtcctcctaacctctcagtgcagggagccagtctctacctgttgcaccctctgggaggggctctgcccaaggctgggagctccgcagtgccctctgatgttggtgaatttcctgtggctgtctgcagcacaggtcgggccctgggttccctgcagacatcggccctatctaccaggctctgtcctccagagctggggagcagggaagcaggtctgcacccagcaaacactgaccctgacctgccatatgcagagcctcgtacacctggccctggagaagttgagcaaacacaagcaggttacagtgttggtgcagatgctgctctttctggttgtgttggccaggaggagctcggcatggagaaggctagagtggggaagtggccccagggacgcagagtcctctgggacgccggagacgactgcaggacagagagccccaggatcggcgcctacttctgggttaaaacagacagccgggcagcagcgcccacagccgagggcgccgcagccgcttcaactccgggtcggggtcgcgggcctggagacaagatgtacgcgaaatctctgcccgccgcaacccgtccggagccccggctccgagcgcgccaggaagccccagcgccccgagcgctcctgcctggccctcggcgctcgctgctcagcgcccgacgccgcctccccgcgggcagcaccgagggccaggaggcggagcgggagtccgcagggaccaagagggcccgagggacggcagttcccagaagcgcggcagcgagtgagatccaaggagagaaagtctaa

SEQ ID NO: 115999 - DNA, 1374 bp, Homo sapiens
tttcgtcatcggtgccctcgctcaacatggcggccttctgtgcccgccccctccgctaacgggcacgttactccgtccgaacgcagtagacgaaggcggcggcgatggcggcgggvgatagtggcttctcgcagactccgcgacctactgacccggcgactgacaggctccaactacccgggactcagtattagccttcgcctcactggctcctctgcacaagaggcggcttccggagtagccctcggtgaagccccagaccacagctatgagtcccttcgtgtgacgtctgcgcagaaacatgttctgcatgtccaagctcaaccggcccaacaagaggaatgccatgaacaaggtcttctgggagagagatggtagagtgctttcaacaagatttccgagagacgcttgactgttcgggcggtgggtgatctcttggtgcaggaaaaatgtttcaattgcaagtattgacctgatggacatggcttcggacatcctgcagcccaaaggagatgatgttggcccggatcagctgggaccttccgtgacatcatcactcgataccagggagacctttcaacgtcatctgagaggtgccccaagcccgataattgctgcccgtccatgggggctgcatttggcgggaggtgtgggaccttgtcaccgcctgtgacatccgggtactgtgcccagggatgcttttcttccagggtgaaggaggtgggacgtggggtttggcttgccgatgtagggaacacttgcagcgccttgccccaaggtcatcggggaaccagagcctggtcaaacgagctggccttcaccgcccgcaaagatgatggctgacgaggccctgggcaagtgggctgtcaaaccgggttttccccagacaaagaggtcatgctggatgctgtccttagcgctggcggccagagatttcccagccaaagagccccggtgggccgtgcagagcaacccaaggtcaaacctggctggtaattccccgcggaaccatttgggtggccgaagagccttaaactacgtggtaaggcgtccctggaacaatgagcatgctgcaagacccaagaccatcgtgaaagtcgggtccaggccacgacttagaaacagggaactgaaaacccgtcaccttcttccaagctctgagagccctcgcgtcccccagccccagccagggggcctggccttgtcccgcctcatccacgagaaagggaggatgggcgatgacagttgtttcctatggcttctgaccccagttttcccagtttataactttatgacaatgagtttctgcaagcccaaggccttatcttcaccccacaaacacataaagcaaagtaaagaaaaaaaaaaaaaaaa

SEQ ID NO: 116000 - DNA, 1101 bp, Homo sapiens
  misc_feature (1)...(1101): n = a,t,c or g
atggaggatgaaaatctttccccccggaaattccctaagaaaagaggtgggacagtggccctttcttccctaagttccctgaacacaaacctcgctgaacctttcctgagtgcggagcctgagaatccagtggctgtgggaagtgttgtgaaaggaaaacacaccggacgatgtgggtctccaggggtccggggcggaattccctgcggaacttcccagtcagatctggacctgaatcctagcgctccactcgcgaggcggctcttggatacggccgatggcttcgaaatattggcggctgatttccaggttatccttgccttaaaagccgccgtgtctctcaacgacatgggttcaaatttcacccaccatgggactggcgactctctgagactcagcgtttccaacaagcggggctttgtcagaagaactgtgggctccgagggaggccctggtcatggggtcactgcatttgtgcgaacagcaggggcgaaggctcntgaattccgaagaccgttactcggcgcggaagcggcaccgccgacgtcaaaacaccgggcctgggaggcgcggcctacgcgtctcccgggcttcgcgccctcgcccgatttgattggatggtggcgggaagaagcggggagacccccgaagaaggggcgcgaaggccggccgggggttccaacggaggcgtcaagggggcaaaggggcggaaccgggcttcgaaccgtcgcgcgtccgcatattgggaaaaagccggttggggattgctggaagggccggaccctgcaaaaacgggtgggcttttgcccgttgggcccggaaggggcccgggctgaacaaccgcgcttccggtcggaattgaagccgcggaagaagccggaactgagaagccgccgaagggggcgggtctcttcgggcgcaacgtccgaagccaaaggcttccgcttcaacaaccgcggcaacagtcttcaagttcaacatcctgagaaggacgcctctggagccgcgactgcccggggttgtgccggccgcagctgccgctcaggccgcctcagctctcctctgcgacggcccgctcactccgcccggccccagccctag

SEQ ID NO: 116001 - DNA, 1116 bp, Homo sapiens
  misc_feature (1)...(1116): n = a,t,c or g
tttcatccagcatgttttagcccgtcccttttgagctatgttgtcagtagttacccttcagttcccccctcctgaatattttgcaggtgattaacccctttgggaannnnnnnnnnnnngctttctgtgtatgtttttgactcgcgtgtttttgcttcgctaatcagattgcgaaaggaaacatctcacgtttgcataggacttcacagttcataaagacctttcccacccaccacaaaaaaagtatgacaagtttcccgtcatcttcattttataggtgtggaaagggagtcaaagaaaagttaatcgataccatttatctagttaagcaggctttgagcagttcatctcctcccgtcctcaaaacgaccttctgaggtgtctcctgcaaccctgctctgaagctcagagcgagacggcctcacatcccagggggctcagctctggcggggccgccacgcgcctccccgtgcctttggacgggtgaggagagctgctgccccggcggggaccacgtggaaaggcctggtcagcaagtggcaaggacgcggcgcaaagccaggctttctaatgtacaatccgcggctctttcgatactgaacacccacctcttcaacaaattcgagcgcctggcaggccctgcaccaagcctagggtgatggcgacccaggcgggtttttactctcaaggagctcaattctagggcagggagaagtaaaattnnnnnnnnnnnnntcataccaaactgaaaaacacataaataagccacgtctctcctcacccctagcacttaatcacaaaggcctgtagagagtcccgacgagaacttctgagcaggccccgctgtcagtccctgaggacagcatgcaagggaggttgacgtccctggacgaagaaagtgctggagaaactggcgaccgtcccaccttccctaaggcgaaggctctgaattccgaccaccgttactcggcgcggaacgcgggcagccgccgacgtcaaaacaccgggcctgggggccgcggcctacgcgtctcccgggcttcgcgcccctcgcccgatttgattggatggtggcggggaattccnccgcnctggacgaatgctatcaggtcgtcg

SEQ ID NO: 116002 - DNA, 285 bp, Homo sapiens
atgcattattccggtaacaaggaacctgctcaagcagacataatgacggctttttggcaagcagcccttcctgctgtggctggaggacgtgtgcagccctctggtgaccagttggtccagagaaggccacccgtcctctggctccggctttgtgatgaaaagcacatgagcccgcgggatatccatcatgattactttttaaacattctcacacaaacgcaacactacttaagggccttcgcattttccatcaggcactcactgaatgaattcttcacactctga

SEQ ID NO: 116003 - DNA, 642 bp, Homo sapiens
atggggaaggcccctgcaggctgctgggcacggggatggctcagggtcctgggctgggctgggctaggcttgggggagcccgggcagcagcagccccacattcaggacagagccatctgtgtcccacggggccaatggaccatttcagtggatgcagggagcacagagcatgagtcgcacctggtggacgggcaggttgcacgatgggaacacaagacccgcaagctgagcagggccttcggatccccctacctggcctgctactctctaagcgtcaccatcctgctcctgaacttcctgcgctcgcactggattctggagccttgctcctcagctgggcagctgctgaaggcagtggggtggcagatggatgagagcagggtctgcatcttgctgtccacaggccggggcacctccaggattcagaagatgactccagcagacttctgcgttatgacccggctgctgggctacgtggaccccctggatcccagctttgtggctgccgtcatcaccatcaccttcaatccgctctactggaatgtgagccctgagcgtcctgtgatcacccccgaggctaatctgcagagtaaggccaagatcagcgtcagcagcacattgttccagacagttttcatttaa

SEQ ID NO: 116004 - DNA, 1039 bp, Homo sapiens
ggcacgagacccactgcagatcattccctgaccacagagcgctgctcccgaaaaccctgcacccctcaatggagtaaattaccataaagcctcttccttacccatgctttggggtgttaacagctgaggctattcctcggtgacctgtgggactcgagctattcctgcagctcaacaaacctcctggccgaggcagacttctgcgttatgacccggctgctgggctacgtggaccccctgggatcccagctttgtggctgccgtcatcaccatcaccttcaatccgctctactggaatgtggttgcacgatgggaacacaagacccgcaagctgagcagggcctttcggatccccctacctgggcctgctacttctctgaaggcgtcaccatcctgctcctgaacttcctgcgctcgcactgcttcacgcaggccatgctgagccagcccaggatggagagcctggacacccccgcggcctacagcctgggcctcgcgctcctgggactgggcgtcgtgctcgtgctctccagcttctttgcactggggttcgctggaactttcctaggtgattacttcgggatcctcaaggaggcgagagtgaccgtgttccccttcaacatcctggacaaccccatgtactggggaagcacagccaactacctgggctgggccatcatgcacgccagccccacggggctgctcctgacggtgctggtggccctcacctacataatggctctcctatacgaagagcccttcaccgctgagatctaccggcagaaagcctccgggtcccacaagaggagctgattgagctgcaacagctttgctgaaggcctggccagcctcctggcctgccccaagtggcaggccctgcgcagggcgagaatggtgcctgctgctcagggctcgcccccggcgtgggctgccccagtgccttggaacctgctgccttggggaccctggacgtgccgacatatggccattgagctccaacccacacattcccattcaccaataagaacaccctgacccc

SEQ ID NO: 116005 - DNA, 654 bp, Homo sapiens
atgaagcctcggaccctcgtggtgagtgttacagctcataaaagcagcgtggacccaaagaactcaggagcccagctggcttcacctagcggatcccacactggggctgcaggtggagctgcctgccagtcctgcaccgtgcgctcgcattcctcagcccttgggtggtcgatgggactgggcgccgtggagcaaggggtggtgctcgtcggggaggctcgggccgcacaggagcccatggagtgggggggaggctcaggcatggcgggctgcaggtcccgagccctgccccgcgggaaggcagctaaggcccggcgagaaatcgagcacagcgccgcactccggcgccaagtttttgccgggaagcccagggcgctcccgggacagggacgcactttggcggactcggcgtcaggccggggctttccagtgcaccgggacccggcgatcgcgctcggggtcccggtctcctctagtccccggctcttgcacgccttaccttccctagggctgaaacgcggggctctgggcgcgccacacaccgggtcgcccacgccttcccagccggcagcctggaggatccctgccgcccccttcgctgctcccgccgccgccgctctcctcctccagccgccgccgccgccgctcaaataa

SEQ ID NO: 116006 - DNA, 551 bp, Homo sapiens
tttcgtggctggaggaggagagcgtcggcggcggaagcaccaaaaggggcggcagggatcctccatgctgccggctgggaaggcgtgggcgacccggtgtgtggcgcgcccagagccccgcgtttcagccctagggaaggaagccagttgagggaagttctccatgaatgtacgtcacaatgatgatgaccgaccaaatccctctggaactgccaccattgctgaacggagaggtagccatgatgccccacttggtgaatggagatgcagctcagcaggttattctcgttcaagttaatccaggtgagactttcacaataagagcagaggatggaacacttcagtgcattcaaggacctgctgaagttcccatgatgtcacccaatggatccattcctcccattcatgtgcctccaggttatatctcacaggtgattgaagatagtactggagtccgccgggtggtggtcacaccccagtctcctgagtgttatcccccaagctacccctcagccatgtctccaacccatcatctcccctccctatgtatt

SEQ ID NO: 116007 - DNA, 273 bp, Homo sapiens
tagcctcgagggtgatgacacctgcacagacctgtacccccctgagttattcacctgaacggaccttggacgcacggagggtgtggattccaatgatgagggcaggagagagacgaccgtgtaccgagggatgtcctagaagcgcgggaagaagccgttgggctcgttgaaaatgaagttcaagattcttctccgcaaacccaagagcttcagctcctgtaaacagcgcaggttaataaaagcactattccgtgacaaaaaaaaaaaaaaaaa

SEQ ID NO: 116008 - DNA, 833 bp, Homo sapiens
tttttccactgaaagcatttataataaggaacttgtcactcccagggagcctccgctcagccggcagttggttcatttcaatccccacgacaacccttcaaagtgcagggcagacagcaggtggctctgcccaggcgcctggatcacagcccggcctgcagccctcacctgggcgcggggagaccctgaggacgctcctccaggcggcgctggccggggcccgtcccagccccgccgcccgcagccccagctgcaacgcagccaccgccgccatcgcacccggccccgcgggcgcttccgggacgcaggaggcatctgcatccggggcgccgctgagtcccgcccagagccccgcccccggctccaggttctgcgagcggcttccgccgggctgctccgcgggcgcgtcggccatgagcgagttgccgggcgacgtgcgggcgtttctgcgggagcacccgagcctgcggctccagacggacgcccgcaaggtgaggtgcatcctgacaggtcacgagctgccctgccgcctgccggagctccaggtctacacccgcggcaaaaagtaccagcggctggtccgcgcctccccggccttcgactatgcagagttcgagccgcacatcgtgcccagcaccaagaacccgtaggtggtccgcggcggcgcggggaggcccagggcaattaggacagcccctccgctggactccgccagtgctgcagcccctactctttcaaagttgggagccctgggacccaggcaccagttgttctgcaaactcaccctgcggcacatcaacaagtgcccagaacacgtgctgaggcacacccag

SEQ ID NO: 116009 - DNA, 851 bp, Homo sapiens
ccttccgccgggctgctccgcgggcgcgtcggccatgagcgagttgccgggcgacgtgcgggcgtttctgcgggagcacccgagacctgcggctcccagacggacgcccgcaagggtgaggtgcatcctaccaggtcacgagctgccctgccgccctgccggagctccaggtctacacccgcgggcaaaaagtaccaacggctggtccgcgcctccccggccttcgactatgcagagttcgagccgcacatcgtgcccagcaccaagaacttcgcaccagttgttctgcaaagggcaaccttgcggcacatcaacaagtgcccagaacacgtgctgaggcacacccagggccggcggtaccagcgagctctgtgtaaatatgaagaatgtcagaagcaaggggtggaagtacgtgcctgccttcctggtgcaccgggaggaggaggtagggaggacccagatggatcggttgtaggcctcgcccgcgtgaagccttctgggagcccacatccagtgatgaggggggagctgcaagtgatgacagcatgacagacctgtacccacctgagctattcaccagaaaggaccttggaagcacggaggatggggatggcactgatgactttttgacagacaaagaggatgagaatgcaaagcccccaagagagaaggccactgatgagagcaggagagagacgaccgtgtaccgagggctggtccagaagcgcgggaagaagcagttgggctcgttgaaaaagaagttcaagagtcatcaccgcaaacccaatgagcttcagctcctgtaaacagccagagttaataaaaagcccatgccgtgaaaaaaaaaaaaa

SEQ ID NO: 116010 - DNA, 436 bp, Homo sapiens
agataacaataaaaacaccgaaagccaaggtgaccatgtcaatctagaaccatgggttgcacgggacagagaagactgagagagaggatgcatctgagagggctgggacgtgtgcaaaagcacaagtttggatgggaagtctccagcaggcagtcctactcccccaagacagcatcttttgccagttgctgtttatggattttctccacactccaaatcacatacttatacctccgttcctcagttaccatctttagacaacagctattcactccccaatacctaaggatgaggcatttagcttcactactccccaatgtctggaacttttcatggactattttttgactcctggcatgaggcattttcctctttctggacaggcagtcgttggattccccagctctgttaaggttgagggacatcagtggcccct

SEQ ID NO: 116011 - DNA, 678 bp, Homo sapiens
atggaaggtaaaaaatgggaggccacaagagtggtggggtccttggtggtctttgacacccggaatagaaaaggacagaatccagttgccaacgaggcagctggggagggtttggaggaggggctgtgggtgctgggtggtgctggggatcctggctcgctgaccgcacagggccccaccgctggctccagaggactcagtgtagctgtctcaggcctgccagggcgcctgcattggagccacatcaagttttcagccatttatggaggtcatttgttttccagtactgctgtgacaaaccaccacaaaccgtgtggccaacaacacagaaattcatcctctcatggctctgggggccagaagtccaatgtcaaggtgtcaggtacctggcaatgtcctcagatgctcagtgaggacgcacctgaggttccagtcctgacagcaaaggtgaccgccctggacctcagtcagctcatctgcagaatggctagctcaaagacagtccgtgctgtcagccagctgcctcccacgggccaccagtgccaccacactgaaggaaccatggagccgcctggaaaagtcaaccgagaattagacataacaatttggttctgcaaggagaggaaacccttggtcctgggattcagccttcaggctgttattagcatttatggatga

SEQ ID NO: 116012 - DNA, 954 bp, Homo sapiens
atgcatctgagagggctgggacgtgtgcagaagcacaagtttggatgggaagtctccagcaggcagtccgtggaggtgtggctggtggcagaattgttggagcaatgggagcatcctgtggagtattttccctctgccatgaagcattcctgtttctgccactgctatcattcagagattgaatctaattccctgctcttggacctgagtttatgcttggcattcaccagaccctgccttgtttccatctttggaacaagcacgcatcagcttgcaagagccagttttgggaatctcttctcaactctgggttcatcgaagtcattttggcagtttgaaatcagtcctggtttacttatgccagggaaatcagcaaatgttacaagtcggggtcctcccatcccccagaaagctggctaccagcacagcactgcttatcttcctattccctgggctggatgcgagcttcatgagggagggcggggcatctctgaaagcccatgtgtctcccaccaacagctcttgacaggcaccgcactcaacaggaactttaagctgaagtttaactcgtgtgatgcaagggtccctgaaactggacgtgagatgggtaaggtgtgtccccccaaaagtgacctgagactagagcagttttcagccatttatggaggtcatttgttttccagtactgctgtgacaaaccaccacaaaccgtgtggccaacaacacagaaattcatcctctcatggctctgggggccagaagtccaatgtcaaggtgtcaggtacctggcaatgtcctcagatgctcagtgaggacgcacctgaggttccagtcctgacagcaaaggtgaccgccctggacctcagtcagctcatctgcagaatggctagaccagaagttcttaaagcctggtccctggaccagcaacatcagtacctcctgggagcttgttag

SEQ ID NO: 116013 - DNA, 1135 bp, Homo sapiens
atgaccttctgcttacaaggatcagtttggtacagagtggacaagctgaagtgggacagcgacccttctacccctccttaccccttttatggtcacaggattgaagatctgaagaaactacctactgtcttctcccacttgggctatctccatagccttctcggttatctaagattattgaaggtacacggtgataacaatgatgacagtgatgaagactccctggaatatgctccaaagtctcccacctgccccccaattcctcatttgggcagcggcacaagcacccgtgtgtttggattgaatgaccagcagcagggcctccaccagaagtgttgccacaagaaaacagtgtggacccagtttcctgatgacattcccatcacggggcccaacttcttcagagtgacatcacaagtatgctcccatagtctggtgccatccctgtaccggccttatgagaaatacctggcgtggcagcttccagccctgttgtatggggcacactccaccctgccaggcagcaagttaagacgtgcctcaatcacggtgataagtggccatttgggcaaagatgcccagacatctcagtgccctttaattctccgcgatggtcccttcccgtctggggcactgccccagtgcttgcctgctccctggtgccggggcccatagaaggttttgctcccctggtgcggtcgctcacaaccaaaacaaggactaggggagcccagaagaggacatcgccaagtccagcagggagcaaaagggtcaggagacaccaaaaggaagtgtgagatgctctgtctccacctcaaagctggagagcaacggggagaccttcccaggtagtgggaacggccacgggcaaaggcgcagaggtaggaatcctgcgtggaacaaatcttgaatcaaaacgaaaaggttactttagcccacagcagggacactgcgtcacgatagcagcactgagaaggctatagaacttgtcagatgcaaagatctcaaggacagaggtcacaaaagtatagcccttaatggccaagaggctgccatagcaaagttacatttttatgatgatgaatgagtggaagggcttggcagtctctactcctcgttgaggagctttgggggg

SEQ ID NO: 116014 - DNA, 436 bp, Homo sapiens; identical to SEQ ID NO: 116010

SEQ ID NO: 116015 - DNA, 251 bp, Homo sapiens
ctaccgcgacatctcatcagatgaaaaagttaataacagaatggcgactccgatgttgagcaagatcaccatgaccaccaggatggcgctgagccctggaaggagatgtagaccccactgtggtaaggagctgttcagagcccccggagccctccacttcctaccacgcagacatcctgctgctgtgcgacacagatggaccagggcttgtcctgaaggctgtgctcctgatgaagcagcatcgtagctga

SEQ ID NO: 116016 - DNA, 816 bp, Homo sapiens
gggctgccctccatccacacccaagacgggaacttgtgaccaacgaggacaacgtccgctgttacccactgatgtgccgggatcccttctgtctcccacgtggagctgaaggggatgcgtgctggcctccttctgccatgccacacagcagagtgttatacaagcaaagaattttggctaaaatccaaaaaacattacccagaaaaaaaggcaaactgtgagtgatacccaatcgtgtggttcttctgtgagaggacttggaagtcgctgggctgtccgagttgcggtctttcccttcttgtggtttggcttttaattttaatgtcccttttttctaccctttctctatttttgctaccgcgacatctcatcagatgaaaaagttaataaacagaatggcgactccgatgttgaggcaagatcaccatgaccaccaggataggcgctgagcccgtactggacttgagctcatccccattctcctcgtcggactctagagcgacaggcaaggatttctggggcggggagaaggtcaagtcccaacgcagccaaccggggctcggccccgcccagccgcaggctcgccagtttctgcacggcgggctccgcggaggaggccggcctgaagttctccttgttctgggccttggaccgcagtctctgcaccccgaagccccggtcctcggggcggtggtcgtcccccaagccccggcaggcgccgccctagctgtagcgtcttttctgggggtgcgtctccatcctcagcaagggcctcgtgccaagcttggcgtagtcatctaaaacagctctcaatcg

SEQ ID NO: 116017 - DNA, 453 bp, Homo sapiens
atgggggaaggagtggaaggaaaaaatcctaggctttctcagaaacaaaagaacagtgcaactggaatacagtctgtgaggaggaaggcctttcatgtggaggcaagagagattagtcaaagtccagagatcactcgtatggcaggccttttgaaagattttgctctttttcctaatgacaaagccttgaaggatttagagggccatcattcagatctggggtccgttgggagctttaccaagcctaagatctccctccaatggaaagacaactatgttgtcttgctaatgacccagcaaccatcagattccatctgctggaagggtgtaaggacgacccggtttctccataaactgcagaaaataagaaaagaacgaaatgcttgggagctgaatgaggcaaagcccaacgactggcttctaaagggcttaatgaaatcagccagtgaataa

SEQ ID NO: 116018 - DNA, 375 bp, Homo sapiens
atgagcaaagttgacattgtagagacccgtgggactcacaacctgccctcttcagcagataaaccacaaggaaacgagaggcctggcatgcaggggactcggcacagttccaaagcagcgtcccggggcatgtgggagaaacgcctagctccaggcccaccccgcctgcttgcgggcccagcatcgctttcacagggcttccaggggatccccaaccgctcagcattgagaaccggtcgctgctctagattaagaggctcaaaggacatatcggatagtatggactttggatccgaattaccaaatcggaacaaaacacacaactttaaatcagacaagcagaaatctcaacactggatattccttgatacttag

SEQ ID NO: 116019 - DNA, 1161 bp, Homo sapiens
accctgagtttccttagcagactaacctcccagcatgccttattggctccatgcaccaggtgaaccacactgtcaaaatgtgaaccccattttcatattctgctcttttgcttcagaaaacagcagataaaaatctgctggcagagctgtaccagtattccaacttcaacagctccaagccaaacaagcttccgaatggcgtggacttctgtgacatggtgggcaacgtggtccgggctgagagagactgccttattggcaagcatttctgttcaggtagagaattagagaagtttctctcttcttcttctccaagagccatctggctggatagcttttggtggatatttcatgagagggaccagaggctgccatcacttctcagcaaagccgtgtacaccagcttctgttgctgctttccacagtcctgggtcgacacgcacgaattcaagtctgacatctgtaacacaatgagcctgtggatttcaggcacctattctagcccacagagctatgacagctgggactactcggaactagacccagagcgattccgcagagaagaattaatgttgtacagaagaagactgacaaaggggagagagttttctttgtttgctggtaagagagccttctcccagaagccagcccagagcaggaaattctaccaccctcagcaccacccagggaaggtcttcactgagaaatcacaagcagtcagcaggaaggcccgtgccttcccaccaccaagacagcctgcccccctctgcaccctcgccatctgccatctctgtgcctatggagaggtcctgctcccctcccagtccttacaacagccctgcaaggtgggtcattattacttcttatctttatttgacaaagcagagcatcattgtcagaccctggtcttgaagaaacctacgcaagaagtcaagaggatatcagaagcaagagaatgtgagaatatgtttcctaaaaagtcgtgtgctgcctgcaaaagccctgagctgacttcaaacctcttcaacatttatgggaagagccctctgattgtgtactttctccagaactatgccagtctgcagcagcacggcaagaatgtgttgatagtcagaagggaaaagaccacgagcaccccatatccttgtcactgtgggcagg

SEQ ID NO: 116020 - DNA, 419 bp, Homo sapiens
aatccgataaatcagaccctgacatctatccactgagtcacgtgtcatgagtggcaaaagctattgttccacagtcacaaaaatcaagtcctattttacctttctttcagctgctgcactcaggcacagctagcactttttccttgctttcacatctggggctgctatgcttcgactatctgcttcccaaaccctgtgctggaggcacttctgggcaagaccctgagagtggttttcatgggacggtgtgtgctcttcaaaggaggtacacactcctctgtggctttcaaattctaatttagaatgggaggtcagaggatgcccttcagccttagatctaggtagtgttctctaaactcccttttagcagggaaccaagcgttatagttacagggaaattttactgactaatgtaattg

SEQ ID NO: 116021 - DNA, 1188 bp, Homo sapiens
ctattactgcatggactgagaatagtgaagagatggtttccaaagaattcagggggctgttaccagaagacggtacgaatgaatgctcgaaaggcaagaacaacaaatgtccactacacttcatccccaagttctaacaaccaactactggaggccaatgggctttctcccaccatatcttgccaatgtggttcaggatatgatgggagagggaattttactggtggaaatatccctaggctactagttggaggacatcagacactggctgacactacagaaatgagacacatcgctgcccctgaagggctcctgaggagctgcatgcatgatgaggctgaggtctttacctttagcaaggcaatgagctgggaattcaggagcagcttagctggtcggttttggataagaatagctcatgatgttgaagtcaacctgttggttaagactgttgtcaaacaaggcttgactggaagctggacaattgcttccaaaatggtttgctcatatggctgttggcaggagacctcagttccttaccaggatcaagtcctaaggcagcagttgggcctggctcctggtccccgtgaggaagccctcagctggtgggccagctccagattggacggtacattcccacccaatcaaggtttttctggaggtgatgtgtgggaaaaatgtggcccaaggtcacccagctcattagtagcagagccaagacttaaactcaggccttctgacaccttcttatccaaaattatttttactaccccagaagaagcactctgtgtacagaccacacatctcacagctgctctcagtcaaaggcaaatagatgaagtctggcgtgaaatgagatggatcatggatgctctacagtatgcaagatacaaacaaccagtttctggcttgcccatcactaagctgatagacccctcagatgagcagagcctaaagaagatcaattctacatcatcatcacatatagactgtcttccatccccacccccatccccagagatgcacagaagaaagacagtgagtgattcacagccctgctctgatgaagaagcctgctcagaagtcttcctccccaccaacagtgactacgactccagcgatgccctgagccccagagacctggacctggtctacctatcatctcacgacattgcgcagcagaccctt

SEQ ID NO: 116022 - DNA, 693 bp, Homo sapiens
atggatgctctacagtatgcaagatacaaacaaccagtttctggcttgcccatcactaagctgatagacccctcagatgagcagagcctaaagaagatcaattctacatcatcatcacatatagactgtcttccatccccacccccatccccagagatgcacagaagaaagacagtgagtgttcatttttgcagctacagagagaaatttattagtctgtattgccgcctttctgctgttgtggagctggattctctgaacacccaacagtccctcagggaagcaatctcagacagcgaggttgcagctgccaaacaaagacaccagcaagttttagatttcattcaggcaaggaacttccgcctctacacacaggaggtgttggaaatgggtcacaatgtgtcctttcttctcctgctccctgcctcagacgacgtctgtacagccccaggacagaataatccttacaccccacactcagggtttcttaacctccctcttcagatgtttgaacttgaagtaaggaaatcagaggggaaaaaatggtttgctgaaggaagtgatgcttttagctttgaatatgttgagactgaaggtgctaagtcaacatccaagtggacatgtttcactggcagtagaaacgcaggagagaaattggatactaaacacagagatctgtccagtgtctattaa

SEQ ID NO: 116023 - DNA, 1179 bp, Homo sapiens
atgatcaagagggctttgtccctgggatgcaaggcccagcttccacaaaaggagcagttttttggtgcagaggtagagaagcctctccctgtggccactaccaccaccaacccacagcaggttttgccaggccaccaccaatgttcacttaaagccgaaaagctcttcggtcatctgaagaggtcaggtctagaaatgctttccaagagcctaggcctggacctggggaccctaagaacccacttgttgctctacccaactgtggccaagctcgtacctaaggtacaagacaaagtcccctttactttaccatctgtgtttctcaaacagagaggatctttcaccatagccgccacagttgggaatgtgctgggttacatctgtattcagcatgtaacccaaggcctgggtattgctgctggttattcagggcccaagggtgcacagactcctcgcaatgcaaggccactgccagggaatgctggaggggtgatgctagcaattgaagattgtctctcctaccctcttcaatgcctctttcagcaatatgaagttaaaaccagagccagcaaagaggaatcagcaccttcagctcagggccaggttgcagcaatggtagtaaacagccataatggagaagacaatggctggaagaggcgactcccgcagtggcagcagggagatctccaagatcaggaagaggtctctaggaagaatgacttctccccatttcccagcttccagcttttacaacaacggctccacactggcaactgtaacccggaaccatatgagaaagtggactcttggaatgctcttcctgccttcccctctcccaatgcagaggaagctgtagagggatccagtggcaactttagatttaacagtcttttaattaaagataaaattagcatctactatgttgcagtttgcaaaaagaagacatggactaaaaagtgccttggagatattttatacctcaaagcaatgcacagatttagtagagagagccatgagactggagaaggccatttcaaaggcattagggaagatccacaggaagatgacagagacttgaaacagaagcctcagcagacactgcctggtcagatgactcaagaacctgatgggccgtcctcagtgtccagataccctacatacctctgggaacttcaataa

SEQ ID NO: 116024 - DNA, 639 bp, Homo sapiens
atggtcctcataactacaccaccagcaaggaagtctgatgcatcaaacagtacacgaacagtaacattaagattcagatgcgaagtgtttggcggtgtagctgtcccgtccccggcgctttccacagcaacagcgcgttctcttcgcctcccgcagtctctcaggacaggccaggctagcgcaaagtaccgtgttcctggaacaccacgagggcgagctcgggaatctcgagccggcctgcaggacacctgccgcaccaagtggctagagcccggggagggcgaggcgagtcacgccagcccgttagattgcaagttgcaggaccgctgtaggaaatgttattcgccgcggtcaggacaggcctgtccgcccgccctcgccgcagcctggcttcgtcgttgcgagcgccggggaggccgtccccggggagggcggaggaaggagctgactttgggtttgcgtcccgctcgctgctctgccccggggccagccaaggacgacgcttggaggcctcaggccgggggctcaagtgctgtatctgaggaggcccatacctttaaacaagtagttaaaatcaagaccatctgtactgtgatggcagtaggtataaagcacgcaagcccccctgtatttgcatag

SEQ ID NO: 116025 - DNA, 1486 bp, Homo sapiens
tttttttttttttttttgtagaaaattcctttattatagtgcaaattacttgtcagcagtgacggaatgtaacgacacagtgagcgaacattttacaccacacaagtaaaataagaaagtgtttctttgaaaatatgtcatcatagggacattatttctacattaatgccagaaaatgccaaggcccgtttatctcaaggcaaacagggctccctccttcctttggggttttttcttttttaacacaaatgaaatgacttgccattttaacaaatcctcaattctaaaagtgatctctcagggggctttgaactaaggtcggcaagatttggaaaatgggggcttcaaaattttaaataataattttaaaatacttccgggaatagcccaaaaagtagaagtcacttctattaagttttaagtagatattacacactcactccaattttactggtaagaaatgggacagattgtcctaaagcctgctttctattcccccagagcctgattgttatttatactccttggttttggttattgcagaactagggctctggtcagaaataacaccttacatacccgaatactttcctgtggaagctttacattgcattttccatcctgaaattcctcaccttagaccttaccaggcccaggagagggtgtgaatattgttttcagtttaccagctaaaagccccttactaatttgggctatacctgaatcaaatcatcacatcatttagattaatcccaataggcttatccaagaggttcccactaacctcacagagaaacaaacagttaacattgtattttcacactaagctgcctaagggcttggctgctaatgagttagctgataggtagacagaataagcgtgtcaattccaatcagtacgacgccctgctcctctagtttctgctgaattatgcagtggggtggggaatggttggccacttcaaaacaagtctttccctatggggctctttccaccataagttggatcaaaactccacaaaatgtatttcaaggtgccctttaagtctctcaaatttagggacttttaagtgccaagccatgagaagttaatcacaggcttgaaaatacctggaaccacagaacagcccccacggaacaggctgaatatggttaaataagttggctggtacataaagcttttcaatgtacagccagtcttgttggataccagtgbcbycttatataatacaatggaactgtgctaaacagtktcaaagttgagaagaatccaaatgtatcaccctttaaaaaattcataattttagtttattttagactttggtactgaaacactgtctacattcttgacacttgaaaatgacatggtcacttcagtgcctctgcatgttgtgtaaaaaaaaaaaaaaaactcaaaaaaggaaagcaggacaaggatgtgtcattacaagacacagtatgctgtacaaacaaaacctaaattata

SEQ ID NO: 116026 - DNA, 1185 bp, Homo sapiens
cgcttcaacatgtaaattttggatgaaacacaatccagtccgtagcactttctcttcactagtgggcattcattccatttacaaatcttaaaaaaaaatgtgggggattttattgctgatgaaagtggctctcagtggaaaggggagctgaaaagtgggcagagtaggaagataatccctggcgggactcctctctgaaactacaccatcaagacatccctctgaagtcaagctgcttctctccaacatccaaccatagtctcccatgtcccactgcctctccttttctccctcttctgcctgcagagcctggggtttttaagggcacaggatttggcatgggggtgggccatgagtggttttggaaaaggcaacagtcaaccaggaaaacaggaatgtatgttctctttttgggccgtggttccaggcttgtggctagaagtacttttggaaaatattgttctattttgggagctatgtttcctggatttcagtttgtagctattcatggttatcatatggtttctgagagattttatgtttctgtgatgcaacaactttttattacttctcaggcttcttcaggatttggctgggaaaagtgctgcttgtgtgaatggtactacgcactaccgctgtgtggagtgagtgggtcctatctgcggttccatggtcacctcatacggcttaggacagatcctgccatgggcctcaaaggtggcatgccaaaaccaagaggggcctagacacccaaaagggaagcggccagagtggatgaagcaaaagaagggtgcaaggatcctccagcagtttgggtcgaatgaagatgtaatgtgtcagcttttcattcaatatgtaaatgataaaagcctcgtttctcaagaggaactagactatgctctttgttggaggcagagacctgtccttttccccttaaagacaactagggaagaacccaatgtaacatcacaaaaggaaaaattacataagttagttcccatgcgcaaagactccagcatatgggatcccctagaccatcttcccctgctcagtgaccccaagccctctcctcagacagctgctgctgcccaagatcctgctccagattcttcacctactcacgttattccccctccttacaatcctgactcttggaaattatcatcccaagagtctgtcccctaa

SEQ ID NO: 116027 - DNA, 1044 bp, Homo sapiens
atgagtggaaatcctgggggtgtggtgcctggtgacttggtgcatgtggtactaagtggcaagtgtccgagcaagtgctgtcatgtggagcgccgtgtgggaaacgaagtgcttgttgtccgcatcaggtcgggtgtaaatgccaagtgcgagcacggggtgtttagtacacaacgctgtgtgcgccgaagcctggaagcacgcaatccagaaggccaagcacatgccgacccctgggctgagttccacctggaagatattgccaccgaacgtgcactcgacacagccagtgagaaacaggaccacgtgtggacgctgtgccccatggtggatgggtctctgcaggtacaacgccgtcccggggaatggctggatgatgaagttctgatcaagatggcatctcagcctccaaagtgctgggattataggcacgagcttccacacgtggctctagttactacattattaacccatgcctcagccgtgaccgtgacatccctccaccctggtgaccgtgatggtgccttacctggtctctgtgcattgacttgccatgcatatctggccacagatctattacattacagctctgtgagcttaaggttctcatctaagaccaccttatcagtggtagagaaacttcaattcaaaccaggtatgtgtagagaagtggaattcctcaactcctcccgcctccacctgccgagggcttcggccgtggccctgaagtgcaaaggcttaatgctctggacctcgaaaagaaaatcgggaagtcattttggggaaggtccatctggccatggtgcgctacacgagggtgggcgcttctgcgagaagggcgaggagtgggaccaggagtggctgtcttccacctggagcacgcagccaacctgggcgagctggaggcctcgtgggcctgggactcatgtactcgcagttgcctcatcacatcctagcgatgtctctctgaaggtgatgacacagcaagaaggcccatgcaagacgctgcatactgatattagacttcccagcctccagaactaa

SEQ ID NO: 116028 - DNA, 3645 bp, Homo sapiens
atggcagacgaagacctcatcttccgcctggaaggtgttgatggcggccagtccccccgagctggccatgatggtgattctgatggggacagcgacgatgaggaaggttacttcatctgccccatcacggatgacccaagctcgaaccagaatgtcaattccaaggttaataagtactacagcaacctaacaaaaagtgagcggtatagctccagcgggtccccggcaaactccttccacttcaaggaagcctggaagcacgcaatccagaaggccaagcacatgcccgacccctgggctgagttccacctggaagatattgccaccgaacgtgctactcgacacaggtacaacgccgtcaccggggaatggctggatgatgaagttctgatcaagatggcatctcagcccttcggccgaggagcaatgagggagtgcttccggacgaagaagctctccaacttcttgcatgcccagcagtggaagggcgcctccaactacgtggcgaagcgctacatcgagcccgtagaccgggatgtgtactttgaggacgtgcgtctacagatggaggccaagctctggggggaggagtataatcggcacaagccccccaagcaggtggacatcatgcagatgtgcatcatcgagctgaaggacagaccgggcaagcccctcttccacctggagcactacatcgagggcaagtacatcaagtacaactccaactctggctttgtccgtgatgacaacatccgactgacgccgcaggccttcagccacttcacttttgagcgttccggccatcagctgatagtggtggacatccagggagttggggatctctacactgacccacagatccacacggagacgggcactgactttggagacggcaacctaggtgtccgcgggatggcgctcttcttctactctcatgcctgcaaccggatttgcgagagcatgggccttgctccctttgacctctcgccccgggagagggatgcagtgaatcagaacaccaagctgctgcaatcagccaagaccatcttgagaggaacagaggaaaaatgtgggagcccccgagtaaggaccctctctgggagccggccacccctgctccgtcccctttcagagaactctggagacgagaacatgagcgacgtgaccttcgactctctcccttcttccccatcttcggccacaccacacagccagaagctagaccacctccattggccagtgttcagtgacctcgataacatggcatccagagaccatgatcatctagacaaccaccgggagtctgagaatagtggggacagcggataccccagtgagaagcggggtgagctggatgaccctgagccccgagaacatggccactcatacagtaatcggaagtacgagtctgacgaagacagcctgggcagctctggacgggtatgtgtagagaagtggaatctcctcaactcctcccgcctccacctgccgagggcttcggccgtggccctggaagtgcaaaggcttaatgctctggacctcgaaaagaaaatcgggaagtccattttggggaaggtccatctggccatggtgcgctaccacgagggtgggcgcttctgcgagaagggcgaggagtgggaccaggagtcggctgtcttccacctggagcacgcagccaacctgggcgagctggaggccatcgtgggcctgggactcatgtactcgcagttgcctcatcacatcctagccgatgtctctctgaaggaggtacaatccttccagatcatggaaactgaaagctttctgaaagaacgcaggaaggctgtcaggctcaggggagaggctcacccagaacacaagaaccaaatgcctaaagaaggctctcccaatctccccagtcagaaagcagccacctcccagtctgcgccgcagcagaagactcaagccaaacctacaaaggctgccaggcagaaggttctagtgactggaggaggaggctacctgggcttcagcctgggatcccacctagccaagagcggcacttccgtcattctgcttgaccgccgcagaccccagtgggaactgtccccggaaaccaagttcatccaggctgatgtccgagatgaagaagccctgtaccgtgccttcgaaggggtggactgtgtcttccacgtggcttcctatggaatgtccggggctgagaagctgcagaaagagcagattgagtctataaatgttggaggcaccaaactagtgattgatgtctgtgttcgccggcgggttccaaggctcatctataccagcactgtcaatgttgcatttggagggaagcccatagagcagggcgatgaggactctgtgccatatttcccattggacgagcacgtagaccactactcccgaaccaaagccatcgccgaccaattgaccctcatggccaatgggatgcctctcccagggccttgcccattcatcattcagcacattctgagcacctgctgtgtggctgcaccccaccagggatacagcccagaagaagtgcggttctcccggccggagtcagagcaggcccgccagcgccgtgtgcagtcctatgagttcctgcagaagaagcacgcagaggagccctgggtccacctgcattactatggcctgagggacagtcgctctgagcatgagcgtcagtacctgctgtgccccggctcaagcggggtggagaacacggagctcgtcaagtcacccagtgagtacctgatgatgctgatgccacccagccaggaggaggagaaagacaagcctgtggcccccagcaacgtcctgtcgatggcccagctgcgcacgctgcccctggccgatcagatcaagatcctgatgaagaatgtgaaggtcatgccttttgccaacttgatgagcctcctgggcccctccatcgattccgtggctgttctgcggggcatccagaaggtggcgatgttggtccaagggaactgggtggtgaagagatgggggtctcgttttattgcccaggcagtagatgtgaatgttcccaagacaaagaaatgtattaatagatatgctcattaccctgatttgatcattacacactgtatgcatgtaggaggaggcactcttcggacgtgtgtgctccggcctccagggatctacggccctgaagagcagaggcacctgccccgtgtggcggtacgtcatccccgccttcaggacccaagtcagagaaggatcctggctgaggtgtacactggtcgggccctcccagcccctggtcgctgcatcagtctcgaggctaagtgtcctgagcctggaaccctcagttctacaagatgttcctgcccccactggtccacaggccccttggagctcctggcaggaacagagctctcagagtgtaccagccaagccaaggcacggggccacatcaagaagaggctgttcatgttccgatttggggaccacaaggcacggatgaactgggtccacgtacacaatctggtgcaggcacacgtgctggcggccgaggccctcaccacggccaagggctacgtggctagtgggcaggcgtactacatcaacgatggggagagcgtcaacctctttgagtggatggccccactggtatcaaaatga

SEQ ID NO: 116029 - DNA, 2905 bp, Homo sapiens
atgttcagttcattcacccccctgacatcagagctgaacttcaatgtggcagctattggccacgtgtgcctcctgagtgactggaatgtggctggtctgaactgcgatgtgctagaaagatgtcctagcctgctcactctagctgtggaagaagcttttctgctgagagaagctacagagtcctggaaaggtggggacccacaggcagatgcagttaaggttaagatggggccattgacatttagggatgtggccatagaattttctctggaggagtggcaatgcctggacactgctcagcaggatttgtatagaaaagtgatgttagagaactacagaaacctggtcttcttgggtattgctgtttctaagccagacctgatcacctgtctagagcaaggaaaagagccctggaatatgaagagacatgcgatggtagatcaacccccagttacatattctcattttgcccaagacctttggccagagcagggcataaaagattctttccaagaagtcatattgagaagatatggaaaatgtggacatgaagatttacagttaagaacaggctgtaaaagtgtggatgagtgtaatctgcacaaagaatgttatgatgaactaaaccagtgtttgacaactacccagagtgaaatatttcaatatgataaatatgtgaatgtcttttataaattttcaaatccaaatatacaaaagataagacatactggaaagaagcctttcaaatgtaaaaaatgtgacaaatcgttttgcatgcttttacacctaactcaacataaaagaattcatattagggaaaattcttaccaatgtgaagaatgtggtaaagtctttaactggttctcaacccttactagacacagaagaattcatactggagagaaaccctacaaatgtgaacaatgtggcaaagcttttaagcagtcctcaacccttactacacataagataattcatactggagagaaaccctacagatgtgaagaatgtggcaaaacctttaaccggtcctcacaccttactacacataaaagaattcatactggagagaaaccctacagatgtgaagaatgtggcagagcttttaaccggtcctcacaccttactacacataagattattcatactggagagaaaccctacaaatgtgaagaatgtggcaaagcttttaaccaatcctcaacccttactacacataagataattcatgctggagagaaaccttacaaatgtgaagaatgtggcaaagctttttaccgattctcataccttactaaacataagataattcatactggagagaaattctacaaatgtgaagaatgtggcaaaggctttaattggtcctcgacccttactaaacataaaagaattcatactggagagaaaccctacaaatgtgaacaatgtggcaaagcttttaatgagtcctcaaaccttactgcacataagataattcatactggagagaaaccctacaaatgtgaagaatgtggcaaagcctttaaccggtccccaaaacttactgcacataaggtaattcattctggagagaaaccctacaaatgtgaagaatgtggcaaagcttttaaccaattctcaaaccttactaaacataagataactcatattggagatacatcttacaaatacctagaatgtgataaagcctttagccagtcttcaactcttactaaacataaggtaattcatactggagagaaaccctacaactgtgaagaatacggcaaagctttcaaccagtcctcaaaccttattgaacaaaaggaaccctatgagtgtgaagaatatggcaaagccttcaacaagtcctcaattcttaccagacataagataattctggctggggcacgagaaggtggggttttaaaagttatccaatcagcgacgctgggttgggaaccgtccaatcaggcctgcagctggagcggacaggacggcttcggggatgtggcggggcctttgtctctcgctgcagctggagctgcaggtctcgccttcactgccctgtgtcctctgctcgcagaggcccagcctctgtggccctgtgacctgcaggtattgagagatccacagctaagacgccagatgtccagtctgctcaccccagccatggaagaagcctttctgctgacagagccctggaaagctgaggacccacaggcaaatgcagttaaggagacgttgacatttagggatgtggccatagaattctctctggaggagtgggaatgcctgaaccctgctcagcagaatttatatatgaatgtgatgttagagaactacaaaaacctggtcttcttgggtattgctgtctctaagcaagacccgatcaccagtctagagcaagaaaaagagccctggaatatgaagatatgtgagatggtggatgaatccccagctatgtgttcttcttttaccagagacctttggccagagcaagacataaaagattcttttcaacaagtgatactgagaagacatggcaaatgtgaacatgagaatttacagttaagaaaaggctccgcaaatgtggttgagtgtaaggtgtacaaaaaaggttatgaactaaaccagtgtttgacaactacccagagcaaaatatttccatgtgataaatatataaaagtctttcataaaattttcaattcaaatagacacaagacaagacatactggagagaaacctttcaaatgtaaaaaatgtgatgaatcattttgcatgcttttacacctacatcaacataaaagaattcatattagagagaattcttaccaatgtgaagaatgtgacaaagtgtttaagcggttctcaacccttactagacacaagagagttcatactggagagaaacccttcaaat

SEQ ID NO: 116030 - DNA, 1594 bp, Homo sapiens
atgggaggtcaatggccatgggaagcccaagaattactacctacagacccagttcctgatgaattcttggctcaaaagaatcaccctgataatttctgggtcccaaaagcctcaattattggacaatattgcatagctagagaaggaaaagaattcactcaccccgtaggacgacttagttgtctgggacagaaactgtataatggtaccacagaaacagtcacttggtggagttcaaatcacatagagaggaatccatttagtaaattcccaaagttgcaaaccgtgtggacccacccggagtcccaccaggactggacagcccccactggattatactggatatgtgggcatagagcttacgccaaattacctgaccactgggcaggtagttgtgttattggcactattaaaccatctttcttccaactgcccataaaaacaggtgaactcctgggcttccctgtctatgcttcccgcaaaaagagaagcatagctatagaaaattggaaagatgatgaatggccgccccctgagagaatcatacaatattatgggcctgttacttgggcacaagacggcttgtggggataccagacccccatttacgtgctcaaccgaatcatacggttacaagctgccttagaaataatcactgataaaatcagcagagccttgactattctggcctggcaagaaactcagatgagaaatgctatctctcaaaatagattggctctcgactacttgctagcagctgaaggaggggtctatgggaaatttaaccttactaattgctgtctacacgtagatgatcaaggacaagtagttgaagatatagttagagataggacaaaactggcacatgtgcccgtgcaagtgtggcatgaatttgatcctggggccatgtttggaaaatggttcccagcactaggaggatttaaaactcttataataggagttttaatagtaataggaacctgcttactgctcccttgtttgctacctgtacttcttcaaatgataaaaagcttcatcgctaccttagttcaccaaaatgcttcagcccaagtgtactatgtgaatcactatcgatctgtcttacaggaagacatgagtagtgaggataaaggtgagaacttccactaatgagagaggttctcaaacggggggaaaaagggaggagaccacccctcatattgtcttatgcctagtttctgcctccaaagaaagaagaagtgaaaactgaaaggcagaaatggaatccacaggcagatagcccagcatcatgccctgggcctgctagttaaaaatccacccctgacctaactgcttgtgttatctatagatttcagacattgtatggaaaagcatcatgaaaatactatccctgttctgttctgttctgactagtggtacatgcagcccccagtcacataccctctgcttgctcaatcaatcatgaccttttcaggcggaccccgttatagttgtaagcccttgaaagggacaggaattgctcactcagggagctcagtttttggagatgtgagtcttccaatgctgccagctgaataaagccctttccttctgc

SEQ ID NO: 116031 - DNA, 750 bp, Homo sapiens
atggtacaaagtgaggaaaaagcacaagcacagacagaaaataaaaaatgttcactatttcgttggctctgttctctcctacccactgtgagggatgtctctcggaaaaaccgccacactgtgtacttttctgcattctgcattgtgcatttattaggaatgcacacatctggaattcttgaacaactgaaaatgcacctgcaaaatcttaaaacggaagacaagttaagcctgtttttaaagcttggtactgaaaataaacactctcatcataactggagtcttgaagacaagaagaatctagcagtgatgttgtggaaaacatactatcatgaattacgatttgccccaacttcatttggttcatcaacatctggctttgaaccacaaatcacagggcccagagcagtcatccatcacctgaacccaagactaaaactcccctttgaaaatgttaaccacatgtgcacacccaagtgggatttctgtagcactagccctgagtcagcagatgtgagggctggaagaatgtcagtcaaacccgaaatgcatcttcgccggaggtctcaagaggagtttctcagagcagttgggatcagcagtgtccacgggggcccctcagtagaccggtctctgctcagaaaagggatactcaaaaatgaaaatgtggggctgatgacactctcgaagtatgaacaacagctccgtgctgctaaagaatggtcacctggaatagctgaaaacatctga

SEQ ID NO: 116032 - DNA, 477 bp, Homo sapiens
atgaccacgtggctggctggagaagattgggacctggattcccttctctttgggtcagtgggctttcttttgcagacacttcatacttgtggccagtggaggcaagaacctgtgaatagcttacattacacggcaacagggactttgcagatgtggttaagactaaaactcccctttgaaaatgttaaccacatgtgcacacccaagtgggatttctgtagcactagccctgagtcagcagatgtgagggctggaagaatgtcagtcaaacccgaaatgcatcttcgccggaggtctcaagaggagtttctcagagcagttgggatcagcagtgtccacgggggcccctcagctgcctcagatactcactggatagtgatagccaatgatatgccagacttgatattgattgataatgttatggccccaccagggaaggttagaagaatggaagctgcttatttcaaatttgaatga

SEQ ID NO: 116033 - DNA, 512 bp, Homo sapiens
aggaaatcacaagggtatttattgtgataagtatccatgaaatcttcacaatttatgttcggagactgcagtaaagacaggtgtaagaaattataaaagtattaatttggggaactaataaatgttcatgaaatcttcacaatccacgttcttctgccatggcttcggccggtccctccgttcggggtccctgacttcctgcaacaaaaaccaacctctacttttcctccacctcctcagcctactcaatgtgaaaatgatgaggatgaaggaattttattatgatctacttccatttaatgagtagtaaatttattttctctcccttatgattttcctttttctttcctctaacttactttattgtaagaatacagtatatatctaccagacaaaacatgttaattgattgtttatgttactgataaagcttcttgtcaacaatagactattagtattaatagcaaagtttgggtagagtcaaaagttatactcaaattttcaactgtgta

SEQ ID NO: 116034 - DNA, 415 bp, Homo sapiens
ccatggacggcggtgtggcctgagttgtcagtctttaatcctgagtcatgtggctctcttttcatctttgatgtcagttccaattatttggcatcaaaaaccttcatgtgtgccggaccagtcaaagaatcccacgtcaaaattgagagaacgaacaagccttcatcgcatggcacatttgtataaaaagaaagggagagatgttgcaggaagtcagggaccccaaacagagggaccggctgaagccatggcagaagaacataaattgtgaagatttcatggacatttattagttccccaaattagtacttttataatttcttatgcctgtctttactgcaatctctgaacataaattgtgaagatttaatggacacatcacttccttaatcaatactcttgtgatttcctaaaa

SEQ ID NO: 116035 - DNA, 887 bp, Homo sapiens
  misc_feature (1)...(887): n = a,t,c or g
ttttttttttttaatttataagaaaagagctttaattcggctgtggttctgcaggctgtacaggaagcataatgctcggcatctgcttctggggaggcctcaggaagcttacaatcatggcagaaggtgaagggggagcaagtatctcacatggtgggagcaggagcaagagggcaaagggggaggtgctacacactttttaaaatgaccacatctcataactcacggcaagagggtggtgctacacattcatcagaaacccacctccatgatccagtcacctcccaccaggcccctcctccaacattgcagattacaactgaccatgagatttgggtggggacacagatccaaaccatataatcttctgttgcgggaagtcagggacccccaaacggagggaccggctgaagccatgacagaagaatgtggattgtgaagattttatggacatttattagttcccccaaattaatacttttgtaatttcttatgcctgtctttactacagtctctaaacataaaattgtgaagatttcatggacactttatcacttccccaatcaatacccttgtgattttctatgcctgtctttacttactttaatctctttaatcccatcatctttgtaagctgaggaggatgtatgtcacctcaggaccatgtgataattggcgttaactgcacaaattgtacagcatgtgtgtttgaggcaatatgaaatctggggcaccttggaaaaaagaacagggtaacagcaattgttcaggggaataagagagataaccttaaactctgaccactgggtgaggcgggcgggaacagagcccatatttctcttcctttcaaaagcanatggggagaaaatatcgcctggaaattcctt

SEQ ID NO: 116036 - DNA, 512 bp, Homo sapiens; identical to SEQ ID NO: 116033

SEQ ID NO: 116037 - DNA, 883 bp, Homo sapiens
  misc_feature (1)...(883): n = a,t,c or g
aaggaatttccaggcgatattttctccccatntgcttttgaaaggaagagaaatatgggctctgttcccgcccgcctcacccagtggtcagagtttaaggttatctctcttattcccctgaacaattgctgttaccctgttcttttttccaaggtgccccagatttcatattgcctcaaacacacatgctgtacaatttgtgcagttaacgccaattatcacatggtcctgaggcgacatacatcctcctcagcttacgagatgacaggattaagagattaaagtaagtaaagacaggcataggaaatcacaagggtattgactggggaagtgataagtgtccatgaaatattcacaacttatgtttagagactgtagtaaagacaggcataagaaattacaaaagtattaatttgggggaactaataaatgtccataaaatcttcacaatccacattcttctgtcatggcttcagccggtccctccgtttgggggtccctgacttcccgcaacagaagattatatggtttggatctgtgtccccacccaaatctcatggtcagttgtaatctgcaatgttggaggaggggcctggtgggaggtgactggatcatggaggtgggtttctgatgaatgtgtagcaccaccctcttgccgtgagttatgagatgtggtcattttaaaaagtgtgtagcacctccccctttgccctcttgctcctgctcccaccatgtgagatacttgctcccccttcaccttctgccatgattgtaagcttcctgaggcctccccagaagcagatgccgagcattatgcttcctgtacagcctgcagaaccacagccgaattaaagctcttttcttataaattaaaaaaaaaaaa

SEQ ID NO: 116038 - DNA, 427 bp, Homo sapiens
gcggtggaattcggctgctggtcatcctgagtggctaacaacacccccagggaaatcaaccctagggtgctggacggactctgcagagatgtcagatcccacttttggactaatggacagcaggcagctggcttctgctccaccatttgctcagcaccaaggcctgggacaacttattggttccttacaaagccacagcagagcacaatcatggaggatccaggattgcatagaaggaagcagccaagcattggaggtcgacatgcctgtgcccaaatcccacgtgttatgtcctgtgtgggttgacactgggatggctggtgacctgctccttgtgttcacaccctgtgtagtgggggtgcctcccaagtgtgggctggcctagcaacttgcttctaaccaaaggtgacagggtgtcacttctaag

SEQ ID NO: 116039 - DNA, 580 bp, Homo sapiens
  misc_feature (1)...(580): n = a,t,c or g
gcctatttgtggtcctaagaggaaagcacagtgccagctttttcaggatgcatttcttgagtttccaaagggccaagtctgctaaacagagacaggaatgttcattcactctgatttggcagggcacagggcaaaaccaccctgacactcaggtacacggacagcaagtccactttgtccagccccggcgttggcgtccaaatgctgggtggtgggtctggttctgtttattttgttgtccttcaacccaaacctgtacacaaagaactctatgacaatggaggatcccactcggcccaacttcactatggaaacgaggctcatttctaaagggagtgagactgttgattacatccctaagcttgaacaccccaattttactttgttgtagttctgactccttattactttcacgaagggaaggaaggtgtggaaaggcaggagaaaacacgcagggacataagcatttgggctaacacacagncacgatatcaactgggcgtcttcaattctaaaagggatcntaggggaaaggacttcagaatcccaggacagttttgncaatcctggccgncccact

SEQ ID NO: 116040 - DNA, 629 bp, Homo sapiens
aattttatacgttgaagcttaaaatctaaatttatgtatgtttggaaatggaatggacattaacataaaatgtattttatcaaaaaggtgtttagactttgaccaaatacatgttggtattatcatgttaatgttctctgtttataaaaattgagtggagatagatagactcggccattctgtgggctgatgagaattctgggctttgttttgcaccaggggtaggaaacagagaacatgtctgtatgttacttaatctccatagcaaaatcccaaacagcattagcagatcgaacttgtttcttctaagacttcctttttctgaatgtgtacacatcccttctcgtgctcacacacttgcccacacactcacttcttcctgcgctgtggctgctctaagcagggctgtgcatggtgcaaagctgcagtcagtgagcctggcagcctgtggtttctgttatggaaatggttccatggtgaaacacatccctgacccttcacagacttacacatttactcaccaggaggtggcagcggtgtgggaggaggagtgttgaccttggacgcaggagagacacctgggttctagttcaagtcggccaaggactgtgtgaccttgacaagtctaa

SEQ ID NO: 116041 - DNA, 2565 bp, Homo sapiens
atgggggaaaatatctccagggcatgtcagagaccttcaagacagcccctcccattagaggcctggaatcttaggaagaaaaaatggtttcatgggcagggcccagggccttggggctttgtgcagtcttgggacttgggaccctgcatcccagccgtggctaaaaggggccaaggcacagctcaggctgctgcttcagaggttgcaagcttcaagctttggcagcttacatgtagtgttgggcctgcaggtacacaaaagtcaagaattgaagtttgggaccctccacctagatttcagaggagtatggaaatgtctggatgtctaggcagaagtttgctgcaggggcagagccctcatggagaacctctgctagggcagtgcagaagagaaatgtggggtgggagccccgacacagtccccactgaggcactgcttagtggagctgtgagaagagagccactgtcctccagaccccagaatggtagatccaccaatagcttgccctgtgcacctggaaaggctgcaaacactcaacatcagcccatgaaagcaacagggaagggtgttgtaccctgcaaagccacagcggcagagctgcccaaggccatgggagcctatctcttgtttcagtgtgacctggatgtgagacatggagtcaaaggagatcactgtggaactttaagatttaatgactaccctattggatttcagacttgcatggggcatgtagcccctttgttatggccaatttctcccattgggaacagaaaacatgccagctttattaatttcttcccatatgggctttttcatttggctgccaatgagcgagctcattgccaactcagcatgccaatgggaattggactggactatgagagggaaacaggggaccagaagattttcctgggctgctccccacaaaggatgattaacgccagccctgcattcagatccaaactccacaaacagtctctgggaattgtgctgggcacggtgccttttgtcagacatcatattattcagtccttacaaggaatggctgctggtcatcctgagtggctaacaacacccccagggaaatcaaccctagggtgctggacggactctgcagagatgtcagatcccacttttggactaatggacagcaggcagctggcttctgctccaccatttgctcagcaccaaggcctgggacaacttattggttccttacaaaggcacttggttgatcagggactgggctgtctccactcaaaggacttgggagaaggcaactcacacagaaggctgcatcagaagagaggctgtgcactaaagccagggagaacacccggtgccacagaagatgaacttgggaagcacacgagtcagccccctaggaccacctcccggaatatttgggaggaatacgagaagggctgggaatccccaaagtacgcgttacagtcacagaaatgtgaatttgagctatttgggagctggccagggtcggaaacagagtctttgaaggaaggggatatcaagagagatcaggataactttagctgtaccatgaagcataacccactcctcagccaaaccaccagttttagcctggggatgcgagataggcaggagagtagcagacgatgggagaaagcagatcggatcatggcccttgtgagggttttggtcaactttacatatacaggaccaaaagctgcctgtcgttttggacttgaattccggtggtctatgaagcctgtggccatcactgcacagtgctcttgggtcttgtacttcggggatccacagggcacagggcaaaaccaccctgacactcaggtacacggacagcaagtccactttgtccagccccggcgtggcgtccaaatgctgggtgttctgactccttattactttcacgaagggaaggaaggtgtggaaaggcaggagaaaacacgcagggacataagcatttgggctaacacacagccacgatatcaactggcgtcttcaattctaaaagggatcctaggggaaagagcttcagaatcccaggacagttttgccaatcctggccgccccaccctggttctcctcctcacaaacagcaaccacacagcgagctgccggtcctttactctttgctcttcatttataagccacattaggtgtcctttgggaccaaacattgtggaggcagaaaaaaagaggcaaacaccaccagagtttgaaaggctctttaatagcaagcgaatgaaaccacaggctgccaggctcactgactgcagctttgcaccatgcacagccctgcttagagcagccacagcgcaggaagaacactgtactcttcaaacgcatcgtcatctgcatccggaagccccagtaactacagggagagaacaagagaaaagcagctgtgagcgccaaatggcccacaggcaggaagacaaccaaaggcatcggatccacattaaagagtacttaacccagcagctgcagacttccccgtcaaccacccctacaatgattttcataaacttgttagacggaaatgtcaatctttcaatggattag

SEQ ID NO: 116042 - DNA, 432 bp, Homo sapiens
atgttggggtctgtgagaaacggggcgctcccggccgctcccctcgcgccggggccggcccgcgggccagttgccgccgccgtcccgccagcccgggagcgagccgcgcccgcccgtaggacgccgccgccgccgcggggggacgggggccgccggaacaatgaacttagaaagcttggggtttgcatcctggcactggaagtttggaggacacccagctccgatgtgaccacttctgagagccttcccgcgctcgcctcttcaccccttgcctcctccacacccccttccccgcagagccgcattcaaaccctgggacctcaaaatgcagaactgcagcaggaacccgacaatggggtgggagacaaagccagcttcagagatgccagtgtttacgctgaagggacgtgggcagaatccgccgacaaataa

SEQ ID NO: 116043 - DNA, 528 bp, Homo sapiens
ctccctctgcggggtctgatggctccagtgcgcccatttccccagactgtgggaggcactgtgcagaacctgagcgtcaacggtccccgccacacaaaccccatgggcgcagacagcacaggtgtggatggagaggtgcatggagcctgctggccgcctgtcttggggttgctggtgagcggccgtgcccctgtgccatgtggcataacgcagtcacagcttctggggattgagacatgcagctcttcttgggaagtgagggtgagacattattttgtctaccacacatggccatggccaagatttcggtgcaccacgcattgcaacgacaaagccaaagattcaatagatgctgggagtaaggagcttcagttgaagcagaagctggaaggtggtgtgaccaagtgtgtggatgaccacatgcacctgctcccaactatgaccgagaaggtgaaggaggctctctcatccattgggaaataaaagtctttgccagtggccatcggggctgagggcaataatgtattt

SEQ ID NO: 116044 - DNA, 584 bp, Homo sapiens
gtcctggtgtctattctcagggaaggtgaaagcagaaggtggagagagaggtgcaaatatccacgtggccttctaactcctgtagtgctccatagtcatctctgtccccagagactttcctacctaacctctctgccctttctccccagggtctcatgttccggtgcagcgccagctgttgtgaggacagccaggccttccatgcagtaggtgcaccagtacatcaaagcactgcaatggcgcctctggctcaagcccgggctttgctcaccagtgagttggagaagttccggcaccacctggcccggtgcgccatgcattgcaacgacaaagccaaagattcaatagatgctgggagtaaggagcttcaggtgaagcagcagctggacagttgtgtgaccaagtgtgtggatgaccacatgcacctcatcccaactatgaccaagaagatgaaggaggctctcttatcaattggaaaataaaagtatttgccagtggccatcagggctgagggcaagaatatattttttataaggaattgggaattttagtcttttaagcaaagtttacgaatgaagaaatga

SEQ ID NO: 116045 - DNA, 324 bp, Homo sapiens
atggacaacatggtgagggagtggaagttcagggagattaaatcattagcctacagtcacaagacattcaaggccacaacaaggaaacgtagcatggaggaggaagcatatgcaggaatccagcagaacagggtcggttcccacatccaccacctctggttacatgacctgggtcagtctagagggctcatccctactgagcaggatctcattgctcagcagttgtgcccggagacatctcagccagctttcagtggaaagctaagtaagccctgggtctgcggcgaggacagccctgcagcacgtctgcaccccctctgctga

SEQ ID NO: 116046 - DNA, 491 bp, Homo sapiens
tttttttttgttatttataaaatatagggcactaaacaaatgttaagacattttaataatatttcactgatagaaaaaaaaaatcctgcaggagaaaggaactggcaacaccttgctttctttggggatccacacaaaaggactgtcacacactcacaatgactcttttgcaagttgagcgtatcagtagaatctcaggataaagaaagatgacctctgtccccgtccttgaaaattcctgaaaataccaacccatataacagcaaaaacaatcctagcaaaatgggccacagttctttcattccagtgtcctgcttgagcggggatagccctgccctcaattagggcagaaggttgggcaccctccctgggaagtgagtgtcagtacctcaaggggacaagcagccgtgagggtcaccaaagtgggtgtgaaggaaggaggcacaggtgccagacacagagctgggcaggagggtgggccctggaggctt

SEQ ID NO: 116047 - DNA, 3639 bp, Homo sapiens
atgtcacgtgttgctggtggcccatcttctgctggggcctgcattggcaaatccaaccagaagccagaagataagagagctggggtaatgcagtctgtagagaggctagatccctgcggaatgaagaatgaggaaattgatgagacagcagctgccatctctgcagtcctccttccagtcctctgtgtggatgacaggtcacgacttgacgatggcggggtcctcctgctgggtgggagtgggcgcgcctgcgcgtacggcacggccaagcaactcgctagggccctgctttttgtaatttcaaccaagttacaccgtttcaacaagagctttgtgtactcccttacaagccgtcctgatgacagcaattctgtccctaacacggactcctctgtactactcctttgggggtaccccactaaaaatcggctacatgaggataaatcacttagacgctgcagcagcgtggtcattagtggcttcaagatgagcgcacgggtgggggtggtcctgtatgaggagcccaactaccacggccgcatgtacgtggtggagagtggcgacttccgcagcttctcggactgggaggcccacagcgcacgagtgcagtcgctccacaagatctgggggcaatttcccagaggagagtctgtaatctacgacctgcaagagaaaagggaagacaggctggctgaggacatctgcacccacagctctacagtccagactcaacccccagagatggctggctcatccccaccagggggccactttgtgccaaaccggagaaggaggggtgggggaggtggagaagccaagaacaaaaaatctatcaacctggaaagaggaagtaggagtcgggctccccgttccccgcgatggccgcgggccgcagtcgtacggagccgccgcgcggaccccggggcgcccctccctagcggggcgcagctccttcttgttccccgccctgccagcgggatggggggcggcgggtcggccctgagggtctgcgccgaccaccgcgggggcatcaactggctgagcctgagccccgacgggcagcgcctgctgacgggcagcgaggacggcacggcccggctctggagcaccgcggacggccagtgctgcgcgctcctgcaagctcaccggccccagaccgcggaccccagctcctgcgcccgcagacccctttctagaagtccagcccccgctcatcccggcacactagcggaagagcgcttgtctgggcccagcatctggctgttgagcgcacggcagggcagggtgccttgtggcctctttgtggccaattgtgctcttctgctggcatttcctgttgacgactctcacagcaacagtagacgcttgttaagggccagcgatgaaaaacatccaggaaaaaaaattccacaaggctccaaaaagcaaaatttggcttccctgctcaccaagtcctacactgaatccacacaagtgaagcgatgtgtagccatcgcatgtaaggaaaatagcgaacatgtgccattccctctgcggctgcctctgtcctcagtctgcgctacatcccgtgaggcaggcattgtccccatcccaggacatgaaagctatgtgaccttctgccagctggaggatgaggctgccttcacatgcagcgccgactgcaccatcaggaggtgggacgtgctgaccgggcagtgtctgcaggtgtaccgaggacacacgtccatcgtgaacaggatcctggttgccaacaaccagctcttcagcagctcctatgaccggacagctcgggtctggagtgtggacaaggggcagatgtcccgggagttccggggccaccgcaactgcgtgctgaccctagcctactctgccccgtgggacctccccagcactccctgcgcggaggaggccgcggccggggggcttctggtgaccggcagcacagatggcacagccaaggtgtggcaggtggccagcggctgctgccaccagacgctgcggggccacacgggtgcagtgctgtgcctagtgctagacacgcccggccacacggccttcacaggcagcaccgacgccaccatccgtgcctgggacatcctgagtggggagcagctgcgggtgttccgggagcaccggggctccgtcatctgtctggagctgggcagcaccttgccctgccctgagcgtctgaaggggctggcagaaggaaggcagcacacacttttgcagaaagagcagctggcactgaaggcagccaaacgtctgatggtttggggctctgctcaggtagtcactaagctggtgaaccgactcgtgtactctggcagcgcggacaggaccgtcaagtgctggctggcagacacaggggagtgtgtgcgcacgttcacggcccacagacgcaacgtgagcgccctcaagtaccacgcgggcacctggagggaggcccagcgcgcgctgtgtgtccgcagtgttcacgggcagcggggacgttgcgcccgggccttcgacgcgcagtctggagagctgcggagggtgttccggggccacacattcatcatcaactgcatccaggtaggtccctctgcccttctcggggccgccgccgtgggagggaaggtgccccgccccgatccatccacgcgggcagcggtgtcccccccgcctaccgcgtcaccggtgacgcccgcccctgcgcccgcagtgcacggccaggtgctctacaccgcctcgcacgacggcgccctgcgttctgggacgtgcgcgggctccgaggtgccccgcggcccccctccgcccatggcagctctcgcggctcttcagcaacaagcacctgagcggggtgctcttcagtcccttgatggtgccactttctgcatccatgtgccccggttggcccgggtgccaggagagaagctgcaggtgacagtgtctgccgtggagagctcatcatctcgctgcagagagaagcacctgctgcaggagcagccccttcaagtggagcagccccttcaagtggagcagccctttcaggtagagcagcatgcgcttcatagtcttaatgcagaagatacttcatcagagacggccggggccgccagggatcacctgctaggtgatgggcgggtccgccctcgggcgcggatgaacaggaaaatgggcctgttgggaggcaagcagatcggtgcaggagaacccgcagaaacggcaccatgcactgttctccgggtgagacttaagcacacacagacctcgggggtggccaggtcttgctgcgtcccggagccattggggcctgtggctgccacaaggggcatacctaccagagaggacctttccatcgtgctgaagggacggttccggtggcgcaggccagagaaccgccttgagtgctgcctgcgggcagtgctgccggccggccctgagcctgcacagacgttcacactgactcctgcttgccgaagacactgctgcttggtgatgctgcgctctggcctgagcagcccctcactgacacgtcagctccagtccccaccttatctccccacagcagagaatggagcatgcatcaagccatccagagaaacccagtggggcatggacccaaaacacgggcgctgcactcactttgcatttttatag

SEQ ID NO: 116048 - DNA, 568 bp, Homo sapiens
cggaaatctcccttgacaacaatgttaacaaacaaaaagttgcacctatactccttctaagcaaaccttcccttgtctctaggtgccttgtggcctctttgtggccaattgtgctcttctgctggcatttcctgttgacgactctcacagcaacagtagacgcttgttaagggccagcggtgcggagaagtgtgccgtcgtcacactatgttaccccacatacagacgtggaaacaggctgggagttaagtaattcgcccaggtcgcacagccagtgaggggtagatggcagtctgagccctctcattgctgtaaaccctgcctgcatgcctggtggtttctatttgtgccctgtactcactcaagaggtcagtgtgcctcgggtgcaccttcccctgggcctgtcccatgcactgtgaggtccctttcagctctggccctcctactgcccaggtagcacacgcagtcccctggatgagccgcgaggctttctgctgtgggtagttctttatcaccgcgggcttttccaccatcatcagtgaactctctgtggcctcgcccaggcctt

SEQ ID NO: 116049 - DNA, 1721 bp, Homo sapiens
tttttttttttttttcactttttatggaaaagttttatttgattttgtaaaacgtaatgttttgagtatacttactttactctttcaaagcaatgaaagtacaatgataagcatttgaataaaaagtaccctgttttatgagcttattttttaacatagtgaaggcatactctcactcgaaagtagaaatatgtgatccaattaccaaaccttaacatttacgaataaacacacacaactgaatagtcatgaaaaaatagaggattagtcaaaatattctgtttaaaaatattaaattcaagttacatggaaattttatgcataaaaatcatattgggataatcagaatgaatcttcagtgggtcatttctgaaaaacaaatactaactttagttaaaaagttaaacttttacttctctttttcaaagtattttcaaaacttcactattcaaattaaataggatattttaataatttacttcaaagatattatataattctgatcccaagagatcttcttgtggtgtttataaataaatctactaacagaaaagagtaagaaaagccaatctaggaaagaaaatcgttgaattaagtgagagtcaaagtgctaattcaatctatggggttttttcctccccatcatttcttttcacgttgcctttggagacagagtaatttgtaggcagctcgccttgatctacattttctctctctaatctctcttggctgtgatatagtacagggaaccactaatatcaccccctccattttcccagacaggaatacctaaggccaaacctcatgcccatcctcgggttgcaacaagtaacgtttacttcagcaacaaagtggacctctctagagattatttgttgtactgtcttgttgccttaatacgaattaatcattaaaaaataaattgaaaaccagaaattcaaactgcccatagacaatcatataaaagttgggaaaatgagaaatggagccttaaccattgaaagtctcccctcctccattcctagctcacacaattccaggaacagaatccctcaaacaataaacctaagcttccccctctgctgcatttaagaaagtgtcacttctttgcgtcgaatgggttgaaagctttgggagatgaacgggaaatttcaagtccaccactttcatcaatttcccttggtcttcccgttctcagtccgcactcccaaggcacgggcagcttcgccgggaagcggcttgagggagttggccctgccctcgtggccgtgggggagggcaggcaaggcgcggctggcgcacagcggagtcctcttcagctttatcacccgctggggtgtaggcttcttgtcggagagtagcaccttagctggaggtaagtgcgtgcctccattttcagcgctcgcagccccaggggaagcctgaggatgcccaggtgcccccgtgcccaccagggccgtggctctggaaggtgcagaagcgctgagctgcctttctgcggctaccactttgaaaccggtttgctgtcgccccagccgacgtctggatggcactggctggagacaccgtgactgaggccgagttcttgactttaatttgggtacttgtggaagggcccaaaaatctaactggcttaggaccagtcttatagttcacactttcgtccgcttcattgaacgttatcagtcgcctagaaatacagaagcgtggcattttgcaca

SEQ ID NO: 116050 - DNA, 384 bp, Homo sapiens
atgccgagcccgcaagccttctccagatgccatgtactctctcctccagggaggcagcgtccatggagcaaaaggaatgccaggatcctgcacaggcagacgcgggccagcctcagcaccgacagccgacgcgcagatagcagagccatccttggggcgaaggctcagcggggagcagcagctactgcatcttaccaggttaccggagcagcagaggcagctccttctaccagctgctgctcctcagcccctgaggaccctgcagaactcgtaagcactccctacctggtcctgccctgcccccaaggagatgtagaagtgggcatcatgcagaacaggcccttcccacaaggcagctcaagcagcaagtttgtctacatctaa

SEQ ID NO: 116051 - DNA, 413 bp, Homo sapiens
gatatttcggttcacgtttgttgccaaatcttgaaacgtgggtcccactatagcaacactcaatcccagccccaggaaggaggcacacagcatcaaggtggtgaaccaccgcagcttgctcccggtcccaccgctctgccaggagaccaccaccacctccggctccggctcattctccgccggggcctccgcctgcaggagccgctgccccgcagccgggggcccggccccacggagctccacctctaactccagctcggcggctccggagaagtcgtcttgctgccgccgcgcttctcagcagaacttctggagctccgagaagagcactggccccgaccccaggcacgggtgtccctccgggcgccacctcccagcggaccgcccggaaccggggcagagaagaggaactt

SEQ ID NO: 116052 - DNA, 771 bp, Homo sapiens
atgcgggagggctatgaagtgtgtctgtgtcaccagtgttctaggcctggctgctactcagaactggcttccaggggacaaagagggaagagttgtcacagccccaagaagttgaaagatgaaagcagggagcaggtatgtctgagaaaacacaccaccaatgaatggaaagaagatctcaacatctgctgcaatttgactgttcagtgctctaccaaagtatcggagtcagtcagtcatgcaggtaggctgccaaccatggctgagccctcaggagctgtcttgatgaccagcatagacacggtctgttgtgttcattcaaacttgccaggaaccaaggatctgagaatgtctctcgttccaccttacgagaaacacccacaggttaaaaatggttattgtgttgaaaatattgtgtcaagttactatgatgagaaagtagatgatgtgtgtggaagtcctgacagcacagaacttctcggcgactccggagaagtcgtcttgctgccgccgcgcttctcagcagaacttctggagctccgagaagagcactggccccgaccccaggcacgggtgtccctccgggcgccacctcccagcggaccgcccggaaccggggcagagaagaggaacttcggcacgccgcaggtgttcgtggcaaaagacgctcgctctccagcaagcaggcgcatgcgcgggtcacgtggcggaaatgtggcctctcgccaaccgctatcgtgcctcaagccggaagttgatatggttgcctag

SEQ ID NO: 116053 - DNA, 489 bp, Homo sapiens
atggcggccgaaatccactccaggccgcagagcagccgcccggtgctgctgagcaagatcgaggggcaccaggacgccgtcacggccgcgctgctcatccccaaggaggacggcgtgatcacggccagcgaggacagcctgggcaacaagaacaaaactttgtctcaaaaaaaaaaaaaagaaagaaataaggaatttggaccttattttgcaggcagtgtagaaccatcaaagagttcaaaacaagcaaatgatatgatcggaatttgtaatttagaaataacaatagctaacctgttgaaagtcccttttctctacgagtacagaattggaccttatgtgttattggatccaatcctcacacttcctccctataaggaatgctacgggaccacaatggtgcttcggaggacctctatgcagtccaaatcactggatatgccagaaatctgtctcaaagtgttatctcagtgtattgctcaaggctga

SEQ ID NO: 116054 - DNA, 454 bp, Homo sapiens
gcctgccgaggaggccgcagcagtcgccgcgcgaacatggcggccgaaatccactccaggccgcagagcagccgcccggtgctgctgagcaagatcgaggggcaccaggacgccgtcacggccgcgctgctcatccccaaggaggacggcgtgatcacggccagcgaggacagaaccatccgggtatggctgaaaagagacagtggtcaatactggcccagcatttaccacacaatggcctctccttgctctgctatggcttaccatcatgacagcagacggatatttgtgggccaggataatggagctgtaatggaatttcacgtttctgaagattttaataaaatgaactttatcaagacctacccagctcatcagaaccgggtgtctgcgattatcttcagcttggccacagagtgggtgatcagtaccggccacgacaagtgtgtgagct

SEQ ID NO: 116055 - DNA, 1272 bp, Homo sapiens
atggtgggaggagcccaaaagaataagatactccacttgcaggttcctaacagggcagagaaaacacacgcagaaccagaacacaagagggctggggtggtgactgccagcaaggcctttttgagcctgagtcttgaaaaaggagaaatcagccagacaatgaacacaggaggagaaagggaattccaggcagaggtacagaaggagcaaaggcagaaaagcactgggcggtaccagtgcagtttacgggaggttcagttttgcaagaaaagaatgtttcaggcaggggacaaggcaaggagatgggaagggagtgaagaaagctttgactctgttgggtcattacaaatggccagcagcctgcaaggcaaggccagcgtgactagagcggacctttgtggaatttcacagcatgaagaagcaacaggatctggtgacagcctgcatgtgggcagtgcgggagcctggcatcaccaatttctgagtaccgtactttcattttacctgcagtcactcatccgcctcgcaactcccgtttctacagatgatgaaaatagcaaagacctgctcgctcgggttaaatcggctgccagaggccaagttaaaggctttccccacaccgcgcgtcacctccctctgcccaggcagagggggcggccgcggagggcggtgcggccgcaaccggagcgggagcctggtctcggcggcgcggggagtcggaggacgcagccaagcggcggcggcgaggagggacgccccctctccgcctgcgacttctcggatgccgccccgccaggggtccgtgtcgtggggctgcgcccggaacgcgccggggagacgcgcagaccccgaggtgcggcgccagcccgggcccagctgcacttaggtttctggggacccaaggacccaactttaatgacagtaatttatgtagccgttagtgtagaatcgtcgctagcaggcagacggccccaacagcgaggaagaaatgtaaatctccctatacacagccctggattaagggtacagctactgatgagagccacttggaagatcagcctgcagtcaccccttggcatgcaggtggccgtgccagagtgtgcacgtacatgcgatgaggccaacgatgaggtctcccaaaggaaagtgattgaagacaaagacccattctgccagtgggatatgctgggaataccaactatacttgttactgagtgtgcatggctggtgttggccagccttcctgatgccagcaagaggagacagaagtaa

SEQ ID NO: 116056 - DNA, 2559 bp, Homo sapiens
atgtataaaggcgccccgtggcatcctctcccagccacagactttcagcttgcgcggcatccccaggcaatacgggcggtgcggcggcagcactcgggggcttacggcggcgcggcgcccaagaggccccagcagccgaagggaaaccggcgcgtcccccgcccgcccaggcgtcagctgatgggctgcctgccgaggaggccgcagcagtcgccgcgcgaacatggcggccgaaatccactccaggccgcagagcagccgcccggtgctgctgagcaagatcgaggggcaccaggacgccgtcacggcgcgctgctcatccccaaggaggacggcgtgatcacggccagcgaggacagggccagagtcacctctcccatgcttgagtgggcagtgtcagccaacagctctccgccttgtttccgagttattttgatttgggtttgttctcttagggctggggtggtgactgccagcaaggcctttttgagcctgagtcttgaaaaaggagaaatcagccagacaatgaacacaggaggagaaagggaattccaggcagaggtacagaaggagcaaaggcagaaaagcactgggcggtaccagtgcagtttacgggaggttcagttttgcaagaaaagaatgtttcaggcaggggacaaggcaaggagatgggaagggagtgaagaaagctttgactctgttgggtcattacaaatggccagcagcctgcaaggcaaggccagcgtgactagagcggacctttgtggaatttcacagcatgaagaagcaacaggatctggtgacagcctgcatgtgggcagtgcgggagcctggcatcaccaatttctgagtaccgtactttcattttacctgcagtcactcatccgcctcgcaactcccgtttctacagatgatgaaaatagcaaagacctgctcgctcgggttaaatcggctgccagaggccaagttaaaggctttccccacaccgcgcgtcacctccctctgcccaggcagagggggcggccgcggagggcggtgcggccgcaaccggagcgggagcctggtctcggcggcgcggggagtcggaggacgcagccaagcggcggcggcgaggagggacgccccctctccgcctgcgacttctcggatgccgccccgccaggggtccgtgtcgtggggctgcgcccggaacgcgccggggagacgcgcagaccccgaggtgcggcgccagcccgggcccagctgcacgtgggtctcccggatgggggtgtggcatgtcgtcttggctgccccctggaagagacagagggcgccctgagacagcgctcagtcctccgggtgatggggaaacggtgccaggacgcggccgggaaggggcagataacccctcgaggcgttttgcagggtgtcctagagctgacttctccctgcctaggggacagaggaacggcggcaagtcgccttaggcaaatacagacgagggaaccagaaaactggattcccggctatggtgatagcatgaggtacccgcagcgtcctggaacccagcccttctcagccggtaaccactgctgctgggacccgttaggtttctggggacccaaggacccaactttaatgacagtaatttatgtagccgttagtgtagaatcgtcgctagcaggcagacggccccaacagcgaggaagaaatgtaaatctccctatacacagccctggattaagggtacagctactgatgagagccacttggaagatcagcctgcagtcaccccttggcatgcaggtggccgtgccagagtgtgcacgtacatgcgatgaggccaacgatgaggtctcccaaaggaaagtgattgaagacaaagacccattctgccagtgggatatgctgggaataccaactatacttgttactgagtgtgcatggctggtgttggccagccttcctgatgccagcaagaggagacagaatggaacgaacattgatttatctgtggccaccaacacttgttcccctcctcaccttttgatagtggaaacacctcttctattttatgcagcattttgttgggaaggaaatcaagaagaaatgggaatagtgcgtttagatacatttggtctttctgagactaatgttatatctaatttagattttatggtttgtaagaatgaggaaaaggaagagggcttccagaggaaagtgaacagaaagctgtacagctgtgagattgcagatatttgcttgcctgactctttctggcttggcttgtccatgatgacctgcagaaccaaccaaccactggaggaatgtccaggatatgaacctgtacagcatatcactacactgaatactatagacaattgtaacacaatggcacataagctgaaaatggtacctgagcaatttctgagtatgtcacgaaaaggcactgaaatacagaagtttctctatggaaaagagtgtcccggcttggaaactgtgtctgaagcaaaaaatttcctcaaaattgttcttcagaaagggagttgccgtctagtagggtccttacaaaatcattaa

SEQ ID NO: 116057 - DNA, 589 bp, Homo sapiens
ggcattccttccatgaaaaatgtttttccggaccactgggtaaatccttagatttggttccaattttgtgacccatatcacttaagttcagactcagcaagaaaccaaatccagtcatgaaaagaaccacaccaacagtgcttggaatgaaatttgatgctattagtttttcaggcagccttgttgaactttactaataaccgtaagtgggttgacatagatgagcctccaaggccgaactctaaaacctgctccattgcccataagagaagtgcatcgggtgggggcagagtcccaagtgcccacagaaagggtaaaaatacaaacaagatgtgtaaaatctgattcatgtgttctagagctggcatatttaccacaaacctcaagtcacccgagggaagagaagacgcgaaggcatcccagggaccgcatttttgcaggtaaactcgggctgggcgctcccgccgggaggttggttagtgcccgaatgcggaggcagaaaagctgcggcggccgaataacgagctcaccgcggccccgcccgggccagctctcggtttccatggctaacgtctactccggcggccgc

SEQ ID NO: 116058 - DNA, 1033 bp, Homo sapiens
cggccgccggagtagacgttagccatggaaaccgagagctggcccgggcggggccgcggtgagctcgttattcggccgccgcagcttttctgcctccgcattcgggcactaaccaacctcccggcgggagcgcccagcccgagtttacctgcaaaaaatgcggtcccctgggaatgccttcgcgtcttctcttccctcgggtgacttgagaaacctgctgtgttacagaaaagcatgtgactttccagaataatccccgagtgaggatgagtcccagatgtgcctctactgaatgattacaagcaggacttctttctgaagcgctttccacagactgttcttggaggccctcgattcaaattaggctattgtgcccctccttacatatatgttaatcaaattattctttttctaatgccatgggtttggggtggagtcggaacacttttataccagttaggcatcctgaaagactattatacagcagcactttcaggtggattaatgctttttactgcatttgtcatccagttcacaagtttatacgccaaaaacaaatcaacaacagtagaaagaatactaaccacggatatcttagcagaggaggatgagcatgaatttaccagttgtactggtgctgagactgtcaaatttctcattcctggcaagaaatatgtagccaatacagtttttcattctattcttgctggattagcgtgtggtcttggaacatggttattagtaatgttcatcatgtctgctggaacagctatagcatcatatttcattccaagcactgttggtccttcaggaggtattccagaagaaggcattgttatcataggagatgacaactccatgtatgttattgcccctgaagactttccagtggaacaagatgtgaagttccaaggacctcacacagtgatggccatatcccccatatacacatttaagtcagttctatcagagttgagtttgagcagccttacccggagagcatgcttgctagcacagtatccaatggaaagag

SEQ ID NO: 116059 - DNA, 430 bp, Homo sapiens
ctgcgggcggaggagcggccatgccgccgcggcgcatcatcgtggaggtgaaggtgctagacgtgcagaagcggcgggtgcccaacaagcattatgtctacatcatccgggtcacgtggtccagcggctccaccgaggccatttaccggcgctacagcaagttttttgacctccagatgcagatgttggacaaatttcccatggaaggaggacagaaggaccccaagcagcggatcatcccctttctgccaggtaagattctcttcagacgaagccacatccgggacgtggctgtcaaacgcctgataccaattgatgaatactgtaaggccctcatccagctgcccccctacatctctcagtgtgatgaggtgctgcagttctttgagacaagacctgaggacctgaatccccccaaagaggagcacat

SEQ ID NO: 116060 - DNA, 813 bp, Homo sapiens
atgcctggccgatacagttgcattataaactctgacacgggtgacgacgagttgggagaccaccttctggtgttaacacccatctcctctgttgctcccgaggtctacatcatccgggtcacgtggtccagcggctccaccgaggccattaccggcgctacagcaagttttttgacctccaggctggggctcccagaggagaagcagacgcaagggaagccgctggaggcagtgtggcacctgaagacgctggagctgctgctgtcagataggaccgtctgttgcaggaaaacaagctcagggctcccactactctacacgatggtgagaacaaagaggccagagaggttgaggatttttccaggtcacacagcagcaagcagtggagcggagtttgaaatgaaagcctgtctgactccggagcctgtgccctttgtcgtgtgtgctattatcatcagcattctgtgtggcttgtctgtttcgattaaaactgttcaaggtcagatcattccagatttcctggtcccttccctcctgaagaaccactggaggaacgaggactcccagcctgtggaggaaagggactggtgtcaagcaggtgccctggaaatgcttagaggatgcttggatgagaccacctcttgctgcaggaagactgcctgccttctgcgaagaagaactcaccggaaaaaaggaataatgactgcttccttccagagtcattaccaggatgaagcaaaaagcacactgatgcgttacaccccaggagactctcaatatgtggaggtcattggagagaaggtttctctctag

SEQ ID NO: 116061 - DNA, 1690 bp, Homo sapiens
tttcgtggctaggcccgacaggggatctgaagaggcttatgaggctgggtgaggcgctgagacggctttggcggtgagtcctgggccaggcgcagctgaaaggcccgcaacccgggaaacgtcaaaacaaacagaaggacttgggattccggagcagtcgcccctatcgctgctcctgcagttgcggacgccaccgaccccgccgccggaggactgggcactgaaaggcctctaggcctaagcgcggcccgcggagccagacgtgttgctgccgtgagtaaaacgagcgccctctccgcactcgtttacaaattaaaatggaggaaatttcgttggccaacctggatactaacaagctagaggccatcgctcaggagatttacgtagacctgatagaggattcttgtttgggattctgctttgaggtgcaccgggcagtcaagtgtggctacttctacctggagttcgcagagactggtagcgtgaaggattttggcattcagccagtggaagacaaaggagcgtgccgcctcccgctttgctcccttcccggagaacctgggaatgggcctgatcagcagctccagcgctcacctccggaattccagtagctgcaaaatgagagtctgaaagtggccaggacaataacatagactggtcctgtggcttcgaggagtaagctaagtagaaaaaagtagaaaaatcagacaaaagttttaattcccccttgaagatcctagcatttaaaaacccaaagtggataatttaggaatcctttttttaaagtgtattacctggagcaagctctgaagccctgggcaaggaggagctgcacagcctgcgggccatgcagtgcctgttgatctcctaaacacaccaggatgtgcgcaagatcctgtagttgcccccaagtgcacaggtgaagcagttgtgtgcccagcatataaaaattttttggttcctcaagcctttctgtctggcctgatgtcaagggctttcctggacagttttggacgtttacaagttcgtcaagggccgtgatcagtggcctgcagtgggactgctcctttgatatctgaacctctgttatgggcttctctgagacaagtaaatgtcaggtgcaagatctggatactaacagtttcagtttgggaaatccaagaaaaagaaatatcaagtttgatagggaagctctgtagccttgactccagcaagaagaaaaggtcaaaaccacgtgtttcccaaaagtccagactacaatgattcagctgacttgaggacaaggcctagcatttggctgagcagagccctcttccttgccctcccaacctggtggcataggcttggcaaatggacaacttggttgtccagaacaggttgaggattcggttatgatcccctggggaggtagcagggacctctgcaactatgcatgatttctcaaacttcaagattcatgtctggatgtattatgctgtggatataagtttagtagggcgggcatttcctactctgagttactggttacctagccagtccatgggtgtgacttggtccttaagtcaggtcactatctgcctcccaccctgggggcaggactgaagtatagaagagcatcatggctgtgcaggaggctgtggtttgaaaacctgacccaagagggactttaacttggcctaataatgggaag

SEQ ID NO: 116062 - DNA, 819 bp, Homo sapiens
tcctgggcgatcagactggtcctcggaggaatgcagcccaacgacttctacattttaaaatctggttttctgcagctcgttcgcagttctccagggaccagcctctcgagagggggcgctttcccgactttggcaagggggcgaagaagcccgggtgtaagcgcagcaggactgcgtctgaaactcggcatcaggctgctaagtgagcccagggctcgggctggggcagcgggcggccaagcaagcatcccaccccatttatttgtcaaaaaccgaagaaagcaaagccttttagcactggcagctaattttggtgcctctgaacgtgtgaaacgcccctccccgccccactcgcatcctgccaccttgcccgcggtagctaggaggttaatcgttaaaaaggtggactcccccagggaaatagatgaaaggatcgtgcccggagaacttgtgtgtgcccactcacaagtgcagagaattaatctcggcccggactgcggcaggagggcaaactggggaaagaaggctgggaggcggcccggtggtgcagagacgcgcggcgcctgctcccgcggctcccggggctggcgtgccctgcgcttacgctccgcgctcgaatatcttccccggagggctcgggaccagcgcgagcaccttccctggaagcccacatccatcacccagcgatctcctctccatcgagagcagggcttgctgagagtggcggaggaccttgaaggctcccggttctgtatctccgtggccgagacgctttctgctcgaggcccaggggagtccgggagcgaaagcctcttttga

SEQ ID NO: 116063 - DNA, 276 bp, Homo sapiens
atgaagctgtgtcccacacagttagttgtcagtgcggtggtgaaggccacacctggcagtggctacagtgcgtctcctgtgagcaggggctgtagctcaccctctcggagctacgccgtgctacggcggcaggagagggagcccgggcgctctcggtggaggaggctggggatcgcagtgccggtgctgcattcagaaaagactcagccgcagccggcgatgtgtgaagttcccagcacgcactcagcccggctgctcctcaccctcaaatgttga

SEQ ID NO: 116064 - DNA, 369 bp, Homo sapiens
atgtctgcaactcgagccaagaaagtgaagatggccaccaaatcatgccccgagtgcgaccaacagatcctggggcccgccggcggcggcggggatccggggccggtcgggctgcaccgaggggtttcccgggaaaagcccggggccgtggcccgccagcgtccacctggcggcggccagacggccaagccccttcttgctgtgtcccggccactggaggagcgcgcctttggtttatcctttgaaaaagagaaacaggaaaaggaaattgacatctatgctaacctgtctgatgaaaaggctttcgtgttttcagtcgccttggcagaaataaatagaaaaattatcaatcaaagacttattctctga

SEQ ID NO: 116065 - DNA, 1087 bp, Homo sapiens
gactgggcgggcggaggccgggctgccgaagtgtgaggggaggagcccgagccgtcgctgctgccgccgctaagggagaggagcatgtctgcaactcgagccaagaaagtgaagatggccaccaaatcatgccccgagtgcgaccaacaggttcctgttgcatgtaaatcatgtccttgtggttacatatttattagcagaaaacttttaaatgcaaaacactcagagaaatcaccaccttctacagagaaacaggaaaaggaaattgacatctatgctaacctgtctgatgaaaaggctttcgtgttttcagtcgccttggcagaaataaatagaaaaattatcaatcaaagacttattctctgatacttgcttgcaaaatctgctgaaacttctgtcaagataacatcagcaaattctcaaacagttatggactctcaggagcattctgactgcatcaataagggccatcgattgtttctttctcgcctgtcgtttagcctgtgccacacttcgggagcaaagctgtgtaggcttggactgttctgggatttccttgtttaccaaggagtattgtcagtgttttgtgtttgggatataagtaagtgtatttgccaacaacaaaaaaaaaccaacaaaaatgctgggtgggtgttaaaggataaaaagtgatgggggtatggggggtagggtatggaaaactagggtaataagatgcttgattgttttcaggtttgccaccagagatgcaatattttaaatactgtcagaaagagtgatttttaaaaatatatatttcagattttcagtgctaacagattgcatatatacagttcatttacttttattaaattggcaatcgatattttattgaatggggaattaagaatataaactgtaaattttgtcttaaattgattttttttcttggcctttatttttattacttaaggtatgagttatattttaggagatactttctagacagtttgaagtttgggtgctatatgaagaaaaacatttaatgatatactcagatataaacaccttgttttcttgaatgtaatttatttattagctaaaaaaa

SEQ ID NO: 116066 - DNA, 728 bp, Homo sapiens
acgtgattcctggacacgatgcgtccggttactgggccggctttgccgggctgccgaagtgtgaggggaggagcccgagccgtcgctgctgccgccgctaagggagaggagcatgtctgcaactcgagccaagaaagtgaagatggccaccaaatcatgccccgagtgcgaccaacaggttcctgttgcatgtaaatcatgtccttgtggttacatatttattagcagaaaacttttaaatgcaaaacactcagagaaatcaccaccttctacagaaaacaagcatgaggccaagaagaagccaaccagagagagttaggagagagaagataaattctacagtagataaagatttagaaaacagaaagaggtctcgaagtaacagccattcagatcatatcagacgaggaagaggaagacctataagtgcatctgccaaaaaaccatgaggaagaaagagaggaaacagggaaaaggaaattgacatctatgcttaacctggtctggatggaaaagggcttttcgtgttttcagtcgccttggcagaaataaatagaaaaattatcaatcaaagacttattctctgatacttgtttgcaaaatctgctgaaacttctgtcaggataacatcagcaaattctcaaacagttatggactctcaggagcattctgactgcatcaataagggccatcgattgtttctttctcgcctgtcgtttagcctgtgc

SEQ ID NO: 116067 - DNA, 436 bp, Homo sapiens
tttcgtggcgacccgggcggcggcggcggtcgaggagcttttatggcagggacgaggcggagggaaggcgaaaggggggcgaggagttaagccagagcctccgcggggcgggtttccgagggaggcacagagggaaacggctctcgcagcccgaggagggtcaggcgcggagcttgtcgcccctcccgcgcattctgtccagcccgggctccggagatgcatctgcatcaggtcctcaccggggctgtcaaccctggagacaactgctactccgtgggcagcgtcggggatgtccctttcacggcatacggatcaggctgtgatattgttattttggcaaatgactttgaatgtgtacagatcattcctggtgctaagcatggaaacatccaagtcagctgtgtggagtgttctaaccaacaaggaagaattgcag

SEQ ID NO: 116068 - DNA, 1029 bp, Homo sapiens
atggggccgggcaaggtggctcaggcctgtaatcccagcactttcggaggccaagataatagattgttgacagcaactgattctattcagttgtgggctcctccaggagatgatattctggaagaggaggaagaaattgataatacagaaccttcagtatctgtacatttgatggaatggtctcctgatggtgaatattttgctactgctggaaaggcatatggatcaggctgtgatattgttattttggcaaatgactttgaatgtgtacagatcattcctggtgctaagcatggaaacatccaagtcagctgtgtggagtgttctaaccaacaaggaagacggaggctgcggaacaacaaagattgctgcctgttcctacctctgggagctttgtcccagaagggcacccgccagatgccgggcagagctctcctgtatgtggtgtctgtaggcccctactgtgaggtgtctccagtctgggtacacgggggggtcagggacccacttgaggaggcagtctgtcctgtatcagagctcgaatgctgtgctgggagaattgctgctctctttagagctgtcaggcagggacgtttaagtctgctgaagctgtgcctgcagccgccccttcccccacgtgctctgtctcggggagctgtggtgggctccacccagttcaaacttcccagcagctttgtttacactgtgagggtaaaaccatctactcaagcctcagcaatggcggatgcacctcctcccaccaagctcgagtgtcccaggtcaacctcagatgctgtgatagcagtgagaatttcaagccagtggatcttagcttgctgggctccgtgggggtgggacccgctgaaccagacactggagaaaatttcctgttctgctggttgtgaagaccatgggaaaagtgcagtatctgggctagagtgtactgttcttcccggtaccgtctctcacagcttcccttggctagcaaagggaaattccctgaccccttgtgcttcccatgtgaggtga

SEQ ID NO: 116069 - DNA, 742 bp, Homo sapiens
tttcgtccggggctggcgcgctctcccgggcttacacatagccgccaccaccaccgccggcggcgggggcagccatttcatctccacagaggccagacacaaaaacatggcagaaatggagaaagaagggagacctcccgaaaataaacggagcaggaagccggctcacccagtgaaaagggagatcaatgaggagatgaagaactttgcagaaaacaccatgaatgaactccttggctggtatggctatgataaggttgaattaaaagatggtgaggatattgaattcaggagctaccctacagatggggagagccggcagcacatttctgttctcaaagaaaattctttgccaaaaccaaaattacccgaggacagtgttatttcaccatacaatataagcacaggctattcagggcttgccactggaaatggactcagtgactcacctgcagggtcaaaggatcatggcagtgtgcccattattgtacctttaattccaccacctttcataaagccaccagcagacctagaggcctatgagagaaaaatggtttcctgggccaggtccagccccccctgctgtatgcagcttctggacttggtgccctgcatctcagcagcttcagcaatggctaaaaggggccaaggtacagctcaggctgttgcttcagagggtgcaagccccaagccttggcagcttccatgtggtattgagcttgagatgtgtagaagacaataa

SEQ ID NO: 116070 - DNA, 636 bp, Homo sapiens
cgacccacgcgtgcggccacgcgtccgcccacgcgtccgggggaaaatggcggacgggaaggcgggagacgagaagcctgaaaagtcgcggcgagctggagccgccggagtggattcatgggagcctcttctactgccacacaatctcagttcctgctgtatactctaacaaacagtggaagagactgttgggtcagtaggtgacaactgcagaggtatcttccttataacgatgctttttgaggttgctgctcccatcaatctgctcagtaaaaatagctcatcttggtaagtttgtttcgacttcaccaggacctgatgaagaagcagaaaaacctgcgaaaactaagactgtttcttccagtaatggaggggaaagttccagtcgcagcgctgagaagcgatcagctgaagaagaagctgccgacctcccaacaaagcctacaaagatctccaagtttggatttgccataggtagtcagacgacaaagaaagcatcagccatatccatcaaacttggatcaagtgtgagttgttatttcatatatgatgtttgtaatgggtcttaaggatttgctttggaaacgtggcgtttactaggttatggtaaattaagggtgaaaaggtacattgttt

SEQ ID NO: 116071 - DNA, 567 bp, Homo sapiens
tcccgggtcgacgatttcgtcggcggggaaaatggcggacgggaaggcgggagacgagaagcctgaaaagtcgcagcgagctggagccgccggaggacctgaagaagaagcagaaaaacctgtgaaaactaagactgtttcttccagtaatggaggggaaagttccagtcgcagcgctgagaagcgatcagctgaaagaagaagctgccgacctcccaacaaagcctacaaagatctccaagtttggatttgccataggtagtcagacgacaaagaaagcatcagccatatccatcaaacttggatcaagtaagcctaaagaaacttgttccaactcttgctccaaaaactctttcagtagcagcagcttttaatgaagatgaagatagtttaaccagaggaaatgcctccagaagcaaagatgaggatgaagaatattggaagggatacaccaacattcagctggaccaaactccttcaataaaggaaagcatgggttttctgataaccagaagctgtgggagcgaaatataaaatctcatcttggaatgtccatgaccaagacaa

SEQ ID NO: 116072 - DNA, 345 bp, Homo sapiens
tccgtggtgaatgagcacccaacgcccgctggaaaacagggggctcggaaatgtggccttggggaaagaccccagggattaccggaaggagggatgtccgcggagaagagtccagtgggtggggacgcctggatccccagcagctctgcattcggggtggacttagctcttcgcgccctgaatcctcagagcccagcgcggcgatcgcgtcggggcaaagccggcgcgtttctggagcaccgagcgggtggggagcccttccagcctcccagcctctgccggcgagcagctttttcgatttcctgccggctctcggccccgcagtgcgttgtggccgcgcgctag

SEQ ID NO: 116073 - DNA, 507 bp, Homo sapiens
atgagggaagacgaggaggaggaggaggagtatagaatgaccactaggcttccagcttgggcagctgaggaaaaggtgacatgtcattcaccaagacaggaaaatggaggagctggtttgagacaaaaggaaccacaccaacaaaaacctcccaaccacacaagaaaaacaagtttaggcacaaaagctcttgtggacacacgatgtttagcagcatccctggactctacctactggaagctgccagtaacactctcccaacctccaccaagatgtaaaaatgaccatggagaacaaaattgtccctggttgagagtcactgttagaacatctttggaagagtacacaagaaatcaggtcaaagtagaacagaagcggcagatgagaaccgtggtgagggcaggagtgcggtcctcacagagcctagtcctgagccagccttggtatggtaacaagagtgaggcatttggaggcacattctgccgctttctaatcatggaaccctaa

SEQ ID NO: 116074 - DNA, 1362 bp, Homo sapiens
ttggaagctcagctgatgcaggccggttggagtggacgtcattgccgggaacgagcgagtcgccgctgcagccctagtgactgcggcctgcatcccgattgtcttctcctccaaggtctacatgattacctgaagtttaataagtaagaccatgaattatggcatttcttaaatgaagcgttcaagaagtgagagaatgtcatagaaaataaatgatttttaagttatgtgctattaatctgactgtagatatatatatttacctccttagtaatgcaaagaaagtgtttgtgggaagcagagaagcaagcaacttgtatttcctggttctcacctaagcattactggaggataagccacatcagtctacaaagaggttttcatacaaacataataagatgtaaatggaccaaaagtgaagcacattcttgcagtaagcactgttactctccaagcaaccatggtttacatattgggattttgaaacttagcacttctgctcccaagggacttacaaaagtgaacatttgtatgtccccgtattaaaagtactttgaactctgtttcaaaggctgttttttggcaatcaaaatgaaaatgaatttcacggtttagctcaatttaagccaagttcccaatttttaaggaaaaagtatcgggatagtggcctggttaaaacagaaaaacatcaaacaagccatcaaatctctgaaaaaatatagtgacaaatcagcagaaaagagtccttttccagaagagaaaagtcacattatagacaaagaagaagatataggtaaacgcagtctttttcattacacaagttctataaccacaaaatttggagactccttctactttttatcaaatcatattaattcatatttcaaacgtaaggaaaaaatgtctcaacaaaagggaaatgaacatttccgggacaaatcagaacttgaagataaaaaggtagaagaggggaaattaagatctccagatcctggcatcctggcttataagccaggctcagaatctgtacatacggtggacaagcctacaagtccttctgcgatacctgatgttcttcaagtttcaactaaacaaagtattgctaactttctttctcgtcccacggaaggtgtacaagctttagtaggtggttatattggtggacttgtccccaaattaaagtatgattcaaagagtcagtcagaagaacaggaagagcctgctaaaactgatcaggctgtcagcaaagacagaaatgcagaggagaaaaagcgtttatctcttcagcgagaaaaggcaagttgttcagtgtgcttttcggttctattactttttgtcaaatttataagttttatttcctaa

SEQ ID NO: 116075 - DNA, 378 bp, Homo sapiens
gttagcagagaacaaatgggaaaagttaaacgtattcgtgcagatgaaagcaacatgtacttggattgtcaaacaagggctaagctaactgcagtaaatatgtttggctgcaacattggtgattcctggggaggagtctccagtcgtgcaacaatgcagcattccccaggcagttgtaaagtcaggagtgcattaagaagcccctgtttgagtagcttttctgattcctggatgtgcattgtaagaaccaagagaagaaaacgctgtgtgagacggctttatgaattgggcatgatagccattgggcgatacagcatgacaatagagactgtggatgtcggtggtgtaaagaaatcacagaccaaggagccaccctga

SEQ ID NO: 116076 - DNA, 429 bp, Homo sapiens
tcatatcactgaactggataatgaaaccgcgatggaaattgtcaagaggtgcaaaaatcttatctctctcaatctctgtctgaactggatcataaatgacaggtgtgtggaggtcattgcaaaggaaggacaaaacctgaaagagctatatttggtgtcctgtaaaatcacagattatgcactgatagccattgggcgatacagcatgacaatagagactgtggatgtcggatggtgtaaagaaatcacagaccaaggagccaccctgattgcacagagcagcaagtctatgagatatttggggctgatgagatgtgataaagtcaacgaagtgacggtggaacagctggtgcagcaatacccccacatcaccttcagcaccgtcctgcaggactgcaagaggaccttggagagagcctatcagatggg

SEQ ID NO: 116077 - DNA, 425 bp, Homo sapiens
  misc_feature (1)...(425): n = a,t,c or g
cggaatccggcacgaggaaagatccacctacgacctctggtcctcagaccgaccaggccagggaacatctcaccaattttaaatcagccgcttccagatcccctggaactctggcccaaggctctctgagtgactccttcccagatcttctcggcttagcagctgaagactgacactgcccaatcgccttggaagcctacaggacaatcacagatgctctgggtaactctcacagtggaggggacgtgagtaaaaatgnnnnnnnnnnnnnnnnnnnnnnnnnnnnnnnnnnnnnnnnnnnnnnnnnnnnnnnnnnnnnnnnnnnnnnnnnnnnnnnnnnnnnnnnnnnnnnnnnnnnnnnnnnnnnnnnnnnnnnnnnnnnnnnnnnnnnnnnnnnnnnnnnnnnnnnnnnnnnnnnnnnnnnc

SEQ ID NO: 116078 - DNA, 487 bp, Homo sapiens
atcgcccggctgattaattcggcacgagctgacacttaagtcagagcattctgtagctgtattttacagaactgtaattgcacagattgttcctcttacaagagaaatatccagagctctaagaaaacaactgatgaaaacgacatgcgtgacatttggtgctgaagacccaggtcagagagactcctttgggggaccagtccgctgtccttgccctcactctgtgaggagacccacctacgacctcgggtcctcagaccaaccagctcaaggaacatctcaccaatttcaaatcgggaccccactggaaaatggactgtccaactcacccggcagccactcccagagcccctggaactctggcccaaggctctctgactgactccttcccagatcttctcggctcagcagctgaagactgacactgcttgattgcctgggaagcctataggaccatcacagacactttggataactcttacagtgg

SEQ ID NO: 116079 - DNA, 648 bp, Homo sapiens
tggggattccgaggcgatcgggcagcatcagtcttcagtcgctaagccgagaagatctgggaaggagtcagagagccttgggccagagttccaggggctctgggagtggctgccaggtgagttgctaggaaccctccatgcaggctctgaacctggtggagctcttccttggtaagtgtctgagatgtctgctgttagtctgatgggcttccctttacaggtaacctgtacatgtagaagggagaggtctttggggacctggtcgagaaaaagtggctatgtgatgagtggcagggatgggaagtcagtgaagaagtcaaagctcttggacagaaagaagagtcaggtacgtgggcttatggaaccaagaggatgctcacctggagactgcactgccgcttctagattaccatgggtagcaagtacccaagaacaccctttccaaatggctctaagcccatctccagacctgtgcaggcttttcctaagatatatcttccaaaaaatggaccttgtcattggtgtgcatatacctgaacccaagcattggccaaggggcaacggtttgcaggtacatgttatcaccactctactatctgtttcaacgggtttgactatattagatcccacaaataagtgagatcatgc

SEQ ID NO: 116080 - DNA, 1626 bp, Homo sapiens
atgatctgggaaggagtcagtcagagagcgttgggccagagttccagtggctctgggagtggctgccgggatgagccttttcagattctgagccctttcagaattctcagaaatcttgaggaagacactggacttccctggcacccagtacaggcagcaggctgccaccaagaaggctggcagtgccctcttgaggaatcccttggcagtgccaggagcctagctggactcaagaatattttgccaagggcacccagcagaaccaatggaagcagaatcacagaaataggtgggggcaaaatcacaggaaaagttccaggagaccataccttccttctccggagtcttccaacaggtgcccctcttattatatgccagccagttgttttaaaggccatccatgggaggacaccggcctctagatgtctctgcagcaaagcgaaattccaggcaagccttagggaaaaaaggaaaaacaaagaaaatgaaacaattggcagtgaaaggcagaaagagaagatggagcccttagagaagggagtatccctgagtaggagaagaggacaaagatactcagagagaaaaagtaaaagaccgaagaaggaggctggagagaccaggatccttccagctgaacaaagtcagccacaaagcagactagccagccggctacaattggagtcagagtcccaaagacatggcaaaacattgtctgcaagcctgttgtcgtctgagaacagtggctgttaccctggtaaccagactgtgatgcctccatccaaaagtggctgtttgccaagcagtgtagttttggctggcttgcataccagtcacggctgctctagcatttcggccttgtcaactactgcaggccctgatcaaggaggcctctgttcatggggcttgttagagtgctgtgcaagatgtctggtaggggccccctttgcttccctggtggccactggattgtgtttctttggggtggcactgttctgtggctgtggacatgaagccctcactggcacagaaaagctaattgagacctatttctccaaaaactaccaagactatgagtatctcatcaatgtgatccatgccttccagtatgtcatctatggaactgcctctttcttcttcctttatggggccctcctgctggctgagggcttctacaccaccggcgcagtcaggcagatctttggcgactacaagaccaccatctgcggcaagggcctgagcgcaacgtttgtgggcatcacctatgccctgaccgttgtgtggctcctggtgtttgcctgctctgctgtgcctgtgtacatttacttcaacacctggaccacctgccagtctattgccttccccagcaagacctctgccagtataggcagtctctgtgctgatgccagaatgtatggtgttctcccatggaatgctttccctggcaaggtttgtggctccaaccttctgtccatctgcaaaacagctgagttccaaatgaccttccacctgtttattgctgcatttgtgggggctgcagctacactggtttccctgctcaccttcatgattgctgccacttacaactttgccgtccttaaactcatgggccgaggcaccaagttctga

SEQ ID NO: 116081 - DNA, 882 bp, Homo sapiens
atggtctatggggcttccgaggcgatcgggctgtgtcagtcttcagccgctaagccaagaagatctgggaaggagtcagtcagagagccttgggccagagttccaggggctctgggagtggctgccagaacagctccctcggtccttcattcaagccttgggcagcctttcttactttcctcgaaccctaatgaatctctcttggcccctctgcctcagaaaatggggctatttgttctgtatttacccttccaagtgggactcccttccacggttccatggcctcttatccttccttcaaaggtccctgaagaagagggccagcttcagagtactcttccttgtggtataaagctacttcctgtgttcacttcccaccatgcgtttttaggcgtgttctgcaatcagtgggtctcagatgtttttctggctcttttcttgatgaagctccttggtgcccaggtgagcctcctttcatcagtagatttcctctgtttcacacccacagctgggaatcagccttgccacttccaaattgtaggtgacttcaaggatcgtggccaagatagtcccctgaaccctacttacccgataaagctgaaagattgcctggagccagggcacggggctgttgtatgtcaggctcaaggtgtgtcacagtgtgtcactgatgtgattggacggctggaagtgaagctgggtctggtcaggggacaggatgagtttggttttgaaactagtgcatttgagatgctgacgggccgtccccatgggaatgtccagctggcagcagagaaaatgagccggatggtaggagcagtggattcgagaacagatcctaaggagctcctgtgtttaaggccaggggaaggagagggatga

SEQ ID NO: 116082 - DNA, 513 bp, Homo sapiens
atggacttaccctccactgtgagagttacccgaagctcggcgtctgtgatggtccaggggggttccgaggcaatcaggcagcgtcagtcttcagccgctaagccaagaagatctgggaaggagtcaaagagccttgggccagagttccaggggctctgggagtggctgccagaaatttatttctcacagttccggaggctgggaaatccaaaatcaaggcaccagcagattcaatgtctgatgggggcctgctttgtggtaacagaaagactctccttccaggattctctagacctggcagaaccaagacattcctatcctctccaggtgaaaaggctagatctcccaacagttctagaaactgaaacagatctagaaaagctagatccttttacaacaatcccttctccagtggaaactctccaatgcctttttgtctcactcagaataaaatccagagtccctatcatggacttgaaggcccttagtgatctgacccctcttgatccctga

SEQ ID NO: 116083 - DNA, 375 bp, Homo sapiens
gctgtgatggcttggagaaacagtgtaaaccggcaggggaaacaagagcaggggcttccgaggcgatcgggcagtgtcagtcttcagctgctaagccgagaagatctgggaaggagtcagtcagagagccttgggccagagttccaggggctctggaagtggctgccagatgaatcctctgtctggccggccccaggttgtctgcttctttactgcacacatgttgacaaagaaaagggaagaaggagcctccatgttgaacatgccttgcttccagtgaaaggaagagatgatccaagcaaatttaggaccaatagcagactcttcacactgcctggggatagagggaccaccctgggctcctcttactcctgg

SEQ ID NO: 116084 - DNA, 410 bp, Homo sapiens; identical to SEQ ID NO: 114507

SEQ ID NO: 116085 - DNA, 864 bp, Homo sapiens; identical to SEQ ID NO: 115468

SEQ ID NO: 116086 - DNA, 928 bp, Homo sapiens
gcctggtggaaccgccatcaataaatcaagtgtgatcagggtgaggaacaggaaagaaggaaatctggggaaatggggtgaatgtcaggtggatcggagagatacagtcatgggggtcagggggcttctgaggcgatctggtagtgtcagtcttcagccgctaagccgagaagatctgggaaggagtcagtcagagagccttgggccagagttccaggggctctgggagtggctgccagaatgcataattgaaacagatatacttagcagcgtggagaatttccatattggtttcctgatatgtggtatgagggctcttatgatgggaaaggctaactggaagccattagagctgcctctacctaagaaaatagcaaataacgaccaatattgcatacttacatggctggcagagatcagtatcaccatcaaaaactttaaagatttacacaaaaacttcatgaagatagctaaacagacaaacaaactctccctaactgaagtaaaaactaacatacaaattgatgctaaagtcatgaaagaaaaagagatgacctatgcaaaggaaatcgatgctcaagatttctgtaagtctgtcagtgtacagaagttcatgaattcccacttgcagaaaccctatgagattaacctgatggaggaactaactctaaagggagtaacccagtactatgcatgtataactgagcttcaaaaactcgcagagacctatctccatcgtattggaagatcaggtcgctttggtcatcctggcttagccatcaacttgatcacatatgatgatcacttcaacctgaaaagtattgaggagcagctgggaacagaaattaaacctattccaagcaatattgacaagagcctgtgtggggcagaataccacagcgagcctgtagaagatgagaagccttaa

SEQ ID NO: 116087 - DNA, 1026 bp, Homo sapiens
atgacctcaggcaagactgctctccttaactgggcaatctccaacagggactttgctgcaccaccaatagctgggcagtatttactgacagctaactgttacggagcacttctagcactaggtactgctctgcgctcttgtaccgtctcagacaaggccccacaggaactccttgacacaggtattgttatcaccattttgcagaaatttctcctggggaactggctaaatgcagagtcctggttccaccggagagaatcagattctataggtccaggatggggcaggctgctcagtgctggggacccagccatgaacaaggccagcacacgcagcccagagaagcagacagatgctaaacaagtaattacaagtgtgatggatgccacaaaggaaaagcagcaagggccctgggaagagacagtgggggatgccaacatctcccatttgtacaagcgaccaattgtcccagcggcgcccaagttccctgaagacctcccagcagtcactctctcacagagacacccgctctcaaaggggccagcagtctggctgcttccggccacgaccacaaccaaggaggctggaccagcatggtggtcccagcttcacaggaggccccgggacttccgagccctgctgggaacttgcagccgggtgcttggtgaggagcggctggagcctggagctgaaggcctgtttgctgggttacaggaagatctgagctgtacagctggtgctggcgaggaaagcagcagtggcagcatgaaggctggtgtggccaactgctacccagagggcatggtcccaatcggaagctgcagcagcaaagacagtggaaagcagccgggggagtccaacgaggacacctgttccttcaggaaacccaagccaagccaggccctcgggtggcggagcctgagcccctggatccagctgccagtgccctcatggacagagctgcatcctgcttcctgtttcctgcttcctgctccttctttcactctatcagtagtttctgcctga

SEQ ID NO: 116088 - DNA, 1008 bp, Homo sapiens
atgggggctgtctgtgaagccttgcggcagtacagcctaggtaatttgctgagcctagtgggtgtcaggggggcttccgaggcgattgggcagcgtcagtcttcagccgctaagccaagaagatctgggaaggagtctgagagccttgggccagagttccaggggctctgggagtggctgccggtccatgactggcgccagagttttgggtccacggataaaacgtgtctcctttgtctctaccagaaaatgaaaggaattgaaattaagagaaggaagagattgaagagtggaaaggagaaagtggttgagggacagtgggactgtccagttacagggaacacacttcagagtttctaccaattctacattatgcggctgaagactgacactgcccgatcacctcaaaaggctcctggaccatcacagatgctttgggtaactctcacagtgcaggccactttacttccaaaggaagctggagtcattcactgcaaaggccatcaaaaggcatcagatcccatcactcaggacaacgcttatcctgataaggtagctaaaaaagcagccatcaaaagggctcagatcccatcgctcaggacaatgcttatgctgataagtgagatctcaaccttctcaatcagtccctctgactcccttttcaagctcatggcactgcgattcatcataagaaccaacagggaccaactactgcaggatactgcagatcttcttaaacaggataatggtagtggacagacgccagctcttcagagaatggaatctctaagaaggaaggggcaacaaaggcgatggcctttgttaactaaaaaccagattgacagaaaaatttctaagagaatgtttgacaatgtcaaatttgattccaaccctcatgatgactttgaggggctcaagacatcagtggaggaagcaactgcagatgcagtggaaacagcaagagatctagaattagaagtggaagctgaagatgctgtaatctcatga

SEQ ID NO: 116089 - DNA, 588 bp, Homo sapiens
atgggggagcagcaaagtcactttgaaaaggagcatgcagaatggaaagataaaacaatcgctacagaaaatggtaacatgatgggaaaactggtgaaacaaggaaagggaaaacaaggacagggggcttccaaggcaatcgggcagtgtcagtcttcagccgctaagccaagaagatctgggaaggagtcagtcagagagccttgggccagagttccaggggctctgggagtggctgccagcattacagctgtggttaactgtcaacaaccctcggactcagtttcatgtctgcagagaagcaccatcgcccatgatcctacccatcctccacacacaaagccacaaaggaaagcagccagagttctgaacagccaacaggcctaccagtccttgtactctatgcagctacttcccctgctggaaatgagcagctgccttcttctccctaagctcatatatttccaacttggagctgaaaaagtcagcaacctggaaatgtcaataaatgcaggggaaaaaaaagccctaagagagtcctgctctctcctgccaaaggaccagaaaagggtagccaagcaagggtaa

SEQ ID NO: 116090 - DNA, 495 bp, Homo sapiens
atggtatggagagatagtgggcgatgtttctcagggctgcttcgagcgggattaggggcggcgcgggaacctagagtgggagagattaaactgaaggaagattttgtgggggcttctgaggcgatcggcaagcgtcagtcttcagctgctaagctgagaagatctgggaaggagtcagtcagagcgccttgggccagagttccaggggctctgggagtggctgccaggaatccttctgcaggaatctggttcagacaggcgctctacccagggtacacagggctgctgctgtgtggtgcagggccagtgtcaatatcagcagtggtgccacgtggcagtgaggagcaggagcgagctgacccatccagctttctacagatactggatcttctgttgatagcacagatcacaggtattaaaagtatcagatattcgagcagatatagggagcatagcggacgttgtgttcaggtgccagaatttgccgatttttaa

SEQ ID NO: 116091 - DNA, 1851 bp, Homo sapiens
atgcagggggcttccgaggcgatcgggcagtgtcagtcttcagccgctaagccgagaagatctgggaaggagttggtcagagagccttgggccagagttccaggggctctgggagtggctgccagactaaaccaggaagaagttgaatctctgaagagaccaataacaggatcggaaattgtggcaataatcaatagcttaccaaccaaaaggagtccaggaccagatggattcacagccgaattctaccagaggtacaaggaggagctgctcaaaataataagagctacctatgacaaacccacagccaatatcatactgaatgggcaaaaactggaagcattccctttgaaaactggcacaagacagggatgccctctctcaccactcctatgcaacatagtgttggaagttctggccagggcaattaggcaggagaaggaaataaagggtattcaattaggaaaagaggaagtcaaattgtccctgtttgcagatgacatgattgtatatctagaaaaccccattgtctcagcccaaaatctccttaagctgacaagcaacttcagcaaagtctcaggatacaaaatcaatgtacaaaaatcacaagcattcttatacaccaataacaggcaaacagagagccaaatcatgagtgaattcccattcacaattgcttcaaagagaataaaatacctaggaatccaacttacaagggatgtgaaggacctcttcaaggaaaactacaaaccactgctcaatgatataaaagaggatacaaagaaatggaagaacattccatgctcatgggtaggaagaatcaatatcgtgaaaatggccatactgcccaaggtaatttatagattcaatgccatccccatcaagctaccaatgactttcttcacagaattggaaaaaactactttaaagttcacatggaaccaaaaaagagcccacattgccaagtcaatcctaagccaaaagaacaaagctggaggcatcacgctacctgacttcaaactatactacaaggctacagtaaccaaaacagcatggtactggtaccaaaacagagatatagaccaatggaacagaacagagacctcagaaataatgccacatatctacaactatctgatctttgacaaacctgacaaaaacaggaaatgggggaaggattccctatttaataaatggtgctgggaaaactggctagccatacgtagaaagctgaaactggatcccttccttacaccttacacaaaaattaattcgagatggattaaagacttacatgttagacctaaaaccataaaaaccctagaagaaaacctaggcaataccattcaggacatagacatgggcaaggacttcatgtctaaaacactaaaagcaacagcaacaaaagccaaaattgacaaatgggatctaattaaactaaagagcttctgcacagcaaaagaaactaccatcagagtgaacaggcaacctacagaatgggagaaaattttcacaacctactcatctgacaaagggctaatatccagaatctacaaggaactcaaacaaatttacaagaagaaaacaaacaaccccatcaaaaagtgggtgaaggatatgaacagacacttctcaaaagaagacatttatgtagccaaaagacacatgaaaaaatgctcatcatcactggccatcagagaaatgcaaatcaaaaccacaatgagataccatctcacaccagttagaatggagatcattaaaaagtcaggaaacaacagacgtgaattgaacaatgagaacacatggacacaggaaggggaacatcacactctggggactgctgtggggtag

SEQ ID NO: 116092 - DNA, 710 bp, Homo sapiens
gtctcctgttatggctggaggtctctttgctgtggatcggaaatggttttgggaattgggtggctatgatccaggtttagaaatctggggaggagaacagtatgaaatctcttttaagggggcttctgaggcaatcaggcagcgtcagtcttcagccgctaagctgagaagatctgggaaggagtcagtcagagagccttgggccagagttccaggggctctgggagtggctgccagtggaaagagtggaacgagaaaacctttcagactattgtgttctgggccagcgtccaatgcatttaccaaatatgaaccagctggcatccctggggaaaaccaacgaacagtctcctcacagccaaattcaccacagtactccaatccgaaaccaagtgcccgcattacagcccatcatgagccctggtcttctttctccccagcttagtccacaacttgtaaggcaacaaatagccatggcccatctgataaaccaacagattgccgttagccggctcctggctcaccagcatcctcaagccatcaaccagcagttcctgaaccatccacccatccccagagcagttaagccagagccaaccaactcttccgtggaagtctctccagatatctaccagcaagtcagagatgagctgaagagggccagtgtgtcccaagctgtctttgcaagagtggcattcaaccgcacacag

SEQ ID NO: 116093 - DNA, 525 bp, Homo sapiens
atgcccatcctagcctcctggccccaccctcctggtcctttcctgctgctgactctcctgctaggactcacagggcctcccatgtggaccatgctaaaaaacaatattgcagaaaagaacgatattcacagcagggactctcacgccagccagtctggaatggcctcgtacatgctccaccaccttgaagcctctgcattttctcttcagcatctgcgctgcagcagcagtggcagcatgaaggctggtgtggccaactgctacccagagggcatggtcccaatcggaagctgcagcagcaaagacagtggatcttgctttaagtgccagaaattctgccactgggccaaggaatgcctgcagcccaggattcctcctaagctgtgccccatctgtgtgggacttcactggaaatcggactgtccaactcaccaggcagccactcccagagcccctggaactctggcccaaggctctctgactgactccttcccagatcttcttggcttagtgactgaagactga

SEQ ID NO: 116094 - DNA, 2214 bp, Homo sapiens
atgattccacttacatgtgccccgccccttgcctgcggagagcccgcgcctgcgcgctgtgtcctgcgcgctccttccctcgcgcgcgctctccgtggaagagcaggggcagcgtgggaggcgccaagggagcgcgaacctgaggaggaagaaacggggctagcgcgcaggcccagaacggtccgagccgcggcagtcggcgacgcctcagagcggaagagggaagtgaatcaggcgccgggtagaggcagcgccaagaagaggcctttgccgctggtcgggattgggatgtcgaagaacacagtgtcgtcggcccgcttccggaaggtggacgtggatgaatatgacgagaacaagttcgtggacgaagaagatgggggcgacggccaggccgggcccgacgagggcgagattcctcaggttgcacccgagtgcctgcctgcctcgggaactggtcccgccggccgcgccctcgcggcgctggggaaggcggccccggctggaaacatgacagctgccctacaggcagctctgaagaacccccctatcaacaccaagagtcaggcagtgaaggaccgggcaggcagcattgtcttgaaggtgctcatctcttttaaagctaatgatatagaaaaggcagttcaatctctggacaagaatggtgtggatctcctaatgaagtatatttataaaggatttgagagcccgtctgacaatagcagtgctatgttactgcaatggcatgaaaagggggcttctgaggcgatcgggcagtatcagtcttcagccgctaagccgagaagatctgggaaggagtcagtcagagagccttgggccagagttccaggggctctgggagtggctgccagaaaataccagaaaatgaaaggaattgaaattaagagaagggagagattgaagtgtggcgccaagattgaaaggagaaagaggttgaaggatagggaggttggagaagagagtaaaaagaggccacttactggatttgaaattgaaccacccaaagtcactgtgatgcccaagaatcagtctttcacaggagggtctgaggtctccatcatgtgttctgcaacaggttatcccaaaccaaagattgcctggaccgttaacgatatgtttatcgtgggttcacacaggtataggatgacctcagatggtaccttatttatcaaaaatgcagctcccaaagatgcagggatctatggttgcctagcaaaagcccctaagttgatggtagttcagagtgagctcttggttgcccttggggatataaccgttatggaatgcaaaacctctggtattcctccacctcaagttaaatggttcaaaggagatcttgagttgaggccctcaacattcctcattattgaccctctcttgggacttttgaagattcaagaaacacaagatctggatgctggcgattatacctgtgtagccatcaatgaggctggaagagcaactggcaagataactctggatgttggctcacctccagttttcatacaagaacctgctgatgtgtctatggaaattggctcaaatgtgacattaccttgttatgttcagggttatccagaaccaacaatcaaatggcgaagattagacaacatgccaattttctcaagacctttttcagttagttccatcagccaactaagaacaggagctctctttattttaaacttatgggcaagtgataaaggaacctatatttgtgaagctgaaaaccagtttggaaagatccagtcagagacaacagtaacagtgaccggacttgttgctccacttattggaatcagcccttcagtggccaatgttattgaaggacagcagcttactttgccctgtactctgttagctggaaatcccattccagaacgtcggtggattaagaattcagctatgttgctccaaaatccttacatcactgtgcgcagtgatgggagcctccatattgaaagagttcagcttcaggatggtggtgaatatacttgtgtggccagtaacgttgctgggaccaataacaaaactacctctgtggttgtgcatgttctgccaaccattcagcatgggcagcagatactcagtacaattgaaggcattccagtaactttaccatgcaaagcaagtggaaatcccaaaccgtctgtcatctggtccaaggtaaatgatacatctagttatatttcctga

SEQ ID NO: 116095 - DNA, 544 bp, Homo sapiens
atgcccgggcaccaaaaagcacctctgagacccgcagtttccaaaaaggtagtcaatgttggagaaaggcaaaatcaagtaattattgaaaccggaggggattttgccgatttcggaaccaccatcaaacaggattttcgcctgctggggcaaaccagcgtggaccgcttgctgcaactctctcagggccaggcggtgaagggcaatcagctgttgcccgtctcactggtgaaaagaaaaaccaccctggcgcccaatacgcaaaccgcctctccccgcgcgttggccgattcattaatgcagctggcacgacaggtttcccgactggaaagcgggcaggggcttccgaggcgatcgggcagtgtcagtcttcagccactaagccgagaagatctgagaaggagtcagtcagagagctttgggccagagttccaggggctctgggagtggctgccagccaatactgtgtggatgttgagaaagtaggaaatatttctgaagaccatattactaaaacagtcatcactgggaacttttgggaagg

SEQ ID NO: 116096 - DNA, 774 bp, Homo sapiens
atggatgtagctggaagccgttatcctcagcaaactaatgcaggaacagaaaaccaaacactgtgtattctcacttataagtgggagcttaatgatgaaaacacatggacccctgagggggaacaacacacaatggggccttttgaggggtgggggcttccgaggcgatcgggcagtgtcagtcttcagccgctaagccgagaagatctgggaaggagtcagtcagagagccttgggccagagttccaggggctctgggagtggctgccagatgcagaaaaggccttcgacaaaattcaacagcccttcacgctgaaaactctcaataaactaggtattgatggatatctcaaaataataagagctatttctgacaaacccacagccaatatcatactgaatggaaaaaaactggacgcattccctttgaaaacaggcacaagacaaggatgccctctctcaccactcctattcaacatagtgttggaagttatggccaggacaatcaggcaagagaaagaaataaagggtattcaaataggaagtgagaaagtcaaattgtctctgtttgtagatgacatgattgtatatttagaaaaccccatcgcctcagcccaaaatctccttaagctgataattaacttcagcaaagtctcaggaaacaaaatcaatgtgcaaaaatcacaagcattcctatacacaaataacagacaaacagagagccaaatcatgggtgaactcccattcacaattgctacaaagagaataaaataa

SEQ ID NO: 116097 - DNA, 753 bp, Homo sapiens
atgggggctgtctgtgaagccttgcagcagtacagcccaggtaatttgctgagcctaactggtgtcaggggggcttccgaggcgatcaggcagtgtcagtcttcagccgctaagctgagaagatctgggaaggagtcagtcagagagccttgggccagagttccaggggctctgggagtggctgccagccttggctgtgatgagaggaaagagcatgagcacatgaatctggccatcagagcctgcctgcaaccaggtgaaataaacagccatgttgctcacacaaagcctgtttggtggtctcttcacatggacgtgcatgaaatttggtgctgtgactcggatcgggggacctcccttgggagatcaatcccctgtcctcctgttctttgctccgtgagaaagatccacctacgacctcaggtcctccgaccgaccagcccaagaaacatctcaccaatttcaaatccggaccccactggaaatcggactgtccaactcacctggcagccactcccagagcccctggaactctggcccaaggctctctgactgactccttcccagattttctcagcttagcagctgaagactgacgctgccggatcgcctcggaagcccctagatctgatgatttaataagagggtatttttccttttgctcagcacgtctcctttctgctgccatgcgtagagggatgtgtttgctttcccttctgtcattactgtaagtttcctgaggcttctccaacc

SEQ ID NO: 116098 - DNA, 565 bp, Homo sapiens
tgcctccactgtgagagaaccccagccacatctccagcacacaagaacttcaaaatgcttaaaccgcaggggcaaggcattccttcaggacctcctcccccaggatcttgcttcaagtgctagaaatctggccactgggccaaggaatgcctgcagcccaggattcctcctaggccgtgtcccatctgtgtgggaccccactgaaaggcggactgttcaactcacctggcagccactcccagagcccctggaactctggcccaaggctctctgtctgactccttcccagatcttcttggcttagcggctgaagactgatgctgcccgatcgcctcggaagccccctacaagaccattcacggacgccgagcttcgggtaactctcacagtggaaggtaagcccgtccccttcttaatcaatacagaggctacacactccgcattaccttcttttcaagggcctgtttcccttgcctccataactgttgggggtattgacggccaggcttctaaacctcttaaaaactccccaactctggggctacttagacaaaactctttaaag

SEQ ID NO: 116099 - DNA, 361 bp, Homo sapiens; identical to SEQ ID NO: 115540

SEQ ID NO: 116100 - DNA, 1071 bp, Homo sapiens
atggccatcggcaacaaggggtcgagatcaggaggtcgctcgccgcccagttgcgtcgctcaccaccggccggccaccagaaccctcggcttccgatccagaaaccgtattttgttcttgcacccagaccgcaagaagcctcagccctcggggacagaccgaaggccagggctgtacctggctcacaaccaggcgccaagcggcacgggactctccttctgcactcgcagcgcgtctctgcagttcccagcgactctcttgggggtcggacctggtcactgcggcacttatctaggtggcggggcccgtggacggcggcgacctggatcctgtggcctgcttcctgagctgggccggcgggtggggctggagctgagtcccaagttaaacttgaagtttgaaatcgaggttctctgcaagaaccttgcattagacatcaatgagctaaaacctggaaacctcctaaaggataaagatcgcctgaagaatttagatgagcaactctctgctccaaagaaagatgtcaagcagccagaagaactccctcccatcacaaccacaacaacttctactacaccagctaccaacagcacttgtacagccacggttccaccacagccacagtacagctaccacgacatcaatgtctattcccttgcgggcttggtaccacacattactctaaatccaacagcccatccacagttgaagcagtgtgtgcgtcaggcaattgaacgggctgtccaggagctggtccatcctgtggtggatcgatcaattaagattgccatgactacttattttccccaagaacgctgtcccgtggtgctcgcaccacttttataccctgaaaaacgggacattctaatggacaggatcctgcctgattccggaggggtagctaaaaccatgatggagagctctttggctgatttcatgcaagaagtaggctatggcttttgtgcaagctggtgggtgctggtcagctacggagtcctcttggtcaccctgggagccttcatcttcggccagaccacagccaacgccatctttgtggatctcttggcataa

SEQ ID NO: 116101 - DNA, 1326 bp, Homo sapiens
atgcagcgagacgacagccatctgcatgcaaggagagaggcctcagagaaactagccctgcctgatgaagttgaattaacagcacaaagaagaggccgaagtgggcacaatcacgacgacaggagaatcgaaaatacagagaaacccaagtataagaagaaaataaaaaaaataaaccagcatatagtggaaagacaccgaagatacacagataaaccagaagacagacgcagacaccggcaacaccgacaagaaaacaagaatagccgaaatgaacccgagagaaaacaagaaacaacagacaacactaaacaacaaaaacaggccaggataaagatcgcctcgaagaatttagcatgcagcaactctctggctccaaacgaaagatgtcaacgcagcccagaacagaactccactcccaatcgacacaccacaacaacttctactacaccagctaccaacaccacttgtacagccacggttccaccacagccacagtacagctaccacgacatcaatgtctattcccttgcgggcttggcaccacacattactctgaatccaacagcccatccacagttgaagcagtgtgtgcgtcaggcaattgaacgggctgtccaggagctggtccatcctgtggtggatcgatcaattaagattgccatgactacttgtgagcaaatagtcaggaaggattttgccctggattcggaggaatctcgaatgcgaatagcagctcatcacatgatgcgtaacttgacagctggaatggctatgattacatgcagggaacctttgctcatgagcatatctaccaacttaaaaaacagttttgcctcagcccttcgtctgatggaagtagtgcgatccaactatgaagcaatgattgatcgtgctcatggaggcccaaactttatgatgcattctgggatctctcaagcctcagagtatgatgaccctccaggcctgagggagaaggcagagtatcttctgagggaatgggtgaatctctaccattcagcagcagctggccgcgacagtaccaaagctttctctgcatttgttggacagatgcaccagcaaggaatactgaagaccgatgatctcataacaaggttctttcgtctgtgtactgaaatgtgtgttgaaatcagttaccgtgctcaggctgagcagcagcacaatcctgctgccaatcccaccatgatccgagccaagtgctatcacaacctggatgcctttgttcgactcattgcactgctcgtgaaacactcaggggaggccaccaacactgtcacaaagattaatctgctgaacaaggtctga

SEQ ID NO: 116102 - DNA, 6291 bp, Homo sapiens
  misc_feature (1)...(6291): n = a,t,c or g
atggtcgtactggccaacggccccaagctgaactgttttggcaatttgactgtgctgtccccagtccaagactgcctcagcacagaaagcacccagcagaacactggccctgaggatgcttccagggaggccagaatgagggcggtggtggaaggcctgtggctgcgctaccagggggtgccagtggaggaggacgtggggcgggagcggcggcggcgagtgctgcagacgctggtctggttcctgctcaccctgctgctggcgctcttcatccctgacatcggcaaggtgatctcagtcattggaggcctggccgcctgcttcatcttcgtcttcccagggctgtgcctcattcaagccaaactctctgagatggaagaggtcaaaccagccaggtgcctaattgaatgtcgagatgaatataaatataatgtggaggctgtggagctgctaattcgcaatcatttggttaatatgcagcagtatgatcttcacctagcgcagtcaatggagaatggcttaaactacatggctgtggcatttgctatgcagttagtaaaaatcctgctggtggatgaaaggagtgttgctcatgttactgaggcagatctgttccacaccattgaaaccctcatgaggattaatgctcattccagaggcaatgctccagaaggattgccccagctgatggaagtagtgcgatccaactatgaagcaatgattgatcgtgctcatggaggcccaaactttatgatgcattctgggatctctcaagcctcagagtatgatgaccctccaggcctgagggagaaggcagagtatcttctgagggaatgggtgaatctctaccattcagcagcagctggccgcgacagtaccaaagctttctctgcatttgttggacaggttgaagagctaaaggaaacggtgaaagaagaatttatgccttgggtttcacagtatctggttatgaagagagtcagtattgagccaaactttcatagcctgtattcaaacttccttgacacgctgaagaatcctgaatttaacaagatggttctgaatgagacctacagaaacattaaagtgctcctgacctctgataaagctgcagccaatttctcagatcgttctttgctgaagaacttgggacattggctaggaatgatcacattagctaaaaacaaacccatcttacacactgacttggatgtgaaatcattgctgctagaggcttatgttaaaggacaacaagaattgctctatgtagtgccctttgttgccaaagtcttagaatctagcattcgtagtgtggtttttaggccaccaaacccttggacaatggcaattatgaatgtattagctgagctacatcaggagcatgacttaaagttaaacttgaagtttgaaatcgaggttctctgcaagaaccttgcattagacatcaatgagctaaaacctggaaacctcctaaaggataaagatcgcctgaagaatttagatgagcaactctctgctccaaagaaagatgtcaagcagccagaagaactccctcccatcacaaccacaacaacttctactacaccagctaccaacaccacttgtacagccacggttccaccacagccacagtacagctaccacgacatcaatgtctattcccttgcgggcttggcaccacacattactctaaatccaacaattcccttgtttcaggcccatccacagttgaagcagtgtgtgcgtcaggcaattgaacgggctgtccaggagctggtccatcctgtggtggatcgatcaattaagattgccatgactacttgtgagcaaatagtcaggaaggattttgccctggattcggaggaatctcgaatgcgaatagcaagcttatcacatgatgcgtaacttgacagcttggaatggctatgattacatgccagggaacctttgctcatgagcatatctaccaactttaaaaaaacagtttttgccctcagcccttcgtactgcttccccacaacaaagagaaatgatggatcaggcagctgctcaattagctcaggacaattgtgagttggcttgctgttttattcagaagactgcagtagaaaaagcaggccctgagatggacaagagattagcaactgaatttgagctgagaaaacatgctaggcaagaaggacgcagatactgtgatcctgttgttttaacatatcaagctgaacggatgccagagcaaatcaggctgaaagttggtggtgtggacccaaagcagttggctgtttacgaagagtttgcacgcaatgttcctggcttcttacctacaaatgacttaagtcagcccacgggatttttagcccagcccatgaagcaagcttgggcaacagatgatgtagctcagatttatgataagtgtattacagaactggagcaacatctacatgccatcccaccaactttggccatgaaccctcaagctcaggctcttcgaagtctcttggaggttgtagttttatctcgaaactctcgggatgccatagctgctcttggattgctccaaaaggctgtagagggcttactagatgccacaagtggtgctgatgctgaccttctgctgcgctacagggaatgccacctcttggtcctaaaagctctgcaggatggccgggcatatgggtctccatggtgcaacaaacagatcacaaggtgcctaattgaatgtcgagatgaatataaatataatgtggaggctgtggagctgctaattcgcaatcatttggttaatatgcagcagtatgatcttcacctagcgcagtcaatggagaatggcttaaactacatggctgtggcatttgctatgcagttagtaaaaatcctgctggtggatgaaaggagtgttgctcatgttactgaggcagatctgttccacaccattgaaaccctcatgaggattaatgctcattccagaggcaatgctccagaaggattgccccagcttgattggaagtagtgcggatccaactatgaagcaatgatttgatcgtgctcatggaggcccaaactttatgatgcattctgggatctctcaagcctcagagtatgatgaccctccaggcctgagggagaaggcagagtatcttctgagggaatgggtgaatctctaccattcagcagcagctggccgcgacagtaccaaagctttctctgcatttgttggacagatgcaccagcaaggaatactgaagaccgatgatctcataacaaggttctttccgtctgtgtacttgaaatgtgtgttgaaatcagttaccgtgctcaggctgagcagcaggacaatcctgctggcaatcccaacatgatccgagccaagtgctatcacaacctggatgcctttgttcgactcattgcactgctcgtgaaacactcaggggaggccaccaacactgtcacaaagattaatctgctgaacaaggtccttggtatagtagtgggagttctccttcaggatcatgatgttcgtcagagtgaatttcagcaacttccctaccatcgaatttttatcatgcttctcttggaactcaatgcacctgagcatgtgttggaaaccattaatttccagacacttacagctttctgcaatacacttccacatgttgaggccctaccaaagctccctggctttgtatatgcctggcttgaactgatttcccatccggatatttattgcaagaatgctgggcacataccgccacaagcagaaggtgggtggcctatggtatgcacagctacctgattgatttaattccaaattatttaagcgcctttccttagaaatgtggaactcaccaaaacctatggcaaatcctctacaaggggcactttaagaagtgcctgctggttcttttgcatgatttcccagagttccttttgtgattaccattatggggttctgttgatgtgatcccacctaattgtatccagttaagaaatttgatcctgagtgtcctttccaagaaacatgaggctccccgacccattcactcctaatctaaaggtggacatgttgagtgaaattaacattgctccccggattctcaccaatttcactgggagtaatgccaccttcagttcaaaaaggatttggattcctatcttaaaactcggttcaccagttcactttcctgtctgatctgcggcgaacccttacaggtattccatggaaccgggggattcggttacaacctccagcttcatcaatggcactgggtgcttctaatgtcggggactcaaggccattgcggcacatccacaacaaggggcaggcacacctttcaatggaggcaccattcactcacttcaggcacacatgggattatctttccaggaattttgggctgtgggatttgggacactggaggggtcgctattctcttttttggaatggcaatttggcaaatcagcttccgggtaccccaaatagccacactcactacttccaggttgcacccatgctgttacctttttggcaggagggccaattcgggaaggccattccaaggaacagatcaccaggagttctcttgggaaccggttgattgttaaataggcccacatccttgggggtcttcttaattacccttcattggagctgattaaaaaccccagcgtttaaagttctggaacccatgaaatttgttacacttgtgcccccccagaaatccgaaaaaagttattcccagtcgggtcggcacagttgctggcatggggacaggaaggcagggcccagcaagttaattgggagggggacagggtgccagttaggacggaaacttgcatctctgttgtacgtgttcagtcttggaggtctcacttgcaccgagtttcataaaactgactgaagaatcctttcagctccttcctgaactttccccaggccctttggttttgtgggtaatctggcccaactaactggtggggatcagccctcctggcctaatgtgggcacggttcccaaggtttaaatgccatttttttgacccttggccaaaatttagaagatgctgtgaatatcattttgaaacttgtgtaaatacatgaaagagaaaacctttgtctggaacttcttggctttgtgcaagctgtgtccaaggcaagtacataaactggtaccttgtaatgaagaggcagctgattcccatgcacttgtctgagggcatagctcccatgtccttctgacaatcccctggtgtccccaaaagaatagccaaaaagcccagtttgaatattatggtaacttatttttttaatgtggacaggggaccctgaaaatcacctaagttattaaaaatgtgggatgtgctaggaattgggatatgtccagggaacatggggaagggctcactattgggantcccatgagtttccagtttgtctctacccaaacgtattccaaagctgactgcatttgtacccatcttatttcttttgggggattaatacaccctcagccgccctgagaatgggggtcagctcctttatataaaggggaaaaccagacccaggcctaaaagccccaccccctacccctcaccccccacaatccctctccctgaaacttaaaaacagtgggaatataggaaagggaaccaaatcctcattaattaattgttcctcccccattaaccccactgaatgaatggccatacaggctaagctgaataatgacaaagttgaaaggaccaatacagccccttttataaggattttgaatgttttgcaaatgtattggtccctgtgttgtattttgtagcctttccctggggcttcagctcccctacttcttgtatgtgtatgcatactgtagctaaccattaaagtcatgacacacacatgagtcccactgtgccctttctcagtaggcaggcaggcagtgctgggtgggtgaggagggaaaagtgggacaatccaggccctgtaggaccttgggggccatggggggaaccaacaactaacttcttgctggaatgattgatttgattgattgattgatagggtcattcctactactaagctggcatgtttaaggaaattgtatttttcttcctatttatttcaacactggacaaatgctggagcaggtttatctggttaaggctgagtttaaaatacccaggttttaatatccttttcccccaggtatttttttttttttttaaagaaaatgagtagatacgtatttaaaaacttaacccacttaaaatttgccttacctttcatgactgtcaagttttc

SEQ ID NO: 116103 - DNA, 458 bp, Homo sapiens
  misc_feature (1)...(458): n = a,t,c or g
aaaacaaataccattttaaagtatattggaattcgtaactaaagtaataaataaatgcttgaaatatacccagtagaaacttatttttattatccaatccttttgataagaaatgcctctagtgttatgtacaaacttgatcttcttggaaacgtgttgtccactgcttttctgtttctgtcacagtagctataaacagctgtttaaggatatccttatctaaatttctgccttcagcctaatgacctccacgcagtgattgtccttgtttctcacattcttttcccacaggagattctgaataaacatattaagatgttcttcctttgcatttcctggtacttcaaatgtgattgtagcaatactctgtaaatcaagggaaataccaataattctttatagtaatcgnacgcgtgggtcgccccagggatatcaaacggtaccgcacggtgatcaan

SEQ ID NO: 116104 - DNA, 1744 bp, Homo sapiens
tatgttaaaattataactcaatcaccagtctttataaatttgcttttttatatttaaaccaaacctaatgctaattgtgatatgttatttattctcacctgatttgaatcattggattcaattaaatgagtttaattatcattaaataattctaagagaaataatgtctattcggatggtgggaattttctttctacatgcagccccattctgaatgaatgaaatcaaatcacgtgaagatcagggtcctagagtaacctaatattttgtacattgggtatttggactcctcatttttatattacatgttatatcaagggagggggtataaaagaaatacaaaaattgcagaggtatctggaatgtacctatttgttaattctatttgtcatttcttttggtttcatcttttgagtaaataagctgcttggaaaagtttctgttctttagctgattttttagctataaaaatgtatttgaaaagctcataaatttcaggattgaaaagataattgaaagtttaaaaaaaacctaattcattgaagtaataaccaaataattttcaatcttgattcaactgtgattcaaatcttacaccatttgcccacttctatggaattttatgtattaaaattttttaagagtcagagttttttttcttggattaattggggtgtatttcacagaatttccaactgctcacgttagcttttcttccttttagagttgatccctctaaggtattagaacttcatgcctttgatagtctctctgcgataatttcgccgaaactaacttcagcatgtgccaggaacacaacctcaccttgatcagagtattgttacaatcacatttgaagtaccaggaaatgcaaaggaagaacatcttaatatgtttattcagaatctcctgtgggaaaagaatgtgagaaacaaggacaatcactgcatggaggtcataaggctgaagtttgaactgaggctgatcaatgttcagtcaattctcctttgagcagggattggtgtcaatcaaagacaaatcacaacaagtgattgtccagggtgtccatgagctctatgatctggaggagactccagtgagctggaaggatgacactgagagaacaaatcgattggtcctcattggtaagtctcaaaggattcacagttttaaaacaaagtgaaaaatatatttgaaaggggtatcatgtgccacttaaacagattaaccattcaggtcctcttttaaaactaaataagcttgtggtcaatgtttcatctttatcatgttacaacgttccgtaaaagcctgttaggacttttgttcttcttcaatgttagaaaagtggttaatcccaaggacccaatgtgacctttgatgtactgaccctggaaagttaaagatggaatcactcaattactattctttttgtaaatttctaaacaccataaagcatttaatgaactggaattgataggtgaactgtgtcattttaataagcataatgtaatcacgtcatattttgttttgtttgcaggcagaaatttagataaggatatccttaaacagctgtttatagctactgtgacagaaacagaaaagcagtggacaacacatttcaaagaagatcaagtttgtacataacactagtggcatttcttatcaaaaggattggataataaaaataagtttctactgggaaaaaaaaaaaaaaaaaaaggcgcctcgggccgaaaaaaaaaaa

SEQ ID NO: 116105 - DNA, 1132 bp, Homo sapiens
ttttgtgttaaaaaaatttaataacaatgtaatcattatatctctgcaatcagctgaagttctaagaaaaaatgacaatgttgaaagttgtatcatcattattataaactttcatgttcagtatatgtaaactccaaagccaatttcaaaagacatttttgtgaaataccattctttaaaaaaaaggatattatatataactgtatgaatgttaaatgttttacagtaccggatttgctaccattttaggtatgctgtaaaacaaataccattataaagtatattggaattcggtaactaaagtaataaataaatgcttgaaaatatacccagtagaaaacttaatttttattaacccaatccttttggataaggaaatgcctctagtgttatgtacaaacttgatctgtcttggaaacgtgtatgtccactgcttttcctgtttcctgtcacagtagctataaacagctgtgttaaggatatccccttatcctaaatttctgcccaaggaggaccaatcgatttgttctctcagtgtcatccttccagctcgactggagtctcctccagatcatagaggctcatgggacacccctggacaatcacttgttgtgatttgtctttgattgacaacaatcccttcaggccttatggacctccatggcagtgattgtcccttgtttctcacatttcttttcccacaggaaggattctggaataaacatattaaggatggatcttcctttgcatttccgggggacgggcaaatgtgattggtaacaatactctgatcaaggtgaggttgtggttcctgggcacatgctgaagtttttttctggcaaacttaatccagagagactatcaaaggcatgaaagatctaatacattagagagatcaactcttgatctttgtgtttctaagatttgtcctagtccgatttatggatctaattgtcgttcttaatttctttacatcttcttctggaaccaagtctgttttattaatgagaatgatatctgccaaagcaacttgcctagtagcttcattgataaggccatcaggtttctcttctgttaaatgttttaatccatattttgaatccacaatagttatgataccatcaaggtaaat

SEQ ID NO: 116106 - DNA, 831 bp, Homo sapiens
atgaacgtgacagtgctggagggtgggcccagcaatgcacaggcacctgatgtcggtcagcggctggcggctgtgtcggaaggccatggatgggggcagctgggagcctgggaggacctgctggacagcatgcccggggcccctgcacatccagcagcttgctctggggaaggttccccagctgagagcatctacagtggcagcccctcccccagcaccaaaagagacacagcagatgacttcttggcacaaacagaggtctctgactggggaggtatcaaagatgccagaaggcgaaccagcgacagacagcaggtgacatacaaggaccctcaaagaggtctcggctcagatgggatgccctccttccaggctgaactaaacctcttcctcctgtgggaaacagccccagagacgtcagattgcgtgggcagtgagtggcacatgcttgtgggccccagaaacacagcagttggcctgaccgtggcagacatcattaatcaatcctgcacactctccagctcagccccgtccctgatcccagggggctgctccacaggacagcaggagcccccaagccagactggaggtcctgggggtaacctgggtgctcaaggctcgctctgtgtgttgccacctccgtttgcacccagaccctcctgtgacgtggctcagcaaacctcttaaatgggtcattggatgctaaacttgaactttcacagggcggggtttcttcaaacgggacacaccagagtccaggccaggctggaatcctgctgccggtgcctgacccagatcagggattccaaacacccatggggcccctggtcc

SEQ ID NO: 116107 - DNA, 798 bp, Homo sapiens
atgaagccgcagacacttgcggttcgtggtctcactggctcagaagtgaagctgcagaccttcacggtgagtgttacagctcttaaggtggcgcatctggagttgttcgttcctcctggtgggctcgtgatcttgctggcttcaggagtgaagctgcagaccttcgcgtgcagcgctgggctgaaggactcctcaagtgccgccaaagtgggagcccaggcagaggaggcgccgagagcgagcgagggctgtgaggactgccagcacgctgtcacctctcaagctgacatcggcagctgtgaggacccacctgttagtctgcacttgaaacagagctataattgtccagtgaatgcagaggaagaagctccagtgtgctgctctgctcgttacaacttagcaattttggccttttttggtttcttcattgtgtatgcattacgtgtgaatctgagtgttgcgttagtggatatggtagattcaaatacaactttagaagataatagaacttccaaggcgtgtccagagcattctgctcccataaaagttcatcataatcaaacgggtaagaagtaccaatgggatgcagaaactcaaggatggattctcggttcctttttttatggctacatcatcacacagattcctggaggatatgttgccagcaaaataggggggaaaatgctgctaggatttgggatccttggcactgctgtcctcaccctgttcactcccattgctgcagatttaggagttggaccactcattgtactcagagcactagaaggactaggagag

SEQ ID NO: 116108 - DNA, 999 bp, Homo sapiens
atgaagccgcggacactcgcgcgtgtccagagttcttccgatgttcggatgtgttcagccttctggtgggttcggggtctcgctggctcagaagtgaagctgcagaccttcctggtgagtgttacagctctgaaggtggtgcgtctggagttgtttgttcctcccggagtgaaggtgcagaccttcacggtgagtattacagcacataaaagcagtgtggacccaaagagggagcagcagcaaggtttatcgcaaagagcgaaagaacaaagctaccacagtgtggaaggggacccgagcaagttgccactgttggctcaggcagcctgcttttattctcttatctggccccacccacatcctgctgattggtccattttacagagagccgagtggcataaacgttcttcaagttcccaccagactcaggagcccagctggcttcaccccgtggatctcgcattggggctgcaggtggagctgcctgccagtcccgagccttcggccgcactcctcagcccttgggtggtcgatgggactgggcgccctggagcagggggcggcgctcgtcggggtggctccggctgcacaggagcccacggaggcgggggtagctcaggcatggagggctgcaggtcccgagccctgccccgcgggaaggcagctaaggcccggggagaaatcgagcgcagcgccgctgagggagccggcttcggccttggccggcccagaaaggggctcccacagtgcagcggcgggctgaagggctcctcaagtgccgccaaagtgggagcccaggcagaggaggcgccgagagcgagcgagggctgtgagggctgccctcatgctgtcacctctcacctgggtctggagctgcagctgtgcccagaagtgtgggctcccgctggccttgtggagcgcacaactctggccacaccccccacttcagccagtttcttctcagcagccactccagagggaccacctctggcatcttaa

SEQ ID NO: 116109 - DNA, 252 bp, Homo sapiens
atggcgagctgcaggtcccgagccctgctccgtgggaaggcagctaaggccgctgagggagccggctctggccttggccatcccagaaaggggctcccacagtgcagcggtgggctgaagggctcctcaagtgccgccaaagtgggagctcaggcagaggaggcgccgagagcgagcgagggctgtgaggactgccagcacgctgtcacctctcaggaggaggaagagttaaaactgaaaagcaaaacctag

SEQ ID NO: 116110 - DNA, 606 bp, Homo sapiens
gcataaacgttcttcaagttcccaccagactcaggagcccagctggcttcaccccgtggatctcgcattggggctgcaggtggagctgcctgccagtcccacgccgtgcgcccgcactcctcagcccttgggtggtcgacgggactgggcgccatggagcagagggtggtgttcgtcgaggaggctagggccgcacaggagcccacggagggggtggaaggctcaggcatggcgggctgcaggtcccgagccctgcccgacgggaaggcagctaaggcccggcgagaaatcgagcgcagcgccgctgagggagccggcttcggccttggccggcccagaaaggggctcccacagtgcagcggcgggctgaagggctcctcaagtgccgccaaagtgggagcccaggcagaggaggcgccgagagcgagcgagggctgtgagggctgccctcatgctgtcacctctcacctgggtctggagctgcagctgtgcccagaagtgtgggctcccgctggccttgtggagcgcacaactctggccacaccccccacttcagccagtttcttctcagcagccactccagagggaccacctctggcatcttaa

SEQ ID NO: 116111 - DNA, 846 bp, Homo sapiens
atggcctgtgcacttgtgcatgtaaaaggggcccctgggagcggtgggacacactatacctactcatactgtgtccggaattggtgggttcttggtctgactgactttaagaatgaagccgcgaaccctcacggagtgaagctgcggaccttcgcagtgagtgttacagctcatgaaggcaatgtggacccaaagaccgagcagcagcaagatttattgcaaagagcgaaagaacaaagcttccacagtgtggaaggggaccagagcggattgccactgctggcttgggcagcctgcttttattctcttatctggccccacccacatcctgctgattggtccattttacagagagcccagtgtactggtgtattcattaagcattctgccgacatggaagccatcccaaacggcatgatgaacctgaatcgccagcgcattcacaccttgtcgccttgcgtatattatttgcccatggtatttattcgcgataagctcatggagcggcgtaaccgtcgcacaggaaggacagagaaagcgcggatctgggaagtgacggacagaacggtcaggacctggattggggaggcggttgccgccgctgctgctgattgtgtgacgttctctgttccggtcacaccacatacgttccgccattcctatgcgatgcacatgctgtatgccggtataccgctgaaagttctgcaaagcctgatgggacataagtccatcagttcaacggaagtctacacgaaggtttttgcgctggatgtggctgcccggcaccgggtgcagtttgcgatgccggagtctgatgcggttgcgatgctgaaacaattatcctga

SEQ ID NO: 116112 - DNA, 885 bp, Homo sapiens
ttttttttttcgagatggagtttcactcttgttgcccaggctagagtgcaattgtgtccaaaattggtgggttcttggtctcactgacttcaagaatgaagccacagacgctcgcagcgagtgtcacagttcttaaaggtggtgtgtccagagtttattccttctgatgttcggctgttttcctgagtttcttccttctggtgggttcgtggtcttgctgacttcaggagtgaagctgcagaccttcgcggtgagtgttacagttcataaaggtggcggtccagagttgttcgttcctcccatccggagttgttcgtcccccctggtgggtttatggtctcactggcttcaggagtgaagctgcagaccttcacagtgagtgttacagctcataaaggtggcatggacccaaagagtgagcagcagcaagatttattgcaaagagcgacagaacaaagcttccatagcatggaagggcacccaagcgggttgccactgctggctcaggcagcctgcttttcttctcttatctggccccacccacatcctgctgattggtccattttacagaaagtcagtctgttttacagagagctattggtccatttttacagggttctgattggtgcatttacaatccctgagttagacacaaaagttctccacgtccccactagattagctagatagagtgtcgattggtgtatttacaaacactgagctagacatagagtgctgattggtccatttacaaaccttgagctagatacagagtgccgattggtgcattcacaatcccttagctagacataaagattctccaagtccccaccagattaactagatacagagtgctgattggtgcattcacaaacccctcgtgcc

SEQ ID NO: 116113 - DNA, 6120 bp, Homo sapiens
tgtcaaaactgcttccaccctgaggaggcccatggagcaagataccaggtgggccagttttccacgtggttggggtggtttgtgatgggggcatgggtgaaggactgggcctgtgggaaccggaggagccaggatggggcccgaggtccatctgaggccagagccagtgctgacccgccagacaggaaatcagagctggggactgaccgtggggcccactcaagtgggtggtgtggggtggtgacgggggctggggtgaaagccaggatgaggtgtcacattaggctaggggggcctgagccggagccccccggggacgagggtgctgacagtcgacagccaccaccaccaccagagcccgcagcccaggtaatccgagaggaggcggggcgcagggtgccatggccgctgtctcccaccaccaggggagggaacgaggacccactcagcgcctcaacctccggctgccagtctgtggtggacccaggcctcaggccagggcccaagaggtgggtagagtcccagggcccaggaagggcttcatggggtggaatgccctcacccttcccatttgcggagcttgaggcagtaccctatctggagggcctgaccacttccttgtgtggcagctgcaacgaggaccccggctctgaccccacctccagccctgactccgccacccctgatgataccagcaactcgtcctctgtggtgagccaggagtgggagtttgggggacaagagtggctcacacctccatctgcagccctgggtcccccgaggaggcctcgggaggggccgagagctgacagctcccaaagggctccgtctctcctcaccaggtcccctgtgggaggagatgctgcaggccagaaaaaggagggtgagtccttctgccaggttggttcccatggtgatggcctggggccccccagatagccatctcactagcagcagcaagatttattgcaaagagcgaaagaacaaagcttccacagcatggaagaggacccgagcgggttgccagagctggctggggcagcctgcttttattctcttgtctggccccacccacatcctgctgatgcacaggagcccacggaggcggggggaagctcaggcatggcgggctgcaggtcccgagccctgcccggtgggaaggcagctaaggcccggcgagaaatccagcgcagcgctggtgggcgggcactgctgggggacccagcacaccctccccagccgctggcccaggtgctaagcccctagcccacgcccacccggaactccagctggcccacaagcgccgcgcgcagcctcggttcccgctcgcgcctctccctccacacctccgtgcaagctgagggagccagctccggcctcggccagcccaggaaggggctcccacagtgcagcggtggcctgaagggctcctcaagtgccgccaaagtgggagcccaggcagaggaggcgccgagagtgagcgagggctgtgagggccgccagcatgctgtcacctctcagtatcacccctcagattctgcatcgattactgagagaaaggcacccttaggctggggagagcgggaagataccactttcaccaagaggctgctcagcatccccagagtggggcaaaccaacataatatgccccctgatatgatgcatggggtcaggggaggggatgctggggactcaacgagagaattccagaacatcctgtgcccagcgggacaatcccaaagcctccagaacctcctctcccaatagagccacacgagacaaccccagaacatcctgcgcccagcgggacaatcccagagcctcctctcccagtagagctacacgagacaaccccacaacatcctgtgcccagcgggacaatcccagagcctccagaacctcctctcccaatagagccacacgagacaaccccagaacatcctgtgcccagcgggacaatcccagagcctcctctcccagtagagctacacgagacaaccccacaacatcctgtgcccagcgggacaatcccagagcctccagaacctcctctcccaatagagccacacgagacaaccccagaacatcctgcgcccagcgggacaatcccagagcctcctctcccaatagagctgcacgagacaaccccacaacatcctgtgcccagcgggacaatcccagagcctccagaacctcctctcccaatagagccacacgagacaaccccagaacatcctgtgcccagcgggacaatcccagagcctcctctcccaatagagctacacgagacaaccccacaacatcctgtgcccagcgggacaatcccagagcctccagaacctcctctcccaatagagccacacgagataaccccagaacatcctgtgcccagcgggacaatcccagagcctcctctcccaacagaaccacccaacaagacagccccagaacatcctgtgcccgacgggacgatcccagagcctcctctcctaacagaaccatccaacaagagaaccccagaacatcctgtgccctacgggacaatcccagagcctcctctcccagcagaaccatccaacaagagaaccccagaacatcctgtgcccaacgggacgatcccagagcctcctctcctaacagaaccacccaacaagagaaccccagaacatcctgtgcccgacgggacaatcccagagcctcctctcgcaacagaaccatccagcgagacaaccccagaacatcctgtgcccagcgggacaatcccagagcctcctctcctaacagaaccatccaacaagagaacctcagaacatcctgtacccgacaggacaatcccaggacctcctctcccaatagagccacacgagacaaccccagaacatcctgtgcccagcgggacaatctcagagcctcctctcccatcagagccacccaacaggacaaccccagaacttgtattcaacagaacatccccagatcatcttctacccaacaagacaaccctaaaacctcttgtaccaaacgagataacctcagacccacttgtacacagcgggaccgcacacagtccttttcctttcaacgagacaaccctggaacctcctcatctcaatgctgcacccaaaaggagaatctgagaccatcatctccccaccgctccactcaatggaacaatcccaggaattcatctccccatcgtactaacaaagacatcccctgggcctcgtttcccctccggccaactcagagtgatggtccccgaacctcttccccatctcgctccaagcaaagcgaggttccctgggcatccatcgccctccggccaacccaaggtgacaggcctcagacatcctctcccagcaggccagcccagcatgacccaccccagtcctcctttggccccacccagtacaacttgccatcccgggccacctcttcctcccataacccaggccaccagagcacctcccgaacttcctcacctgtgtaccccgctgcctatggggctcccctgacctctcctgagccctcccagcctccatgtgctgtgtgcattgggcaccgggatgcccctcgagcctcttcgccccctcgctatttgcagcacgaccccttccccttcttcccagagccccgcgcccctgagagtgaaccgccccaccacgagcctccctatataccacctgctgtgtgcattggacaccgagatgccccccgggcgtcctcgcccccccgccacacccaatttgaccccttccccttcctcccagacacatcagatgccgagcatcagtgtcagtccccccaacacgagccccttcagctccctgcacctgtgtgtattgggtaccgagatgcaccccgggcctcctccccaccacgccaggccccagagccttccctcttattccaggacctccccagggccagcacagagagccttgtcccttccatggactctctgcacgagtgcccccacatccccacccctgtgtgcattgggcaccgggatgcaccctccttctcatccccaccacgccaggctcctgagccatccctcttcttccaggatccccctggaactagtatggagagcctggccccctccactgactctctgcatggctccccagtgctgatcccccaagtgtgcatcgggcaccgggatgcaccccgagcctcctccccaccccgccacccacccagtgacctagcgttcctggcaccctcaccttcaccgggcagctctgggggctcccggggctcagcgcctcccggggagaccaggcacaacttggagcgggaggagtacactgtgctggccgacctgcccccacccaggaggctggcccagagacagccagggccccaggcgcagtgcagcagcgggggccgcacccacagccctggccgtgcagaggtggagcgcctcttcgggcaagagcgcaggtgagcccgggggtggggtcagccaggtgggctggggaggaggctcggcagcaggacaggtgaagggggaaaattcactctaaggccttcagctctcacagagtaaggaaacgcactcacctccaattagattacaaattggctgggtgcagtggctcatgcttgtaaccagagccaacttctccgaagacagtccagccctgcccccagcaggcaggtgagcactgccagctgtctggggccccgcaccccaaggggcggccactgcctcttccctcccgcttggagtcctgagaagagacctgagggagatcggcagctccaggggtccccgctgccccccaggacatcagccaggacccctgagagggagctgcggacacagagacctctggagagtggccaagcaggcccaagacagcctctgggggtgtggcagagtcaggaggaaccgccagggtcccagggccctcatagacacctagaaaggagctggagcagccaggagggaggcctgggccctgggggctggtggggatgtggagagcccagcctgggggcagccaaagccccggagggagcatgggggggcacttccagggagtacaaggagagctgggggcagccagaggcctgggaggagaagcccactcatgagctccccagagaactaggaaagagaagcccactcacgagcccccctgagaactggggaggccccgcagagtcctcacaatcctggcactctgggacacccactgctgtgggctggggggcagagggagcgtgtccatacccgcgtggctctgagaggcgacccgagcttgactggagggatctgcttggccttctccgggcaccaggagagggggtctgggcccgtgtccccagcctggactgggagggcctcttggagctcctgcaggccaggctgccccgcaaggacccagctggacacagggatgacctggccagggctttagggccagagctgggtcccccaggcacaaacgatgtccctgagcaggagtcacacagccagccagaaggctgggccgaggccaccccagtcaatggacacagccccgcactgcagtcccagagcccggtccagctgcccagccctgcctgcacctccacccagtggccaaagatcaaagtgacaagaggaccagcgaccgcaactctggcaggcctggagcagacgggccccctggggagcaggagcactgcgaagggccccagcttgccagagctgcaggtaaggaggtttccaccctcccaagggtagccagaaagtcagccccactcagccaagtctccttggcggatgcccggggaccggcccacgctgttcaatccgttcctgctgtctctgggggtcctcaggtggcgaagggtaggctggctccagtggggactggaggggtgagggtggatagagacggggatgggttggaagatggacagcacatccctgctggtggcagcagccttcctgagggaggtgtcctcctgtgattatagggccttgtcaggtggagatggactagcgaggagacagcagtgtggacagaaacgggtggtcatgtttgagaagtagcaagagcgtagggaaggggtctggggaggagggcctcactgctagggcttggacaggggcaataga

SEQ ID NO: 116114 - DNA, 1472 bp, Homo sapiens
catctggtcaagaaaccttgtctttagctttgggttcttcctcagaaggattgaggcagcgtaccctttcacaagcacaaactgaccaagcacagagtcaccagtttccatatgtaatgcaaggaaatgtagacaaccaatttcctgggcaagctgctccacctggattcccagtgtatcccgcgtttagcccactgcagatgctatggtggcaacagatgtatgctcatcagtattatatgcagtatcaagctgcagtttcagctcaggccacatcaaatgttaacccaacccagcctactacttcacagcctctaaatttggcacatgttcctggagaagaacccccaccagctccaaacctagtggcccaagaaaatcgacccatgaatgagaatgttcaaatgaatgcacagggaggtccagtactaaatgaagaagacttcaatcgagactggctagactggatgtacacgttctcacgagctgcgattctccttagcattgtatacttctattcttcttttagtcggtttatcatggtaatgggagccatgctactggtttatttacaccaagctggatggtttccttttaggcaagaaggaggtcatcagcaggctcccaacaataatgccgaagttaacaatgatggtttttaatgcaaacaacttggaacttgaagaaatggaaccgtcttatggatgatgggcttgaagatgagagtggagaagatggaggtgaagatgccagtgcaattcaaaggcctggattaatggcttcagcttggtctttcatcaccaccttctttacttcactaataccagaggggcctccccagggttgccaatttaacctgaaaaactgtgccagctacaaggagggtctgacttcaggaaagtggtttaaataacagtgcaatttcaaaaaaatttataactttcttttgatcatcatgtacagaggtgttttttttctttaggcttctcatgcatatgaatattttaagcacgaatggactactaaatatctgagtttttttttttttttttttaaagatcctaacagaacatagcgtaacaatattggtcttccagggtgttactcatttcaattatgtgtagtataccagggacagacctattttcatgtcttatttctttaaagagctgcttcattgggccgggcgccatggctccacgtctgtaaatcccagcactttgggaggccgaggcgggtcgggttacttgaggtcaggagttcgagaccagcctggcaaacatggcgaaaccccatcttaactaaaaatacaaaaaaattagccgggtgtggtgtcacgcgcctgtaatcccagctacttgggggggctcaggcaggagaattgccttgaacccaggagggcggaggtttgcagtgagctgagattggggccattgcactccagcctgggaaacagagtgaagacgctgtct

SEQ ID NO: 116115 - DNA, 3654 bp, Homo sapiens
atgaaattgccatcagttgagaaggaagaggctgtggatgaagcggaaaggggacactggacagccacaacttccggcaaatgcccaggacaggtggttcctggtgacctgcggcagagcaattccagcagggcacttgacatcgtcactgctcacatcagccctaagtcccttcgccgcgggacgcgcgagacgggagaaggtgcgggaagcgggaagcaggagcgggagcgcgcggccctggcacgcatagggcggcggagagggcacgagcagggattgagcacctactgtgtgccttcacgctttacaaaaggattttcgttcgatgttcactacagcccctgcccgggggtactgatgccccatttacagagggacaagccggatttcggagaggtgaagtcactcgccgaaagtcgcaccgccaggacctcgcagggaacatttgcggatgggctggtagaggaggctcggacatcccagttccgcacccgcactcgaccaacgcgtgcgaaattcacaaatttgaccaaggaaccggagcgcggccgtcctcgccgggattccggtcatcgcaataatctggctctcggcccctactcccaggcacggaggtcgaagagacgggcttcccctacaccgccctgtgtagatgtagcctcttcgtcccggcagccctccgagattccctgtgtccaccggagcgaggagaggaagcgttcccggccgcgagccccggagggagctcatgggagtatgaaggagatggtaggaggctgctgcgtatgttcggacgagaggggctgggccgagaacccgctggtctactgcgatgggcacgcgtgcagcgtggtcgtccaccaagcttgctatggcatcgttcaggtgccaacgggaccctggttctgccggaaatgtgaatctcaggagcgagcagccagggtgaggtgtgagctgtgcccacacaaagacggggcattgaagaggactgataatggaggctgggcacacgtggtgtgtgccctctacatccccgaggtgcaatttgccaacgtgctcaccatggagcccatcgtgctgcagtacgtgcctcatgatcgcttcaacaagacctgttacatctgcgaggagcagggccgggagagcaaggcggcctcgggagcctgcatgacctgtaaccgccatggatgtcgacaagctttccacgtcacctgtgcccaaatggcaggcttgctgtgtgaggaagaagtgctggaggtggacaacgtcaagtactgcggctactgcaaataccacttcagcaagatgagtcgaaaggacaaagaacgccttaagcagaagcacaagaagcggcctgagtcgccccccagcatcctcaccccgcccgtggtccccactgctgacaaggtctcctcctcggcttcctcttcctcccaccacgaggccagcacgcaggagacctctgagagcagcagggagtcaaaggggaaaaagtcttccagccatagcctgagtcataaagggaagaaactgagcagtgggaaagtctcgtccctgcagagctcccctgacttctctgcattccccaagctggagcagccagaggaggacaagtactccaagcccacagcccccgccccttcagcccctccttctccctcagctcccgagccccccaaggctgacctttttgagcagaaggtggtcttctctggctttgggcccatcatgcgcttctccaccaccacctccagctcaggccgggcccgggcgccctcccctggggactataagtctccccacgtcacggggtctggggcctcggcaggcacccacaaacggatgcccgcactgagtgccacccctgtgcctgctgatgagacccctgagacaggcctgaaggagaagaagcacaaagccagcaagaggagccgccatgggccaggccgtcccaagggcagccggaacaaggagggcactgggggcccagctgccccatccttgcccagtgcccagctggctggctttaccgccactgctgcctcacccttctctggaggttccctggtcagctccggcctgggaggcatctacaccagtaataaggaccccatctcccacagtggcgggatgctgcgggctgtctgcagcacccctctctcctccagcctcctggggcccccagggacctcggccctgccccgcctcagccgctccccgttcaccagcaccctcccctcctcttctgcttctatctccaccactcaggtgttttctctggctggctctacctttagcctcccttctacccacatctttggaacccccatgggtgccgttaatcccctcctctcccaagctgagagcagccacacagtgtgtcttgggatcagcgcttacggaggtctcaacctctccgggtatttacgagttaagggggcgggtcacaagcgccccgccctctccctggagagtcagcccagccccagaaagctaattggtgcagggagaccacctgtcaggctgggaggcggggcctacagccaggctgccgactcagagccagacctggaggactgcagcttccggtgtcgggggacctcccctcaggagagtctgtcttccatgtcccccatcagcagcctccccgcactcttcgaccagacagcctctgcaccctgtgggggcggccagttagacccggcggccccagggacgactaacatggagcagcttctggagaagcagggcgacggggaggccggcgtcaacatcgtggagatgctgaaggcgctgcacgcgctgcagaaggagaaccagcggctgcaagagcagatcctgagcctgacggccaaaaaggagcggctgcagattctcaacgtgcagctctctgtgcccttccctgccctgcctgctgccctgcctgccgccaacggccctgtccctgggccctatggcctgcctccccaagccggcagcagcgactccttgagcaccagcaagagccctccgggaaagagcagcctcggcctggacaactcgctgtccacttcttctgaggacccacactcaggctgcccgagccgcagcagctcgtcgctgtccttccacagcacgcccccaccgctgcccctcctccagcagagccctgccactctgcccctggccctgcctggggcccctgccccactcccgccccagccgcagaacgggttgggccgggcacccggggcagcggggctgggggccatgcccatggctgaggggctgttgggggggctggcaggcagtgggggcctgcccctcaatgggctccttggggggttgaatggggccgctgcccccaaccccgcaagcttgagccaggctggcggggcccccacgctgcagctgccaggctgtctcaacagccttacagagcagcagagacatctccttcagcagcaagagcagcagctccagcaactccagcagctcctggcctccccgcagctgaccccggtaatgcccctggcgcagggtgacctgagacaaaggcttcccggcccctgtctccaagtcgtccatccctggggcgtaggcacgttttagtgagccccggcggctggcggcgggcgggccgggagcgagcgagcggaggcgcgcggccat

SEQ ID NO: 116116 - DNA, 1296 bp, Homo sapiens
  misc_feature (1)...(1296): n = a,t,c or g
aaaacccaaattattgcgatgaccggaatcccgggcgaggacggccgcgctcccggttcccttggtccaaatttgtgaatttcgctaacacgaaaagttaaacaagacacagaggagaaactgcacttaagggtttctaacgaattacctttactagcaagaataaaactgcaagaaaattaaacgtaaaaatgtcagtcctaaatcatgcacgagtttcagaatatttgaatatttccttttggggcccaccgctgccaaggtggccgcagtttcgggtttcgccggacagggctcactaaaaacgtgcctacgccccaggggatgggacgacttgggagacaggggccgggaagcctttgtctcagggtcaccctgcgccaggggttttcgcctaagtttatgggggatgggacggggagacaacatttgttaagtttagagttttggggaacgttgtttcgtttaatcctccccacaccgtttttagggtggctgttcatatttcccattttgtggatggagcaactgaggtttcgacgggaaaaagtgactcgctcaaagtcactcaggctgaaatcggcagagtcgggacttgaacccagtctgtgcctcgctacgacaggggttccgctaccacgcgttggtcgagtgcgggtgcggaactgggatgtccgagcctcctctaccagcccatccgcaaaatgttccctgcgaaggtctggagaaacccggtgccccgcgggctgggctggattcgtggcgggtacctagggtcgagctgtcaagttcaatctcaagcttccaacatttattttcctgagcgcccactatgtgtcgatccgcaaaaaacgagcaagagcaggaaccaagccaacaagtggttcaagttcatcgcgctctccccggggtaactgaacactgctttagggtgtcacgcagaccctggcggtgcgactttcggcgagtgacttcacctctccgaaatccggcttgtccctctgtaaatggggcatcagtacccccgggcaggggctgtagtgaacatcgaacgaaaatccttttgtaaagcgtgaaggcacacagtaggtgctcaatccctgctcgtgccctctccgccgccctatgcgtgccagggccgcgcgctcccgctcctgcttcccgcttcccgcaccttctcccgtctcgcgcgtcccgcggcgaagggactggggcagagacgaccaaacanaaaattatttccgcccgctcgccccgccccgcccgtccccggagccagaaggggattgtggggcc

SEQ ID NO: 116117 - DNA, 342 bp, Homo sapiens
atggcggctgtagctgctgttcgctggctggggctctgcagcaggcttgaccagccactgacggatctccgagcattggatgtggccaactggctggaagtgattactcaaatttggaaagatagtaaagaatatagtcacactttctgcaacaacctgagagaagagatcctgacactcatggcaatggataagcacccaccagagcttcagagagtaatgactgactttgcaatcaaccaggaacaaaaggaagccctaggcaacttcactgcattgaccagtaacagtgatactgacagcagcagtgacagcgacagtgacaccagtgaaggcaaatga

SEQ ID NO: 116118 - DNA, 1551 bp, Homo sapiens
atgggggataccacagctgtgccttatgtgtttcaagatgatccttaccttatgccagcatcatctttggaatctcgttcatttttactggcaaagaaatccggggagaatgtggccaagtttattattaattcataccccaaatattttcagaaggacatagctgaacctcatataccgtgtttaatgcctgagtactttgaacctcagatcaaagacataagtgaagccgccctgaaggaacgaattgagctcagaaaagtcaaagcctctgtggacatgtttgatcagcttttgcaagcagccccagctcttgaggcagcaggctacagagccaacactgacctctgcaatgccaaccaagcctgtattgctctacgtcagcctcatcccagaccttggtttataaataaagacaagatttattcttgtaagaagtcttgccagcaccgagcttatgagcaggcattaaacttgtacactgagttactaaacaacagactccatgctgatgtatacacatttaatgcattgattgaagcaacagtatgtgcgataaatgagaaatttgaggaaaaatggagtaaaatactgtgctcatctctcagagatctagaacttgcctaccaagtacatggccttttaaaaaccggagacaactggaaattcattggacctgatcaacatcgtaatttctattattccaagttcttcgatttgatttgtctaatggaacaaattgatgttaccttgaagtggtatgaggacctgataccttcagcctactttccccactcccaaacaatgatacatcttctccaagcattggatgtggccaatcggctagaagtgattcctaaaatttggaaagatagtaaagaatatggtcatactttccgcagtgacctgagagaagagatcctgatgctcatggcaagggacaagcacccaccagaggtaggcctgaaactcaccagccaaagtgagttgctgaatgagcttatggaccagtgcaaaagtgtctaacagcccttcccaggcccattgaagtagtagagctggcaagtgccttcagcttacctatttgtgagggcctcacccagagagtaatgagtgattttgcaatcaaccaggaacaaaaggaagccctaagtaatctaactgcattgaccagtgacagtgatactgacagcagcagtgacagcgacagtgacaccagtgaaggcaaatgaaagtggagattcaggagcagcaatgggtctcaccatagctgctggaatcacacctgagaactgagatataccaatatttaacattgttacaaagaagaaaagatacagatttggtgaatttgttactgtgaggtacagtcagtacacagctgacttatgtagatttaagctgctaatatgctacttaaccatctattaatgcaccattaaaggcttagcatttaagtagcaacattgcggttttcagacacatggagaggtccatggctcttgtcatcaggataagcctgcacacctagagtgtcggtgagctgacctt

SEQ ID NO: 116119 - DNA, 102 bp, Homo sapiens
tcaggacacggcgtaggagtgcgggggccagcaggaccttgccgagctagtgatgtttgaggaacgaccaaaaggaagatgcaggaggagctgtgaggggat

SEQ ID NO: 116120 - DNA, 1856 bp, Homo sapiens
ggggctcagtagtaaagattttatttagttccatgtaaattcaattagctaagttctttaatacctaccaatcacacataattacattttcatgtaccttacaaaaccataataaagtatgacaaattaaaaataacattatgataaactctgcctgtgctgttattattacttggtaatattaatagcgactgaagcaagacttcagaggtgagatttactactgaggcccaatgacaatgatttggagaattaggtatatatctagaaatgaaacgggtccagaaaccttgtaagaaagatttgaattctataaggcagaatctggccagccacaggggccaagccttggcctctggccttaggccctgggccaggtgccaggccaaccaaggccattcggcttctcacctccagtgggtgctgaccgtaggggctaggctttggttaccactcatttttacccccatttctgtccccacttcccataaaagacacttccaaaatgctgatgcttccagagaataagaaacattctgaaaaggaaaaaaacaaaaaggcctgctggcatataaacttcaaaagaaaaaaaaggtacaataaggagaccttatctattccttatccattgagtagttgtagtttttaaataactataagaacacttggtcttatgtttataacattacagtaacattaattaacacaaattaacataaacaaaattaattaacatcaattaacataaacactaaaatagataacatttagttgtagtcaaaaatcatcatacctcagtaaaaacatactttttttttttttttaaagaaaaactccaattactcctgggatattccttaatcccttattttagtagctgagtggaaggatcttttccattaaaataaaattctgtcccaaaaatagctaaaatggaaactgaaatatatgaaccatttgtgacactataaaaactacttgtcagagccaactcagtttctcatatctcatatttttaatattgacttcaggccttaaaatttctatttatctttctttaaaaatataggttctatgccagggagaacatgaacatttcctttgcaagtagcaaaacacaagtaaactttcacgacagctgcaccggcataattcatcttaaaatatttaaaacatcatgcaaatttaacagcatgtgtacttttattatacagaatttaataattaacaaaaacaacttccattctcatggcacttttataagagggtaaggaaagaaaaatattatgacgctcactctgtgggaaaaaggatgaggataatggctgcagcttgtggaaagggccaaatttacggccagttgtcctggttgcaactgctatcttctctcttcaattaggcatgttctagaacagggaaacatggatactgtacactcacaagggtctttcatttgaagatttcaggaacctttaataaaggtccatctgcactaaccagcactactaatcccatttggatgttttccgcctcatataactgtgcccctcactatcaatagcttcataggaggtccgtttttattctcttgtattgcatgtagataaccaatatatgccacgcaaagtgaaagagttaccaatccgaaagccattacagggtttggtagggttaatgaagagctctggattcacagcacgaaataaggttgttgtgcgcacccctctgagccctgggctttgaaactctttttctttgggtggttcctttttgaatgttggaggctcaggtgctgaagacatcttgatcaatgatgatttattatctttcgcggggtcacctcttctcctcgcccg

SEQ ID NO: 116121 - DNA, 843 bp, Homo sapiens
atgccacgcagcagccagcactcggagagcagtcccctggatactaccacacagagaaaaggggcatcttcacttgcacatcaggcctcagagaagcagtttcagcctacccatgacttagcagctaaagaaagatgtattcctggggccaacaggacccaagggagaagaagccaatgtccacttaggtgccattctcagagcataaagaagtctcatccaggtaaatcagggatttcttcttcatttggatccattgcaggccctgcaggagcaatccacttccttcagagcgtctatggattcgctcagcattcctggtatattcctgcagtagttctggagcaaaagttaatgatgggctccctccctgcaggggctccccctcaacagggtcactgtgggctacctgtggccctagacaagggtcacacttatgaaggaccctttccacacagccctgtctgttctcaggttctggccaccactccctgctctcacacctacccgcctagggttagcaacagctcgaaatttctcatagttctgggtgctgggaagtccgagctcaatatgccagcagattcggtggctggaggctttgtgggcccagcggaccagaacacaagctctggagtcagccctgagtttgaattctacctctcctatttactagctgcaataccagactcacattactttacctctttgtgcctccatatttttctctctataactggagacccagaagctaaacctggattaaaaggacttgtaccacaggaatggcacatgggcccccatacccccatggtggtactggtttccattgagctcagttaa

SEQ ID NO: 116122 - DNA, 408 bp, Homo sapiens
ctgtccagcacttgatctgactcttagctagaaaggttcatactatcagctgtgcctatctcactggcttagagaaaggataaaaaaaaaccctgcagtacaagctgggggtggcggtgggggcactgaagccacgctccaggtgaggtggggaggcacactgatggaggggtatgagcccacttcatggggaacatgcacaaagaagaaaacatctcaggctgctgtgggagggcagatgtcctgtgcctgcagtccagaatccccctcattccccccttcaataaagggaatcctgtgggaagagaaaggaatgtgttaaagtgtagatcaagaagggacaggagaataaaaagaaatgtaagcaggtgcccactcagaaaagatgatgagtgttctattgttgcc

SEQ ID NO: 116123 - DNA, 526 bp, Homo sapiens
  misc_feature (1)...(526): n = a,t,c or g
agtgcatgccagaaataggatccagaaatttaagtggaataaatggaaagttctggactttggtttaacaaacccgtgacacagctgaaagattttagctgactaaatgctcaatatgagttcataggaaccaagccacgttaagcagctcatgtttcccctttgccttcaggatgccagatccctccttagtgtccagcagggggtcctccagatgtgagctgggctaccaatcctgtgttcagggttgcagacttgccatgtcctttgaacaccttttgcacctctggcacatggtctcatctcttttcttcctgtagggttcgccagcttgagggtcctattcacactttctttctttctgagtcagaatccctgtcccccaggctggcagtgcaattgccgtgattcatgggtttcantgtgggcntcaaatttccagggttcaagtggatcctcccacntcaggcntccagagttagttggaaaccagagggtttgttgcggaccacaaccnggttatttt

SEQ ID NO: 116124 - DNA, 534 bp, Homo sapiens
atgtgcagaggtgcaaaggtgttcaaggacatggcaagtctgcagcctgacacaggattggtagccagctcacatctggaggaccccctgctggacactaaggagggatctggcatcctgaaggcaaaggggaaacatgagctgcttaacgaagtcacaagagaccttatcagctgtcttgctgaaatccagatgtaccacatcctcaacgtctccctgatctacccgccctgccacaccattagaagaagaaatgagtgcaggggtgccgtgcacagtgtgatggatgtggatggagccctgcagcaggcagtgggcagcctgggtggcagccggaatgtgaacttggaaacagacgagcaggaaagaggctctttggagaagtcactcattagacattatccgggatctcagattacagggaatgcagaggcaaaaagcctcccctttgtaacagccggcacccaatttgctttatatggtcatgagccctcttacctgcagcatcaaatgggaggcatgaagccacgataa

SEQ ID NO: 116125 - DNA, 535 bp, Homo sapiens
  misc_feature (1)...(535): n = a,t,c or g
ggcctcgtgccaggatgccagaaataggatccagaaatttaagtggaataaatggaaagttctggactttggtttaacaaacccgtgacacagctgaaagattttagctgactaaatgctcaatatgagttcataggaaccaagccacgttaagcagctcatgtttcccctttgccttcaggatgccagatccctccttagtgtccagcagggggtcctccagatgtgagctgggctaccaatcctgtgttcagggttgcagacttgccatgtcctttgaacaccttttgcacctctggcacatggtctcatctcttttcttcctgtagggttcgccagcttgagggtcctattcacactttctttctttctgagtcagaatccctgtcccccaggctggcagtgcaattgccgtgattcatgggtttcantgtgggcntcaaatttccagggttcaagtggatcctcccacntcaggcntccagagttagttggaaaccagagggtttgttgcggaccacaaccnggttatttt

SEQ ID NO: 116126 - DNA, 534 bp, Homo sapiens
ccatgtgcagaggtgcaaaggtgttcaaggacatggcaagtctgcagcctgacacaggattggtagccagctcacatctggaggaccccctgctggacactaaggagggatctggcatcctgaaggcaaaggggaaacatgagctgcttaaggaagtcacaagagaccttatcagctgtcttgctgaaatccagatgtaccacatcctcaacgtctccctgatctacccgccctgccacaccattagaagaagaaatgagtgcaggggtgccgtgcacagtgtgatggatgtggatggagccctgcagcaggcagtgggcagcctgggtggcagccggaatgtgaacttggaaacagacgagcaggaaagaggctctttggagaagtagctcattagacattatccgggatctcagattacagggaatgcagaggcaaaaagcctcccctttgtaacagccggcacccaatttgctttatatggtcatgagccctcttacctgcagcatcaaatgggaggcatgaagccacgat

SEQ ID NO: 116127 - DNA, 974 bp, Homo sapiens
accattacgtgacaaagaagaaattggttacagagcataaagacacagaggattttagacaagacttccactcagagatgtctggattttgtaaagctgctttgaacacttctgcagggaactcaaatccttatcttccgtattcctgtgaattgcctttatgttatttctcctcaaaatgtatgtgttcatccgggggacctgtagacagagcaccagactcctctaaggatggtagaaaccatcataaaacaatggggcattataaccacaatgactctttgcggaaaacacagataaactctttgaaaaactcagtggcctgccctggtgcacaaaaggctattacgtcttcagaggcagttgacagatttatgcctaggacaacacaactgcaggagcgcaaaagaagaagagaagatgatcgtaaacttggaacttttcttcaaacaaacccaactggtaatgagattatgattggacctctgttaccagacatctctaaagtggatatgcacgatgactcattgaatacaacggcgaatttaattcggcataaacttaaagagttaataaggttcaatttcagctatgatgtacttgtagcaggacgagctgcagacaaaaccccgcagacaccaggttatagaaagaagaggctttattcggccaggagcgtcggcagacttgtgtctcaagaaccgtgctccctgaagaaaaagttcctggtccttttaagggcttacaactcaagccaatataccctggatttggtttgggaaatacaccatacttacaggaaacaggaattgtctattgctaaagaggttaaaagctcaatggaagtcttgaatatagttactgaaataatcatgaatgtcttcttggggcccaaatgccaggatggggctgaactctcaatgattgccttgacttcagcagtgggctgcagcccaacagaggagagtgtctag

SEQ ID NO: 116128 - DNA, 871 bp, Homo sapiens
ctggttgccagggattctctttttgagagagggaaagcataatgaatggaagtacccagctggaggtttcagggcttctggaggatgctctcgcatagctcgaggtcctctgcccacctcttctctccaaggaaaatgaggactgccccttccccctgcaggattggcccccagcctgcgcatgcaccctcctcttgcccaagtggggagcacagaggcggagaggaatcccttaccacacccacggcccagcttgctcacgagtgtcacctctgtgacggtcaccactgctcccttggagggccacttgagttactgttgcttcctcgcctgctggcttgatgagcaccgatggtggggatctgaccccgaggggcagagctgtcggtgactgaggactggactgtggtgaccatgccgatttgcttcagggagaacgttgcaattgcacccagcagctcctggctctgcaggcggcacagcctggggccctgtgatcctctggtttcttccattggggcggagtcgggggtggagggagctggccacaacccactgctctgatgggtggtttgtccaaggatgctgaatgtaatgcctggtcaatgtggaagcccatgaggttgcccagggaagcctccaaaagctgggatgcttgagggtatccaagttgaaaaagacaaaatctgaccatcagccagtgacagtcgtatatgaggttctcgctgaaacgcttgcggaggttgtcgacaaaggcagattcgctggtgtacgcgtccaatagcacaaaatcctgaaccccgaccttgtcccgggcagtcagcgccccttccatgtgcagacggatgtgtttcctcctcacgtcttcttt

SEQ ID NO: 116129 - DNA, 965 bp, Homo sapiens
ccaaaaaaaaaaaaaaaaaaaaaattagctgggcatggaggcaagcacctatagttccatctactatatagttccatctactccagaggctgaggtggaaggatcatttgagcatggaaggcggaggttgcactgagccaagatggtgccgctacactccagcctgagacgcagagtgagagaccctgtcttctcagcaaactattgcaaggacaaaaaaccaaacaccgcgtgttctcactcataggtgggaactgaacaatgagaacacttggatacaggaaggcggacatcacacaccggtgcctgttgaggggtggtggggttttttttttttttttttccttcaaaaaatagtttattctgcacatttcctagtaggctctctgcccaccgttccaggggtagcagctactcataacttgtctttctctccaaaaccaagagggccttcccaacagaaaaaccttcagttcccaaagcagcatcgattcttcccctcacccccagcaaacctcggggtgggaataatggaatcattcaccttctcccacccctcactgccccgccccaccttcatttgccagggactgtcactgggctgatgggtcaggattttgtcttttttcaacttgggatacccttcaaggcatcccaggcttttgggagggctttcctgggggcaacctcatggggcttccacattggaccaggggattacattcaggcatccttgggacaaaaccacccattcaggaggcagtggggttgtgggccaggttccctccacccccgactccgccccaatggaagaaaccagaggatcacagggccccaggctgtgccgcctgcagagccaggagctgctgggtgcattgcaacgttctccctgagcaaatcggcatggtcaccacagtccagtcctcagtcaccgacagctctgcccctcggggtcagatcccacc

SEQ ID NO: 116130 - DNA, 555 bp, Homo sapiens
atgcagactctttttacattactacaaccttcctcccaaactcctggcatcccacagcccatcgtctgctgtgtttatgcagaaagtggggccagagattctggacagccgcctctaaagtgccagtgccttcattctgcactcctgctgccacacagaggggctgaagggaaccaggatgcagccacccagcaggagattgctctgctccccaacaatgcagctgacctgggcaagtatatcactggtgacaaggtgctggcctcaaacacctaccttccaggacctcctggcctgcctgggggccagggccctcccgggacatggatgaaggtggaaaccatcactcagcaaacgaacacaggaacagaaaaccgcgtgttctcactctccctttacatgaccatcagcaaacagtacctgagtgaggagcaggggagtcattggctgtcttgcttaataaatgccttgcaagctttcttctccaatgctgccatttggcttgtaacatggtttgagctgtccagggtccttgatggagcagagaatgattga

SEQ ID NO: 116131 - DNA, 390 bp, Homo sapiens
atgactccaaagcacgaccatctggggcacgtgctgccgatctctctgcagctgctgttggaattgtcttcctgtcttcctgcagcctccgccgtgtggtgtgccggctgtaatgacccatggatgacaggttacccggacaacatgcattacaattacaagccaatgctgcatgacagaggaggctcggcagtgacgttgtctgcctcgcagagttggtatgctggctgtaatgctgaaaagtcagaagtaaacgcgttccccgggacccagggcatgcgcttcatctcagcggcttcttacaaggattgggtgcaagtgctgcagcagaaagatgtttccaggaacatgggaaccaaggctaggtctgcatcttctctgaaaaactag

SEQ ID NO: 116132 - DNA, 2534 bp, Homo sapiens
  misc_feature (1)...(2534): n = a,t,c or g
atgaaggaagccctgcgggaggccgtgtttgtcacttctgaagccagcctgaaaaatctctgccagatgtcccaggccgtactggatgaggatctcttcaacttcctgcaggcccactggttcacctgtgaactgctgtggtacatgcatgttaggaagggcctgcttgcgtgtaacacctacatggacagcctagacattgtcaccagcaaggtgtcaagcctctttcgggaacagcagtcgctgctggactgcatcctctgctttgtggattacatagacttctttaataccaaaggcttgaagaacttgcccacacctcctcccaaattaaagagagctcggccggcaagcatgccactgaagtccaagaaagcttttggaatctgtggagagagccttaccagcctccctgcagaagagaccaagccagacgcacagcanatagcaaaagtgatgaagaactttcttaaggtagatgagggttccatggcttccttcagtgtgggtgacagccagcacctggaccggcgggggggccagagcagtaagatgaccgacctgttcatccgcttcccagagaatctcttgctacaccgggtggagaacacccagggccacatcctctatgctttcttggtggagaacaaggaacgagaaagtcgagtggtgcactttgctgtgctcaaggcggagacagtcacctctgtggccaagatgctgagcatcttcacagagttcaactccgattggcccaaggtcaaggtggtctttgtggacccttcattccattaccgggctatcctgcaggagatctttcctgctgcccgcatcctcctttccatctaccacacaacccgactcttggagaagaagttgcatcgtagttcagcaaatccatcctttaaaaggctcatgaaggaagccctgcgggaggccgtgtttgtcacttctgaagccagcctgaaaaatctctgccagatgtcccaggccgtactggatgaggatctcttcaacttcctgcaggcccactggttcacctgtgaactgctgtggtacatgcatgttaggaagggcctgcttgcgtgtaacacctacatggacagcctagacattgtcaccagcaaggtgtcaagcctctttcgggaacagcagtcgctgctggactgcatcctctgctttgtggattacatagacttctttaataccaaaggcttgaagaacttgcccacacctcctcccaaattaaagagagctcggccggcaagcattgccactgaagtccaagaagggttttgggaatctgtggagagagccttaccagcctccctgcagaagagacccaagccagacgcacagcaggtacaggtacagcagcagttcacaagtgccgccctcgcaggttggcatgctggacaccttgcaccagagtggctctgaactaggcctacaagctgtgccacaatgagtgggaggtggtacagaacttccacccacctggtggacatggctggctctttcagtggacgtttcagctgctagaggactctcaccaggttagcaaagatgggctgtaagctgcaagctggttcctttcaacaatggtaccacctgccatgccgacacattttggctctgctgcacaccagccagcagccggttggtgaagccatggtgtcccgccggtggcagaagaagtaccagtacctccttgggcccaatggggagctccaggatcgtggtatggtcccgatcacaggaaagcataagaagcaaggacggaacgacatgattcaggacctaagcagggagttagcaaacctgctcatgcagacccgaggggccagagctggaggaacgctactccaccctgcgcaagatgtggaataatctgggctggcccctcccagccatctgagctctttcagccagccaggagaactttaaggactgggcccgcctccctttcctctggggaaagcaagaagaaggggagggattccctcctgctacagcctgtgatgccattattgaagccactttagctgaagccattggaccacaaacacttctcccttggaagtgtgagagttttaaagtgggccaggacatactagggtttagcattttagccaatgtcttcctaggtggggctaggaatattgttacagtagagaggaagggaactccccctgtgtgacagtcctttcaatctgccccttttcagcccctacttttggcattccttgggagcctcagcttgcttgcttcaaggccaaagcttatctccgctactgccaatgctcatcctcttcctcccccagctcccctgagatcagatcttatttgctctgcaaagatgaatccctgcctcaggttagggtgagacaaaatcggtctggtaaaagggcctgttttcagggacaaagggaatgaggatgatctttggactgttgctgactactttatgaagaatacttatttgtaactttttattacatattaaagttgtttttaataaaattaaaaaaaaa

SEQ ID NO: 116133 - DNA, 567 bp, Homo sapiens
cggccgcaagtgtttttgttttttttgttttgtgattttttttgtttttttgtttttgcccttcatggtccgagaaggaaacggtggaaggtttcacatggttccaatgctgtaggtcgccgcgggcccgatggtgtgatggtacgggtcggcagctgcgtagactctgccgtaactgtcgctgtaggctgccgccgctgcagcgggctgagcgtatctgtaggctgcgtagcctccataaatctcagcaccataaaatccatcctgatacacgaccgctccgtaagtcgggatggggggtgggggtggcgcagcccgaaatgtattatacacggcccggccccggccccgaagatgtgcgccccggtaggcaacggctgtgccggtggtggggtaggggaaccccgtcactgcatagaattcaggcccgtagactgcgccgaccactggatttagcttccagccgttggtgtaggggttccccgtcttcttgttggtcatcactcgggccgtggcattattgacctcaattttccgtccctctacgatcgtcccattcagcttctc

SEQ ID NO: 116134 - DNA, 593 bp, Homo sapiens
gggtggcaacggctagccctgatgaggccacctttaccaaaacatcctcgccggtcaataatgccacggcccgagtgatgaccaacaagaagacggggaacccctacaccaacgtccctcctctggaagtgggtgtgataaccgccttaaggaagccaggtgtccagacaggttcctgggcccagtccattctgaagatgagaaaacagcacccccagggaggtgaaggacttaccgaggaccccccaactctcaaggactcaggctatagcctgcccgaccccaggcacattgccaaggggctgtggctttctccacagtgctcatcagtccaggagctctcaggcctccgttctgcctgtatcgacagccgcccacacaccctggatgctgtgtgtgccgtggctatatccgccacccaccaccaggaactcgtgcatgtaggtttacaatccagatctctggcacctcatagatcttactacgtggttactggtgccaacgtcactcaacgtgtgggacagagaacagacgagggcctctcccgaaacctcctctaccgctgcccctcccagtatagtcaatggcactaa

SEQ ID NO: 116135 - DNA, 612 bp, Homo sapiens
atgtcccaatctgctttggctttcacagccgctgacccacaggctgtcccacgaagaatgggagaggcctgtcaagggagccacatgtcttccatcaaactcaagggaccaaaggaaatggcagtgactgagaacagtggcccgtggctggctggcgctctggagaacagttacgcaggacagcggcccggagagacctgtgctcctgggggttctgcgccggccggcagctcccttgaagaaattccacagtgtgtgtacagcctaagggtccccttaaatctgagtggcaagcccacagtggcgagggccagtcgctggaatgtcggggctgctgttgaggtcctcaggctacactggttgtctgtgtcacatggcggtcgggcgtggactttgatccctgttgagagagcatgctgctgtgggcgctgggctggggaaggtccttccatgcttcatgctgccttggaggtggtcagcaggttccaggctggtgtttacaatctcggaggaagtgcgatggtttctgttcttttgacagttcagtctgatttcaagtcagtcgaaagcgaaccagaagcaccgggcacagcagctcctctggctgtgtag

SEQ ID NO: 116136 - DNA, 374 bp, Homo sapiens
cccgggtcgacccacgcgtccgctatggacctgagggggacatgcggtttgtacgattaatcacctacatcttactttgtggatttgaaccattctatgatgaaagaggcgaaccggtcatgttcaagagaaacctgaaatgtgaatattactttatctccccctggggggatgaagaatctctaaatgccaaggacttgggcagaaaattaattgttttggatccaaagaaacggctgactacatttcaagctctccagcatccgtgggtcacaggtaaagcagccaattttgtacacatggataccgctcaaaagaagctccaagaattctatgcccggcgtaagcttaaggcaccggcgaaagctgtggtg

SEQ ID NO: 116137 - DNA, 642 bp, Homo sapiens
atgccgataatcttgcgtaataccaggttcttgtataccacgagtaaacgcaaggtggacttgcagatattgggcttgagtattgtacctagcatgtacacagccgccgtgtggcatcgctacgtatcatgtcgcatagcgagctataaagttgcaacgccagaagtcccctgcacgacctcggcgcgaacaacctcggtcatgaacggctgcccctctgaacaggggccgtgtgatttagcgtgcccagtgccatcacggaatttcacgagcacaatagacgtggagcacacagatcataccagaggtcagaaaattaattgtttaggatccaaagaaacggctgactacattcaagctctccagcatccgtgggtcacagtccttttcttggtttcaatcgcgttttcatatggcgccagccatgatacaatcgatgctcggtaccaaattgagcaagaacaacatcaacttatggtaaagctgggtggaagaatggcgaaatcactgaggctttataaaagttgtggggacaatgttctaaagaaattaacagtatacaagtggatactcattttaagaagggataagacaatgttgaagacaaagcccacagtgcagatcatccacatcaatttttga

SEQ ID NO: 116138 - DNA, 1763 bp, Homo sapiens
cccggacccaggtgctgccagggcggcggctggcggccggcttctcgctcgggcagcggcggcggcggcggcggcggcttccggagtcccgctgcgaagatgctcaaagtcacggtgccctcctgctccgcctcgtcctgctcttcggtcaccgccagtgcggccccggggaccgcgagcctcgtcccggattactggatcgacggctccaacagggatgcgctgagcgatttcttcgaggtggagtcggagctgggacggggtgctacatccattgtgtacagatgcaaacagaaggggacccagaagccttatgctctcaaagtgttaaagaaaacagtggacaaaaaaatcgtaagaactgagataggagttcttcttcgcctctcacatccaaacattataaaacttaaagagatatttgaaacccctacagaaatcagtctggtcctagaactcgtcacaggaggagaactgtttgataggattgtggaaaagggatattacagtgagcgagatgctgcagatgccgttaaacaaatcctggaggcagttgcttatctacatgaaaatgggattgtccatcgtgatctcaaaccagagaatcttctttatgcaactccagccccagatgcaccactcaaaatcgctgattttggactctctaaaattgtggattatcaagtgtctcatgaagacagtatgtggaaccccagggtactgcgcacctgaaattcttataggttgtgcctatggacctgaggtggacatgtggtctgtaggaataatcacctacatcttactttgtggatttgaaccattctatgatgaaagaggcgatcagttcatgttcaggagaattctgaattgtgaatattactttatctccccctggtgggatgaagtatctctaaatgccaaggacttggtcagaaaattaattgttttggatccaaagaaacggctgactacatttcaagctctccagcatccgtgggtcacaggtaaagcagccaattttgtacacatggataccgctcaaaagaagctccaagaattcaatgcccggcgtaagcttaaggcagcggtgaaggctgtggtggcctcttcgcgcctgggaagtgccagcagcagccatggcagcatccaggagagccacaaggctagccgagacccttctccaatccaagatggcaacgaggacatgaaagctattccagaaggagagaaaattcaaggcgatggggcccaagccgcagttaagggggcacaggctgagctgatgaaggtgcaagccttagagaaagttaaaggtgcagatataaatgctgaagaggcccccaaaatggtgcccaaggcagtggaggatgggataaaggtggctgacctggaactagaggagggcctagcagaggagaagctgaagactgtggaggaggcagcagctcccagagaagggcaaggaagctctgctgtgggttttgaagttccacagcaagatgtgatcctgccagagtactaaacagcttccttcagatctggaagccaaacaccggcattttatgtactttgtccttcagcaagaaaggtgtggaaccatgatatgtactatagtgattctgtttttgaggtgcaaaaaacatacatatataccagttggtaattctaacttcaatgcatgtgactgctttatgaaaataatagtgtcttctatggcatgtaatggatacctaataccgatgagttaaatcttgcaagttaac

SEQ ID NO: 116139 - DNA, 390 bp, Homo sapiens
ctgagtgggttgggggtgtatgtttgcaaggatagaatttctcatgggggagtggccctgcttcctcccttagaatggcttggggcttagggctggggacttgccctccatggaggtcagtgggagttgcagctgcagcgagggggtagcgcagtgcccagctggctgggtgacctcgggcacggctcgtcccctggtcggcttcagtttgcctatcggtatgttggagcttctactccacatttcttctcccctaactccagcccctgaaaccgtcttccccagtccctcctcgggctgcgactaggttggacctagaagcacacgggaccaggctgggcgaagaacactgacgcccagagccgaataaacaagagttccgtgtttcaa

SEQ ID NO: 116140 - DNA, 591 bp, Homo sapiens
atgactatccacatcctcatcctgctgttgctcctcgccttctccgcccaaggggacctggacactgcagccaggcgaggccagcaccaggtcccccagcaccgcgggcacgtctgctacctgggcgtatgccggacccaccgcctggcggagatcatatactggattcgctgtctccaccaaggagccctcggggaaggccagccacgagccccaggacccctacagctatgggcgccgccggtggcgcgaggcggaagcccggctcggttcccaggattccggcctgcagcgagggggctagcgcagtgcccagctcgctgggtgacctcgggcacggctcgtcccctcctcggcttcagtttgcctatctggctccagcgtgacatggctgaagcgcaccaggccgtgggcttccgaccctcgctgacctcggacggggctgaagtggaactcagtgcccctgtgctgcaggagatctacctctctggcctgcgctcctggaaaaggcatctctcacgtttctgggtgaggagcggtgctggtcggtttccttccggggatccaggtttctgcttccgggatgtctga

SEQ ID NO: 116141 - DNA, 441 bp, Homo sapiens
gctacctgggcgtatgccggaaccaaccgcttggcggaagaatcatatactggattcgcttgtctccaaccaaggagccttcgggaaagcccagccacggagccccaggaccccttacagcttatgggcgccgccggtggcgcgaggcggaagcccggctcggttcccaggattccggcctgcagcgagggggctagcgcagtgcccagctcgctgggtgacctcgggcacggctcgtcccctcctcggcttcagtttgcctatctgtatgttggagcttctactccacatttcttctcccctaactccagcccctgaaaccgtcttccccagtccctccccgggctgcgactaggttggacctagaagcacacgggaccaggctgggcgaagaacactgacgcccagagccgaataaacaagagttccgtgtttcaaaaa

SEQ ID NO: 116142 - DNA, 1300 bp, Homo sapiens
tttttttttttttttttggggccaactgaattcaacaagtatttattgagtgtctattatgtgctagagacgtgagacacatcgagagaacgaaaccgaaagccctgccctggtcgggcttacagtctagcacttagcgccagttaacctgcaggctacctggagccccgggcaagtcaccgcacctctgtgccctcggtcctcagctgcccaatgggagaataagcagacctggctcaaaacatgaatcatgtgccttggtgtaactgcaagatgcccaaactgcatcccccacaacccaccacgtaggacagcagacaggggcctggaagttgatttttaatgataaatgtacaatgaagggtagggcagaggggctaagcctaactgtcctggggtgcctgtggtggtggtaaaatggcctaacacaaactgttgctgctgctgctgcttcttggtgcgtcgccttgctggcgagggtccttggccttctctgtaagctgccagtgccgtctcctttgccttcttccttggcttccattggctgtcctcaaacaaatgttttggaaggggccttcgcccttgcaagcttagccaagatatattcaaaaacccttccataatccttggtcaacgttgcttttgaaccggggcaagaccaaattcctgggacagctctggaagacaccaaattaagctaggaggagaccccaggcttcccggcggattttcagtcccagcccactgttgtcaagagttcacaacagtaaaacacatcgtttcctccaccaccattcagccggggcgtggttggatgttcccaggtgaaggtagtcatggtctgattctgtgggtccacaatagagtcctccaggacgttacacccgagtgggagctacattggcaaggaaaataagtcgctcgggcccagcgtgggcattcctgttggtctttggtcaggagtcgccggggacagcagtttctggtcaggggtcacctcccggtgtactatgtcttccgtcaagacatgtttgctatagggattcgggtacccgctgccagaaaggcgggaaacactttggtcccaggaactccggagcacgctctggcccaggaaatacttcaccatcgtcccggccgaagcgggctcagcacccgcgcagcatcaggggtgcggagcctgggaggcacgcgagggccgggccgggccggggctcggcgcacacccgccagccaggctcgtagctcagctcaccaccgcaccgcgcccaagcagctgccgccgccgccgccgccgcca

SEQ ID NO: 116143 - DNA, 498 bp, Homo sapiens
atggggcaggactttgccgcaagtccagcaattcaggtgggaggaaggagagtggagggaagacaagcggtcaccaacttagagcggcagggcaggaaggaatgcaggtacaagagcagcagcgaggccatcactggctctgccggggcagacccagaagtggaattgctggatcataaggaccgggccaaagccgaggcagtgaataagaggctccggaagcagctggccgagttccgggcaccacaggtgatgacttacgtccgggagaagatcttaaatgcggacctggagaagagcatcaggatgtgggaaaggaaagtggagatagcagaggacctcattccatgcatgtacacagtcggcatgggtctttcggattctgtacgaatcccgcagactttgaatatggtaccatgtaacaggaagcaccctcgctcctgtgagctccgggagatcaatgggctatgggaaaccatatgctggtgtcagaagtaa

SEQ ID NO: 116144 - DNA, 567 bp, Homo sapiens
  misc_feature (1)...(567): n = a,t,c or g
tcaatctggacaaggagatcttgctgagaaaagagctacttgaaaaaattgaaaaagaaacactacaagtagaggaggaccgggccaaagccgaggcagtgaataagaggctccggaagcagctggccgagttccgggcaccacagggtgatgacttacgtccgggagaagatcgttaaatgcggacctgggagaagagcatcaggatgtgggaaaggaaagtggagatagcagagatgtccttaaaaggccatcgtaaggcttgggaatcgaatgaaaataaccattgagcagttgcaggcagattaccttgctgggaagtagccagaggcaggccacggcttacagaccactacatgacctataaaagtaatcagctcctttctagtcacgggctcctctcactgttccctgtctgccttggtgtttcccaaccccccaccccanggctgagtatcatctccttggggccacatctgcccattgggaagttgttttcaaagccttggcccctggaactgttaccactgaaagaaccacagggcactctaatggtttgacacttgg

SEQ ID NO: 116145 - DNA, 557 bp, Homo sapiens
  misc_feature (1)...(557): n = a,t,c or g
atgggtgcatccagtcaaggncctcttaagagccttgatggtgctctatatgatgatgaagatgatgatgacattgaaagagcaagcaagttatcttctgaagatggtgaagaagcttctgcttatctctatgagagtgatgactctgttgaaacaagagtgaagactccttactcaggactggatttccaactcacttcccctgaagtttcccagactgataaaggaaaaacagaaaagagggaaacactaagccagatttcagatgatctgcttatacccggtcttgggcggcattcatcgacttttgttccttgggagaaagaagggaaagaagccaaagagacttcagaagatattggactgctccatgaagtagtgtcattatgtcatatgacatctgacttccaacaaagcttgaacatttcagacaaaaacacaaatggaaaccaaacttaaatcttgcatccaagcttctatggagacatttttgaggttcaatggcaatcttgtattattaaacaggaattattttgtagggattgggcaactcctac

SEQ ID NO: 116146 - DNA, 816 bp, Homo sapiens
ttaaagatgaaacatgtatgataggatggattctttctgtattctgagagtgtacagtacaggattattataatgaaagtttatatcaacagggtttcgttggctctgccatatattataagcaaaagagattggtaaagtgccacagtattccagataacttttcagttgcggcctttcttctcgttctttaatttgaaacctagatacatgcagtaaaaactaggagaatgacttttacccttggggacagccaagttttgttgataaacctatttcctagcatgccttcaggaacgttgtgccacaccctagattgtgaaggacccactgttcttctgttgtacgagctccctgaaccattgttcagaggacccaatgtcacatcgctttcatgggcatggcccatggagcatctgggtgatatctgtctaacagtattggctccttctgcgaaggctgataacacaaggcctctcctcccacatgatcatttgcaaacctcccccagcccctacccatcccaatgtggaaggaaaacaagaactgccctgaagaagagtcccaagcctacagatacacagcgtgtgcattgcgtctgtcaccttcctcctcccactttctgtatcctcagagatgctgcgtggatgtttccttaacctcagctgacttccctgtgaatgtctaatgctagttcagggcctccaggcattgatttgtacagtggtaactcccaatgaggcttctgttatcatttggtgtgctttctctgtcattaaaagaaatgattttcccagaaaaaaaaaaaaaaaaaaa

SEQ ID NO: 116147 - DNA, 437 bp, Homo sapiens
  misc_feature (1)...(437): n = a,t,c or g
ggggttacggaggcggctacggtggccagagcagcatgagtggatacggtaaccaaggagcagtgaacagcagctactacagtagtggaagccgtgcatctatgggcgtgaacggaatgggagggttgtctagcatgtccagtatgagtggtggatggggaatgtaattgatcgatcctgatcactgactcttggtcaaccttttttttttttttttttttttctttaagaaaacttcagtttaacagtttctgcaatacaagcttgtgatttatgcttactctaagtgggaaatcaggattgttatgaagacttaaggcccagtatttttgaatacaatactcatctagggatgtaacagtgaagcntgagtaaactataacngtttaaaacttaagttcccgctttttcnccaagttagttnttagggntgtact

SEQ ID NO: 116148 - DNA, 2723 bp, Homo sapiens
gttttaaagaatttgaataatcagttgaataaaaacctgaaaagtggtgaatgaaaatttgagagataaggaaaggctagagttggcattcaggggacacaaatagtttgaagactctggtagtagaattatgcaagttttcttaaaattaggcaatatataatattgatactacgaaattcagtacttttccgtaggagggggtcaggtctcattgccttttccgtaccccaaaatatgaaaggtggtctacaattttgttgtggcattgtcacagcagttggccccatgttacatttcctcttgtggcacctctgagaggtgtttcttcattacctcttgacaagagtatattttgattgactgctctatgtgcttgtttattttttatagcatttaaatcaaacggtattgagatggattgggttatgaaacataatggtccaaatgacgctagtgatgggacagtacgacttcgtggactaccatttggttgcagcaaagaggaaatagttcagttctttcaaggtacctctagtattagtcaaagtttagtagtattgtaattttatatttgtattgttttactgtttttaatttgtaaaacccatttgattttggaacttttaagtttaactatgatagtcttggttaatgtattaaaataatatgctccagttaatattcaatacagaatgtgtagaatatgtaaaacctaattaatgtgcagtaacatatttgagaattgtgatgaaatgaaccgtgaattagtatatggagcatatatttgattttgtagccttttttcatgtaatataggtgggcttttagagtgtgtaattacacagtgtttttacactggtcgcaaaaaatttatttaatccagtaatatttgaaaaaatctttcatttgtattatggggtgatgggaaactaagcttttttgttttgttttgttttgttttgtttagacttgttttaaatatttgattcagatgggaatgtttcagcctttaacactgttccccttgatggggttatttgtccttgggttaaagggttggaaatcgtgccaaatgggataacattgacgatggactaccaggggagaagcacaggggaggccttcgtgcagtttgcttcaaaggagatagcagaaaatgctctggggaaacacaaggaaagaatagggcacaggtggggatggagagtttgggatggtgttaaatttttatttttgggggttgtgggtcactattgcttaaatgggggggtagccataacatttttctggggtagtttaaaagaattgataattatctaaatttaacttggaaactacagatttgggtggggaattaatgctaatagttaaattaaaattagattgtttccatttctctgtaggatgttgttgataaatgcttttgtataatcacctatttcctttaaaacacctattatgtactaaaagagacaaagtaaaaatatactttatgaattgttttccgtgactaatttctttgtaaaacttaaatatttaattaagtttgtaggtttaaactgttaacttacggtgtatttaggcaatttaaattgggttatgtatctagatatagaaaaacttactgcattttgcccagtatctaatttacactaatacatttatgctgaaacctgtaccttaaaacatttttaaataggtatattgagatcttcagaagtagcaggagtgaaatcaaaggattttatgatccaccaagaagattgctgggacagcgaccgggaccatatgatagaccaataggaggaagagggggttattatggagctgggcgtggaagtatgtatgacagaatgcgacgaggaggtgatggatatgatggtggttatggaggttttgatgactatggtggctataataattacggctatgggaatgatggctttgatgacagaatgagagatggaagaggtatgggaggacatggctatggtggagctggtgatgcaagttcaggttttcatggtggtcatttcgtacatatgagagggttgccttttcgtgcaactgaaaatgacattgctaatttcttctcaccactaaatccaatacgagttcatattgatattggagctgatggcagagccacaggagaagcagatgtagagtttgtgacacatgaagatgcagtagctgccatgtctaaagataaaaataacatgcaacatcgatatattgaactcttcttgaattctactcctggaggcggctctggcatgggaggttctggaatgggaggctacggaagagatggaatggataatcagggaggctatggatcagttggaagaatgggaatggggaacaattacagtggaggatatggtactcctgatggtttgggtggttatggccgtggtggtggaggcagtggaggttactatgggcaaggcggcatgagtggaggtggatggcgtgggatgtactgaaagcaaaaacaccaacatacaagtcttgacaacagcatctggtctactagactttcttacagatttaatttcttttgtattttaagaactttataatgactgaaggaatgtgttttcaaaatattatttggtaaagcaacagattgtgatgggaaaatgttttctgtaggtttatttgttgcatactttgacttaaaaataaatttttatattcaaaaaaaaaaaaaaaaa

SEQ ID NO: 116149 - DNA, 719 bp, Homo sapiens
  misc_feature (1)...(719): n = a,t,c or g
agcccgggtttgcattaaattttttaaaaggccatagtctcctcaactctattgaattggggttaataagactccacaaaattgtcaagcagaccaattaactagggacaaatttcaaaacctaaaaatttagtttgcgtgtaacgtgggactgcacacaagtttggaaatcatggcaaaacatcaattacctaggactacaaaacattaatttcttcttttaagcagagagaatatggatttaattgtttaccataagaaaagtgacatatccaaccaaccatccatccccacctgtgccctattctttccttgtgtttctttagagccttttcagctatttcctgtgaagcaaactgcacgaaggcctcccccgtactcctcccctgggaagtccaccggcaatgttatcccatttgggcacggatttccaacccttcaacccaagggncaaataaccccagtaggggggcaatattaacatcacaagcccagaaatgattcttcttataggctttaaataaaccaggactttttaactttagggtgaatgggtatgctttcaacaagtactctttaaatatgcattgcaataatatgaagttccattattataaagtataactattcttaacacacccatggtacagtatatattaaaaaaaacttgctgaacacaggatgcattaagaattcaacaacttaagaacacatatctt

SEQ ID NO: 116150 - DNA, 2234 bp, Homo sapiens
ggcacgaggcgcagaagtcgcgtgtctagtttgtttcgacgccggaccgcgtaagagacgatgatgttgggcacggaaggtggagagggattcgtggtgaaggtccggggcttgccctggtcttgctcggccgatgaagtgcagaggtttttttctgactgcaaaattcaaaatggggctcaaggtattcgtttcatctacaccagagaaggcagaccaagtggcgaggcttttgttgaacttgaatcagaagatgaagtcaaattggccctgaaaaaagacagagaaactatgggacacagatatgttgaagtattcaagtcaaacaacgttgaaatggattgggtgttgaagcatactggtccaaatagtcctgacacggccaatgatggctttgtacggcttagaggacttccctttggatgtagcaaggaagaaattgttcagttcttctcagggttggaaatcgtgccaaatgggataacattgccggtggacttccaggggaggagtacgggggaggccttcgtgcagtttgcttcacaggaaacccctgaaaaggctctaaagaaacacaaggaaagaatagggcacaggtatattgaaatctttaagagcagtagagctgaagttagaactcattatgatccaccacgaaagcttatggccatgcagcggccaggtccttatgacagacctggggctggtagagggtataacagcattggcagaggagctggctttgagaggatgaggcgtggtgcttatggtggaggctatggaggctatgatgattacaatggctataatgatggctatggatttgggtcagatagatttggaagagacctcaattactgtttttcaggaatgtctgatcacagatacggggatggtggctctactttccagagcacaacaggacactgtgtacacatgcggggattaccttacagagctactgagaatgacatttataattttttttcaccgctcaaccctgtgagagtacacattgaaattggtcctgatggcagagtaactggtgaagcagatgtcgagttcgcaactcatgaagatgctgtggcagctatgtcaaaagacaaagcaaatatgcaacacagatatgtagaactcttcttgaattctacagcaggagcaagcggtggtgcttacgaacacagatatgtagaactcttcttgaattctacagcaggagcaagcggtggtgcttatggtagccaaatgatgggaggcatgggcttgtcaaaccagtccagctacgggggcccagccagccagcagctgagtgggggttacggaggcggctacggtggccagagcagcatgagtggatacgaccaagttttacaggaaaactccagtgatttttcaatcaaacattgcataggtaaccaaggagcagtgaacagcagctactacagtagttggaagcccgtgcatctatggggcgtgaacggaatggggagggttgtctagcatgtccagtatgagtggtggatggggaatgtaattgatcgatcctgatcactgactcttggtcaacccttttttttttttttttttttttctttaagaaaacttcagtttaacacgtttctgcaatacaagcttgtgatttatgcttactctaagtcggaaatcaggattgttatgaagacttaaggcccagtattttttgaatacaatactcatctaggatgtaacagtgaagctgagtagactataactgttaaacttaagttccagcttttctccaagttaggttatagggatgtacttaagcagtaagcgttatttagggtaaaaggcaggttggaatttatggttaaatggttggcccctttgccacggtttaaattggaacactgttttggggatggcatggttggaaaggaccatggcttttattttttttgtaaaacaatatagggagctgtgtcctacttattaaaaggtggaaccattttgggccatgtttgttaaattctagtttcatttaataacctgtaaggcacgtaagtttaagcttttttttttttttaagttaatgggaaaaatttgagacgcaataccaatacttaggattttggtcttggtgtttgtatgaaattctgaggccttgatttaaatctttcattgtattgtgatttccttttaggtatattgcgctaagtgaaacttgtcaaataaatcctccttttaaaaactgc

SEQ ID NO: 116151 - DNA, 572 bp, Homo sapiens
tccagtgttggctgacttacagctcttataaactagtggcaatttctgaacccagccggctccatctcagcttctggtttctaagtccatgtgccaaaggctgccaggaaggagacgccttcctgagtcctggatctttcttccttctggaaatctttgactgtgggtagttatttatttctgaataagagcgtccacgcatcatggacctcgcgggactgctgaagtctcagttcctgtgccacctgggcttctgctacgtctttattgcctcagggctaatcatcaacaccattcagctcttcactctcctcctctggcccattaacaagcagctcttcccggaagatcaactgcaagactgttcctattgcatctcaagccggcatgtggttctcttgccagaagaacaaggcaccaactcatcagacacagacaccagccatcacagggcattcccggtgaatgcatacgtgttcaattggtctttgcaggcatcacatagaacatgctctacgctacaaggtccccattcactggaagtggagcttgttggagggatctctgtctag

SEQ ID NO: 116152 - DNA, 818 bp, Homo sapiens
  misc_feature (1)...(818): n = a,t,c or g
caacacttttaattccactgcagcactgctgggttatttcttgctttccaaattcccttgtctgtagctatctttcatcacttgcaaaaatagcacgtgctcaatcctagattaaaatataagctactctcagaattgataactcataccactctttttaaaaatcaactaaccagaattcagtttttattcacagttcttatctttagctcagggcgtaatataaaagcactaggtttaaaacttacttggtcagcagcaatccacttctaggtacatgtccaaaggaactgaagaaagcatctcaatgtgtgaatgcctacctgtgttcattcgcagcatttattcagaagaagccaagaggtggaagccaaagtaaatgtcccattgacagatcgaaantggtaaaccaaaatggcattatatacatacaatgccaatatccatttagccttaaaaacaaaattcctgccctatgcctacaacatggacgttatgcctaagtgaaataaacccagttcccgaaagggacaaatacaccccatttcccacttatatggggtatctaacgtcaaacgtcagaagaacaaagtactgcggtatttgcccacaagctggtggaggagaaaatgagttgttcaatgggtattgagtgtcagccacgcaagatggaaaagctttttgagatttgttgtataaaaatatgcctatagttaacaatactcttcggtacacacaaagtatgtgaaagggtaaattttatgtgtttttatcacaataaaacttgtaataaaagaaaaaaaaaaaaaaagtcgacc

SEQ ID NO: 116153 - DNA, 889 bp, Homo sapiens
atgtgggaaagcttggaactccctagagactggtttaatggctttgaccaaaattgtggcaatgatatggacaatgaaatccaggatgaggtggtctcagatggagatgagaaacttgttgggaactggagcaaagcagggacttccaatctctcagagacagagccccctctgtggaaggagagtcctggtcagctcagtgactacagggtggagaacagcatgtacattattaatccctgggtataccttgagagaatggggatgtataaaatcatattgaatcagacagccaggtattttgcaaaatttgcaccagataatgaacagaatattttatgggggtttgcctctgcagtatggctggcaatatatgacaggcagattaactgatcccacccgaaggacaaactggggctatgaatctggagatcatatgtgcatctctgtggacagttggtgggctggtcactttaagggatttaagagccacaatgtcaataatgattccttacgacatatccagcttttcacagaaggacgaaaacaaggttctgcaaaagcagtggcctctgaagggccagctctggtagttagcactagagggcacctgatgaccaggttagaaacaaaactcacaatgactccaccactaaagctgttccagctggatgggctgatagatttatggagggctctcagggccatgtgggagagccagtcagcctctagattccagagcatctgtggactgtgcttcccacagtgtggcacccataaacagcctctctggtgcactaagatagggaagctaaaagcagaccctgcaggtatgccttcagctgcagggatgtatgggaacagacacacaactctccctcccagataa

SEQ ID NO: 116154 - DNA, 259 bp, Homo sapiens
atggcagcagtacagtccagctttggctcggcatcagagggagaccgtggaaagagagggagagggagaccgtggggagagggagagggcgagggcgagggcgaggttgaatcatttattttggaccaagaagatctggataacccagtgcttaaaacaacatcagagatattcttatcaagtactgcagaaggagcagacttacgcactgtggatccagagacacaggcacgactagaagcattgctagaagcagcag

SEQ ID NO: 116155 - DNA, 2625 bp, Homo sapiens
atgctgcgctctctccgcctgcagcaggagtggctggaatgggaggaccggcggcgggcggctgcccagcagtgccggagccgcaggtgcccgtcaagtccccgggcccgactcactaggcctcaccgttcctgccgagacccagctgtccaccaagccctcttctccggcaacctgcagcaggtccaagccctgttccaagatgaagaggccgccaacatgattgtggagactgtgagcaaccagctggcctggtcggctgaacaggggttctgggtgctgacccccaagaccaagcagacggcacccctcgccatcgctacagcccgaggctacacagactgtgctcgacacctgatccggcagggagctgagctggatgcccgtgtcgggggtcgcgctgccttgcatgaggcctgtgcccgagcccagtttgactgtgtgcggctgctgctgaccttcggagccaaggctaatgtgctgactgaggagggcacgactcctttgcacctctgcacgatccccgagtccttgcagtgcgccaagttgctgctggaagcaggagcgacggtgaacctggcagcaggcgagagccaggagacgcccctgcacgtggcggcggcgcgcggcctggagcaacatgtggctctgtacctggagcatggcgccgacgtgggcctgcgcaccagccagggcgagactgcgctgaacacggcgtgcgctggggccgagggcccaggtagctgcaggcgacaccaggctgcggcgcgccggctcctggaggctggagctgatgcccgggcggccgggcgcaagcgccacacgccgctgcacaacgcttgtgccaacggctgcgggggcctggccgagctgctgctgcgttacggggcccgcgctgaggtccccaatggggcgggccacacgcccatggactgtgcgctgcaggccgtccaggactcccccaactgggagcctgaagtccttttcgccgcactgctggactacggggcgcagccagtgcgccctgagatgctgaaacactgcgccaacttccctcgggccctggaagtcctgcttaatgcctatccttgtgtcccatcctgtgagacctgggtggaggcggtgctcccagagctgtggaaggagcacgaagccttctacagctcggccctgtgcatggtgaaccagccaaggcagctgcagcacctggcccgactagctgtgcgcgctcggttgggaagccgctgccggcagggtgccacccggctgccactgcccccgctcctcagggactacctgctgctgcatatgaagcggagccgctgccgcgaccgaccgcagccgccgccgcccgaccgccgggaggatggagttcagcgggcagcggagctgtctcagtctttgccgccgcgccggcgagcgccgcccgggaggcagcggctggaggagcggacgggccccgcggggcccgagggcaaggagcagccgcctgccttggcctcccaaagtgccgagattgcagcctctgcccggctgccaccccgtctgggaagtgaggagcgtctctgcctggccgcccatcgtctgggatataattctttgagcaactactggggcattatattggacacttcagtaccaagagaaatacatacgatccttgtctaccaggagtctaatagaaagatggacagcgtggaccctgccagcagccaggccatggagctctctgatgtcaccctcattgagggtgtgggtaatgaggtgatggtggtggcaggtgtggtggtgctgattctagccttggtcctagcttggctctctacctacgtagcagacagcggtagcaaccagctcctgggcgctattgtgtcagcaggcgacacatccgtcctccacctggggcatgtggaccacctggtggcaggccaaggcaaccccgagccaactgaactcccccatccatcagagggtaatgatgagaaggctgaagaggcgggtgaaggtcggggagactccactggggaggctggagctgggggtggtgttgagcccagccttgagcatctccttgacatccaaggcctgcccaaaagacaagcaggtgcaggcagcagcagtccagaggcccccctgagatctgaggatagcacctgcctccctcccagccctggcctcatcactgtgcggctcaaattcctcaatgataccgaggagctggctgtggctaggccagaggataccgtgggtgccctgaagagcaaatacttccctggacaagaaagccagatgaaactgatctaccagggccgcctgctacaagacccagcccgcacactgcgttctctgaacattaccgacaactgtgtgattcactgccaccgctcacccccagggtcagctgttccaggcccctcagcctccttggccccctcggccactgagccacccagccttggtgtcaatgtgggcagcctcatggtgcctgtctttgtggtgctgttgggtgtggtctggtacttccgaatcaattaccgccaattcttcacagcacctgccactgtctccctggtgggagtcaccgtcttcttcagcttcctagtatttgggatgtatggacgataa

SEQ ID NO: 116156 - DNA, 2950 bp, Homo sapiens
gccactgcactccagcctggcgacagagcaagactgcgtctcaaaaaaaaaaaaaaaaaaaaggctggagtgcaacggcacaatctcggctcaccgcaacctccgcctcccgggttcaagcgattctgctgcctcagcctctccggagtagctgggactacaggtgcccgccaccacgcccggctaattttttgtatttttagtagagacagggtttctccatattggtcaggctggtctcgaactcccaacctcaggtgatccgcatgcctcagcctcccaaagttctgggattacaggcatgagccaccgcacccggccatttgtatgtaattttctatatttattgaaatgcattttaagtaatatgaaagcatttttctccttacaatggaaaaaccaacttgattttacatttatttatataacctgacttaattctatgtaagtcaagtgaaaaaggaaacaactgctctgtggaatcaacctgaagatgtctaatttttcctctgatgccaccagacttaaagcagttcacgatcctctctacaaagaagtatatttaggttctccctctccctctccctctccctctccccacggtctccctctgatgccgagccgaagctggactgtactgctgccatctcggctcactgcaacctccctgtcctgattctcctgcctcagcctgccgagtgcctgcgattgcaggcgcgcgccgccacgcctgactggttttcggtttttttttggtggagacggggattcgctgtgttggctgggctggtctccagctcctaacccgtgagtgaatccgccaagccttcggccttcccgaggtgccgggattgcaagacggagtcttgttaactcaagtgctcaaatggtgcccaggctggagtgcagtggcgtgatctcggctagctacaacctcccacttccccagccgcctgtcttggccccccaaagtgccgagattgcagcctctgcccggccgcttaccccgtctgggaaagtgaggaagcgtctctgcctggccgcccatcgtctgggatgtgaggagcccctctgccctggctgcccagtctggaaagtgaaggaagtgtctctgcccggccgcccatcccatctaggaagtgaggagcgcctcttcccacccgccatcccatctaggaagtgagggagcgtctctgcccggccgcccatcgtctgagatgtggggagcgcctctgcccggccgcgaccccgtctgagaagtgaggagcgtctcagcccggccgccatcccatctaggaaacatttaattttggcttctgctgctagccggatcttcattgccaaaagaagcacccaaccctctgcagtggctattggccgaccttccgtaccccagtgcactatgcggctttcagttaataactgctctaggccacctggcattttcaaggcatccctgcactcacacagaggtacacaggcactcaccacacagaagaagagcccagcaaagagccccacggccgccacaaccgagaccagggtgatgaggaagatttcccacggcaccagggacccaccaggcttcgcctcactcactgcagtagatgcactatgggaagttgtgtgcattccagtcagagctgctgttccagagcctgcagaggtcacactggacccagagttggtggctgtgttggccccactggaggttgtgctggactcagaattggtggcagtgctggccccactggacactgtgctggactcagagttggtggctgtgctggccccactggaggtcgtgctggactcagaggtggtggctgtgctggccccactggacactgtgctggactcagagttggtggctgtgctggtcccactggaggtcgtgctggacccagagttggtggctgtgctggccccactggaggttgtgctggactcagagttggtggctgtgctggccccactggaggtcgtgctggactcagagttggtggctgtgctggccccactggaggttgtgctggagtcagagttggtggctgtgttggccccactggaggttgtactggactcagagttggtggctgtgttggccccactggagggtgtgctggactcagaattggtgactgtgctgatcccactggacactgtgctggactcagagttggtggctgtgccggccccactggaggtcgtgctggactcagagttggtggctgtgccggccccactggagggtgtgctggactcagagttggtggctgtgctggccccactggaggtcgtgctggactcagagttggtggctgtgccagccccattggaggtcgttctggactcagagttggtggctgtgctggccccactggaggttgtgctggactcagagttggtggcagtgctggccctactggacactgtgctggactcagagttggtggctgtgctggccccactggaggttgtgctggactcagagttggtggctgtgctggcctcactggaggttgtgctggagtcagagttggtggctgtgctagccccactggaggttgtgctggagtcagagttggtggctgtgctggccccactggagggtgtgctggactcagagttggtggctgtgctggccccactggaggttgtgctggactcagagttggtggctatgctgatcccactggacgctgtgctgaactcagagttggtggctgtgctgatcccactggaggttgtatggaactcagagttggtgactatgctgaccccattggaggtcacgctggaccctgagatggtggctgtgctgaccccactggaggtcacactggacccagagttggtggctgtgctggctccactggagatcacactggatccagtgttggcagaggtgctagtctcattggaatttgttgctgaagaaatcatataa

SEQ ID NO: 116157 - DNA, 3384 bp, Homo sapiens
ttgagtaacaagatgctaacacactttcaaaaaaaaaaaaaaaaaaaggatgcttaaaactatgctaaaggcccatgaactgacatcatccattcaacaccattactttgttacataaacctgttttcttaaggtagaacatattatgcaataatttggaaattagccaagcactaagcaattacaatagcaggtaatacaccatcaatttttgaaacacatttggtcacatttcatgacccatctgcagtatggattctatagactctcactcagtttaaaatttgtttctggacctgaatgacaagagaatggctttatgaaattttctcataagacatttaaatagtcttaggttcacaccccttttgttgtaaatgatttaatctgacatgctatatagctacaataaaaataattatgttcaattcttaaatgaaaactaaatgccaataaatggtaacagatttgacatggaatgttgtaagatcttcctctacgtaatctgacactgcgcctcactgaatttcagagcttgaaaacttcagattaaaaaccacaataaaatttactcttgatggcatgcaagatcttcctaaaattaaccctaggccctagaagtctcagtattattggaccataaaaaaacacaacaaattggtacattttattcaccatttatttttcgcttttagtgtgctcacaggaaaaattaggacaaccttaagcgggagttaaatagaaatttttgtaagcaaagttacattccatctctaagtcaaattggtcaaagcatctccagtatctaccaaacctgatggaccaggatgctacacaaaacccattgcatcttgaagatttttttttcctttattcctcaaagacggactggaaaaagaaagcattatctgcctgtaatccaaaaacataccccacagtataaaccagtaacccatccccacttatccacagcttgggttgagtttaaaatttcgtgttttaaaaggtcccaagatgactgccagttttaacaaaaatgggggcagggtgggaaaggttggcaaactttcatgtggcttctggggtttccaggtttgttttttattaccatagtcacaggttaaaaaccaccctgctgggtaatacataattacactttaataagggtcataaacccggcaaataaaacaaataaagcctatacaacttgtagttcctacttaatcactgaactggtacagctaacatggagataaagtgaaaagttgctaatggtttaaaatgaactccctaagactatggatcgttttttttttttttaaatctgggtaattggtgttttttcttttttcctctttccttcttaaactcaggactggtagtgttgtaaacctgcctcacaaaatacatgggtattaccttttctttaaaaaaaaaaaaaaaaaagacagcctttacaccatttctagtggcacaactattttcggcaatgttatgcaccacttcaatttccccattgtgacccctatcacttcatttgatatccctttttgacccacccatctccttcatatatgggcatgtccatagattgacaaagaaagtttacacttttgaataaagatgcaaagtatgcaaaaacattaatactgatgccgaaaaaaataaaaaataaaagagaaacaaggccagaggaagaaggtggttttaagctctcctcgacctgttggaatggtgggttaacagaatgattttgagatgggatctgtggggaggggagaaaaaaaaaaaacaacaaaatttggtgcttaaaaaaaagtaaaataaaaaaagacatctttaaaatcaatccctggttgtagacaagttctccaaaaccagtggcctggcaccactccaaccaaacaaacgggggagaaaatgttcttcgattatctcacaaaagcttgctcttttactctgccgacttccgctgggggggctttaggactgcactcgggctgggcctcatgtgagggggctgcgcaggcttgattgaggctgcggcggccgcgggctcctccgcgggggctgcctcctgctccgggggcgcgccgggcccggcggcggagggggcctcgcaggcggcggcgctggccccggcctcctcggcctttttctcctccaccttgctgggctcctcggcggccttggtctcgtcgctggcgggcggcttctctggcgcgacagcggcctcctggggcttggcctcctgcgggtcgccacccgccgccccctcctcgcccgctgccgcctcctcgcccggcgccgctgcctgctccccggaggccgcgcccgcctcggcggcggccgcagctgcgcccccggcggcctcgtccttgccgccttcggcagcgggcgcctcagcctcaccgccttctccagcctccttcttgttcttcttgaaggagaagccgctcagcttgaaagacttcttgaaggaaaagcgcttctttttttttttcggggtctcgttgctgggcgagggcgtggccccgtcctcggccttgggcgaagaagtcgaggaggcggccgacgcggcctctccctccgcggccgtggccgagccgggctcggcagcctcgccttccgcgggggcctccttctctaccgggctggccccggcctcgggggcagcggcggcggccggctcacctttctcggccgaggagggcgacgccgccccgctcccggcggccgcgggctcctccttgtcggcggccggggcgctgccgttggcctgcagctcctccttggcgcccgactcggcggccgcgggcgaagcgtcgccgtttaccttcactttggcccattctcccttgtcccgttcgcttttggaaaagccgaacgaaggcccaacagccgcctcccccccaagccctctcccgcggcggccttctccccttcgctgcggtccttggagaacttgggcaccccatgctggccttccttccaacaaagaaactccaacagatcccaagaggggaaaacaaagagccctcgggttggtgtaacgacggggcgagcagcagcagcagcggcggcggcaaacagcggcagcggcacacacaccggatggaagcgggggtgggggtggtggagaggacagaacagaaccgattaaatacactccggataaaaaaattttaagtccgaagagattcaaaaagcagcagcaccaggaggggaggggaaaaagggttggaaaagttcgaggcacaaaaaaagggagcccaagttttagtttcgaaaaaaaaagaagtaataaaaaaatccccagatttgtagccgcactgtagacaagaggaaaatggagaaatctccctggttgctaataagatgcgg

SEQ ID NO: 116158 - DNA, 565 bp, Homo sapiens
atggagacagccttacattccttgtaccaggatctgtctcgggttgacatctggggcgagtcaagaatgtatttggaaaaaatcccatccgcaaactgttttccagctgacaacaactgggtgtcctacaattcaattacatgttggcatcatctacctggagaaagcttcagatcccacaggttgaggactcagtcccacaagactgcccctgacttcgccagacctgtacttttgaccaacctgctacaaagaggggattgtcaagactccctccgtggatttgatcaattggctagagcttacagaactcagggaaatagtttacttattataaagcctattagatgaagagccaggtggaagagatgcatgggggaatgcatatgtgagcgcttccatgccctctccaggtgctgccccaccctacggtcacctctatgttaccagacactcctgttactcaggagattacaaaggtctcaggagctctgtgtcaggaaccgggttcaaagaccacgtattagtgcaaaagattgtataccccaatctacaagagttttag

SEQ ID NO: 116159 - DNA, 567 bp, Homo sapiens
atgagggagaaccagaaaagagatttctggccgtcgtctggaatcatcctacgcgtttaccagtttgttgtcagattgtccttctggaatggaagctccacgtggacctgggactgcagccccctcctccctgacacggggcctgcctcggtccaaaagctccagaaccgggaaatcaaggaagcaggagacccaattccagccctgcttcttctgcctgagcctcagttttttgatctgcaatctgcatgccctgcatatctcagggccaggctgaagatcgaccggactgctctgaggcctgggagccgccccagctgtgagagtgtgaagtggactcacgctggcacccacgtgccgagctgcggatggaaagctgagaaaggtgaagggaagggctactttttcctaaaggagaaaaaagctttcagacaaagctcgtaccaacccctgaactgcaaatttgctcaagtgaccgtgcatacttatattcctaatttaaatgattatttatgtcaaacgctcattgtgaaacttgaaaatgttgtattacattacatcaaataa

SEQ ID NO: 116160 - DNA, 442 bp, Homo sapiens
ttagagcaccatagagtactgctccctagcaggaaagatgtcctcagaggtcttggaggaattcctgggccactttgttccctgctatagacaggtctctggaagccaccacccccactcccagcgatcagggcctgtgcccatattgtcctgagctgacaccctctttagaggaatgaaccaggcctcttgtgccggccaccaggactttgtctctctcaagggaagcaggatgacctgcgttcagatctgtgaatggcgccttgaagcctggaaaggacagtgtggtgttagctgggcttaggattgcctatttccacatcccgaggcctagtcccaaagcacaatggccacagcccaccctcggggctgtcgtcttggcctcctggtcaattctgtcctgagtcgtgctcttagaagacaccctggctgcgttccatgg

SEQ ID NO: 116161 - DNA, 308 bp, Homo sapiens
  misc_feature (1)...(308): n = a,t,c or g
ggcagcttattttggattggttcacaatgtggatcaaacaggaaaatctgttatcatcaacaagaccagcagcaccagaatntnccgagtcttccagcagtgcaggctcctcaggntcgctgtcccgcacccatccacctctccagagcacacccctagtctcaggtgtggcagctggctctccaggctgtgtgccttatccagagaatggaatagggggccaggttgctcccagcagcaccagctacatcctccttccacttgaagctgcaacaggcatcccgcctgggaagcaatccttctttaat

SEQ ID NO: 116162 - DNA, 371 bp, Homo sapiens
  misc_feature (1)...(371): n = a,t,c or g
ggattctacaggcatagacttacacgagtttctgattaacacattaaagaataattccagggacaggatgatacttttgaaaatggagcaggaaattattgatttcattgctgacaacaataatcattataaaaagttccctcagatgtcatcgtatcagaggatgcttgtccatcgagtggcagcttattttggattggttcacaatgtggatcaaacaggnaaatctgttatcatcaacaagnccagcagcaccagaatnttaccagccagtcttgtctngtcaacaggggnttccaagggctaataggagtncagcagcccacctcagagtcagacgtggttaaatnacccccaagggactccggtgc

SEQ ID NO: 116163 - DNA, 567 bp, Homo sapiens
tgaatttttaaagccataatcttgttcactcttagaagtaaaaaaaagagaaaatgcattcttagggaataaacatctgataacacattctgaatgtggagactgagatgtctgaaggctgccttttgaaccagtagttttaccccatgaaacatcactgtgttctttctgcacaaccagttcaaaagatctcttttcttcgcaggttaccagccagtcttgtctggtcaacagggattccaaggcctaataggagtgcagcagccacctcagagtcagaacgtgataaataaccaacaaggaactccggtgcaaagcgtgatggtttcctacccaacaatgtcttcttatcaggtgccaatgacccagggttctcaaggactgccccagcagtcataccaacagccaatcatgctacctaaccaggcagctataacagaatacctgaagctgggtaatttacaaagaaacaaagtttatttggctcaaggtgctgatggctggaaagtccaagattgggcagctgcatctggtgagagcctcaagctgcttcaactcgtggcataa

SEQ ID NO: 116164 - DNA, 1305 bp, Homo sapiens
atgccaggttccgagtcttccagcagtgcaggctcctcaggatcgctgtcccgcacccatccacctctccagagcacacccctagtctcaggtgtggcagctggctctccaggctgtgtgccttatccagagaatggaatagggggccaggttgctcccagcagcaccagctacatcctccttccacttgaagctgcaacaggcatcccgcctggaagcatccttcttaatccacacacaggccagccctttgtgaatcccgatggaactcctgcaatatacaacccacccaccagtcagcagcccctgcgaagcgccatggtggggcagtcccaacagcagccaccacagcagcagccctccccgcagccccaacagcaggtccagccaccgcagccacagatggcaggccctctggtcactcagagtataccagcaaagaaggaactgaatgccttcagagttagaaatcaggaacagagagatacaggaactttgcatgagggttcgggaaagatctcaaggatggtgttgggatgggaaccattatcaccctatgctcctgatagagatgatgtggcaacacagtttggccagatgaccctgagccggcagtcctcgggggagactcctgaacccccatcaggtcctgtctacccatcctcccttatgccacagccggcccagcagcccagctatgtaatcgcctctacaggccagcagcttcctacaggaggattctcaggctctggccctcccatctcccagcaggtcctccagccccctccctcaccacagggatttgtgcaacagcctccgcctgcacagatgcctgtatattattacccatctggtcagtaccctacctcaaccacgcaacagtaccggcccatggccccggttcagtacaacgctcagaggagtcaacagatgccacaggcagcacagcaagcagtactggaagtgctgtcacccctggtcagcaccgtgatgcccccaaaactcgccgtcttggtcatggcgggctttagattgcggttggaactgtcggagtctgtgctgctccaggccctttggtggtcagaccacttgagttcattttctgagctgctctgtcgactcccagatgttctccctgagccatctctgttgcccctggagtacgaccaccagaaagatgcacagggacaggattaccttacatgcatggtgttggttactctcctactggaatcacctactggaatccaggaagatgatagtaatgagatatctgtcattggagctgggccctcttgtaagtaa

SEQ ID NO: 116165 - DNA, 1488 bp, Homo sapiens
cccacgcgtccggagggaagacagagcagtgcatggttatggatactggacaaggatatttggaaaggttgacgatgtgtcacactgtgtaagggaatcgcatggagatgggcattccgaactgttaatggggacatgggactccagttgtctctgatcacttgtgtggattttcctggcgtagaacgacagaagccgctagtaagtcgccaagacctaccgcaagaattttcgccccaaagggcataaaatcttgttattttaatttgcatctgggagaatgtctgagcaaggagacctgaatcaggcaatagcagaggaaggagggactgagcaggagacggccactccagagaacggcattgttaaatcagaaagtctggatgaagaggagaaactgggaacttgcagaggcggctggaggctcagaatcaagaaagaagaaaatccaagtcaggagcaggaaaaggtaaactgactcgcagtcttgctgtctgtgaggaatcttctgccagaccaggaggtgaaagtcttcaggatcaggaatcaattcatttacagctttccagtttttccagcctgcaagaggaggataaatctaggaaagatgactctgaaagagaaaaagaaaaggataaaaacaaagataaaacctctgaaaaacccaagatcagaatgttatcaaaagattgcagccaagaatacacggattctacaggcatagacttacacgagtttctgattaacacattaaagaataattccagtaatcattataaaaagttccctcagatgtcatcgtatcagaggatgcttgtccatcgagtggcagcttattttggattggatcacaatgtggatcaaacaggaaaatctgttatcatcaacaagaccagcagcaccagaataccagagcaaaggttttgtgaacatttaaaagatgaaaaaggtgaagaatcccagaagcggtttatcttgaagcgagataactctagtattgataaagaagacaatcagtttccgctgcatgtctgggagggtcgggatgccacaggctccgagctgtggagaaaagctttgtcagtcgcatatccagatgtctgtgtaactatggcagtcgttccactccctacagctttgtccttcagttgtgcacaaattgagctggattatcaatacggaccgatgatcaaccggtgtagctgtaaagaacaaaccttgttatgtccccaagctttcaaaatgatttcttccctcagctaccttgaactagccacttcctcttttttcaccggcattctgcctccttctgaggagtcagaaccacacagctctgcagctccagaagaaaccactagctcggaatccgacggccacacgtttctccagctgtttcattcacatttctcttcttctgacctccatgccgaacagactaaatctaaaacctggagacgtcctgaaggaaaaataccctatgctgcatga

SEQ ID NO: 116166 - DNA, 2548 bp, Homo sapiens
  misc_feature (1)...(2548): n = a,t,c or g
acagggacaggatgatacttttgaaaatggagcaggaaattattgatttcattgctgacaacaataatcattataaaaagttccctcagatgtcatcgtatcagaggatgcttgtccatcgagtggcagcttattttggattggatcacaatgtggatcaaacaggaaaatctgttatcatcaacaagaccagcagcaccagaataccagagcaaaggttttgtgaacatttaaaagatgaaaaaggtgaagaatcccagaagcggtttatcttgaagcgagataactctagtattgataaagaagacaatcagtcagtttgctcccaggaaagcctttttgtggaaaacagtaggctcttggaagacagtaacatatgcaatgagacctataagaaaagacagctctttcggggcaacagagatggctcagggagaacatctgggagtcgacagagcagctcagaaaatgaactcaagtggtctgaccaccaaagggcctggagcagcacagactccgacagttccaaccgcaatctaaagcccgccatgaccaagacggcgagttttgggggcatcacggtgctgaccaggggtgacagcacttccagtactaggagtaccgggaagctgtccaaagcaggttccgagtcttccagcagtgcaggctcctcaggatcgctgtcccgcacccatccacctctccagagcacacccctagtcgcagggtgtggcagctggctctccaggctgtgtgccttagtccagagaatggaatagggggccaggttgctcccagcagcaccagctacatcctccttccacttgaagctgcaacaggcatcccgcctggaagcatccttcttaatccacacacaggccagccctttgtgaatcccgatggaactcctgcaatatacaacccacccaccagtcagcagcccctgcgaagcgccatggtggggcagtcccaacagcagccgccacagcagcagccctccccgcagccccaacagcaggtccagccaccgcagccacagatggcaggccctctggtcactcagtctgtccaggggctgcaggcttcctcccagtcagtgcaatatccggcagtctcttttcctccccagcacctcctacctgtgtctccaacgcagcactttcccatgagagatgatgtggcaacacagtttgggccagatgaccctgagccggcagtcctcgggggagactcctgaacccccatcaggtcctgtctacccatcctcccttatgccacagccggcccagcagcccagctatgtaatcgcctctacaggccagcagcttcctacaggaggattctcaggctctggccctcccatctcccagcaggtcctccagccccctccctcaccacagggattcgtgcaacagcctccgcctgcacagatgcctgtatattattacccatctggtcagtaccctacctcaaccacgcaacagtaccggcccatggccccggttcagtacaacgctcagaggagtcaacagatgccacaggcagcacagcaagcaggttaccagccagtcttgtctggtcaacagggattccaaggcctaataggagtgcagcagccacctcagagtcagaacgtgataaataaccaacaaggaactccggtgcaaagcgtgatggtttcctacccaacaatgtcttcttatcaggtgccaatgacccagggttctcaaggactgccccagcagtcattaccaacagccaatcatgctacctaaccagggcaggtcaagggtcacttcccaggccactgggaatgcctgtttactgttaatgttcacaccgcccacccctcaggaacaaccttagggcttgattggggcccacattgcccttccaggcattgttcccagttgatgttcaggctagcttgcaggaacaaactgttggcaagtatggaggcantgctgggttgggcaggtcaaattctgaggagctcttggctgttggtacatttctttcagatatttctcatgggcctttgatggaagaggaacaaggtgggaaaactggctgaggacttaagtattcactcaacactcaaatggattgctgctggtattctgtaaaaaataaacaaagactaatatacacgttagctggttaatggtgcatatttctgtccatgtccggcctaggtatgccctttaatagccttagcctagtgacatgaattccatccaaggtaagattttcctccctacccactgaatacccactgtgtagattataatatcccctaatttggattagttttgtactttgtgttgagtttgtgatgcctaaaagtatttaaaaattatatactaaatcacattgtaccaaagctgtaatggaaaagcaaagaagaattgatgaattgaaggaataatttatatacattatagagttttcttttttaatggatatatactgtattgtagtgtttaatcaaaataaaactatttgaccttatggaggaaggtcatgtttttaccaccagtttggttca

SEQ ID NO: 116167 - DNA, 284 bp, Homo sapiens
acctgcgtgctctgaggctgcccgaccctgagctccagaacagaccatcgagttcaggagacaagcatgtcagccatgacacaaggcagatgagagggacccccagcgtccacacgtggaggcagcgggggcagccggagatggaacgaggaaaacagttaagcaacgatggactccagggggaaaaccggagaagaagaaactgtaattccagtccgtccacatggcccagcagtgaacgacaattgcatggtcagagagagcaaaagcaccacgccgactga

SEQ ID NO: 116168 - DNA, 2466 bp, Homo sapiens
atgtggatgggccgtaaatccagtgacaagtgtccttataagactaagggagtcagtgaagcaggatatttccctgaccctttcacgggactcacaacgggtgcctcatatactcagcccaccactctcaactccttgcaggagggagcatgtgagcaaatgagtgagggaactggagtgaatgagcacgggaatcggccagctgctttggtgctagcaggagtgaactttatgcaggcccaatggcagcatccagagttttacagtgtttgggacaaagtggttggaggcaaagtaaagaagcccggtaaacgtggtcggaagccagccaaaattgacttgaaagcaaaacttgagaggagccggcagagtgcaagagaatgccgagcccgaaaaaagctgagatatcagtatttggaagagttggtatccagtcgagaaagagctatatgtgccctcagagaggaactggaaatgctggcttttgctggctccccagaggagaaccaattgtgtgcatctcttcccaacttgatgttcagtgacatcaggctgtacaggaagcatgactggggaggcctcaggaaacttacagtcatgatggaagacaaagtgagagcaggcatcttgcatggcagcattgggaccagggatcgggggtaccacacgcttttaaataaccggatcttcagcaggctggacattaacgtattcgatgaagatgagaagaaagggagaattcagattccactcaaaggatgcatccctgtcccttccctcctcaccgacggtttacgagaacctggagccagaatcctgattaaaatccaaccacagaagacttgccagcaagttccaatatatggcgtgctttccatagcagatctggctagtggttacttggaggaagcccaccaagaagtggatgacagtgtaggcagtgccttcccaagaggaggggaggaaatagttacaatgactgtcccagttggagccatagaaaaagagcacaggggtcacaaagcctgcatcaaagacccacgatgccgcaatcattttcttggctttttctctggacaccttgaagctcagaggatagacgatggtgtagaaccggtctatgcagatggagaggagaacgtagatctggacacctggagtgagatattgaaaatatcgcacaaccttgcacgttgcactacccagcgtccaccttccagtggtgaactggagcaggacgaaaggcgtgctggcaacgctgatgagaaggtcagcacatgccatggagaccacaaagtagttggtggtagactgagtcctcctactcctatggatgaccaaacaaaccagggaattgccgaagatagaaaacaaccacagaatcccaaagaagatgctggctgtggccacttccccgggtttcagcacatagtgaagctgctttacacccatgagtctgtctgcccatttccccagcccaaccacttggaagcagaggatcccaatgctcagaaacaggacgagggagcccgaggagttcctgagtctagatttcccctgctgggtctggttttagatggagtggttagagaaaggttctctgaagaggttatatggcagctgaaaccccaacgacaggaagtccgccataacattcaggcagaagaaatgatgagtgcaaagaccctggtgggccacgagttcaccatgagttcaccagctgcaggcttcagcatcacaggacagcatgttccccagggatcaggcagacaagggcattttcctatgcacttcacacatacagcgcagctgccaggatatactttaggctgccaaaatgaaatgaagtcactttcttggctagcggcatttctctggggccgaggaattccacgaagaagatctctgcgaggcccagaaggccgcacaactacttcttcagaaacaaaattttttaaaaaagtaaaaatagaggaagtcagccagtttatcaccttggaaccagcgttttgtttggcttttccgcttttcactctacgaaaaagcccattggcggctacccaggttaccgtcctgttgccattgcgcctgcgcggcggttgtgaagattacagaaatctgggatggcttatgggacgcttctcagccctaagtaggaaaacagcagtgaaaatggcaaccaaaacatcacgcaggactgggggttttggggaaacagctcactttagagcagtgcagtgtagagctttccgtcttttaccagggtccacctttaacactgtttatctgaaaattttccccctggcttactcgcttgcagctgcccactttgcagaaggatggcgctctgatctctacgctccctgttccttcagggactccatagtattttttttcacgcgtcgtcgctactacagcagacgcctgcgttctcattatttgctgtacagatctccggtgccttga

SEQ ID NO: 116169 - DNA, 603 bp, Homo sapiens
atggtgcttctccccaaaaaggggcgtcggggatattcaccacggcgggtgtggagcccacacgagtacctgtcttatagctacctagatacagacgagaccttcgatgtcacagaccatgcacagtttgagcgggaccagggcatggagctgagctttggatatagacgacgaatcctgattaaaatccaaccacagaagacttgccagcaagttccaatatatggcgtgctttccatagcagatctggctagtgggtacttggaggaagggcacccccaaccaacacacaccccagtactggcacgcttccctgcaaaggcccagagaacccccagcaagcatcctgctgctggctctgggattcgtctaggtcccttccagcaattattgccagtgtcgggtgctgaatggaagtatgaagagttaatggaagcctttaaaactttgcataaagaatatgagcagctcaagatatctggattttctacagcagaaataagaaagggggagctcttcgccaagatggtggagcacatgtacgacatattcgacgaggacgtcgactcagagggcggtgtacgacgatcaacatgttcgtga

SEQ ID NO: 116170 - DNA, 954 bp, Homo sapiens
atggtgctggccacagagcctctctctgagccccgtgcccggctttaccagcctgctcatagctcaagaaatgcagagtctgctcaagggctgggaggagaagtcagggccaccggggattcactgatccatcaggtgatgggcccggaggatgtggatatgagaggcctctaccacgtggcaataaggcaaaaccctgccctcagagttacagagcccgggactcataccccagcagcaccgctcaacaactcagctgcgccctcagcacagcttcccaccctgagaggaagggtgctgagggtgcagggcggtgggaaccctaagcagctgaaggtgaacagccactggcaggatggacaggaaaagtcacaaaggtgcaggcaagctgggcctgccgcacaggaacttggccaaggaaaggcacagctggcctgcagctgctgggggtgccagcgcaagaagtcatgtagccaaccccatggcgaccaacaagggccactgtccctcaaaggcggccccaccagcacaaaagatggaaagtggaagctggctgggggggcttcacctggggaggacctgtccagcaaagagctgcgagtcactgatgagcatacgcacaagctctcccaacttcctgcagcaacccctcatcctgcccagtccctgcggccccgcccacccagctctcctggactcacccccaggaatacggctctcagaggcttcccaaagacgtgctggcatgctggtttctctcatgcttcttttctaccccaaactgcccctggccagctttcacggtccctcaaacatctgctaacacaacagttgctgcctgttctgaggcctgctcagggaggttcggggactcagtgtgtgggcagccgcaatcaatcaaacctctgtttcgacatcccgacccctccccacaaacatcttgcttctgtttga

SEQ ID NO: 116171 - DNA, 503 bp, Homo sapiens
  misc_feature (1)...(503): n = a,t,c or g
agggcnatganaatgatagctgtacgcctgcgcnaccggnccggaattccggggtcgacgggaggcaggaggaggacaccctgccgaccaaagagaccattgagcaggagaagcggagtgaaatttggtaagatgctggaggatttcctacccccgtcctcttcgagaccccagtcgtgatgtggaggaagagccacctgcaagatggacacgagccacaagctgcactgtgaacctgggcactctccagatcggatgcctggaaaaacagaaccggagactgctggtcccaaccaggtccacaacgttcgggggttgctcaagaggctgaaagagaagaaaaaggccaggttggagccccgggatggaccccccagtgctctgggctctagggagtcgctggccacactctctgaactggacctgggtgccgagcgggatgtgcggatctggccactgcaccccagccttctggnggagcctcactgctttcagagtacctg

SEQ ID NO: 116172 - DNA, 2063 bp, Homo sapiens
atggggaactcagggatccagatcggatgcctggaaaaacagaaccggagactgctggtcccaccaggtccacaacgttcgggtaaggcagccagtgaaggggttgctcaagaggctgaaagagaagaaaaaggccaggttggagccccgggatggaccccccagtgctctgggctctagggagtcgctggccacactctctgaactggacctgggtgccgagcgggatgtgcggatctggccactgcaccccagcctcctgggggagccccactgctttcaggtaacctggacgggtggaagccgctgcttctcttgtcgctcggccgctgagagagaccgctggatcgaggaccttcgtcgccaattccagcccaccaggacacgtggagcgggaagagacatggctgagcgtgtgggtgcacgaagcgaagggcttccccgagcagcggcgggggcacccggcgtgcgcgccgagctgtgctggatggcgcgctgctggcacgcacggcgcctcgggccggcccaggccgctcttctgggccgagcgcttccacttcgaggcgctgccaccggcacgtgcctgtcgctgcggctgcgcggcttgggcccgggaagcgcggtgctgggcgcgtggccctggcgctggaggagctggacgccccacgcgcgcctgccgcggtctggagcgctggttcccgctgctcggggcgccggcgggcgcagcgtgcgggcgcggattcgggcgcgtcgcctgcgcgtgctgccgtccgagcgtacaaggagctggcggagttcctcaccttccactatgcgcgcctctgcgggccctggagcccgcgctgcctgcgcaggccaaggaggagctggcggcaccatggacaggttgtgcggcgtctctgtgcttctactgaggactgtgaagtggaccccagcaaatgtccagcctcggagctgccagagcaccaggccagacttcggaacagctgcgaggaggtcttcgaaaccattatccattcctacgactggttccctgcgagctgggcatcgtgttctcaagctggcgagaagcatgtaaagaacgtggtctgaggtgctgggcccccgactggttcggtgagaaggaggcctacatgggcttcagaatagcttcctggaggaacatggaccagccatgcaatgcttcctggacagagccagtctctgcgcagcgttcgccgctcagagagttgggcccgccacggccggacgaagagcggcccctgcggcggccccggccggtgcagccacgcagagtgtcccggtccggcgtcctgcccgccgccgccaatctgcgggccctggccgcgacccaaaggctccctgagcatgggaccagcgccccggcccggccttggacccgggactccgcctcgctgcctcggaagccgtctgtaccctggcagcgccaaatggaccagccgcaagaccgaaaccaggcactgggcacgcaccgacctgtgaacaagttggcagagctgcagtgcgaggtggccgctctgcgtgaggagcagaaagtgctgtcccgcctcgtggagtcgctgagcacccaaatccgggccttgacggagcagcaggagcagctgcggggccagctgcaggatctggactccagggctccgtgctgggagctcagagtttgattcagagcacaacctaacaagcaaatgaaggcaccagtctgaaaaaccctggagccccgcctaaatgagatggagagaactcaggctcagctgagggatgctgtccagagcctgcacttttctccaaggacgcgggggtcttggagtcaaccccagcccctcaaagctccctgcctcaatggagacacccacctgagctgcccatcctgcctcatcacacgtggtctgggagcagagagatagccatcttagggggggtgtctgactttgccttagccctacttggcctacagtggggagtggagctgctggtcccaaccactctggcagtatgaagttgcccagtaaaatcttgatttcagtgaaaaaaaaaaaaaaaaa

SEQ ID NO: 116173 - DNA, 639 bp, Homo sapiens
gcgccggggcactctaggctaatgtaatcatacgattacataattaacccagctgtctcattaagaaaatcaactggaattcagggcataattagtcatacggcaattagcatgctgatgagcgactgatgaaaagctgtctagatacccggcgtgccaggaccaccccggtcatggcaaagcggggcacaaacgacgcacctctccactctccacgcaagcacaccgaggaggagtccccaagtcacatccagggtgttctcactctagtgctgtgtcgagggaccgggggaggatggatggaggagggaaagccttgggaaggacggcagccggcaaaacctggcggcaacaggcctaacgcccatcttgtcatgcctgcttgtctttagaacagtggtggccaattcctcagcctgcaaacatacagtgtcctacatggagaggcggattgagccccaggtttatgaacctggccgaggaaggtcttgtttgccaacacctggagacctggaatacgtggactggagtcaccgtacagaatcaggctgcaatggccacatttctatcaccttcgagaaggctaccaagtggcacattgatgaacttcttggcatgaaaaccaggggctatttctaa

SEQ ID NO: 116174 - DNA, 1356 bp, Homo sapiens
atggcagaaggcaaggaggagcaagtcccatcttacatggatggcagcaggcaaagaaagaatgaggaagatgtaaaagcagaaacccctgataaaaccatcagctctctaaggggtgctggtgggtactacatgtggggccacactcgagctgccttctcagtcaacccctttggcagcttgggccaagtctctttgaagaggaagactgtgatatctgaactcaaacaggcagtgcccagagagagaagcacaggtccacgcaggcagccaaagccatcttcttggttgaaagatactcttttcggggggaggagccaagatggccgagtaggaacagctccggtctacagctcccagcgtgagcgacaaagaagacgggtgatttctgcatttgcatctgaggaacgcagttcctcaccagcaacggaacaaagctggatggagaatgactttgacgagctgagagaagaaggcttcagacgatcaaattactctgagctacgggaggacattcaaaccaaaggcaaagaagttgaaaactttgaaaaaaatttagaagaatgtataactagaataaccaatacagagaagtgcttaaaggcgctgatggagctgaaaaccaaggctcgagaactacgtgaagaatgcagaagcctcaggagccgatgcgatcaactggaagaaagggtatcagcgatggaagatgaaatgaatgaaatgaagcgagaagggaagtctagagaaaaaagaataaaaagaaatgagcaaagcctccaagaaatatgggactatgtgaaaagaccaaatctacgtctgattggtgtacctgaaagtgatgcggagaatggaaccaagttggaaaacactctgcaggatattatccaggagaacttccccaatctagcaaggcaggccaacgttcagattcaggaaatacagagaacgccacaaagatactcctcgagaagagcaactccaagacacataattgtcagattcaccaaagttgaaatgaaggaaaaaatgttaagggcagccagagagaaaggtcgggttaccctcaaagggaagcccatgagactaacagcgaatctctcggcagaaaccctacaagccagaagagagtgggggccaatattcaacactcttaaagaaaagaattttcaacccagaatttcatatccagccaaactaagcttcataagcgaaggagaaataaaatactttacagacaagcaaatgctgagagattttgtcaccaccagacctgccttacaagagctcctgaaggaagcacgaaacatggaaaggaacaaccggtaccagctgctgcaaaattatgccaaaatgtaa

SEQ ID NO: 116175 - DNA, 1326 bp, Homo sapiens
acccacactccagcagacttattgttcatgtgctttcaaatagacctcagctctggaccagcccccaggtttcaggctggaccctcggccccagaatccaagtcagccctcacagatctgtcctctagattaggacccacacattcagtctccagctttgcccaggggactcaaggtttatgttcattcccatggctccaggaaccaagacttgatgttgtgctgacccaatcagccaacaacaccatgaccaacacccattcttatgggcttaaaggtcgagcccaacatttacaagccccacctttacaattacactccccgtcacccatccaaacaatgctgaactttactgttggtcataaacaaaggtgtcaagcattgtccactaccttcatgagttttgtcccagagaaatgcaggactattatccactgcagtgctcgggtagaggaatgcagctcctcaccagcaatggaacaaagctggatggagaatgactttgacgagctgagagaagaaggcttcagacgatcaaattactctgagctatgggaggacattcaaaccaaaggcaaagaagttgaaaacattgaaaaaaatttagaagaatgtataactagaataatcaatacagagaagtgcttaaaggagctgatggagctgaaaaccaaggctcaagaactacatgaagaatgcagaagcctcaggagccgatgcgatcaactggaagaaagggtatcagcaatggaagatgaaatgaatgaaatgaaaccaaatctacgcctgattggtgtacctgaaagtgatgtggagaatggaaccaagttggaaaacactctgcaggatattatccaggagaacttccccaatctagcaaggcaggccaacgttcagattcaggaaatacagagaacaccacaaagatactcctcgagaagagcaactccaagacacttaattgtcagattcaccaaagttgaaatgaaggaaaaaatgttaagggcagccagagagaaaggtcgggttaccctcaaagggaagcccatcagactgacagcggatctctcggcagaaaccctacaagccagaagagagtgggggccaatattcaacatttttaaagaaaagaattttcaacccagaatttcatatccagccaaactaagcttcataagtgaaggagaaattaaatactttacagacaagcaaatgctgagagattttgtcaccaccaggcctgccctaaaagagctcctgaaggaagcgctaaacatggaaacgaacaaccagtaccagctgctgcaaaatcatgccaaaatgtaa

SEQ ID NO: 116176 - DNA, 1041 bp, Homo sapiens
atgagtgtccactcctggaagccctcttggatcagacccatccgtagcctttctcccaagcgtcctctagggacccaagggacctctgaagtcccaccagatactcacatctgccagacaaaatttcacagtctttcttcaggaccacttctcttgtcagtccatccagttggaaagctatccgcagttgttggcagagtcttcatacacatactctcccagcgtgagcgacgaagaagacgggtgatttcagcatttccatctgaggtaccgggttcatctcaccagggagtgccagacagcgggtgcaggtcagtgggtgcgcaccccgtgcgcgagccgaagcagggcgaggcattgcctcactcaggaagcccaagggaaggaaaactaacaaacagaaaggacatccacaccaaaaacccatctgtacatcaccatcatcaaagaccaaaagtagataaaaccacaaagattgggaaaaaacagaacagaaaaactggaaactctaaaacgcagagcgcctctcctcctccaaaggaatgtagttcctcaccagcaacggaacaaagctggatggagaatgactttgatgagctgagagaagaaggcttcagacaatcaaattactctgagctacggaaggacattcaaaccaaaggcaaagaagttgaaaactttgaaaaaaatttagaagaatgtaaaactagaataaccaatacagagaagtgcttaaaggagctgatggagctgaaaaccaaggctcgagaactatgtgaagaatgcagaagcctcaggagccgatgcaatcaactggaagaaagggtatcagtgatggaagatgaaatgaatgaaatgaagcgagaagggaagtttagagaaaaaagaataaaaagaaatgagcaaagcctccaagaaatatgggactatgtgaaagaccaaatctacgtccgattggtgtacctgaaagtgacggggagaatggaaccaagttggaaaacactctgcaggatactatccaggagaacttccccaatctag

SEQ ID NO: 116177 - DNA, 1695 bp, Homo sapiens
atggagagaagtttcaaagagaagagagctcagatttgggctatgggacaaatgtggaaggaggaagaaggaaatgaaaggtggagtgtggacagagtggtgactcttggaaaggaagacctgagggaggttaaatgggccagggaaaactatcaccataacattggctcaccatattgcttacggttagcttctgctgatgtcaatgggaagatcatcgtctgggatgtagcagcaggagtagctcagtgtgagatccaagagcatgccaagcctatccaggatgttcagtggttgtggaatcaagatgcttcccgcgatttactgcttgctatccacccgccaaattacattgtgctctggaatgccgacactggcaccaaactatggaagaagagctatgcagataacattctttctttttcttttgacccttttgatccctcacatttaactttgcttaccagcgagggtattgttttcatctcagacttctccccatccaagcctccctcaggccctgggaaaaaagtttacatatccagcccacactctagcccagctcataacaagctggccacagccacaggtgccaagaaagctctaaataaagtaaaaattttaatcactcaagagaaacctagtgctgaattcataactctcaatgattgccttcagttggcatacctgccttcaaaaaggaatcacatgttgttgctctatcctcgagagattttaatccttgaccttgaggtgaatcagacggtgggtgtgattgcaatagaacgcacaggagttccatttttacaggtaataccctgctttcagcgtgatggtttattttgtctacatgaaaatggttgtataactttacgtgttcgaagatcttataataacatttttaccacttcaaatgaggaaccagatccagatccagttcaggagcttacctatgatttacgaagccagtgtgatgcaatcagggtgacaaaaaccgtccgtcccttcagtatggtgtgctgtcctgtcaatgagaatgcagccgccctcgtagtgagtgatggcagggtcatgatatgggaactcaagtctgcagtttgtaatcgaaattcacggaacagggtttctgccgagagatccgctgttagtctgatgggcttccctttgaagcccgtcggaaaagcgcagtattcgggtgggagtgacccgattttccaggtgctgtccgtcacccctttctttgactcagaaagggaactccctgaccccttgcgcttcccaggtgaggcaatgcctcgccctgcttcggctcgcgcacggtgcacgcacccactgacctgcgccgactgtctggcactccctagtgagatgaacctggtacctcagatggaaatgcagaaatcacccgtcttctgcgtcactcaggctgggagctgtagaccggagctgttcctattcggccatcttggctcctccctcgagggttcagccttttggagagctgtaacactcaccgtgaaggtctgtggcttcattcttgaagtcagcgagaccaagaacccaccggaaggaaccaactccagacacagaactgctcgccaaagcaccgagctacggacaaatattcctgggacaggccttcctttccatggagctcagttccttgacagaagggtgtcagactggttggtctaa

SEQ ID NO: 116178 - DNA, 1767 bp, Homo sapiens
  misc_feature (1)...(1767): n = a,t,c or g
atgggcccaaggtggtcgaggcacagcttggttttatacactttatacactttagggagacatgagacatcaatcaatatatgtaaggtgtacattagttcagtccagaaagaaggaaaactaacaaacagaaaggacatccacaccaaaaacccatctgtacatcaccgtcatcaaagaccaaaagtagataaaaccacaaagacggggaaaaaacagaacagaaaaactggaaactctaaaaagcagagcgcctctcctcctccaaaggaatgcagttcctcaccagcaatggaacaaagctggatggagaatgactttgatgaactgagagaagaaggcttcagacgatcaaattactctgagctacgggaggacattcaaaccaaaggcaaagaagttgaaaactttgaaaaaaatttagaagaatgtataactagaataaccaatacagagaagtgcttaaaggagctgatggagctgaaaaccaaggctcgagaactacgtgaagaatgcagaaggctcaggagccgatgcgatcaactggaagaaagggagaatggaaccaagttggaaaacactctgcaggatattatccaggagaacttccccaatctagcaaggcaggccaacattcagattcaggaaatacagagaacaccacaaagatactcctcgagaagagcaactccaagacacataattgtcagattcaccaaagttgaaatgaaggaaaaaatgttaaaggcagccagagagaaaggtcgggttaccctcaaaggggagcccatcagactaacagctgatctctcaacagaaaccctacaagccagaagagagtgggggccaatattcaacattcttaaagaaaagaattttcaacccagaatttcatatccagccaaactaagcttcatcagtgagggagaaataaaatattttacagacaagcaaatgctgagagattttgtcaccaccaggcctgccctaaaacagctcctgaaggaagcactaaacatggaaaggaacaancgactaaaccaggaagaagttgaatctctgaatagaccaataacaggatctgaaattgtggcaataatcaatagcttaccaaccaaaaagagtccaggaccagatggattcacagccgaattctaccagaggtgcaaggaggaactggtaccattccttctgaaactattccaatcaatagaaaaagagggaatcctccctaactcattttatgaggccagcatgattctgataccaaagcctggcagagacacaaccaaaaaagagaattttagaccaatatccttgatgaacattggtgcaaaaatcctcaataaaatacttgcaaaaaaaatccagcagcacatcaaaaagcttatccaccatgatcaagtgggcttcattcctgggatgcaaggctggttcaatatatacaaatcaataaatgcgatccagcatataaacagagccaaagacaaaaaccacatgattatctcaatagatgcagaaaaggcctttgacaaaattcaacaacccttcatgctaaaaactctcaataaattagttactgtaaaatggggaaaggagaaatttgaaggtgtagaattgaatacagatgaacctccaatggtattcaaggctcagctgtttgcgttgactggagtccagcctgccagacagaaagttatggtgaaaggaggaacgctaaaggatgttgaaggctgcaataccgaaggcctcaccactgaacgctga

SEQ ID NO: 116179 - DNA, 2286 bp, Homo sapiens
atggagctgaaagccaaggctcgagaactacgtgaagaatgcagaagcctcaggagccgatgcgatcaactggaagaaagggtatcagtgatggaagatgaaatgaatgaaatgaaactaaaccaggaagaagctgaatctctgaatagactaataacaggctctgaaattgtggcaataatcaatagcttaccaaccaaaaagagtccaggaccagatggattcacagccgaattctaccagaggtacaaggaggaactgatgcaaaaaaggcctttgacaaaattcaacaccttcatgctaaaaactctcaataaattaggtattgatgggacgtatctcaaaataataagagctatctatgacaaacccacagccaatatcatactgaatgggcaaaaactgggagcattccctttgaaaactggcacaagacagggatgccctctctcaccactcctatttaacatagtgttggaagttctggccagggcaattaggcaggagaaggaaataaagggtattcaattaggaaaagaggaagtcaaattgtccctgtttgcagatgacatgattgtatatctagaaaaccccattgtctcagcccaaaatctccttaagctgataagcaacttcagcaaagtctcaggatacaaaatcaatgtacaaaaatcacaagcattcttatacaccaacaacagacaaacagagagccaaatcatgagtgaactcccattcacaattgcttcaaagagaataaaacacctaggaatccaacttacaagcgacgtgaaggacttcttcaaggagaactacaaaccactgctcaatgaaataaaagaggatacaaacaaatggaagaacattccatgctcatgggtaggaagaatcaatatcgtgaaaatggccatactgcccaaggtaatttacagattcaatgccatccccatcaagctaccaatgactttcttcacagaattggaaaaaactactttaaagttcatatggaaccaaaaaagagcccgcattgccaagtcaatcctaagccaaaagaacaaagctggaggcatcacgctacctgacttcaaactacactacaaggctacagtaaccaaaacagcatggtactggtaccaaaacagagatatagatcaatggaacagaacagagccctcagaaataacgctgcatatctacaactatctgatctttgacaaacctgagaaaaacaagcaatggggaaaggatttcctgtttaataaatgcagtgccccactctcctggtacccatttactatactggtccattttcacattgctgataaagacataaccacgaagatggccgaacaggaacagctccggtctacagctcccagtggtattccaacagacctgcagctgagggtcctgtctgttagaaggaaaacaaacagaaaggacatccacaccgaaaacccatctgtacatcaccatcatcaaagaccaaaagtagataaaaccacaaagatggggaaaaaacagagcagaaaaactggaaactctaaaacgcagagcacctctcctcctccaaaggaacgcagttcctcaccagcaacggaacaaagctggatggagaatgactttgacgagctgagagaagaaggcttcagacgatcaaattactctgagctacaggaggacattcaaaccaaaggcaaagaagttgaaaactttgaaaaaaatttagatgaatgtataactagaataaccaataaagagaagtgcttaaaggagctgatggagctgaaagccaaggctcgagaactacgtgaagaatgcagaagcctcaggagccgatgcgatcaactggaagaaagggtatcagtgatggaagatgaaatgaacgaaatcaagcgagaagggaagtttagagaaaaaagaataaaaagaaaggagcaaagcctccaagaaatatgggactatgtgaaaagaccaaatctacgtctgattggtgtacctgaaagtgacggggagaatggaaacaagttggaaaacactctgcaggatattatccaggagaacttccccaatctagcaaggcaggccaacattcagattcaggaaatacagagaatgccacaaagatactcctcgagaagagcaactccaagacacataattgtcacatcctccaaggttgaaatgcagaaaaaaatgttaagggcagccagagagaaaggtcatgttacttacaaagggaagcccaccaaaccaacagcgaatctctctgcagaaaccctataa

SEQ ID NO: 116180 - DNA, 1167 bp, Homo sapiens
atgtacagaaggagtagcagaccttcagcaaggtctcaggatgaaaaatcaatgtgcaaaaatcacaagcactcctatacaccaataacaaacagagagccaaaacatgagcgaactcccatttgcaattgctacaaagagaataaaatacctaagaatacagcttacaagggatgtgaaggacctcttcaaggagaactacaaaccactgctcaaggaaataagagaggacacaaacaaatggaaaaacattccatgctcatggataggaagaatcaatatcgtgaaaatggccatactgcccaaaaaataaaaactaccataagagaatactataaacacttctacacaaataaactagaaaatctagaagaaattgataaattcctggaaacatacaccctcctaagtctaaaccaggaggaagtcgaatctctgaatagaccaataacaagtagtgaaattgaggaagtaattaatagcttaccaaccaaaaaagtccaggaccagacaaagtcacaaccagattctatcagagaaggaaaactaacaaacagaaaggacatccacaccaaaaacccatctgtacatcaccatcatcaaagaccaaaagtagataaaaccacaaagatggggaaaaaacagaacagaaaaactggaaactctaaaacgcagagcacctctcctcctccaaaggaacgcagttcctcaccagcaacggaacaaagctggatggagaatgactttgacgagctgagagaagaaggcttcagacgatcaaattactctgacctacgggaggacattcaaaccaaaggcaaagaagttgaaaactttgaaaaaaatttagaagaatgtataactagaataaccaatacagagaagtgcttaaaggagctgatggagctgaaaaccaaggctcgagaactacgtgaagaatgcagaagcctcaggagccgatgtgatcaactggaagaaagggtatcagcaatggaagatgaaatgaatgaaatgaagcgagaagggaaggttagagaaaaaagaataaaaagaaatgagcaaagcctccaagaaatatgggactatgtgaaaagaccaaatctacgtctgattggtgtacctgaaagtgatgcggagaatggaaccaagttggaaaacactctatag

SEQ ID NO: 116181 - DNA, 2343 bp, Homo sapiens
atgacacatgtcacaacatggcaactgactttccaacagatccatgagcaagagagtgagagaggggccttagaactgatgaccaagtactttaacaactggaactgggtctatgacaacgtaataaatcacgatgaaagtgaattgaacttgaagcatattaaaatagacctagataaattctcagataaccctgatggctatattgatgttttacaagggttaggacaatcctttgatctgacatggagagatataatgttactgctagatcagacactaaccccaagtgagagaagtgccgccataactgcagctcgagagtttggcaatctctggtatctcagtcagtctgggcaacagaaggacaatatggacggacaaagaatgcccgtcctgttcaagttaaaggattctgcttcctttccctaccaaaggcggtacccccttagactggaggcccaacaaggactccaaaagattgttaaagacctaaaagcccaaggcttagtaaaaccattcaatagcccctgcaatactccaattttaggagtacagaaacccaacggacagtggaagttagtacaagatctcaggattatcaatgaggccattgtccctctatacccagctgtacctaacccttatactctgctttcccaaataccagaggaagcagagtggtttacagtcctggaccttaaggatgcctttttctgtatccctgtacatcgtgagtctcaattcttgtttgcctttgaagatccttcaaacccaacatctcaactcacctggactgttttaccccaagggttcaggaatagccctcatctatttggccaggcattagcccaagacttgagccagttctcatacctgaatactcttgtccttcggtacctggatgatttacttttagctgcccatttagaaaccttgtgccatcaagccacccaaaaaaaaacaggaatagctctaggagtccttacacaggttcaagggaccagctttcaacccgtggcacacctgagcaaggaaattgatgtggtggcaaagggttggcctcattgtttatgggtagtggctgcagtagcagtcttagtatctgaagcagttaaaataatacagggaagagaacttactgtgtggacatctcatgatgtaagtggcacactcactgctaaaggagacttgtggctgtcagacaaccttttgcttaatcaggctctattatttaaaaggccagtgctgcgactgcacacttgtgcaactcttaacccagccacatttcttccaaacaataaagaaaagatagaacataaccatcaacaggtgattgttcaaacctacaccattcaaggggaccttctagaggttcccttgactgatcccgacctcaacttgtatactaatggaagttcctttgtagaaaaaggacttcgaaaagcggggattcatccttcaaggcagtggactcccctctggcccaaggcaggtccagaaatgctgtccaagaggcaagtcctagaatcaggaatcctaaaagccttcttggttccctacctccttgtggctgtgctgggcagcattgacttcaatggaaagcctccagttgctgtgttctccctctcccaagctcacagatttctctgtgccacgtggctgctgctggggtatggggaagtgtggatccattctcatactgctataaagacataccagaggaggaggagccaagatggccgaataggaacagctccggtctacagctcccagcgtgagcgacgcagaagacgggtgatttctgcatttccatctgagggtattccaacagacctgcagctgagggtcctgtctgttagaaggaaaactaacaaacagaaaggacatccacaccaaaaacccatctgtacatcaccatcatcaagaccaaaagtagataaaaccacaaagatggggaaaaaacagaacagaaaaactggaaactctaaaacgcagagcgcctctcctcctccaaaggaacgcagttcctcaccagcaacggaacaaagctggatggagaatgactttgacgagctgagagaagaaggcttcagacgatcaaattactctgagctacgggaggacattcaaaccaaaggcaaagaagttgaaaactttgaaaaaaatttagaagaatgtataactagaataaccaatacagagaagtgcttaaaggagctgatggagctgaaaaccaaggctcgagaactacgtgaagaatgcagaagcctcaggagccaatgcgatcaactggaagaaagggtatcagcaatggaagatgaaatgaatgaaatgaagtga

SEQ ID NO: 116182 - DNA, 1056 bp, Homo sapiens
atggggaaaaaacagaacagaaaaactggaaactctaaaacgcagagcacctctcctcctccaaaggaatgcagttcctcaccagcaacggaacaaagctggatggagaatgactttgaagagctgagagaagaaggcttcagacgatcaagttactctgagctacgggaggacattcaaaccaaaggcaaagaagttgaaaactttgaaaaagatttagaagaatgtataactagaataaccaatacagagaagtgcttaaaggagctgatggagctgaaaaccaaggctcgagaactacgtgaagaatgcagaagcctcaggagccgatgcgatcaactggaagaaagggtatcagcgatggaagatgaaatgaatgaaatgaagcgagaagcgaaggaaacccatctcacgtgcagagacacacataggctcaaaataaaaggatggaggaagatctaccaagcaaatgggaaacaaaaaaaggcagggggtgcaatcctagtctctgataaaacagacattaaaccaacaaagatcaaaagagacaaagaaggccattacataatggtaaagggatcaattcaacaagaagagctaactatcctaaatacatatgcacccaatacaggagcacccagattcataaagcaagtcctgagtgacctacaaagagacttagactcccacacaataataatgggagactttaacaccccactgtcaacattagacagatcaacgagacagaaagtcaacaaggatacccaggaattgaactcagctctgcaccaagcagacctaatagacatctacagaactctccaccccaaatcaacagaatatacatttttttcagcaccgcaccacacctgttccaaaattgaccacatacttggaagtaaagctctcctcagcaaatgtaaaagaacagaaattataacaaactgtctctcagaccacagtgcaatcaaactagaactcaggattaagaatctcactcaaaaccgctcaactacatggaaactgaacaacctgctcctgaatgactactag

SEQ ID NO: 116183 - DNA, 1395 bp, Homo sapiens
atggggaaaaaacagagcagaaaaactggaaactctaaaaagcagagcgcctctcctcctccaaaggaatgcagttcctcaccagcaacggaacaaagctggatggagaatgactttgacgagctgagagaagaaggcttcagacgatcaaattactccgagctacgggaggacattcaaaccaaaggcaaagaagtcgaaaacttcgaaaaaaatttagaagaatgtataactagaataaccaatacagagaagtgcttaaaggagctgatggagctgaaaaccaaggctcgagaactacgtgaagaatgcagaagcctcaggagccggtgcgatcaactggaagaaagggtatcagtgatggacgatgaaatgcatgaaatgaagcaagaaagaaaatcgagacagaaagtcaacaaggatacccaggaattgaactcagctcagcaccaagctgacctaatagacatctacagaactctccactccaaatcaatagaatatacatttttttcagcaccacaccacacctattccaaatttgaccacatacttggaagtaaaactctcctcagcaaatgtaaaagaacagaaattataacaaactatctctcagaccacagtgcaatgaaactagaactcagaattaagaatctctctcaaaacctctcaactacatggaaactgaacaacctgctcctgaatgactactgggtacataatgaaatgaatgcagaaataaagatgttctttgaaaccaacgagaacaaagacacaacataccagaatctctgggacgcattcaaagcagtgtgcagagggagatttatagcactaaatgcccacaagagaaagcaggaaagacctaaaattgacaccctaacatcacaattaaaagaactagagaagcaagagcaaacacattcaaaagctagcagaaggcaagaaataactaaaatcagagcagaactgaaggaaatagagacacaaaaaacacttcaaaaaattaatgaatccaggagctggttttctgaaaggatcaacaaaattgatagactgctagcaagactaataaagaaaaagagagagaagaatcaaatagatgcaataaaaaatgataaaggggacatcatcaccgatctcacagaaatacaaactaccatcagagaatactacaaacacctctacgcaaataaactagaaaatctagaagaaatggataaattcctcgacacatacactctcccaagactaaaccaggaagaagttgaatttctgaatagaccaataacaggatctgaaattgtggcaataatcaatagcttaccaaccaaaaagagtccaggaccagatggattcacagctgaattctaccagaggtacaaggaggaactg

SEQ ID NO: 116184 - DNA, 1839 bp, Homo sapiens
atgaaactcatggaaacacttaaccagtgcataaacgctggtcatgaaatgacgaaggctatcgccattgcacagtttaatgatgacagcccggaagcgaggaaaataacccggcgctggagaataggtgaagcagcggatttagttggggtttcttctcaggctatcagagatgccgagaaagcagggcgactaccgcacccggatatggaaattcgaggacgggttgagcaacgtgttggttatacaattgaacaaattaatcatatgcgtgatgtgtttggtacgcgattgcgacgtgctgaagacgtatttccaccggtgatcggggttgctgcccataaaggtggcgtttacaaaacctcagtttctgttcatcttgctcaggatctggctctgaaggggctacgtgttttgctcgtggaaggtaacgacccccagggaacagcctcaatgtatcacggatgggtaccagatcttcatattcatgcagaagacactctcctgcctttctatcttggggaaaaggacgatgtcacttatgcaataaagcccacttgctggccggggcttgacattattccttcctgtctggctctgcaccgtattgaaactgagttaatgggcaaatttgatgaaggtaaactgcccaccgatccacacctgatgctccgactggccattgaaactgttgctcatgactatgatgtcatagttattgacagcgcgcctaacctgggtatcggcacgattaatgtcgtatgtgctgctgatgtgctgattgttcccacgcctgctgagttgtttgactacacctccgcactgcagtttttcgatatgcttcgtgatctgctcaagaacgttgatcttaaagggttcgagcctgatgaacgcagttcctcaccagcaacggaacaaagctggatggagaatgactttgacgagctgagagaagaaggcttcagacgatcaaattactctgagctacgggaggacattcaaaccaaaggcaaagaagttgaaaactttgaaaaaagtttagaagaatgtataactagaataaccaatacagagaagtgcttaaaggagctgatggagctgaaagccaaggctcgagaactacgtgaagaatgcagaagcctcaggagccgatgcaatcaactggaagaaagggtatcagtgatggaagatgaaatgaatgaaatgaagcaagaagggaagtttagagaaaaaagaataaaaagaaatgagcaaagcctccaagaaatatgggactatgtgaaaagaccaaatctacgtctcattggtgtacctgaaagtgatggggagaatggaaccaagttggaaaacactctgcaggatattatccaggagaacttccccaatctagcaaggcaggccaacactcagattcaggaaatacagagaacaccacaaagatactcctcgagaagagcaactccaagacacatatttgtcagattcaccaaagttgaaatgaaggaaaaaatgttaagggcagccagagagaaaggttgggttacccacaaagggaagcccatcagactaacagcagatctctcagcagaaaccctacaagccagaagagagtgggggccaatattcaacattcttaaagaaaagaattttcaacccagaattgcatatccagccaaactaagcttcataagcgaaggagaagtaaaatactttacagacaagcaaatgctgagagattttgtcaccaccaggcctgccctaaaagagctcctgaaggaagcactaaacatggaaaggaacaaccggtaccagccactgcaaaatcatgccaaaatgtaa

SEQ ID NO: 116185 - DNA, 6094 bp, Homo sapiens
atgggagactttaacaccccactgtcaacattagacagatcaacgacacagaaagtcaacaaggatacccaggaattgaactcagctctgcaacaagcagacctaatagacatctacaaaactctccaccccaaatcaacagaatatacattcttctcagcacctcatcacacttattctaaaattgaccacataattggaagtaaagcactcctcagcaaatgtaaaagaacagaaatcacaacaaactatctctcagatcaccgtgcaatcgaattagaaatcaggattaagaaacttactcaaaaccacacaactacatggaaactgaacaacctgctccggaatgactactgggtaaataatgaaatgaaggcagaaataaagatgttctttgaaaccaacgagaacaaagacacaacgtaccagaatctctgggacacatttaaagcagtgtgtagagggaaatgtacagcactaaatgcccacaagagaaagcaggaaagatctaaaatcaacaccctaacatcacaattaaaagaactagagaagcaagaggaaacaaattcaaaagctagcagaaggcaagaaataactaagatcagagcagaactgaaggagataaagacacaaaaaacccttcaaaaaatcagtgaatccgggaggaggagccaagatggccgaataggaacagctccggtctacagctcccagcgtgagcgacgcagaagacaggtgatttctgcatttccatctgagggcacagacaaacaaaaagacagcagtaacctctgcagacttacgtgtccctgtctgacagctttgaagagagcagtggttctcccagcacgcagctggagatctgagaacgggcagactgcctcctcaaaaggaaaactaacaaccagaaaggacatctacaccgaaaacccatctgtacatcaccatcatcaaagaacaaaagtagataaaaccacaaagatggggaaaaaacagaacagaaaaactggaaactctaaaacgcagagcacctctcctcctccaaaggaacgcagttcctcaccagcaacagaacaaagctggatggagaatgattttgacgagctgaaagaagaaggcttcagacgatcaaattactctgagctacgggaggacattcaaaccaaaggcaaagaagttgaaaactttgaaaaaaatttagaagaatgtataactagaatagccaatacagagaagtgcttaaaggagcagctgatggagctgaaaaccaaggctcgagaactacgtgaagaatgcagaagcctcaggagccgatgtgaacaactggaagaaagggtatcagcaatggaagacgaaatgaatgaaatgaatgaaatgaagcgagaaggaaagtttagagaaaaaagaataaaaagaaacgagcaaagcctccaagaaatatgggactatgtgaaaagaccaaatctacgtctgactggtgtacctgaaagtgatggggagaatggaaccaagttggaaaacactctgcaggatattatccaggagaacttccccaatctagcaaggcaggccaatgttcagattcaggaaatacagagaacaccacaaagatactcctcgagaagagcaactccaagacacataattgtcagattcaccaaagttgaaatgaaggaaaaaatattaagggcagccagagagaaaggtcgggttaccctcaaagggaagcccatcagactaacagcggatctctcggcagaaaccctacaagccagaagagagtgggggccaatattcaacattcttaaagaaaagaattttcaacccagaatttcatgtccagccaaactaagcttcataagtgaaggagaaataaaatactttacagacaagcaaatgctgagagattttgtcaccactaggccctgccctaaaagagctcctgaaggaagcgctaaacatggaaaggaacaaccggtaccagccgctgcaaaatcatggccaaatgtaaagaccatcgagacaaggaagaaactacatcaactaacgagcaaaatcaccagctaacatcataatgacaggatcaaattcacacataacaatattaactttaaatgtaaatggactaaattctccaattaaaagacacagactggcaagttggataaagagtcaagacccatcagtgtgctgtattcaggaaacccatctcatgtgcagagacacacataggctcaaaataaaaggatggaggaagatctaccaagcaaatggaaaacaaaaaaaggcaggggttgcaatcctagtctctgataaaacagactttaaaccaacaaagatcaaaagagacaaagaaggccattacatgatggtaaagggatcaattcaacaagaggagctaactatcctaaatatgtatgcacccaatacaggagcacccagattcataaagcaagtcctgagtgacctacaaagagacttagactcccacacattaataatgggagactttaacaccccactgtcaacattagacagatcaacgagacagaaagtcaacaaggatacccaggaattgaactcagctctgcaccaagcagacctaatagacatctacagaactctccaccccaaatcaacagaatatacatttttttcagcaccacaccacagctattccaaaattgaccacatacttggaagtgaagctctcctcagcaaatgtaaaagaacagaaattataacaaactatctctcagaccacagtgcaatcaaactagaactcaggattaagaatctcactcaaagccgctcaactacatggaaactgaacaacctgctcctgaatgactactgggtacataacgaaatgaaggcagaaataaagatgttctttgaaaccaacgagaacaaagacacaacataccagaatctctaggacgcattcaaagcagtgtgtagagggaaatttatagcactaaatgcccacaagagaaagcaggaaagatccaaaattgacaccctaacatcacaattaaaagaactagaaaagcaagagcaaacacattcaaaagctagcagaaggcaagaaataactaaaatcagagcagaactgaaggaaatagagacacaaaaaacccttcaaaaaatcaatgaatccaggagctggttttttgaaaggatcaacaaaattgatagaccgctagcaagactaataaagaaaaaaagagagaagaatcaaatagacacaataaaaaatgataaaggggatatcaccaccgatcccacagaaatacaaactaccatcagagaatactacaaacacctctacgcaaataaactagaaaatctagaagaaatggatacattccttgacacatacactctcccaagactaaaccaggaagaagttgaatctctgaatagaccaataacaggagctgaaattgtggcaataatcaatagtttatcaaccaaaaagagtccaggaccagatggattcacagccgaattctaccagaggtacaaggaggaactggtaccattctttctgaaactattccaatcaatagaaaaagagggaatcctccctaactcattttatgaggccagcatcattctgataccaaagccgggcagagacacaaccaaaaaagagaattttagaccaatatccttgatgaacattgatgcaaaaatcctcaataaaatactggcaaaccaaatccagcagcacatcaaaaagcttatccaccatgatcaagtgggcttcatccctgggatgcaaggctggttcaatatacgcaaatcaataaatgtaatccagcatataaacagagccaaagacaaaaaccacatgattgtctcaatagatgcagaaaaagcctttgacaaaattcaacaacccttcatgctaaaaactatcaataaaataggtattgatgggatgtatttcaaaataataagagctatctatgacaaaaccacagccaatatcatactgaatgggcaaaaactggaagcattccctttgaaaaccggcacaagacagggatgccctctctcaccgctcctattcaacatagtgttggaatttctggccagggcaatcaggcaggagaaggaaataaagggtattcaattaggaaaagaggaagtcaaattgtccctgtttgcagatgacatgattgttgatctagaaaaccccatcgtctcagcccaaaatctccttaagctgataagcaacttcagcaaagtctcaggatacaaaatcaatgtgcaaaaatcacaaggattcttatacaccaacaacagacaaacagagagccaaatcatgagtgaactcccattcacaattgcttcaaagagaataaaatacctaggaatccaacttacaagggatgtgaaggacctcttcaaggagaactacaaaccactgctcaaggaaataaaagaggatacaaagaaatggaagaacattccatgctcatgggtaggaagaatcaatatcgtgaaaatggccatactgcccaaggtaatttacagtttcaatgccatccccatcaagctaccaatgcctttcttcacagaattggaaaaaactactttaaagttcatatggaaccaaaaaagagcccgcatcaccaagtcaatcctaagccaaaagaacaaagctggaggcatcacactacctgacttcaaactatactacaaggctacagtaaccaaaacagcatggtactggtaccaaaacagagatatagatcaatggaacagaacagagccctcagaaataacgccgcatatctacaactatctgatctttgacaaacctgagaaaaacaagcaatggggaaaggattccctatttaataaatggtgctgggaaaactggctagctatatgtagaaagctgaaactggatcccttccttacaccttatacaaaaatcaattcaagatggattaaagacttaaacgttagacctaaaaccataaaaaccctagaagaaaacctaggcaataccattcaggacataggcatgggcaaggacttcatgtctaaaacaccaaaagcaatggcaacaaaagccaaaattgacaaatgggatctaattaaactaaagagcttctgcacagcaaaagaaactaccatcagagtgaacaggcaacctacaaaatgggagaaaatttttgcaacctactcatctgacaaagggctaatatccagaatctacaatgaactcaaacaaatttacaagaaaaaaacaaacaaccccatcaaaaagtgggtgaaggacatgaacagacacttctcaaaagaagacatttatgcagccaaaaaacacatgaaaaaatgctcatcatcactggccatcagagaaatgcaaatcaaaaccacaatgagataccatctcacaccagttagagtggcaatcattaaaaagtcaggaaacaacaggtgctggagaggatgtggagaaataggaacacttttacactgttggtgggactgtaaactagttcaaccattgtggaagtcagtgtggcgattccttagggatctagaactagaaataccatttgacccagccatcccattactgggtatatacccaaatgactataaatcatgctgctataaagacacatgcacacgtatgtttattgcggcattattcacaatagcaaagacttggaaccaacccaaatgtccaacaatgatagactggattaagaaaatgtggcacatatacaccatggaatactatgcagccataaaaaatgatgagttcatgtcctttgtagggacatggatgaaattggaaaccatcattctcagtaaactatcgcaagaacaaaaaaccaaacaccgcatattctcactcataggtgggaattgaacaatgagatcacatggacacaggaaggggaatatcacactctggggactatggtggggaggggggaggggggagggatagcattgggagatatacctaatgctagatgacgagttagtggtgcagtgcaccagcatggcacatgtatacatatgtaactaacctgcacaatgtgcacatgtaccctaaaac

SEQ ID NO: 116186 - DNA, 549 bp, Homo sapiens
ggaggcaggagatgtgtcaggctgctggtctcagctgtgctttcttatgcatttgaggggtaggctggctggatctggtctaggatgggttccacggggctcccttccacatggtctgccgtcctgtggcaggctagcccaggccatctgcttggttctaagaaggaagtagaagcatgcagtacctttggaggcccaggttgggacctggtgtactgtgacttctgcattttatcagccaaagcaaggtgcaagactagcccagattcaaaggagaggtggaaggaaacacttgcaaaagctctcattcgaatctcagaacgttatctggatctgcaacacagggcagctgctaacctttcagagcaatcttcggcagccctaaatggtattaacatcttagacatagcatcccaagccaatgagggccaatcggaagtccaaagcagttacctctccactgcccccaaccagcaaccaaaagccctatgctggttctccaaccggcgtgtgtgcctccttaaggaaaaaacttccttcctcccatag

SEQ ID NO: 116187 - DNA, 534 bp, Homo sapiens
atgattaaacaccaagggaaggctgccttcccagtccgtgaccggcgccggaattttgggtccacggataaaacgtgtctcctttgtctctaccagaaaatgaaaggaattgaaattaagagaagggagagattgaagtgtggcgccaagattgaaaggagaaagagaattttagaactggaaggaaacttagagaatgtcttctccatcatcctggcttttcagacaccaaagcttagagtagctgagtggattgtcattgtaacaaaacgggtcttagcagaactggagccaaagctcaggtcttcagattcccgttctgccctgataccttatcaaggaaaacaagtacttcttgaggacatggcccaagacacattgactgcggccagtgagaagaaagtccgggactcagctggacccactgacaatggctgtcagagttacagtcatcttccctccaagtctgagcagccacacgaaccccagatacttacatctgggagcaccccagtgacaaagccagtgacttaa

SEQ ID NO: 116188 - DNA, 537 bp, Homo sapiens
atgattaaacaccaagggaaggctgccttcccagtccgtgaccggcgccggagttttgggttcatggataaaacatgtctcttttgtaaaaaccagaaaatgaaaggaattgaaattaagagaagggagagattgaagtgtggcgccaagattgaaaggagaaagaggttgagggataaaaccattacatttctgatgtctgtagctttgtataaagcaaatgagagaaaaatatctgaagaaattgtgtgcccttttgctaatgatggcactagaagtatatcagagaattccctggtagcaatggacttctcaggccagaaaagcagagttatagaaaatcccactgaagccctttcagttgcggttgaagaaggactcgcttggagggtagaagatgacggtgaaatgttccacacactggatgatggccacacaagatttacagatctaatacagctggtggagttctatcaactcaataagggcgttcttccttgcaagttgaaacattattgtgctaggattgctctctag

SEQ ID NO: 116189 - DNA, 423 bp, Homo sapiens; identical to SEQ ID NO: 114702

SEQ ID NO: 116190 - DNA, 432 bp, Homo sapiens
atggtctacggggcttccgaggcgatcgggcagcatcagtcttcagccgctaagccgagaaggagtcagtcagagagccttgggccagagttccagggactctgggagtggctgccagggtctagggctgtgaagcatctcagggttatatttgatgaaaaagagcctaaacgctatctgatttgggataaagaaaaaggagcattaaccttgactatgcctttggctccagccacctttttaagagtaaattgctgggcaggtgggggagggctagtcacggaacgaaactgtaagcccgaccagaaaatgaaaggaattgaaattaagagaagggagagattgaagtgtggctccaagattgaaaggagaaagaggttgagggatagtgagggaggttggagaagagtagaggccgcttaccggatttga

SEQ ID NO: 116191 - DNA, 615 bp, Homo sapiens; identical to SEQ ID NO: 114705

SEQ ID NO: 116192 - DNA, 696 bp, Homo sapiens
atggccttgggtgaacatagtcagaagtcagggagtggtgacaacagaccttgggcaagggccagcactgtgctggcttcaggtctgacccagcacagtgatagtggtggaggccacagggctgcttgtgtcactccatccccagctgtaggtggctcaggagagagagagagagagagagagagagagagatatgctcgatatgtttgggaaaaagcttccgaggcgatcgggcagtgtcactcttcagctgctaagccaagaagatctgggaaggagtcagagagccttgggccagagttccaggggctctgggagtggctgccgggcgagttggacagttcgatttccagtgggaaaatgaaaggaattgaaattaagagaatggagagattgaagtgtggcgccaagattgaaaggagaaagaggttgagggatagtgaggagaggttgagggatagtggagaagagaataaaaagaggccacttacgggatttaaaattggctggaggaagaaattctcctctggttcttcaaaaatccagcattactgtcgtaagttgtcaaaggagaaggccgcacggcaaggaattgtggggtctctaggaattgaatatgggtcctgccttagccagaaagacaccagagatgtgaattctacaactgcaaagaactcaattgttccaacaagatga

SEQ ID NO: 116193 - DNA, 1464 bp, Homo sapiens
ggggcttctgaggcgatcgggcagtgtcagtcttcagccgctaagccgagaagatctgggaaggagtcagtcagagagccttgggccagagttccaggggctctgggagtggctgccagaaaataccagaaaatgaaaggaattgaaattaagagaagggagagattgaagtgtggcgccaagattgaaaggagaaagaggttgaaggatagggaggttggagaagagagtaaaaagaggccacttactggatttgaaattgaaccacccaaagtcactgtgatgcccaagaatcagtctttcacaggagggtctgaggtctccatcatgtgttctgcaacaggttatcccaaaccaaagattgcctggaccgttaacgatatgtttatcgtgggttcacacaggtataggatgacctcagatggtaccttatttatcaaaaatgcagctcccaaagatgcagggatctatggttgcctagcaaaagcccctaagttgatggtagttcagagtgagctcttggttgcccttggggatataaccgttatggaatgcaaaacctctggtattcctccacctcaagttaaatggttcaaaggagatcttgagttgaggccctcaacattcctcattattgaccctctcttgggacttttgaagattcaagaaacacaagatctggatgctggcgattatacctgtgtagccatcaatgaggctggaagagcaactggcaagataactctggatgttggctcacctccagttttcatacaagaacctgctgatgtgtctatggaaattggctcaaatgtgacattaccttgttatgttcagggttatccagaaccaacaatcaaatggcgaagattagacaacatgccaattttctcaagacctttttcagttagttccatcagccaactaagaacaggagctctctttattttaaacttatgggcaagtgataaaggaacctatatttgtgaagctgaaaaccagtttggaaagatccagtcagagacaacagtaacagtgaccggacttgttgctccacttattggaatcagcccttcagtggccaatgttattgaaggacagcagcttactttgccctgtactctgttagctggaaatcccattccagaacgtcggtggattaagaattcagctatgttgctccaaaatccttacatcactgtgcgcagtgatgggagcctccatattgaaagagttcagcttcaggatggtggtgaatatacttgtgtggccagtaacgttgctgggaccaataacaaaactacctctgtggttgtgcatgttctgccaaccattcagcatgggcagcagatactcagtacaattgaaggcattccagtaactttaccatgcaaagcaagtggaaatcccaaaccgtctgtcatctggtccaaggtaaatgatacatctagttatatttcctga

SEQ ID NO: 116194 - DNA, 357 bp, Homo sapiens
atggaggaagtgaaggttggtgcaaaagtgggaaaggtcagaggtctccaaatcagaagtaaccaagaagttatgtcctcaaagaattgtgtctgtggagccttctctataccaagagctactttagatgacattgccattggatctttggagtggccacccttaacacccaaggaggaggatcctcaatccttctgggccagtggaaaagtcacagtcctccactgctggcgtggaagcctcccagctgggaagagtgggcaggaccattaccgctgcccacgtggcctccaccagcaccacagtgtgggcggcttcatcgctgctgagcctgaccctccactaggcctctcttaa

SEQ ID NO: 116195 - DNA, 429 bp, Homo sapiens
atgatattgagcgggactatcaagcaccagcagacttctgtttacatctcattggtcagaggtctccaaatcagaagtaaccaagaagttatgtcctcaaagaattgtgtctgtggagccttctctataccaagagctactttagatgacattgccattggatctttggagtggaaaatgaaaggaattgaaattaagagaagggagagattgaagtgtggcaccaagattgaaaggagaaagaggttgagggataccacccttaacacccaaggaggaggatcctcaatccttctgggccagtggaaaagtcacagtcctccactgctggcgtggaagcctcccagctgggaagagtgggcaggaccattaccgctgcccacgtggcctccaccagcaccacagtgtgggcggcttcatcgctgctga

SEQ ID NO: 116196 - DNA, 469 bp, Homo sapiens
atgggggctgtctgtgaggccttgcggcagtacggcccagaaggggacagacttaccttccactgtgagagttacccgaagctcggtgtccatgatggtttagggggcttccgaggagatccggcagtgtcagtcttcagccgtgaagctgagaagatctgggaaggagtcaatcagagagccttgggccagagttccaggggctctgggagtggccgccagaaaatgaaaggaaatgaaattaagagaagggagagattgaagggtggcaccaagattgaaaggagaaagtggttgagggatagggagagagatgtggatgttgccagggttctcactccagatgcttttgtgtgtcggaccatctgcacctatcaccccaactgcctcttctttacattctatacaaatgtatggaaaatcgagtcacaaaggcgagtatgcatggaaaatcgcatcacaaaggcga

SEQ ID NO: 116197 - DNA, 459 bp, Homo sapiens
atgggggctgtctgtgaagctctgcagcagtacagcctagaaggggatgggcttaccttccactgtgagagctatccgaagcttggcgtcggtgatggtctagggggcttccgaggcgatcgggcagtgtcagtcttcagccgccaagccaagaagatctgggaaggagtcagtcagagagccttgggccagagttccaggggctctgggagtggctgccagaaaatgaaaggaattgaaattaagagaagggagagattgaagtgtggggccaagattgaaaggagaaagaggtggagggatagtgagggaggttggagaagagtaaaaagaggccgcttaccagatttgaaattgaaaggctttgtggcaaatgtttatgagcgaagaactttttacctcctctttgtggctgagatccagaaggccaagtgtgcagaaactctgtccctggaataa

SEQ ID NO: 116198 - DNA, 738 bp, Homo sapiens
taaaacggccccacccttatctccctttgctgactctcttttcggactcagcccacctgcacccaggtgaaataaacaaccatgttgctcacacaaggcctgtttggtggtctcttcacacggacgtgcatgaaatttggtgccgtgactcggatcaggggacctcccttgggagatcaatcccctgtcctcctgctctttgctccgtgaaaaagattcacctatgacctcaggtcctcagacccaccagcccaaggaacatctcaccaattttaaatcatgtaagcaagcctcttgttactctcttctccaacctctctcactatccctcaacctctttctccttttaatcttggcgccacccttcaatctctcccttctcttaatttcaactcctttcattttctggtggagccaaaggagacatattttatccattgacccaaaactccagcgccagtcacggactcggaaaggcagacttcccttggtgtttaatcattgcgaggacgcctctctgattattcacccacgttccactggtgtctgatctccgccgggacgtctgccttggtctttcacccttagtggcaagtcctgcttttctgggggagggggaagtaccccaaccccttctctccatgtctctaccccttttttgcttttctgaggcaggggcaagaacccctcaaccccttctccttcacgcttagtggtaagtcccgcttttctaggggg

SEQ ID NO: 116199 - DNA, 1035 bp, Homo sapiens
atgatagtgctgaggaaatatgataatgatgatgatagtgatggtgatgatgatgatgacaataatctactgaacatttctatttgtgtgttcactagcaaactcttcagctttcctcccctgacctgtcagagcagccccaccgaccctcttcccaataggagatgcttgggggctttgagcgtggccccgccggcgctgtcgctgccctctccgctgcccgcccgggccggcgcgctgctgccctctgcctccatcctggctcgcggctccgcgacctgctgcccagcccgggttcaccgcgctggcccgagcgccttcctgatgctgctgctgctgctgccgccgccgccgcttctgcagcccagcagaggctggtgcttagcttctcacttgaaggcgccagagcctcagggctaccgagagggggccctgccagcgggaggggtcacagaacgcggcagggctccttccaccgaggctatggcagagacacgctcccgggctccccaagtcaccaagactagggtgcgcggtgcccggtttcgccagaggttggtccttcttcctccctttcttcttcccttcctttgggcgccggcggcgagagcagggattgtcagcaactcgggctgcagaagcagcagcaacggcggcggcggcagtggtagccgcctccagggcaccggaaccctgatcccggagctgctgaaaagttggacagctccaggctggcacgcccgagctgtgactttcaccaaaaccactccagccatgctcttagagaaatggagtttggcgattcctggctggttctcagagcttgttgacgatgagccccatgctggtgcttccaaagataaggaatgtgaccaggcaaagttgcctggaatattgtctatgcgcgtcgctgaaaaattggatctgggtgaagatccaatacagggagaatgcccaatgtttcctcttgaagatcttcctccaacttggcctcgggagtggtcctcgctggaaatcaaggcgagtcgtccttag

SEQ ID NO: 116200 - DNA, 1023 bp, Homo sapiens
atggatttaatgcaactagcaatgataatgctcaaacaacaggagtgctatgaagacaatgaaacaggtccatcggacaaaaaattctccaaccctgtttacggctcaagtttcgaaccggtgcggatcctctatcggatcttgtttctacctgaaagtgctcttagagaaatggagttggcgattcctggctggttctcagagcttgttgacgatgagccccatgctggtgcttccaaagataaggaatgtgaccaggcaaagttgcctggaatattgtctatgcgcgtcgctgaaaaaatggatctgggtgaagatccaataaccctgagacccctgactgtgaggggcgcttcctcgcgtccttgcagctcaggcctctgtcagggacctagaggcgccggcgggtggaatccctgtttccgacacccggttgatgcggtctggagagcgagactggccgagggaccggcttaggcaaaggcctggaggcacgactgcgccaggaggattcggaacacagggacatcttgtgtccactgagaacaaagtatgagtcggagttatttcctcagtaccaggctgaggattgatctttgtgaggaccgtagaagccatggacagttttgaacaaagaaggaaatctgtgttagagttaaagattccgaaaggatgttcaaaggaagaacggagtgtaaggcggtgatgagaacagtgaggcattgagaggttgaatatttgctcaaggtcacgtagctggtaaaaggtgacattgagcactgggccacaagattagagactcagcctgaggtcacctggctacagggccaaaaaaaagcttacagagaaacctgagtctatcaaatcccagcagggacacattcctgaaagctccgccttttggcacaccttctcatggctatggaagtatttaaggaacccacagaaggaagtataggatgctctagtccctcactggtaaaaaacctcacctatatgtctagatcttaatgtcctgggaat

SEQ ID NO: 116201 - DNA, 321 bp, Homo sapiens
atgatagaaggcacacaggcttctagaagagctaaaggaggagcacttaactctgaagagtggacaagcagaggaggcttcccagaggaggcggtgcctgtactaacccttgagaggcaggcagcagtggcactgctggagggaatggcttggttcttaagtccagagaagaggacctgggccctcatgggtgtgagcaggcccaggattgcatggggagtgtggagactgacccaacccttcattcaaggcaagctcttcctccaggaagtcctaccggataaaccagctttggtccagcacccctcactgaagcagtga

SEQ ID NO: 116202 - DNA, 317 bp, Homo sapiens
atgattaaacaccaagggaaggctgccttcccagtccgtgaccggcgccggaattttgggtccacggataaaacgtgtctcctttgtctctaccagaaaatgaaaggaattgaaattaagagaagggagagattgaagtgtggcgccaagattgaaaggagaaagagaattttagaactggaaggaaacttagagaatgtcttctccatcatcctggcttttcagacaccaaagcttagagtagctgagtggattgtcattgtaacaaaacgggtcttagcagaactggagccaaagctcaggtcttcagattcccg

SEQ ID NO: 116203 - DNA, 495 bp, Homo sapiens; identical to SEQ ID NO: 114706

SEQ ID NO: 116204 - DNA, 696 bp, Homo sapiens; identical to SEQ ID NO: 116192

SEQ ID NO: 116205 - DNA, 390 bp, Homo sapiens
atggtgacagagaaggaaagaaatgtagtaaatgagcaaaagcaaagcgtgttccaagcaattagaataataatcattttacccgcggctataaatatacccacgctaatccgaaaatatatcctgcatcgaaacccgcaccgcatagtgaatctccgagggtatctccgaacttactctgcgacaatacacttgaaaatgaaaggaattgaaattaagataagggagagactgaagtgtggcgccaagattgaaaggagaaagaggttgagggatattcacctgtatctcatcattggaccacgagagcaagcagctggaccctgttcctccggcaacggcatcaatcttaccaccaaccttggctctttgaggggcttggtatattaa

SEQ ID NO: 116206 - DNA, 643 bp, Homo sapiens
ggggcttccgacacgatcaggcagtatcagtcttcagccgctaagccgagaagatctgggaaggagtcagtcagagagccttgggccagagttccaggggctctgggagtggctgccagaaaagcaggacttgccgctaagggtgaaggaccaaggcaggcgtccctgcgtggtctgacacccttgaaacatgagtgtataatcagagaggtgtccctgcaatgattaaacaccaaggaaaggctgccttccctagtctgtgacaggcgccggaattttggctccacggataaaacgtgtctcctttgtctctaccagaaaatgaaaggaattgaaattaagagaagggagagattgaagtgtggcgccaagattgaaaggagaaagaggttgagggatagtgagggagggtggagaagagagtaaaaagaggctgcttaccagatttgaaattggtgagatgtttcttgggctgcgacacaaggacctcaaaatgttcaggtggaagtcttatctcccagttgttggatccattgttgtgtgcccagtggaagcattcctctccatgaggaccaaaatctctaaactagcagagctcaaagctgttgaggagagaagcaattattcaagttactgtgtgtaa

SEQ ID NO: 116207 - DNA, 416 bp, Homo sapiens
cgacccctgaacgtgactttgccacctctcacccacaaagcagagccccttccataaggaagccacaggcacttaaggcatccatgtgccaacataccgagttttaaatctgttacagatttacagacccttcagtctggtccccccggattaatccaaactatatctcagattcccctgacaaacaccccattctaatgaggctgacctcccgttcccctgacaaacaccctgttccaatgaggccgatctcctgggcacctgtgatcagaccatttccatttcctcctccatccctttgctcaaattctttcgttcctctgcaatgtcctttcttcttccttaaagtcagaagcacagtcataccccacctttctacaccattgtccttgactcctttgatgactgtgtctttt

SEQ ID NO: 116208 - DNA, 701 bp, Homo sapiens
  misc_feature (1)...(701): n = a,t,c or g
tgtgaaagcccaanacaaggaattttnggcaaaagaaacagacaacagcctgaattttgttttcaaactagaacccagttgatgttcagaatggattaaaggagaataggtgcttgggacaacgggaaaataccaactgttaatcctgaccttctagggcagcacaccaacacttggatgtgtatattcatcacctggcgattccgttacagtagaagatatgctacagcaggcctgggtggaatccaagagtcagcatgtccaacaagccccaggtgatgccaatgttgcaggctctcagacaaccccgagtcaagagggtctgggggaaagcagatggggctctgagctcaggcagagaccgtgaggaggggaggatggactatgttccagagaaaatacactgtcttgccactcttgtctttctccctcactgtatcagaagtaggtccgaagcaggaaggagggggacgaaggagtcagtgggagcagatgagtaaaaagcacctgcctttggtatccttcgttgatctgagatgcattatccgagcccgggaccacggaaaagccgccagtttcccctaaccagtgagatgtgcctgctggatttttcctgcagctctggcccttgactacatcgacttgagggatgcccttgactgcctgtcagcagggcctgcatcagacgcctcttcacgaaa

SEQ ID NO: 116209 - DNA, 1034 bp, Homo sapiens
cgggcccccagccctgagagccttctgccttcccgctcctgcccagcaaactccactcacctctcacgctgtcatttcctccaggagatcttttctaagttgaagccttctgtccaagacactcccataatgatgaatctaaccatcctcccttcctagaggggctcatggagaacagaacatggctgccctgcctggatcccttcagagcctcaggcccacccagctcaggaccctgcctaagagcaggcacttgataaacgcctgttgaatgaatgaatacatgagccatggtgtccagcgagagaacactgctgccccagaagaggtgcgtgcggtggggagggggtggagactgggggacaggaacagtgacaacaggggcccagtcttgggtggtggtcacagctcgagggccaccagaagtcttcccagcagacggggccatgcacaaccgtgtcacagcacatgcctcagaaatcatgttgctgacagcagtcagcgtcaagccacagtcagcgtctacacgtgcccccgcttctcaggctttgaacctgaatcaccccttctgtccagaggaagccatccacaaagttggagcatcaagggcagaagaatttgcccatcttctgatagggcagaagatgacgggaggacagccacacatgttccaaactgctctcagcttccagggcagcacaccaacacttggatgtgtatattcatcacctggcgattccgttacagtagaagatatgctacagcaggcctgggtggaatccaagagtcagcatgtccaacaagccccagctctggcccttgactacatcgacttgagggatgcccttgactgcctgtcagcagggcctgcatcagacgcctcttctgcaccccctttctccttccaaaatgcgaacatggctcatcaaaaggagcgagagagtcagaagcacagtcataccccacctttctacaccattgtccttgactcctttgatgactgtgtcttttattatttgcaccacacagtttag

SEQ ID NO: 116210 - DNA, 834 bp, Homo sapiens
atggctcttccatctcccaaacgtgtcatgttggtctgcacccagtcagcaggaaagggtaagagtggaggatcttgcaggggagcctttgggaccaagcctgggatgctccccacttctgttcatagtccactggtcagactcagtcacaagccagcttccacctatcgggagccggggcagcagggagcccaggacatttctgtagtcatggacccaggaagaacaggaaatggatttggtgaacacatggttgagtctctaccacacacagaacagctgtgttcctggaaattcccagattttgccccaagcttctctcttgtgaccgatgccccgatctggtgctggacccctgcctgtgttactgagttctgctcttctgtgtctctgctcgctgaccccctgtgcaagccgacctccacatgccagatttcccactggagccctctgaacataacctcacctgccagcccagtcctacacccctggtgctcccctcctcatccagaagctgatcttgatgacatgattgattgtccctgtggatccttcccctttatgctttccatatcccccaactgctcagagattgaccgcgtgccaatgcaggcagaagggacacgggttaaaagctgccaaggcccaggctctctgtgtagtgaagttagatgccctgctcaggatgtgttgaattgggcaaaaatccgaacccacatgaaagaacagagagctattcttacaaaacagcaggtggattgtattcaggaggagttccaggagttgctgcaggaagagagaaattccaggaggaaaggagggagactatactag

SEQ ID NO: 116211 - DNA, 7863 bp, Homo sapiens
atgaagccgcggaccctcacggtgagagttacagctcttaaggtggcgcgtctcgagtctgtcccttctgatgttcagatgtgttcggagtttcttccttctgactcagcagcccagctggcttcacccagtggatctcgcaccggggctgcaggtggagctgcctaccagtcctgtgccgtgctcccgcactcctcagccctttgggtggtcgatgggactaggtgccgtggagcagggggcagtgctcatcagggaggctcagccacacaggagcccacggagcgggtggaaggctcaggcatggcgggctgcaggtcccgagtcctgccccactggaaggcagctaatgttctgggaatgtcagtggaatctgctcctgctgtggaggaagagaagggagaagagttggaacagaaggagaaagagaaggaagaagatacttcaggcaatactacacattcccttggtgctgaagatactgcctcatcacagttgggttttggggttctggaactctcccagagccaggatgttgaggaaaatactgtgccatatgaagtggacaaagagcagctacaatcagtaaccaccaactctggttataccaggctgtctgatgtggatgctaatactgcaattaagcatgaagaacagtccaacgaagatatccccatagcagaacagtccagcaaggacatccctgtgacagcacagcccagtaaggatgtacatgttgtaaaagagcaaaatccaccacctgcaaggtcagaggacatgccttttagccccaaagcatctgttgctgctatggaagcaaaagaacagttgtctgcacaagaacttatggaaagtggactgcagattcagaagtcaccagagcctgaggttttgtcaactcaggaagacttgtttgaccagagcaataaaacaggagtggtgaaaggacataggaaggagtctggggaactgtactacagcattgaaaaagaaggccaaagaaagtggtataagcgaatggctgtcatcctgtccttggagcaaggaaacagactgagagagcagtatgggcttggcccctatgaagcagtaacacctcttacaaaggcagcagatatcagcttagtagcagcagcacaacccctacccgaaagatcacagaaagtcctcgtgcctccattgggagttctctcaggcaaaagaaaacttatcacttctgaagaggaacggtcccctgccaagcgaggtcgcaagtctgccacagtaaaacctggtgcagtaggggcaggagagtttgtgagcccctgtgagagtggagacaacaccggtgaaccctctgccctggaagagcagagagggcctttgcctctcaacaagaccttgtttctgggctacgcatttctccttaccatggccacaaccagtgacaagttggccagccgctccaaactgccagatggtcctacaggaagcagtgaagaagaggaggaatttttggaaattcctcctttcaacaagcagtatacagaatcccagcttcgagcaggagctggctatatccttgaagatttcaatgaagcccagtgtaacacagcttaccagtgtcttctaattgcggatcagcattgtcgaacccggaagtacttcctgtgccttgccagtgggattccttgtgtgtctcatgtctgggtccatgatagttgccatgccaaccagctccagaactaccgtaattatctgttgccagctgggtacagccttgaggagcaaagaattctggactggcaaccccgtgaaaatcctttccagaatctgaaggtactcttggtatcagaccaacagcagaacttcctggagctctggtctgagatcctcatgactggtggtgcagcctctgtgaagcagcaccattcaagtgcccataacaaagggattctctcctggaacattgacctgtcatcctttgacttgaaccaacagttgagactcttcattacccggcacctagctcacttctcctcagaggtcaaagcatttttatttaggctgcacaggtttcagggtttctggttcctgcttcggcttagccaacagatctccagggcagagcagaatcttggtacttacatgatgatgggcaccatcaaatccagagtggaaggaggggctcctgaatttactgctacaagatcaagttgtactctgagatttggcccagatcaaagctcacataatgcagtttcccattctgctgggagaatagtagagaatttcctggaaaaacccacacagctcaagacagccacagccccacccctgctggctcctctttcagctgtccccacaaacaacagtcagcccagagcagctgcagacactgcccctccctccagccttctgttaccccacagagccaagcaaaagcactggagctcagacgtcgtgaaggcaaagaaacagttaagtctccagtgcctcgtcacggaccagcccctcttccccgccctggcgccgccctcctcatcaagcacccccctcccccccccaccgcccgccccactcccacctttaagtgctgcagactcttccctgaagctgccggctgaggccggagctgccgcctccatgagaggcttcctcctacaccccagggtaagaaccgaaccaaagggcttggcatgtgggggccagaggaccctttgccaccagagtgagatcctagagaccatcatcctggtaaatcccagtgcagacagcatcagctctgaggttcatcatcttcttagcagctcatcagcttataaactactaatcttgagtgggcaaagtttagagcctgggggagacctcatcctacagagtggcacctactcatatgaaaactttgcccaggtccttcacaaccccgagatttcccaattgctcagcaatagagaccctgggatacaggccttccttaccgtgtcctgcttaggggaaggtgattggagccacctgggattatccagttcccaagagaccctgcacctccggctaaaccctgagcccactctgcccaccatggacggcgtggctgagttctccgagtatgtctctgagactgtggacgtgccatccccatttgacctactagagccccccacctcagggggcttcctcaagctctccaagccttgttgctacatcttcccaggtggtcgtggggactctgccctctttgctgtcaatggtttcaacatcctggtggatggtggctctgatcgcaagtcctgtttttggaagctggtacggcacttggaccgcattgactcggtgctactcacacacattggggcagacaacctgccaggcatcaatggactactgcagcgcaaagtggcagagctagaggaggagcagtcccagggctctagcagttacagcgactgggtgaagaaccttatctctcctgagcttggagttgtctttttcaacgtgcctgagaagctgcggcttcctgatgcctcccggaaagccaagcgtagcattgaggaggcctgcctcactctgcagcacttaaaccgcctgggcatccaggctgagcctctatatcgtgtggtcagcaataccattgagccactgaccctcttccacaaaatgggtgtgggccggctggacatgtatgtcctcaaccctgtcaaggacagcaaggagatgcagttcctcatgcaaaagtgggcaggcaatagtaaagccaagacaggcatcgtgctgcccaatgggaaggaggctgagatctccgtgccctaccttacctctatcactgctctggtggtctggctaccagccaatcccactgagaagattgtgcgtgtgctttttccaggaaatgctccccaaaacaagatcttggagggcctagaaaagcttcggcatctggacttcctgcgttaccctgtggccacgcagaaggacctggcttctggggctgtgcctaccaacctcaagcccagcaaaatcaaacagcgggctgatagcaaggagagcctcaaagccactaccaagacggccgtgagcaagttggccaaacgggaggaggtggtagaagagggagccaaggaggcacgttcagagctggccaaggagttagccaagacagagaagaaggcaaaagagtcatctgagaagcccccagagaagcctgccaagcctgagagggtgaagacagagtcaagtgaggcactgaaggcagagaagcgaaagctgatcaaagacaaggtagggaaaaagcaccttaaagaaaagatatcaaagctggaagaaaaaaaagacaaggagaaaaaagagatcaaaaaggagaggaaagagctcaagaaggatgaaggaaggaaggaggagaagaaggatgccaagaaggaggagaagaggaaagataccaaacctgagctcaagaagatttccaagccagacctaaagccctttactcctgaggtacgtaagaccctctataaagccaaggtccctggaagagtcaaaatagacaggagccgtgctatccgtggggagaaggagctgtcttctgagccccagacacccccagcccagaagggaactgtaccactcccaaccatcagtgggcacagggagctggtcctatcctcaccagaggacctcacacaggactttgaggagatgaagcgtgaggagagggctttgctggctgaacaaagggacacaggactaggagataagccattccctctagacactgcagaggagggacccccaagtacagctatccagggaacaccaccctctgttccagggctgggacaagaagaacatgtgatgaaggagaaagagcttgtcccagaggtccctgaggaacaaggcagcaaggacagaggcctagactctggggctgaaacagaggaagagaaagatacctgggaggaaaagaagcagagggaagcagagaggctcccagacagaacagaagccagagaggaaagtgaacctgaagtaaaggaggatgtgatagaaaaggctgagttagaagaaatggaggaggatgagacaatccctggctactcagagactgagcagaccatctcagatgaggagatccatgatgagccggaggagcgcccagctccacccagatttcatacaagtacatatgacctgcccgggcctgaaggtgctggcccattcgaagccagccaacctgccgatagtgctgttcctgctacctctggcaaagtctatggaacgccagagactgaactcacctaccccactaacatagtggctgcccctttggctgaagaggaacatgtgtcctcggccacttcaatcactgagtgtgacaaactttcttcctttgccacatcagtggctgaggaccaatctgtggcctcacttacagctccccagacagaggagacaggcaagagctccctgctgcttgacacagtcacaagcatcccttcctcccgtactgaagctacgcagggcttggactatgtgccatcagctggtaccatctcacccacctcctcactggaagaagacaagggcttcaaatcaccaccctgtgaggacttctctgtgactggggagtcagagaagagaggagagatcatagggaaaggcttgtctggagagagagctgtggaagaggaagaggaggagacagcaaacgtagagatgtctgagaaactttgcagtcaatatggaactccagtgtttagtgcccctgggcatgccctacatccaggagaaccagcccttggagaagcagaggagcggtgccttagcccagatgacagcacagtgaagatggcttctcctccaccatctggcccacccagtgccacccacacaccctttcatcagtccccagtggaagaaaagtctgagccccaagactttcaggaggcagactcctggggagacactaagcgcacaccaggtgtgggcaaagaagatgctgctgaggagacagtcaagccagggcctgaagagggcacactagagaaggaagataaagataaagcaatagtctttgagattatggaggcaggagagcccacaggcccaattctgggagcagaagcccttcccggaggtttgaggactttaccccaagaacctggcaaacctcagaaagatgaggtgctcagatatcctgaccgaagcctctctcctgaagatgcagaatccctctctgtcctcagcgtgccctccccagacactgccaaccaagagcctacccccaagtctccctgtggcctgacagaacagtacctacacaaagaccgttggccagaggtatctccagaagacacccagtcactttctctgtcagaagagagtcccagcaaggagacctccctggatgtctcttctaagcagctctctccagaaagccttggcaccctccagtttggggaactaaaccttgggaaggaagaaatggggcatctgatgcaggccgaggacacctctcaccacacagctcccatgtctgttccagagccccatgcagccacagcgtcacctcccacagatgggacaactcgatactctgcacagacagacatcacagatgacagccttgacaggaagtcacctgccagctcattctctcactctacaccttcaggaaatgggaagtacttacctggggcgatcacaagccctgatgaacacattctgacacctgatagctccttctccaagagtcctgagtctttgccaggccctgccttggaggacattgccataaagtgggaagataaagttccagggttgaaagacagaacctcagaacagaagaaggaacctgagccaaaggatgaagttttacagcagaaagacaaaactctggagcacaaggaggtggtagagccgaaggatacagccatctatcagaaagatgaggctctgcatgtaaagaatgaggctgtgaaacagcaggataaggctttagaacaaaagggcagagacttagagcaaaaagacacagccctagaacagaaggacaaggccctggaaccaaaagacaaagacttagaagaaaaagacaaggccctggaacagaaggataagattccagaagagaaagacaaagccttagaacaaaagaatacagccctggaacagaaggacaaggccctggaaccaaaagataaagacttggaacaaaaggacagggtcctagaacagaaggagaagatcccagaagagaaagacaaagccttagatcaaaaagtcagaagtgttgaacataaggctccggaggacacggtcgctgaaatgaaggacagagacctagaacagacagacaaagcccctgaacagaaacaccaggcccaggaacaaaaggataaagtctcagaaaagaaggatcaggccttagaacaaaaatactgggctttgggacagaaggatgaagccctggaacaaaacattcaggctctggaagagaaccaccaaactcaggagcaggagagcctagtgcaggaggataaaaccaggaaaccaaagatgctagaggaaaaatccccagaaaaggtcaacgccatggaagagaagttagaagctcttctggagaagaccaaagctctgggcctggaagagagcctagtgcaggagggcagggccagagagcaggaagaaaagtactggagggggcaggatgtggtccaggagtggcaagaaacatctcctaccagagaggagccggctggagaacagaaagagcttgccccggcatgggaggacacatctcctgagcaggacaataggtattggaggggcagagaggatgtggccttggaacaggacacatactggagggagctaagctgtgagcggaag

SEQ ID NO: 116212 - DNA, 1320 bp, Homo sapiens
atggctcccctcagttcgggcgaggctgcggaattgccagacagtacttatcagggatacatcttaactagaagcttcttccggcgccgaggcaaccgcctcgccccaccaatgggtcccccagagaccccacccccgctcaagtctaagtggaagctcccgctggcagcagccaatgaactgcacctgccgccggcctttaagagccgcgcgcactctgcctgcagcggaagctgccggactaacactccgcgggtgtttccatggagaccgaggccgagcctgcgcggccttacggcgttggccatggagacaactccggggctggggcttcgaagtcccggcgccccccttgctcagaacccccgcggagcttgtgggccaagcccggagccgcgctgtcctggaaaagtgagtatggctgagtttctcacagaatttttggaaattcctcctttcaacaagcagtatacagaatcccagcttcgagcaggagctggctatatccttgaagatttcaatgaagcccaggtagatgtgttggagtctcagttctcccagctgcttcatcagatcaattctacccgagactttgaaagcatccgattggctcatgaccacttcctgagcaatttgctggctcaatcctttatcctattgaaaccttccccagtggaagaaaagtctgagccccaagactttcaggaggcagactcctggggagacactaagcgcacaccaggtgtgggcaaagaagatgctgctgaggagacagtcaagccagggcctgaagagggcacactagagaaggaagagaaagttcctcctcccaggagcccccaggcccaggaagcacctgtcaacattgatgagggacttacaggctgtaccattcaactgttgccagcacaggataaagcaatagtctttgagattatggaggcaggagagcccacaggcccaattctgggagcagaagcccttcccggaggtttgaggactttaccccaagaacctggcaaacctcagaaagatgaggtgctcagatatcctgaccgaagcctctctcctgaagatgcagaatccctctctgtcctcagcgtgccctccccagacactgccaaccaagagcctacccccaagtctccctgtggcctgacagaacagtacctacacaaagaccgttggccagaggtatctccagaagacacccagtcactttctctgtcagaagagagtcccagcaaggagacctccctggatgtctcttctaagcagctctctccaaaagccttggcacccttccagttggggaactaa

SEQ ID NO: 116213 - DNA, 2815 bp, Homo sapiens
cttccgctcacagcttagctccctccagtatgtgtcctgttccaaggccacatcctctctgcccctccaatacctattgtcctgctcaggagatgtgtcctcccatgccggggcaagctctttctgttctccagccggctcctctctggtaggagatgtttcttgccactcctggaccacatcctgccccctccagtacttttcttcctgctctctggccctgccctcctgcactaggctctcttccaggcccagagctttggtcttctccagaagagcttctaacttctcttccatggcgttgaccttttctggggatttttcctctagcatctttggtttcctggttttatcctcctgcactaggctctcctgctcctgagtttggtggttctcttccagagcctgaatgttttgttccagggcttcatccttctgtcccaaagcccagtatttttgttctaaggcctgatccttcttttctgagactttatccttttgttcctgggcctggtgtttctgttcaggggctttgtctgtctgttctaggtctctgtccttcatttcagcgaccgtgtcctccggagccttatgttcaacacttctgactttttgatctaaggctttgtctttctcttctgggatcttctccttctgttctaggaccctgtccttttgttccaagtctttatcttttggttccagggccttgtccttctgttccagggctgtattcttttgttctaaggctttgtctttctcttctggaatcttatccttctgttccagggccttgtctttttcttctaagtctttgtcttttggttccagggccttgtccttctgttctagggctgtgtctttttgctctaagtctctgcccttttgttctaaagccttatcctgctgtttcacagcctcattctttacatgcagagcctcatctttctgatagatggctgtatccttcggctctaccacctccttgtgctccagagttttgtctttctgctgtaaaacttcatcctttggctcaggttccttcttctgttctgaggttctgtctttcaaccctggaactttatcttcccactttatggcaatgtcctccaaggcagggcctggcaaagactcaggactcttggagaaggagctatcaggtgtcagaatgtgttcatcagggcttgtgatcgccccaggtaagtacttcccatttcctgaaggtgtagagtgagagaatgagctggcaggtgacttcctgtcaaggctgtcatctgtgatgtctgtctgtgcagagtatcgagttgtcccatctgtgggaggtgacgctgtggctgcatggggctctggaacagacatgggagctgtgtggtgagaggtgtcctcggcctgcatcagatgccccatttcttccttcccaaggtttagttccccaaactggagggtgccaaggctttctggagagagctgcttagaagagacatccagggaggtctccttgctgggactctcttctgacagagaaagtgactgggtgtcttctggagatacctctggccaacggtctttgtgtaggtactgttctgtcaggccacagggagacttgggggtaggctcttggttggcagtgtctggggagggcacgctgaggacagagagggattctgcatcttcaggagagaggccttcggtcaggatatctgagcacctcatctttctgaggtttgccaggttcttggggtaaagtcctcaaacctccgggaagggcttctgctcccagaattgggcctgtgggctctcctgcctccataatctcaaagactattgctttatctttatcttccttctctagtgtgccctcttcaggccctggcttgactgtctcctcagcagcatcttctttgcccacacctggtgtgcgcttagtgtctccccaggagtctgcctcctgaaagtcttggggctcagacttttcttccactggggactgatgaaagggtgtgtgggtggcactgggtgggccagatggtggaggagaagccatcttcactgtgctgtcatctgggctaaggcaccgctcctctgcttctccaagggctggttctcctggatgtagggcatgcccaggggcactaaacactggagttccatattgactgcaaagtttctcagacatctctacgtttgctgtctcctcctcttcctcttccacagctctctctccagacaagcctttccctatgatctctcctctcttctctgactccccagtcacagagaagtcctcacagggtggtgatttgaagcccttgtcttcttccagtgaggaggtgggtgagatggtaccagctgatggcacatagtccaagccctgcgtagcttcagtacgggaggaagggatgcttgtgactgtgtcaagcagcagggagctcttgcctgtctcctctgtctggggagctgtaagtgaggccacagattggtcctcagccactgatgtggcaaaggaagaaagtttgtcacactcagtgattgaagtggccgaggacacatgttcctcttcagccaaaggggcagccactatgttagtggggtaggtgagttcagtctctggcgttccatagactttgccagaggtagcaggaacagcactatcggcaggttggctggcttcgaatgggccagcaccttcaggcccgggcaggtcatatgtacttgtatgaaatctgggtggagctgggcgctcctccggctcatcatggatctcctcatctgagatggtctgctcagtctctgagtagccagggattgtctcatc

SEQ ID NO: 116214 - DNA, 8643 bp, Homo sapiens
  misc_feature (1)...(8643): n = a,t,c or g
gggggagacctcatcctacagagtggcacctactcatatgaaaacttggcccaggtccttcacaaccccgagatttcccaattgctcagcaatagagaccctgggatacaggccttccttaccgtgtcctgcttaggggaaggtgattggagccacctgggattatccagttcncaagagaccctgcacctccggctaaaccctgagcccactctgcccaccatggacggcgtggctgagttctccgagtatgtctctgagactgtggacgtgccatccccatntgacctactagagccccccacctcagggggcttcctcaagctctccaagccttgttgctacatcttcccaggtggtcgnggggactctgccctctttgctgtcaatggtttcaacatcctggtggatggtggctctgatcgcaagtcctgtttgtggaagctggtacggyacttggaccgcattgactcggtgctactcacacacattggggcagacaacctgccaggcatcaatggactactgcagcgcaaagtggcagagctagaggaggagcagtcccagggctctagcagttacagcgactgggtgaagaaccttatctctcctgagcttggagttgtctttttcaacgtgcctgagaagctgcggcttcctgatgcctcccggaaagccaagcgtagcattgaggaggcctgcctcactctgcagcacttaaaccgcctgggcatccaggctgagcctctatatcgtgtggtcagcaataccattgagccactgaccctcttccacaaaatgggtgtgggccggctggacatgtatgtcctcaaccctgtcaaggacagcaaggagatgcagttcctcatgcaaaagtgggcaggcaatagtaaagccaagacaggcatcgtgctgcccaatgggaaggaggctgagatctccgtgccctaccttacctctatcactgctctggtggtctggctaccagccaatcccactgagaagattgtgcgtgtgctttttccaggaaatgctccccaaaacaagatcttggagggcctagaaaagcttcggcatctggacttcctgcgttaccctgtggccacgcagaaggacctggcttctggggctgtgcctaccaacctcaagcccagcaaaatcaaacagcgggctgatagcaaggagagcctcaaagccactaccaagacggccgtgagcaagttggccaaacgggaggaggtggtagaagagggagccaaggaggcacgttcagagctggccaaggagttagccaagacagagaagaaggcaaaagagtcatctgagaagcccccagagaagcctgccaagcctgagagggtgaagacagagtcaagtgaggcactgaaggcagagaagcgaaagctgatcaaagacaaggtagggaaaaagcaccttaaagaaaagatatcaaagctggaagaaaaaaaagacaaggagaaaaaagagatcaagaaggataggaaagagctccagaaggatgaaggaaggaaggaggataaaaaggatgcccggaaggaggagaagaggaaagattccagccctgagctcaggaagatttccaagccagacctaaagccctttactcctgaggttcgtaagaccctctataaagccaaggtccctggaagagtcaaaatagacaggagccgtgctatccgtggggagaaggagctgtcttctgagccccagacacccccagcccagaagggaactgtaccactcccaaccatcagtgggcacagggagctggtcctatcctcaccagaggacctcacacaggactttgaggagatgaagcgtgaggagagggctttgctggctgaacaaagggacacaggactaggagataagccattccctctagacactgcagaggagggacccccaagtacagctatccagggaacaccaccctctgttccagggctgggacaagaagaacatgtgatgaaggagaaagagcttgtcccagaggtccctgaggaacaaggcagcaaggacagaggcctagactctggggctgaaacagaggaagagaaagatacctgggaggaaaagaagcagagggaagcagagaggctcccagacagaacagaagccagagaggaaagtgaacctgaagtaaaggaggatgtgatagaaaaggctgagttagaagaaatggaggaggtacacccttcagatgaggaggaagaggacgcgacaaaagctgagggtttttaccaaaaacatatgcaggaacccttgaaggtaactccaaggagccgggaggcttttgggggtcgggaattgggactccagggcaaggcccctgagaaggagacctcgttattcctaagcagcctgaccacacctgcaggagccactgagcatgtctcttacatccaggatgagacaatccctggctactcagagactgagcagaccatctcagatgaggagatccatgatgagccggaggagcgcccagctccacccagatttcatacaagtacatatgacctgcccgggcctgaaggtgctggcccattcgaagccagccaacctgccgatagtgctgttcctgctacctctggcaaagtctatggaacgccagagactgaactcacctaccccactaacatagtggctgcccctttggctgaagaggaacatgtgtcctcggccacttcaatcactgagtgtgacaaactttcttcctttgccacatcagtggctgaggaccaatctgtggcctcacttacagctccccagacagaggagacaggcaagagctccctgctgcttgacacagtcacaagcatcccttcctcccgtactgaagctacgcagggcttggactatgtgccatcagctggtaccatctcacccacctcctcactggaagaagacaagggcttcaaatcaccaccctgtgaggacttctctgtgactggggagtcagagaagagaggagagatcatagggaaaggcttgtctggagagagagctgtggaagaggaagaggaggagacagcaaacgtagagatgtctgagaaactttgcagtcaatatggaactccagtgtttagtgcccctgggcatgccctacatccaggagaaccagcccttggagaagcagaggagcggtgccttagcccagatgacagcacagtgaagatggcttctcctccaccatctggcccacccagtgccacccacacaccctttcatcagtccccagtggaagaaaaatctgagccccaagacttccaggaggcagactcctggggagacactaagcgcacaccaggtgtgggcaaagaagatgctgctgaggagacagtcaagccagggcctgaagagggcacactagagaaggaagagaaagttcctcctcccaggagcccccaggcccaggaagcacctgtcaacattgatgaggggcttacaggctgtaccattcaactgttgccagcacaggataaagcaatagtctttgagattatggaggcaggagagcccacaggcccaattctgggagcagaagcccttcccggaggtttgaggactttaccccaagaacctggcaaacctcagaaagatgaggtgctcagatatcctgaccgaagcctctctcctgaagatgcagaatccctctctgtcctcagcgtgccctccccagacactgccaaccaagagcctacccccaagtctccctgtggcctgacagaacagtacctacacaaagaccgttggccagaggtatctccagaagacacccagtcactttctctgtcagaagagagtcccagcaaggagacctccctggatgtctcttctaagcagctctctccagaaagccttggcaccctccagtttggggaactaaaccttgggaaggaagaaatggggcatctgatgcaggccgaggatacctctcaccacacagctcccatgtctgttccagagccccatgcagccacagcgtcacctcccacagatgggacaactcgatactctgcacagacagacatcacagatgacagccttgacaggaagtcacctgccagctcattctctcactctacaccttcaggaaatggggaagtacttacctggggcgatcaccaagccctgaatgaacacattctgacacctgatagctccttctccaagagtcctgagtctttgccaggccctgccttggaggacattgccataaagtgggaagataaagttccagggttgaaagacagaacctcagaacagaagaaggaacctgagccaaaggatgaagttttacagcagaaagacaaaactctggagcacaaggaggtggtagagccgaaggatacagccatctatcagaaagatgaggctctgcatgtaaagaatgaggctgtgaaacagcaggataaggctttagaacaaaagggcagagacttagagcaaaaagacacagccctagaacagaaggacaaggccctggaaccaaaagacaaagacttagaagaaaaagacaaggccctggaacagaaggataagattccagaagagaaagacaaagccttagaacaaaaggatacagccctggaacagaaggacaagaccctggaaccaaaagataaagacttggaacaaaaggacagggtcctagaacagaaggagaagatcccagaagagaaagacaaagccttagatcaaaaagtcagaagtgttgaacataaggctccggaggacacggtcgctgaaatgaaggacagagacctagaacagacagacaaagcccctgaacagaaacaccaggcccaggaacaaaaggataaagtctcagaaaagaaggatcaggccttagaacaaaaatactgggctttgggacagaaggatgaagccctggaacaaaacattcaggctctggaagagaaccaccaaactcaggagcaggagagcctagtgcaggaggataaaaccaggaaaccaaagatgctagaggaaaaatccccagaaaaggtcaaggccatggaagagaagttagaagctcttctggagaagaccaaagctctgggcctggaagagagcctagtgcaggagggcagggccagagagcaggaagaaaagtactggagggggcaggatgtggtccaggagtggcaagaaacatctcctaccagagaggagccggctggagaacagaaagagcttgccccggcatgggaggacacatctcctgagcaggacaataggtattggaggggcagagaggatgtgtccttggaacaggacacatactggagggagctaagctgtgagcggaaggtctggttccctcacgagctggatgtccagggggcccgcccacactacactgakgaacgggaaagcactttcctagatgagggcccagatgatgagcaagaagtacccctgcgggaacacgcaacccggagcccctgggcctcagacttcaaggatttccaggaatcctcaccacagaaggggctagaggtggagcgctggcttgctgaatcaccagttgggttgccaccagaggaagaggacaaactgacccgctctccctttgagatcatctcccctccagcttccccacctgagatggttggacaaagggttccttcagccccaggacaagagagtcctatcccagaccctaagctcatgccacacatgaagaatgaacccactactccctcatggctggctganatcccaccctgggtgcccaaggncagacccctccccnctgcacccctctccccagctcctggtccccccacacctgccccggaatcccatactcctgcacccttctcttggggcacacccgagtatgacagtgtggtggctgcagtacaggagggggcagctgagttggaaggtggnccatactcccccctggggaaggactaccgcaaggttganggggaaagggaagaagaaggtagggctgaggctcctgacaaaagctcacacagntcaaaggtaccagaggccaggaaaagccatgccaccacggagcctgagcagactgagccggagcagagagagcccacaccctatcctgatgagagaagctttcagtatgcagacatctatgagcagatgatgcttactgggcttggccctgcatgccccactagagagcctccacttggagcagctggggattggcccccatgcctctcaaccaaggaggcagctgccggccgaaacacatctgcagagaaggagctttcatctcctatctcacccaagagcctccagtctgacactccaaccttcagctatgcagccctggcaggacccactgtacccccaaggycagagccagggccaagtatggagcccagyctcaccccacctgcagttcccccccgtgctcctatcctgagcaaaggcccaagcccccctcttaatggtaacatcctgagctgcagcccagataggaggtccccatcccccaaggaatcaggncggagtcactgggatgacagcactagtgactcagaactggagaagggggctcgggaacaggcagaaaaagaggcccaatccccaagtcctcctcaccccattcctatggggtcccccacattatggccagaaactgaggcacatgttagccctcccttggnctcacacctggggnctgcccgacccagtctggacttccctgcttcagcctttggcttctcctcattggarrcagctcccccacagstgccctctccagctgaaccccgctcggcaccctgtggctcccttgccttctctggggatcgagctctggctctggctccaggaccccccaccagaacccggtatgatgaatacctggaagtgaccaaggcccccagcctggattcctcactgccccagctcccatcacccagttctcctggggnccctctcctctccaatctgccacgacctgcctcaccagccctgtctgagggctcctcctctgaggctaccacgcctgtgatttcaagtgtggcggagcgcttctctccaagccttgaggctgcagaacaggagtctggagagctggacccaggaatggaaccagctgcccacagsctctgggacctcactcctctgagcccagcacccccagcttcactggacttggccctagctccagctccaagcctgcctggagacatgggtgatggcatcctgccgtgccacctggagtgctcagaggcagccacggagaagccaagccccttccaggttccctctgaggattgtgcagccaatggcccaactgaaaccagccctaaccccccagnccctgccccagccaaggctgaaaatgaagaggctgcggcttnccctgcctgggaacgtggggcctggcctgaaggagctgagaggagctcccggcctgacacawtgctctcccctgagcagccagtgtgtcctrcagggggctccgggggcccacccagcagtgcctctcctgaggtcgaagctgggccccagggatgtkccactgagcctcggccccatcgtggggagctctccccatccttcctgaacccacctctgcccccatccatagatgatagggacctctcaactgaggaagttcggctagtaggaagaggggggcggcgccgggtaggggggccagggaccactggggkkccatgscctgtgactgatgagacacccccnacatcagccagtgactcaggctcctcacagtcagattctgatgtnccgccagaaactgaggagtgtccgtccatcacagctgaggcagccctcgactcagatgaagatggagacttcctacctgtggacaaanctgggggtgtcagtggtactcaccaccccaggcctggccatgacccacctcctctcccacagccagaccnccgcccatcccctccccgccctgatgtgtgcatggctgaccccgaggggctcagytcagagtctgggagagnagagaggctacggnagaaggaaaaggttcaggggcgagtagggcgtagggccccaggtaaggacaagccagtgtcccctgnacggcgtctggntcttcggggaaaacgctcacccacccctggtaaagggtctgnagatcgagtatcccggnccccanctcgatcacgnagtancacaagccaggtcaccccagcagaggaaaaggatggacacagccccatgtccaaaggyctagtcaatggactcaaggcaggaccamtggccttgagttccaagggcagctctggtgcccctgtatatgtggatctcgcctacatcccgaatcattggagtggcaagactgctgacctygacttcttccgtcgagtgcgtgcatcctactatgtggtcagtgggaatgaccctgccaatggcgagccaagccgggctgtgctggatgccctgctggagggcaaggcccagtggggggagaatcttcaggtgaaggtgactctgatccctactcatgacacggaggtgactcgtgagtggtaccaacaaactcatgagcagcagcaacaactgaatgtcctggtcctggctagcagcagcaccgtggtgatgcaggatgagtccttccctgcctgcaagattgagttctga

SEQ ID NO: 116215 - DNA, 475 bp, Homo sapiens
taattatcgtgttctctttttaaacaataattgcttgtttttcttcccaagtatttatgcgctgccagttgagccgattacagaaagggcatgccacagatgaatggtttctgctcagctcccatataccattaaaaggtattgaaccagggtccctgcgtgttcgagcacgatactctatggaaaaaaatcatgccagaagaagagtacagtgaatttaaagagcttatactgcaaaaggaacttcatgtagtctatgctttatcacatgtatgtggacaagaccgaacactactggccagcatcctactgaggatttttcttcacgaaaagcttgaatcgttgttgttatgcacactaaatgacagagaaataagcgtggaagatgaagccactaccctatttcgagccacaacacttgcaagcaccttgatggagcagtatatgaaagccactgcttcacagtttgttcatg

SEQ ID NO: 116216 - DNA, 795 bp, Homo sapiens
atgggtccggaattggagggtcttggtctcactgacttcaagaatgaagccgtggactctcgcgcaggcttggggatgtccgagtgtggggccgcaaaccaagacaaccggaatccagtggcgaaaggcggacaagaccggaccgaaaacaatactatagctgaccgcgcagtgtgcgattacagaaagggcatgccacagatgatggtttctgctcagctcccatataccattaaaaggagctatccctttaatgggtttggctcctggcccggttcagtggggaaccttgtctccacggttatagatctcgcaacgccgggaaaacgtgagattgagggccatcggatcgacaagatatcaagcagcaccaaagccgaagagttctccccaagggaaaaggttccaccaggggtatccagaaattttggcacgagaccgcaaagaggggtgctatacaccccccaagaaaacccacttgacgaacaaaagtcgacccaactcacacaacaagtactgacgaacgtcttcttgagagaggatctgatgggtcctggaccagcaatgaacacatatgactgccccttccagaggcagaacactgagggaatctgcacaactatatcagctaatctgtctgggcctgttgggccagctgaccagcatgtggagaccccagtagccagacacccatggactttgacagctggtgttccacataccaccacagttggaaccgtacatttccagagtgggcatgcagacctcaacatccagcaaagacctcgcagatga

SEQ ID NO: 116217 - DNA, 663 bp, Homo sapiens
atgcagagccttgggaggatctggcaggaagtccacaaaagcaaaactgaggacaaggctgtcctcagactgtgcccatccgtggtcagtccacctccaaatgccttagagattatagcaatcagacttatgagttttgtttcggttactgtgatgagggccactgaggactgctccatggccactttgtgtcagtgcatctctagccctcataacataattagttataacgagatcacactggttcagggtggcccctacatccaacgacaggtatccttacaagaagaggagaggtcacacagagaaaaccttgtgaaggcagaggtggagactgcagctacaagccaaggcatgaacacatacatgggtctcctcttggtacttgctctccttttcctggtcttggctgaaccaagaaatccctcacatactttacccagcaccaccaggaatgctcttcccttagagatcctcgtggtgaattccctcatttccttcaagtctgctcaaatgttacttctcaaacagaattcaaatgcagccattgaagataaaacatttgctgattatgagacaagagaacattgccccagatgtcagattatttatcgccacagagctgaacatcagaaaccaattcacacatcacaatggctgtag

SEQ ID NO: 116218 - DNA, 529 bp, Homo sapiens
atgggagagtttcctaagtggcatatgaccgtcctatgggaacattccgctggtgaaggaagaattcctcaagtgagtactttacttcctttcattcctgctaaaaactttttaataaactttcactcctcctctaaaacttgcttcaggctctccctctgccttatgccccttagtcgaattctttcttctgaggaagcaagaattgaggttgctgcagatccatgtggatttgccgccacgaacatttcttactacctatgtcgtttttccatttcttcctctgcttccagagacacctaaaatatcaggggcagcagaaaaacaagagcctgcgttgtcagacacaggccaagtaggaccaagagtgatttggtgctggcccatggatcatggagctgaggatgagcaaggccagactgaacaccaagcaggcagtccacatgaaacagccattgccaaggacaacgcagaaacacgatccataaatattgcaggcaggaagttagaaatcagaaatgctagatga

SEQ ID NO: 116219 - DNA, 515 bp, Homo sapiens
gtcggttggctctttagcatccctcaggcaccgctggcttcttgccctcggctctcattccaagattaattggaaatgcatcatcaggtgctgccagacctggcttctcttctattctgagaactgatatcctgtggctgacttaccagggtcgtcctagtccccccgcacggtattgggagtggaggcagccccacacggaggcgctgggagactttcctcccagcagtgtcctgtcactgcattccggcccctgcgtttgtaggcagtgatgtcacagagtgccttcatgctcctcgggtctccggttctccccggacctctgtagtcctcattgccaaagttgtaccccctggggagtgcaccctgcctggcatttctggaggttcgggcggttccggggctctgcaggagcctccaggcgtgataaagagcgctgccggcactcccggggtctcggcctctttggggcccattgccaagccccttccctcctcgtgctcccgctccgcgtt

SEQ ID NO: 116220 - DNA, 729 bp, Homo sapiens
atgatggcacttctcattcaagctgtcctgcccccgcctccacgcctgctccccgctccgtccacagccacggcagcgagcaagcagaaggcacaggatgctttcagggaactcagagctcaagcctcgctgctttgggctgccatccccagcctcgctgagtcaaatccttcagtccctctcctgcagcacttctgctgctggaatttctcatggatgaacgtgcttctctggataaagtcttttgccttcaccacgagggcacagactggagctgtcacaggatatgttactatctgcctggggataaaaaccccatcaaggcacgacagcaaccgcaggtgtgaggaaattcaatctctaatggcaaaggctcaaacacaaaagctagaagctcacgtggtggctacactccagcagctccaggatactttgaagcaactggatttccgctgtatctcacaatcagtgaggcaagccattctcattttccacattcaggattttccatgtcttagtgatggcatttctggaatattcctggatctgacccagcctctgaaattagtcctcatgttctccccaccagacttaaagtccatgaagaaaggcagtgatgtcacagagtgccttgatgctcctcgggtctccggttctccccggacctttgtagtcctcattgccaaagttgtaccccctgtggagtgcaccctgcctgcatttctggag

SEQ ID NO: 116221 - DNA, 720 bp, Homo sapiens
atggttaccttaacagcaggttgggatgaacttgagtgccatcgcgtttataatttcttatgcgaactgactaatctctgccgcaagatacaaatggctgtctgcagcaaaccaggacaggtggtttggcaggaaatgatagaagaacctacagatgaattcagtctgaaaggtttggctgatgccattaagttactatatgacgctagcactaaagagtggacagcagatgatgttatcagtcttgtagatgaactatcagtggttccccgtgagtggcttctagagaataatgcacgtctcctaatgctaagtggaaacaacatctgtttcagtttcatggctagtaaagctgtgaatggacgcaccattgaactggcaaggctcgtagtctttttggctttggtgtgtgagaaagaactgtactgcatggattggacagttaaaatgatgcaaaaagtctgcaaagtctttagcactccagtggaaagaaagaacttcctgcagaatgtggcaaatgcatttgcatgtgttataatggaaatgctgcaatcaattatgtctggctccggccgcagctccaggccactagagcagatagataatgtaggacagaatgaccaggcctatgatggcaaagaacatcaggatgaaaatatccagcattgtggattcctaggccgaccaagcccctggattctggtgaaccgtgagctgtga

SEQ ID NO: 116222 - DNA, 909 bp, Homo sapiens
atttgagcagttctccgcggtaactttaataagtctccatttcaactttctgttctcaatcccatctacagctcaaacatatgcagtatctgccagccctgtcccatgaattcctgaagtcccagccaagtgcctctcagctcaaaaagccccttgcttgccaggggtcagccatgtctggaaggctctgaaagaggtctgctggacagtaggactgcttctgtggatgagaggcctcttgttggactggaagagaccaggagccgagattaacagcagaagccaaaaatcccaccggtgcgtcagcaagcagggcactcggccattcagctccatccttccttttgagctgttctccagcaggctccggccgcagctccaggccactagagcagatagataatgtaggacagaatgaccaggcctatgatggcaaagaacatcaggatgaaaatatccagcattgtggattcctaggccgaccaagcccctggattctggtgaaccgtgagctgtgagcacggaggttgcagtcggtggagagaaatggctccccttcactccacagctcagccctggttctttcccctccccctcccaggggcctgagactgaaggatgctgcagctccatccagcagcttcctgcccccccaccaaccacagccaaccaatcacaaagcctgggggtggatagccaaggagatgccagatttagacccacagaaccgcagaatcaaaggggctcaatttctccccaggaacccaatcccacccctttgtatctaaatggagcctgcatgctctggatgtaggaggagataggatcctacccagctcccccaagagtgaatcctcctgactgccttcttcgcgtttcccggacgcgtgggtcgagtcgggcaacggg

SEQ ID NO: 116223 - DNA, 216 bp, Homo sapiens
tcaagtctgctgaaactgtgcccacagccgccccttcccccaggtgctctgtcccaggcagatgaaagatttatctataagcccctgattggggctgctgcctttctttcggagatgccgcacacagctgttggcaggcccagggccttgctggcagctggccagaggtatcagttccttgccatgtgggcctttccgtgaggctgctgacagcat

SEQ ID NO: 116224 - DNA, 312 bp, Homo sapiens
tttttttttttttttttttgattaataaagaggtttatttggctcactgttctgcaaaatgtacaaaaatcatggtgcagcatctgcttctgctaagggtctcaggctgcttccactcatggcagatgatgaagggagagccagtgtatgcagacatcacaaaaattaacagagcgatagctcactcacccctcaatccagagagggcattaatttattcatgagggatcttcacacattcttttatgttcacaagatttctcatcaatatgagctctctggtgttgagtaaatttttcgtacacagtgaag

SEQ ID NO: 116225 - DNA, 393 bp, Homo sapiens
  misc_feature (1)...(393): n = a,t,c or g
atgaacatgatttttaacagacttgttccaatgaactgttatagagatggtccccaacaatgacaactaacaatttctcagctttatgatggcacaaaagtgatatggcgctatagcttggatatttgtccctnnnnnnnnnnnnnnnnnnnnnnnnnnnnnnnnnnnnnnnnnnnnnnnnnnnnnnnnnnnnnnnnnnnnnnnnnnnnnnnnnnnnnnnnaaattaatgccctctctgggngncnngnnngnnnanggnagcccancaaanannnntggggaaagccnnnnnnnnnnnncggttaattatcgcggcaaccgggggcgtggggaagaggnnnnnnnnnngggggggcacattaaaaatctggggcgggaaaccaaaagaaaag

SEQ ID NO: 116226 - DNA, 745 bp, Homo sapiens
tctgtatttgttccatcttgcttttacagatcaatacaaataggtacctaaacctcctaaacgaaacatccaagatggtggaaaaaaggccatatgaacagttctttcctcacctactatcaacaaacagtaaattaaacattcctaactgcagcctccttttgtaaaatttataaccatttatcttttgagtgtgacatgatactagatgtatgataattacatgttttgtgtatcagtatgaacatgatttttaacagacttgttccaatgaactattatagagatggtccccaacaatgtcaactaacaatttctcagctttatgatggtacaaaagtgatatgttgctatagtttggatatttgtccctccaaatctcatgttgaagtttgatctcagtgttggaggtggggcctaatggaaggtgtttgggtcatggtggaagatccctcatgaataaattaatgccctctctggattgaggggtgagtgagctatcgctctgttaatttttgtgagagctggttgttcaaaagaacctggcacctcctccctcaccctcttgttttctctcttgccatgtgatgtctgcatacactggctctcccttcatcatctgccatgagtggaagcagcctgagacccttagcagaagcagatgctgcaccatgattcttgtacattttgcagaacagtgagccaaataaacatctttattaatccaaaaaaaaaaaaaaaaaaa

SEQ ID NO: 116227 - DNA, 552 bp, Homo sapiens
gaacagggcaggcctgccacactgttaccgttagctgcccctgaagaaaagcctccctagggaaaggtggccagaagaagccagagagctgaaggagataaagactgaagccatgctgcccatctgggaaggatgttcctaagcgtatgccttggtgtgtgggggccacttggctggagcagcatgaaggtatgggacagtgacctgtacttgtggggaggtgggatcacccaggaacctcaaagaccagagtaaagactttgcttttgccttgcattctcagcgagagaaccagccacgaggggattcccgctgaaagagtaacacaacctgccttttgttttagcacagtgctgtgcagaacttcctgcaacgccgacacgttctacgttctgtgctgtctgcacagtgactatgaaccagacgtggctatttaagttaattaaaataaaatttaaaattcagtgcttccagtccagcggccacatttcaagggctgatgtggctgacggctatcacactggacagtgcggtgtcagagaatcagtctga

SEQ ID NO: 116228 - DNA, 268 bp, Homo sapiens
cgagagaaccagccacgaggggattcccgctgaaagagtaacacaacctgccttttgttttagcacagtgctgtgcagaacttcctgcaacgccgacacgttctacgtctgtgctgtctgcacagtgactatgaaccagacgtggctatttaagttaattaaaataaaatttaaaattcagtgcttccagtccagcggccacatttcaagggctgatgtggctgacggctatcacactggacagtgcggtgtcagagaatcagtctga

SEQ ID NO: 116229 - DNA, 462 bp, Homo sapiens
atgatcagtccatcagtttggagaagaggcttctggaaacatgggcagaaacagaaagaccagttaggaggctttgcaatgatccaggcgagagaggacagggtcctgagtgaaggtgataccagcagaggagcaaaggggtgttggaggatattgctggattctggttatcttttgaaggtagagtcaacgggatttgttgatagactagataacattggaaaggccggtccccgcctgggacttgggtccaaagttctggggcctaccctggactccctgcggaacgccagttcggggcagaagtcagaggacatgttttctcccggttggggatctagacataaacaagtgaaaatcatgaatttggggaaattccaggaacctgagccagaagaatgctgctctatgcagcagttggaaaacagttttgtggacagattacaagtctggcctaagtga

SEQ ID NO: 116230 - DNA, 531 bp, Homo sapiens
atgttcaagtacgctaataagcaacatactgggaaaagaattggctgtggcatacaacgcacatcatttcagtatgctacctcctgccacttaagttttgtgacattcaatgtgttcttcatagccaactcaaagaataggatcttagataacagaaaagggcagctgggaactagctgcctgcccctttcagtccttgagggaactcgcccctttgccctggcctgtgtggtgttaaagctctgtttctcgggcacctcctcctccaaaccccggaccagccgcccagcgccgtcagagcagccccgactagcctcctctcctctcagccgtctgactcctctccccagtctgtagtcccctcaatttgcatcctttagccccgcttggaaagagaccggagagaaatttgcccactacccccgcgagaagacccacttgtcagccgtgtctcggggtggggggcactgcaaggcctggcgctgttttgtgcacgttaaatgcccagcagtatctcccagaccggcaacc

SEQ ID NO: 116231 - DNA, 3213 bp, Homo sapiens
atgggggtagatttccactttgatgctgttctcatggtagtcaagctggcttttaagaagctttctgtctgcctgttcagtgtggccctcactggaggaatgagaagtgcctacacacttagactgcagggtctgagaattttgagggtcatccatgtaggcagctcagcagacgcagcaggcctgagggctgccgttgcagaaatgccccaaggaatggcactcacatgtcgggcaactgaccctcagagcaacctttccacagcagccgtcatcttcagcgcacgcattcagtggccggagcctcaacagaaagctcctttagttcctcctcctccaccgccaccaccaccaccaccgccacctttgccagaccccacacccccggagccagaggaggagatcctgggatcagatgatgaggagcaagaggaccctgcggactactgcaaaggtgatgtgccaagcatggtgagtattaaagtcagcatcagtaaggtcattagagatagtaaggttccctccttatacccgtgccagccccccccaaatttggtgggtagaatcagtattgcgaaaatgaccatactgccgaaagcagtctacaaattcggtgcaattcccatcaaagtactaccgtcattcttcacagaactagaaaaaaccatcctaaaattcacatggaaccgaaaaagagtctgcatagtcaaagcaagactaagcaaaaagagaaaatttgaaggcatcacattacctgatttcaaactgtactctggagcagctgctctggacagggcaggacctactgttgatgcagcagcagctgctggagcaggtggatatcatccagtgaaaattggagacctcttcaatggccggtatcatgttattagaaagcttggatgggggcacttctctactgtctggctgtgctgggatatgcagatggatggccttagtcgtaatgtgtccgtttccttctggtgggttcttggtctcactgacttcaagaatgaagctgcggaccttgcagtgagtgttacagctcttaaaggtggcgcatccagagttgtttgttcctcccggtgggttcgtggtctcgctgacttcaggaatgaagccacagaccctcatgatgtctgcatggtcttcgaagtacttggccaccatctcctcaagtggatcatcaaatccaactatcaaggcctcccagtacgttgtgtgaagagtatcattcgacaggtccttcaagggttagattacttacacagtaagtgcaagatcattcatactgacataaagccggaaaatatcttgatgtgtgtggatgatgcatatgtgagaagaatggcagctgaggccactgagtggcagaaagcaggtgctcctcctccttcagggtctgcagtgagtacggctccacagcagaaacctataggaaaaatatctaaaaacaaaaagaaaaaactgaaaaagaaacagaagaggcaggctgagttattggagaagcgcctgcaggagatagaagaattggagcgagaagctgaaaggaaaataatagaagaaaacatcacctcagctgcaccttccaatgaccaggatggcgaatactgcccagaggtgaaactaaaaacaacaggattagaggaggcggctgaggcagagactgcaaaggacaatggtgaagctgaggaccaggaagagaaagaagatgctgagaaagaaaacattgaaaaagatgaagatgatgtagatcaggaacttgcgaacatagaccctacgtggatagaatcacctaaaaccaatggccatattgagaatggcccattctcactggagcagcaactggacgatgaagatgatgatgaagaagactgcccaaatcctgaggaatataatcttgatgagccaaatgcagaaagtgattacacatatagcagctcctatgaacaattcaatggtgaattgccaaatggacgacataaaattcccgagtcacagttcccagagttttccacctcgttgttctctggatccttagaacctgtggcctgcggctctgtgctttctgagggatcaccacttactgagcaagaggagagcagtccatcccatgacagaagcagaacggtttcagcctccagtactggggatttgccaaaagcgagtaaaattgatgagccagccctgcaaacagcccgacattctgcagcccctttggttccagcagtctggaattgcacgccgacatgcccttccatggtgctgctagagtgtctttgcagtatgctcacccgatcagtgtattcccctgctcacagtttccacagctccccatcatctacagcagtggtctccacagtggagagtgtacatccctgcataaccagcaccatccaggaagcaaaaacccgggcagctgacttgttggtgaatcccctggatccgcggaatgcagataaaattagagtaaaaattgctgacctgggaaatgcttgttgggtgcataaacacttcacggaagacatccagacgcgtcagtaccgctccatagaggttttaataggagcggggtacagcacccctgcggacatctggagcacggcgtgtatggcatttgagctggcaacgggagattatttgtttgaaccacattctggggaagactattccagagacgaagaccacatagcccacatcatagagctgctaggcagtattccaaggcactttgctctatctggaaaatattctcgggaattcttcaatcgcagagctctggatcctgaatccagcaacgcgaggaaggcctgtacttttggtcattcaagttgcgctctgtttctgtctgcgcgggcggtggtagtgtctgcatgcagtgtactgattaaactgtcgtgtgtttctgttttgctggcaatgtttcccaatgcagatcacatagcattgatcattgaactgctggggaaagtccctcgaaaatacgctatgttggggaaatactccaaggagtttttcaccagaaaaggagaactgcgacacatcaccaagctgaagccctggagcctctttgatgtacttgtggaaaagtatggctggccccatgaagatgctgcacagtttacagatttcctgatcccgatgttagaaatggttccagaaaaacgagcctcagctggcgaatgccttcggcatccttggttgaattcttag

SEQ ID NO: 116232 - DNA, 682 bp, Homo sapiens
gttggagaccctggctgggcccctggcccagtgcccgccgcctgcccctcccgctgagaacaggatgtgggtgtcaggagccccagcggccttcccagcttcccctgattgtgtacagggcgataaaggggctgatgagagggagatctctggcggcacagacacagcggcggcggctcaactgaagattcactattggataccagggcctagcacggtgcaggagcacaaggaagtgttcaacaccaagctggctgatggacaaaatggatcacccagcaaacaagcaagtatctgtgacaggcagtttgttgtggcaggagggtaccatcgctcattggcagatgaggcttatggagatgaggaggacttgcccaaggtcgtgggcctggtgcacagcaccagagggccagcccatcccacttacctgctcaggcctctgcagaaggaccaggactcaagtctgctgagagcgtctggaggaggaggtggcagccccagcagtagtacgaaatcagaacacagctgccgacagatacacattccaggccccttcagccatgctgatattacagggcagaagtggtttccaggcggcgtgtccacagagcctgccaggaacatggggttcctgaagcctaccccaacacctctgctacgctcacccaaggactttcggtga

SEQ ID NO: 116233 - DNA, 405 bp, Homo sapiens
atggctgactcgaagcagctgcggttcgaggctcccactgagatgaacgaaaacggtcagcagcgtcaaagaccaaagccagataaaatcaggaagatgagaaagaatcaatacaaaaatgctgaaaactcaaaaagccagaaagcctcttctcctccaaatgattgcaacacctctccagcaatggcacagaactggcctgaggctgagatggatgaactgacagaagtagccttcagaagtgggttcttggtctcgctgatttcaagaatgaagctgcggacccttgccgtgagtgttacagctcttaaagatggagtgaagccacggaccttcgtggagagtgttatagctcttaatgatgatgcagacccaaagagtgggcagctgcaagatttgttgtga

SEQ ID NO: 116234 - DNA, 914 bp, Homo sapiens
tcaagtaggaagttcagcttgcaactgaaatcctctagcctcactctggtgctttgaaacaaatggagctttcaggagctgctgataaaggatggggatgctggcttggaggtcaggcgccggcagtgtgggggctgaggtggcaagcagggttgtcattatgctaatagcatccgtggagccacagccagtgaccctattgtgtccggaattggttccttccggtgggttcttggtctcgctgacttcaagaatgaagccgtggaccctagcagtgagtgttaccgttcttaaagatggtgtgtccggagtttgttccttcagatgttcagatgtgtccagagtttcttccttctggtgggttaatagtctcgctggcttcaggagtgaagctgcagaccttcgcagtgagtgttacagctcataaaggtggcgcttctggagttgttcgttccttccggtgggttcgtggtctctctggcttcaggagtgaagctgcagacctttgcagtgttacatctcttaaaggtggcacgtccagagttgtacattcctcccgtccagagttgttttgttcctccttcctcgttcctcccagtgggtttgtggtctcgctggcttcaggagtgaagctgcagacctttgcagtgagtgttacagctcttaaaggtggcacagacccaaagagtgagcagcagcaagatttattgcaaagagcaaaagaacaaaacttcgaaaaagtggaaggggacctgagtgggttgctcaggtggcctgcttttattcccttatttggccccaatcacatcctgctgattggtctattttacagagagctgattggtccattttacagagtgctgattggtccgtttttacacagagcactgattggtgcatttacaaagctttag

SEQ ID NO: 116235 - DNA, 1314 bp, Homo sapiens
atgagggctatatccacagcagccaggacttccaaagcggagcccaaatgcctgttcaggcaggggcactcaagaacaatagatgaaggatctgaaaccagggctgtcctagaaaatctggggcactcggccacctgcacgatgcctgtagtgagcacagctgggccaggtgcatttagaaacctggctgaaaactgcaggtctgatgaggagcacaaaggtcgggtccctagagaacaggagcctttgaaggaagagggtggagctgattgcagactgccgaatcttgaaggggtccacagaaaggctgcagtgtcttacagccagagcttgcttcgagacacaaatcctgccttgactgcccagggcacacaggtctatacatggggcttcatgcccttctccggctctggagtaggaggcagagactttacagtttaccagggactttctctttcacttgtgcctgaactgtcagtggcctggcagcagcctcagctcactggaacgaggaagacacagtggccagaccttgaagagccaagcaccagttctattaatcaattatctgctgcctgggctgcgagtaaggctgttgggccagataaaccccaggggaggggaggcgaccaagagacagacagcccgcactccctgtctgccccacgtcagcaggtgcacagcaccagagggccagcccatcccacttacctgctcaggcctctgcagaaggaccaggactcaagtctgctgagagcgtctggaggaggaggtggcagccccagcagtagtacgaaatcagaacacagctgccgtgagtcctatgggagacaagaaagggggcagacactctcccgctccaggcccagctcctggacattgggagtgaagtctagtttctctctgtcctctgaactggttaacaaggaccacagagattccttgatggatgaatggtgccgtgaaaagtctctgagtcctgcacggagtgaccattgggaagggttctggaggggctcaggtggagccacggacaggagtggcagtgaagggcagatggcctgggggactcaggcttgggccccacccagcctggggagtgggggtagtcattcttgtgtagcctttggttgcatggacccaaagtttacagaagaagaccctggaggaggacacgtctcccttgatgtcaaccgcttgtgggttcttggtctcgctgatttcaagaatgaagctgcggactttgaggtgagtgttacagctcttaaaggtggcacggacccaaagagtgagcagcagcaagatttactgtga

SEQ ID NO: 116236 - DNA, 397 bp, Homo sapiens
  misc_feature (1)...(397): n = a,t,c or g
agctgttantctgaagggcttcccctttgtgggtaaacccgaacctatcnacactggctgcccttaacatcttntccttcatttcaactttggtgaatctgacaattatgtgtcttggagttgctcntctcgaggagtaccnntgtggtgtttgaatgttggcctgccttgctagattggggaagttctcctggataatatcctgcagagtgttttccaacttggttccattctccccgtcactttcaggtacaccaatcagacgtagatttggtcttttcacatagtcccatatttcttggaggctttgtttctttttattcttttttctctaaacttctcttctcgcttcatttcattcatttgatcttccatcactgataccctttcttccagn

SEQ ID NO: 116237 - DNA, 756 bp, Homo sapiens
atggggaaaaaacagaacagaaaaactggaaactctaaaaatcagagcgcctctcctcctccaaaggaacgcagctcctcaccagcaacggaactaagctggatggagaatgactttgacgagctgagagaagaaggcttcagacgatcaaattactctgagctacgggaggacattcaaaccaaaggcaaagaaattgaaaactttgaaaaaaatttagaagaatgtataactagaataaccaatacagagaagtgcttaaaggagctgatggagctgaaaaccaaggctcgagaactacatgaagaatgcagaagcctcaggagccgatgcgatcaactggaagaaagggtatcagcgatggaagatgaaatgaatgaaatgaagcgagaagggaagtttagagaaaaaagaataaaaagaaatgagcaaagcctccaagaaatatgggactatgtgaagagaccaaatctacgtctgattggtgtacctgaaagtgatggggagaatggaaccaagttggaaaacactctgcaggcaacaaaagacaaaattgacaaatgggatctcattaaactaaagagcttctgcacagcaaaagaaactaccatcagagtgaacaggcaacctacaaaatgggagaaaattttcgcaacctactcatctgacaaagggctaatatccagaatgtacaacgaactcaaacaaatttacaagaaaaaaacaaccccatcaaaaagtgggcaaaggacatga

SEQ ID NO: 116238 - DNA, 645 bp, Homo sapiens
atggccgaacaggaacagctctggtctacagctcccagcatgagcaactcagaagacaggcgatttctgcatttccatctgaggtaccgcgttcatctcactagggagtgcccaacagaacgcagttcctcaccagcaatggaacaaagctggacggagaatgactttgacgagttgagagaagaaggcttcagacgatcaaactactccgagctacaggaggaaattcaaaccaatagcaaagaagttataaactttgaaaaacaattagatgaatgtataactggaataatcaatgcagagaagtgcttaaaggagctgatggagctgaaagccaaggctcaagaactacatgaagaatgcagaagcctcaggagcggatgcaatcaactggaagaaagagtaccagggatggaagatgaaatgaatgaaatgaagcaagaagggaagtttagagaaaaaagaataaaaagaaatgaacaaagcctccaagaaatatgggactatgtgaaaagaccaaatctacgtctgattagtgtacctgaaagtgacggggagaatggaaccaagttggaaaacactctgcaagatattatccaggagaacttccccaatctagcaaggcaggccaacattcagatttag

SEQ ID NO: 116239 - DNA, 948 bp, Homo sapiens
atggctgaacagctctggttgcaaacagcaacagctctggtctacagctcccagcgtgagcgatgcagaagatgcatgatttctgcatttccatctgaggaggaaattcaaaccaaaggcaaagaatttgaaaactttgaaaaaaatttagacgaatgtataactagaataaccaatacagagaagtgcttaaaggagctgatggagctgaaagccaaggctggagaactacgtgaagaatgcagaagcctcaggagccgatgcgatcaactggaagaaagggtatcagcgatggaagatgaaatgaatgaaatgaagcgagaagggaagtttagagaaaaaagaataaaaagaaacgaacaaagcctccaagaaatatgggactatgtgaaaagaccaaatctgcatctgattggtgtacctgaaagtgacggggagaatggaaccaagttggaaaacattctgcaggatattatccaggagaacttccccaatctagcaaggcaagccaacattcagattcaggaaatacagagaatgccacaaagatactcattgagaagagcaactccaagacacataattgtcagattcaccaaagttgaaatgaaggaaaaaatgttaagggcagccagagagaaaggtcgggttacccacaaagggaagcccatcagactaacagcggatctctcggcagaaactctacaaaccagaagagagtgggggccaatattcaacattcttaaagaaaagaattttcaaaccagaatttcatatccagccaaactaagcttcataagtgaaggagaaataaaatactttacagacaagcaaatgctgagagattttgtcaccaccaggcctgccctaaaagagctcctgaaggaagcactaaacatggaaaggaacaaccggtaccagctgctgcaaaatcatgccaaaatgtaa

SEQ ID NO: 116240 - DNA, 660 bp, Homo sapiens
atggggaaaaaacagaacagaaaaactggaaactctaaaaagcagagcgcctctcctcctccaaaggaaagcagttcctcacgagcaacggaacaaagctggatggagaatgactttcacgagctgagagaagaaggcttcagacgatcaaattactctgagccacaggaggacattcaaaccaaagacaaagaagttgaaaactttgaaaaaaatttggaagaatgtataactagaataaccaatacagagaagtgcttaaaggagctgatggagctgaaaaccaaggctcgagaactacgtgaagaatgcagaagcctcaggagccaatgcaatcaactggaagaaagggtatcagcaatggaagaagaaatgaatgaaatgaagcgagaagggaagcttagagaaaaaaagcataaaaagaaaagagcaaacatccaagaaatatgggactatgtgaaaagaccaaatctacgtccgattggtgtacctgaaagtgacagggagaatggaaccaagttggaaaacactctgcaggatattatccaggagaacttccccagtctagcaaggcctgccctaaaagagctcctgaaggaagcactaaacatggaaaggaacaaccggtaccagccgctgcaaaatcatgccaaaatgtaa

SEQ ID NO: 116241 - DNA, 518 bp, Homo sapiens
ggtcaaccgtcgacagcgacacacttgcatcggatgcagcccgggttacgtgccggcacgggctggatccccctgagctacgggaggacattcaaaccaaaggcaaagaagttgaaaactttgaaaaaaatttagaaaaatgtataactagaataaccaatacagagaagtgcttaaaggagctgatggagctgaaaaccaaggctcgagaactacgtgaagaatgcagaagcctcaggagccgatgcgatcaactggaagaaagggtatcagcaatggaagatgaaatgaatgaaatgaagcgagaagggaagtttagagaaaaaagaataaaaagaaatgagcaaagcctccaagaaatatgggactatgtgaaaagaccaaatctacgtctgattggtgtacctgaaagtgatgtggagaatggaaccaagttggaaaacactctgcaggatattatccaggagaacttccccaatctagcaaggcaggccaacgttcagattcaggaaatatag

SEQ ID NO: 116242 - DNA, 3570 bp, Homo sapiens
atgcacattgttgtagaaacagctctgtcagcttcatggcagaacaaggccaagcccccagctagggttctgcttcaggtggtccccaatgtgtggttccttgtggctgttgtgtgggaactgtatccatctttggatctcatggatcgttccatagaatgcagttcctcaccagcaacggaacaaagctggacagagaatgactatgacaagctgagagaagaaggcttcagacgatcaaattactctgagctacaggaggacattcaaaccaaaggcaaagatgttgaaaactttgaaaaaaatttagaagaatgtataactagaataactaatacacagaagtgcttaaaggagctgatggagctgaaaaccaaggctcgagaactacgtgaagaatgcagaagcctcaggagccgatgcgatcaactggaagaaagggtatcagtgatggaagatgaaatgaatgaaatgaagcaagaagggaagtttagagaaaaaagaataaaaagaaatgagcaaagcctccaagaaatatgggactatgtgaaaagaccaaatctacgtctgattggtgtacctgaaagtgatggggagaatggaaccaagttgaaaaacactctgcaggatattatccaggagaacttccccaatctagcaaggcaggccaaagttcagattcaggaaatacagagaatgccacaaagatattccttgacaagagcaactccaagacacataattgtcagattcaccaaagttgaaatgaaggaaaaaatgttaagggcagccagagagaaaggagcacccagattcataaagcaagtcctgagtgacctacaaagagacttagactcccacacattaataatgggagactttaacaccccactgtcaacattagacagatcaacgagacagaaagtcaacaaggatacccaggaattgaactcagctctgcaccaagtggacctaatagacatctacagaactctccaccccaaatcaacagaatacacatttttttcagcaccacaccacacgtattccaaaattgaccacatacttggaagtaaagctctcctcagcaaatgtaaaagaacagaaattataacaaactatctctcagaccacagtgcaatcaaactagaactcaggattaagaatctcactcaaaaccgctcaactacatggaaactgaacaacctgctcctgaatgactactgggtacataacgaaatgaagctagaaataaagatgttctttgaaaccaacgagaacaaagacacaacataccagaatctctgggacgcattcaaagcagtgtatagagggaaatttatagcactaaatgcccacaagagaaagcaggaaagatccaaaattgacaccctaacatcacaattaaaagaactagaaaagcaagagcaaacacattcaaaagctagcagaaggcaagaaataactaaaatcagagcagaactgaaggaaatagagacacaaaaaacccttcaaaaaattaatgaatccaggagctggttttttgaaaggatcaacaaaatagatagactgctagcaagactaataaagagaaaaagagagaagaatcaaatagatgcaataaaaaatgataaaggggacatcaccaccaatcccacagaaatacaaactaccatcagagaatactacaaacacctctacgcaaataaactagaaaatctagaagaaatggataaattcctcgacacatacactctcccaagactaaaccaggaagaagttgaatctctgaatagaccaataacaggatctgaaattgtggcaataatcaatagcttaccaaccaaaaagagtccaggaccagatggattcacagccgaattctaccagaggtacaagaaggaactggtaccattccttctgaaactattccaatcaatagaaaaagagggaatcctccctaactcattttatgaggccagcatcattctgataccaaagccaggcagagacacaaccaaaaaagagaattttagaccaatatccttgatgaacattgatgcaaaaaccctcaataaaatactggcagaccgaatccagcagcacatcaaaaagcttatccaccatgatcaagtgggcttcatccctgggatgcaaggctggttcaatatacacatatcaataaatgtaatccagcatataaacagagccaaagacaaaaaccacatgattatctgcatagatgcagaaagggcctttgacaaaattcaacaacccttcatgctaaaaactcttaataaattagtgttggaagttctggccagggcaattaggcaggagaaggaaataaagggtattcaagtaggaaaagaggaagtcaaattgtccctgtttgcagatgacatgattgtatatctagaaaaccccattgtctcagcccaaaatctccttaagctgataagcaacttcagcaaagtctcaggatacaaaatcaatgtacaaaagtcacaagcattcttatacaccaataacagacaaacagagagccaaatcatgagtgaactcccattcacaattgcttcaaagagaataaaatacctaggaatccaacttacaagggatgtgaaggacctcttcaaggagaactacaaaccactgctcaacgaaataaaagaggatacaaacaaatggaagaacattctatgctcatgggtaggaagaattaatatcgtgaaaatggccatactgcccaaggtaatttacagattcaatgccatccccatcaagctaccaatgcctttcttcacagaattggaagaaactactttaaagttcatatggaaccaaaaaagagcccgcattgccaaggcaatcctaagccaaaagaaaaaagctggaggcatcacactacctgacttcaaactatactacaaggctacagtaaccaaaacagcatggtactggtaccaaaacacagatatagaacaatggaacagaacagagccctcagaaataatgctgcatatctacaactatctgatctttgaccaacctgagaaaaacaagcaatggggaaaggattccctatttaataaatggtgctgggaaaactggctagccatatgtagaaagctgaaactggatcccttccttacaccttatacaaaaatcaattcaagatggattaaagacttaaacgttagacctaaaaccataaaaaccctagaagaaaacctaggcattaccattcaggacataagcatgggtaaggacttcatgtctaaaacaccaaaagcaaaggcaacaaaagccaaaattgacaaatgggatctaattaaactaaagagtttctgcacagcaaaagaaactaccatcagagtgaacaggcaacctacaaaatgggagaaaattttcgcaacctactcatctgacaaagggctaatatccagaatctacaatgaactcaaacaaatttacaagataaaaacaaacaaccccatcgaaaagtgggtgaaggacatgaacagacacttctcaaaagaagacatttatgcagccaaaaacacatga

SEQ ID NO: 116243 - DNA, 3354 bp, Homo sapiens
atggggaaaaaacagaacagaaaaactggaaactctaaaatgcagagcgcctctcctcctccaaaggaacgcagttcctcaccagcaacggatcaaagctggatggagaatgactttgacgagctgagagaagaaggtttcagacgatcaaattactctgagctacgggaggacattcaaaccaaaggcaaagaagttgaaaactttgaaaaaaatttagaagaatgtataactagaataaccaatacagagaagtgcttaaaggagctgatggagctgaaaaccaaggctcgagaactacgtgaagaatgcagaagcctcaggagccgatgcgatcaactggaagaaagggtatcagcaatggaagatgaaatgaatgaaatgaagcaagaagggaagatcaaaagagacaaagaaggccattacataatggtaaagggatcaattcaacaagaagagctaactatcctaaatatatatgcacccaatacaggagcacccagattcataaagcaagttctgagtgacctacaaagagacttagactcccacacattaataatgggagactttaacacctcactgttaacattagacagatcaatgagacagaaagtcaacaaggatacccaggaattgaactcatctctgcaccaagcggacctaatagacatctacagaactctccaccccaaatcaatagaatatacatttttttcagcaccacaccacacctattccaaaattgaccacatagttggaagtaaagctctcctcagcaaatgtaaaagaacagaaattataacaaactatctctcagaccacagtgcaatcaaactagaactcaggattaagaatctcactcaaagccgctcaactacatggaaactgaacaacctgctcctgaatgactactgggtacataacgaaatgaaggcagaaataaagatgttctttgaaaccaacgagaacaaagacacaacataccagaatctctgggacgcattcaaagcagtgtgtagagggaaatttatagcactaaatgcccacaagagaaagcaggaaagatccaaaattgacaccctaacatcacaattaaaagaactagaaaagcaagagcaaacacattcaaaagctagcagaaggcaagaaataactaaaatcagagcagaactgaaggaaatagagacacaaaaaacccttcaaaaaatcaatgaatccaggagctggttttttgaaaggatcaacaaaattgatagaccgctagcaagactaataaagaaaaaaagagaggagaatcaaatagacacaataaaaaatgataaaggggatatcaccaccgatcccacagaaatacaaactaccatcagagaatactataaacacctctacgcaaataaaccagaaaatctagaagaaatggataaattcctcgacacatacactctcccaagactaaagcaggaagaagttgaatctctgaatagaccaataacaggagctgaaattgtggcaataatcaatagtttaccaaccaaaaagagtccaggaccagatggattcacagccgaattctaccagaggtacaaggaggaactggtaccattccttctgaaactattccaatcaatagaaaaagagggaatcctccctaactcattttatgaggccagcatcattctgataccaaagccgggcagagacacaaccaaaaaagagaattttagaccaatatccttgatgaacattgatgcaaaaatcctcaataaaatactggcaaaccgaatccagcagcacatcaaaaagcttatccaccatgatcaagtgggcttcatccctgggatgcaaggctgccaatatcatactgaatgggcaaaaactggaagcattcctttgaaaactggcacaagacagggatgccctctctcaccactcctattcaacacagtgttggaagttctggccagggcaatcaggcaggagaaggaaataaagggtattcaattaggaaaagaggaagtcaaattgtccctttttgcagacgacatgattgtttatctagaaaaccccatcgtctcagcccaaaatctccttaagctgataagcaacttcagcaaagtctcaggatacaaaatcaatgtacaaaaatcacaagcattcttatacaccaacaacagacaaacagagagccaaatcatgagtgaactcccattcacaattgcttcaaagagaataaaatacctaggaatccaatttacaagggatgtgaaggacctcttcaaggagaactacaaaccactgctcaaggaaataaaagaggatacaaacaaatggaagaacattccatgctcatgggtaggaagaatcaatatcgtgaaaatggccatactgcccaaggtaatttacagattcaatgccatccccatcaagctaccaatgactttcttcacagaattggaaaaaactactttaaatttcatatggaaccaaaaaagagcccgcatcgccaagtcaatcctaagccaaaagaacaaagctggaggcatcacactacctgacttcaaactatactacaaggctacagtaactaaaacagcatggtactggtaccaaaacagagatatagatcaatggaacagaacagagccctcagaaataacgccgcatacctacaattatctgatctttgacaaacctgagaaaaacaagcaacggggaaaggattccctatttaataaatggtgctgggaaaactggctagccatatgtagaaagctgaaactggatcccttccttacaccttatacaaaaatcaattcaagatggattaaagatttaaacgttagacctaaaaccataaaaatcctagaagaaaacctaggcattaccattcaggacataggcgtgggcaaggacttcatgtccaaaacaccaaaagcaatggcaacaaaagccaaaattgacaaatgggatctaattaaactaaagagcttctgcacagcaaaagaaactaccatcagagtgaacaggcaacctacaacatgggagaaaattttcgcaacctactcatctgacaaagggctaatatccagaatctacaatgaactcaaacaaatttacaagaaaaaaacaaacaaccccatcaaaaagtgggcgaaggacatgaacagacacttctcaaaagaagacatttatgcagccaaaaaatacatgaaaaaatgctcatcatcactggccatcagagaaatgcaaatcaaaaccacaatgagataccatctcacaccagccccggtgtgtgatgttcgccttcctgtatccaagtgttctcattgttcagttcccacctatgagtga

SEQ ID NO: 116244 - DNA, 2232 bp, Homo sapiens
atggaacaaagctggagggagaatgactttgatgagttgagagaagaagccttcagacgatcaaactactctgagctacaggaggaaattcaaaccaaaggccaagaagttaaaaactttgaaaaaactttagatgaatatataactagaataaccaatacagagaagtgcttaaaggagctgatggagctaaaagccaaggctcgagaactacgtgaagaatgcagaagcctcaggagccgatgcgatcaactggaagaaagggtatcagtgatggaagatgaaatgaatgaaatgaagcgagaagggaagtttagagaaaaaagaataaaaagaaacgaacaaagcctccaagaaaaatgggactatgtgaaaacaccaaatctacgtctgattggtgtacctgaaagtgatggggagaatggaaccaagttggaaaacactctgcaggatattatccaggagaacctccccaatctagtaaggcaggccaacattcagattcaggaaatacagagaacaccacaaagatactcctcgagaagagcaactccaagacacataattgtcagattcaccaaagttgaaatgaaggaaaaaatgttaagggcagccagagagaaagaaatacaaactaccatcagagaatactacaaacacctctacgcaaataaactagaaaatctagaagaaatggataaattccttgacacatacactctcccaagactaaaccaggaagaagttgaatctctgaatagaccaataacaggatctgaaattgtggcaataatcaatagcttaccaaccaaaaagagtccagaccagttggattcacagccgaattctgccagagaaaaagagggaatcctctctatctcattttgtgaggccagcatcatcctgataccaaagctgggcagagacacaaccaaaaaagagaattttagaccaatatccttgatgaccattgacacaaaaatcttcaataaaatactggcaaaccaaatccagcagcacatcaaaaagcttatccaccatgatcaagtgggcttcatccccgggatgcaaggctggttcaatatatgcaaatcaataaatgtaatccagcatataaacagaaccaaagacaaaaaccacatgattatctcaatagatgcagaaaaggcctttgacaaaattcaacaactcttcatgctaaaaactctcaataaattaggtattgatgggacgtatttcaaaataataagagctatctatgacaaacccacagccaatatcatactgaatgggcaaaaactggaagcattccctttgaaaactggcacaagacagggatgccctctctcaccactccttttcaacatagttttggaagttctggccggggcaattaggcaggagaaggaaataaagggtgttcaattaggaaaagaggaagtcaaattgtccctgtttgcagacgacatgattgtatatctagaaaaccacattgtctcagcccaaaatctccttaagctgataagcaacttcagcaaagtctcaggatacaaaatcaatgtacaaaaatcactagcattcttatacaccaataacagacaaacagagagccaaatcatgagtgaactcccattcacaattgcttcaaagagaataaaatacttaggaatccaacttacaagggacgtgaaggacctcttcaaggagaactacaaaccactgctcaatgaaataaaagaggatacaaacaaatggaagaacattccatgctcatgggtaggaagaatcaatatcgtgaaaatggccatactgtccaaggtaatttacagattcaatgccatccccatcaacctaccaatcactgtcttcacagaattggaaaaaactactttaaagttcacatggaaccaaaaaagagcccacattgccaagtcaatcctaagccaaaagaacaaagctggaggcatcacgctacctgacttcaaactatactacaaggctacagtaaccaaaacaggatggtactggtaccaaaacagagatatagatcaatggaacagaacagagccctcagaaataacgacacatatctacaactatctaatctttgacaaacctgagaaaaacaagcaacggggaaaggattccctatttaataaatggtgctgggaaaactggctagccatatgtagaaagcagtgtgttttcattgtacctccaacagaagggtag

SEQ ID NO: 116245 - DNA, 1356 bp, Homo sapiens; identical to SEQ ID NO: 116174

SEQ ID NO: 116246 - DNA, 1206 bp, Homo sapiens
  misc_feature (1)...(1206): n = a,t,c or g
atgagtatgcaggatggagaaccagatgctctcctagcgctctcccaagcatcatttcctgatgactccctgtgcccagtgccatgcagtgttcttgatgcacaggtgcgtaaggagctggctttgccttccaggaactttttgtcaaatggggagatgtgctatgagtgtgacctgaaaggcattgtgtgccatttgatctcagactgctgtgctagcaatcagcgagattccgtgggcgtaggaccctctgagccaggtgtgggatatagtctcgtggtgcgccgtttcttaagccggtctgaaaagcgcaatattcgggtgggagtgacccgattttccagggaactccctgaccccttgcgcttcccagncaaaagagataaacctcaaagatgggaaacaccagaccagaaacctggaactctaaacgcagagcgctcttctctcacaaaggaacgcagttcctcacagccaacagaccaaagctggatggagaatgattttgacgagctgaaaaaaaagggcttcagacgatcatattactctgagctacgggagcacattcaaaccaaaggcaaagaagttgaaaactttgaaaaaaatttagaagaatgtataactagaataaccaatacagaaaagtgcttaaaggagctgatggagctgaaaaccaaggctcgagaactacgtgaagaatgcagaagcctcaggagccgatgcgatcaactggaagaaagggtatcagcaatggaagatgaaatgaatgaaatgaagcgagaagggaagtttagagaaaaaagaataaaaagaaatgagcaaagcctccaagaaatatgggactatgtgaaaagaccaaatctacgtctgattggtgtacctgaaagtgatgtggagaatggaaccaagttggaaaacactctgcaggatattatccaggagaacttccccaatctagcaaggcaggccaacgttcagattcaggaaatacagagaactccacaaagatactcctcgagaagagcaactccaagacacataattgtcagattcaccaaagttgaaatgataggaaaaaatgttaagggcagccagagagaaaggtcgggttaccctcaaaggaaagcccatcagactaacagcggatctctcggcagaaaccctacaagccagaagagagtgggggccaatattcaacattcttaa

SEQ ID NO: 116247 - DNA, 1902 bp, Homo sapiens
atgaatgctaaagcactgccaacgctctccccactgccccaggccactacagagagtgtgagcttgacccaggaacgcagttcctcaccagcaacggaacaaagctggacggagaatgactttgacgagctgagagaagaaggcttcagacgatcaaattactccgagctacgggaggacattcgaaccaaaggcaaagaagttgaaaactttgaaaaaaatttagaagaatgtataactagaataatcaatacagagaagtgcttaaaggagctgatggagctgaaaaccaaggctcgagaactacgtgaagaatgcagaagcctcaggagccgatgtgatcaactggaagaaagggtatcagcgatggaagatgaaatgaatgaaatgaagcgagaagggaagtttagagaaaaaagaataaaaagaaacgagcaaagcctccaagaaatatgggactatgtgaaaagaccaaatgtacgtctgattggtgtacctgaaagtcatggggagaatggaaccaagttggaaaacactctgcaggatattatccaggagaacttccccaatctagcaaggcaggccaacattcagattcaggaaatacagagaacaccacaaagatactcctcgagaagagcaactccaagacatataattgtcagattcaccaaagttgaaatgaaggaaagaatgttaagggcagccagagagaaagaaatacaaactaccatcagagaatactacaaacacctctatgcaaataaactagaaaatctagaagaaatggataaattcctcgacacatacactctccgaagactaaaccaggaagaagttgaatctctgaatagaccaataacaggagctggaattgaggcaataatcaatagcttaccaaccaaaaagattccaggaccagatggattcacagccgaattctaccagaggtacaaggaggaactgagaataaaatacctaggaatccaatttacaagggatgtgaaggacctcttcaaggagaactacaaaccgctgctcaaggaaataaaagaggatacaaacaaatggaagaatattccatgctcatgggtaggaagaatcaatattgtgaaaatggccatactgcccaaggtaatttacagattcaatgccatccccatcaagctaccaatgactttcttcacagaattggaaaaaactactttaaagttcatatggaaccaaaaaagagcccgcattgccaagtcaatcctaagccaaaagaacaaagctggaggcatcacactacctgacttcaaactatactacaaggctacagtaaccaaaacagcatggtactggtaccaaaacagagatatagatcaatggaacagaacagagccctcagaaatcatgccgcatatctacaactatctgatctttgacaaacctgagaaaaacaagcaacggggaaaggattccctatttaataaatggtgctgggaaaactggctagccatatgtagaaagctgaaactggatcccttccttacaccttatacaaaaatcaattcaagatggattaaagacttaaacgttagacctaaaaccataaaaaccctagaagaaaacctaggcattaccattcaagacatagacatgggcaaggacttcatgtctaaaacaccaaaagcaatggcaacaaaagccaaaattgacaaatgggatctaattaaactaaaagagcttctcacagcaaaagaaactaccatcagagtgaacaggcaacctacaaaatgggagaaaattttcacaacctactcatctgacaaagggctaatatccagaatctacaatgaactcaacaaatttacaagaaaaaaacaaacaaccccatcaaaaagtgggcaaaggacatga

SEQ ID NO: 116248 - DNA, 2232 bp, Homo sapiens
atggggaaaaaacagaacagaaaaactggaaactctaaaacgcagagcgcctctcctcctccaaaggaacgcagttcctcaccagcaacagaacaaagctggatggagaatgattttgacgagctgagagaagaaggcttcagacgatcaaattactctgagctacgggaggacattcaaaccaaaggcaaagaagttcaaaactttgaaaaaaatttagaagaatgtataactagaataaccaatacagagaagtgcttaaaggagctgatggagctgaaaaccaaggctcgagaactacgtgaagaatgcagaagcctcaggagccgatgcgatcaactggaagaaagggtatcagcaatggaagatgaaatgaatgaaatgaagcgagaagggaagtttagagaaaaaagaataaaaagaaatgagcaaagcctccaagaaatatgggactatgtgaaaagaccaaatctacgtctgattggtgtacctgaaagtgatgtggagaatggaaccaagttggaaaacactctgcaggatattatccaggagaacttccccaatctagcaaggcaggccaacgttcagattcaggaaatacagagaacgccacaaagatactcctcgagaagagcaactccaagacacataattgtcagattcaccaaagttgaaatgaaggaaaaaatgttaagggcagccagagagaaagaaatacaaactaccatcagagaatactacaaacacctctacgcaaataaactagaaaatctagaagaaatggatacattcctcgacacatacactctcccaagactaaaccaggaagaagttgaatctctgaatagaccaataacaggctctgaaattgtggcaataatcaatagtttaccaaccaaaaagagtccaggaccagatggattcacagccgaattctaccagaggtacaaggaggaactggtaccattccttctgaaactattccaatcaatagaaaaagagggaatcctccctaactcattttatgaggccagcatcattctgataccaaagccgggcagagacacaaccaaaaaagagaattttagaccaatatccttgatgaacattgatgcaaaaatcctcaataaaatactggcaaaccgaatccagcagcacatcaaaaagcttatccaccatgatcaagtgggcttcatccctgggatgcaaggctggttcaatatacgcaaatcaataaatgtaatccagcatataaacagagccaaagacaaaaaccacatgattatctcaatagatgcagaaaaagcctttgacaaaattcaacaacccttcatgctaaaaactctcaataaattaggtattgatgggacgtatttcaaaataataagagctatctatgacaaacccacagccaatatcatactgaatgggcaaaaactggaagcattccctttgaaaactggcacaagacagggatgccctctctcaccgctcctattcaacatagtattggaagttctggccagggcaatcaggcaggagaaggaaataaagggtattcaattaggaaaagaggaagtcaaattgtccctgtttgcagacgacatgattgtttatctagaaaaccccatcgtctcagcccaaaatctccttaagctgataagcaacttcagcaaagtctcaggatacaaaatcaatgtacaaaaatcacaagcattcttatacaccaacaacagacaaacagagagccaaatcatgggtgaactcccattcacaattgcttcaaagagaataaaatacctaggaatccaacttataagggatgtgaaggacctcttcaaggagaactacaaaccactgctcaaggaaataaaagaggacacaaacaaatggaagaacattccatgctcatgggtaggaagaatcaatatcgtgaaaatggccatactgcccaagaattggaaaaactactttaaagttcatatggaacaaaaagagccgcatcgccaagtcaatcctaagccaaaagaacaagctggaggcatcacactactgactcaactatactacaaggctacagtaaccaaaacagcatggtactggtaccaaaacagagatatagatcaatggaacagaacagagccctcagaaataatgccgcatatctacaactatctgatctttgacaaacctgagaaaaacaagcaatggggaaaggattccctattataa

SEQ ID NO: 116249 - DNA, 2991 bp, Homo sapiens
atggagaatgactttgacgagctgagagaagaaggcttcagacgatcaaattactctgagctatgggaggacattcaaaccaaaggcaaagaagttgaaaactttgaaaaaaatttagaagaatgtataactagaataaccaatacagagaagtgcttaaaggagctgatggagctgaaaaccaaggctcgagaactacatgaagaatgcagaagcctcaggagccgatgtgatcaactggaagaaagggtatcagcaatggaagatgaaatgaatgaaatgaagggagaagggaagtttagagaaaaaagaataaaaagaaacgagcaaagcctccaagaaatatgggactatgtgaaaagaccaaatctacatctgattggtgtacctgaaagtgatggggagaatggaaccaagttggaaaacactctgcaggatattatccaggagaacttccccaatctagcaaggcaggccaacgttcagattcaggaaatacagagaatgccacaaagatactcctcgagaagagcaactccaagacacataattgtcagattcaccaaagttgaaatgaaggaaaaaatattaaaggcagccagagagaaagacagatcaacgagacagaaagtcaacaaggatacccaggaattgaactcagctctgcaccaagcagacctaatagacatctacagaactctccaccccaaatcaacagaatatacatttttttcagcaccacaccacacctattccaaaattgaccacatacttggaagtaaagctctcctcagcaaatgtgaaagaacagagattataacaaactatctctcagaccacagtgcaatcaaactagaactcaggattaagaatctcactcaaaaccgctcaactacatggaaactgaacaacctgctcctgaatgactactgggtacataacgaaatgaaggcagaaataaagatgttctttgaaaccaatgagaacaaagacacaacataccagaatctctgggatgcattcaaagcagtgtgtagagggaaatttatagcactaaatgcccacaagagaaagcaggaaagatccaaaattgacaccctaacatcacaattaaaagaactagaaaagcaagagcaaacacattcaaaagctagcagaaggcaagaaataactaaaatcagagcagaactgaaggaaatagagacacaaaaaacctttcaaaaaattaatgaatccaggagctggttttttgaaaggatcaacaaaattgatagaccgctagcaagactaataaagaaaaaaagagagaagaatcaaatagacacaataaaaaatgataaaggggatatcaccaccaatcccacagaaatacaaactaccatcagagaatattacaaacacctctacgcaaataaactagaaaatctagaagaaatggataaattcctcgacacaaacaccctcccaagactaaaccaggaagaagttgaatctctgaatagaccaataacaggatctgaaattgtggcaataatcaatagtttactaaccaaaaagagtccaggaccagatggattcacagccgaattctaccagaggtacaaggaggaactgctgggcagagacacaaccaaaaaagagaattttagaacaatatccttggtgaacattgatgcaaaaatcctcaataaaatactggcaaaacgaatccagcagcacgtcaaaaagcttatccactatgatcaagtgggcttcatccctgggatgcaaagctggttcaatatacgcaaatcaataaatgtaatccagcatataaagagagccaaagacagaaaccacatgattatctcaatagatgcagaaaaagcctttgacaaaattcaacaacccttcatgctaaaaactctcaataaattaggtattgatgggacgtatttcaaaataataagagttatctatgacaaacccacagccaatatcatactaaatgggcaacaactggaagcattccctttgaaaactggcacaagacagggatgccctccctcaccactcctgttcaacatagtgttggaagttctggccagggcaattaggcaagagaaggaaataaagggtattcaattaggaaaagaggaagtcaaattgtccctgtttgcagaccacatgattgtatatctagaaaaccccattgtctcagcccaaaatctccttaagctgataagcaacttcagcaaagtctcaggatacaaaatcaatgtacaaaaatcacaagcattcttatacaccaacaacagacaaacagagagccaaatcatgagtgaactcccattcacaattgcttcaaagagaataaaatacctaggaatccaacttacaagggatgtgaaggacctcttcaaggagaactacaaaccactgctcaaggaaataaaagaggatacaaacaaatggaagaacattccatgctcatgggtaggaagaatcaatatcgtgaaaatggccatactgcccaaggtaatttatagattcaatgccatccccatcaagttaccaatgcctttcttcacagaattggaaaaaactactttaaggttcatatggaaccaaaaaagagcctgcatcgccaaggcaatcctaagccaaaagaacaaagctggaggcatcacactacctgacttcaaactatactacaaggctacagtaaccaaaacagcatgtgagagttattctgttaaaaaaaatgccacaaataaaacagttgaaattggttcctttagtcttcttgaacataaaaaggagatggccctaggtcacaatcggacatcaaatcagttgggaggacttctgagaagcagatgccaagataggattaaatgtgcaagggtattattagagaaccaactgtgtggaggaaaacgaagagggaacagagaatttctgaaagagccttgggacctaagtgaaggagagggagaaaaagttgtatag

SEQ ID NO: 116250 - DNA, 2136 bp, Homo sapiens
atggatgcatgtggagaccactattctaagcaaatcaaagcaggaacagaacaccaaataccacatgttctcacctctaagtgggccctggacacaaagaaagaaacaacaaacagtggagaccccaaaagtgggaagggacagagggagatcagtgttcaaaaccttcctgcattagtccattttcacactgctggggggtcccgaccccctgcccggagattccccccccttaaccacccaaagggcggggataaagggggtgacccaccgccccgggccccaaagggatttttcctaataaagggcttccaaccgggggtggaagagggccctaaaaaattgacccaattagagtcacagtctcccttgaagcctggtccacagttgcgatggcagcctgaatttcaggcccatgaaagacctgctcagcagatgaaatgctcccacaaacaaaaggcaaagacccgtctgaaaccaaagagcaactttcaccgcctgacacataaacttcatgacctccacattgagacaagatcttgccatgtgacatacaacactgctcgttcaactccaccaacatggggtcaaataaaggtttcatctcatcaaacagaaaatttcttaaaagaaaaagtcactccaaaaacgaccagtaatatgattctggctgcctttatggtagtcagtgcagcgttaagtataccaccggttagggcaatacataattatacttactgggaatatgttccttttccccctctaattcggtctgtctcctggatggactccccagtagaagtttacactaataatagtgcattcatgtcggtctctaatgatgattggttaccagctcaaccagaagaagacgtccagaaacttgaaatttgcattttacagacccaagcatccatattgtctaggaaactgatggatatgtcagaaataattgatgatggtaatgatggtgatgctcatggtagtgactatgatgttaatggtgatggtgatgatggtggtggtgatatcaattacggttatggtaatgataataatggcagtgatgatggtaataacgataatgataatgttgatgatcatgatggtggtgctggtgataatgatagtaatgatggggatggtgatgatggtggtgatggtgatggtaatggtaatgataattatgatgatgataataacaatggcaatgggatgataatgatgatgatgatggtgacaatgttgggcacagacaaacaaaaagacagcagtaacctctgcggacttaaatgtccctgtctgacagctttgaagagggcagtggttctcccagcacgcagctggagatttgagaaccagcagactgccgccttaagtgggtccctgacccctgaccccaagcagcctaactgggaggcaccccccagcaggggcagactgacacctcacacggctgggtactccaacagacctgcagctgagggcaaggaagttgaaaactttgaaaaaaatttagaagaatgtataactagaataaccaatacagagaagtgcttaaaggagctgatggagctgaaaaccaaggctcgagaactatgtgaggaatgcagaagcctcaggagccgatgtgatcaactggaagaaagggtatcagcgatggaagatgaagcgaatgaaatgaagcgagaagggaagtttggagaaaaaagaataaaaagaaatgaacaaagcctccaagaaatatgggactatgtgaaaagaccaaatctatgtctgattggtgtacctgaaagtgacggggagaatggaaccaagttgaaaaacactctgcaggatattatccaggagaacttccccaatctagcaaggcaggccaacattcagattcaggaaatacagagaacaccacaaagatactcctcgagaagagcaacttcaagacacataattgtcagattcaccaaagttgaaatgaaggaaaaaatgttaagggcagccagagagaaaggtcgggttaccctcaaagggaagcccatcagactaacagtggatctcttggcagaaactctacaagccagaagagagtggggtccaatattcaacattcttaaagaaaagaattttcaaatctga

SEQ ID NO: 116251 - DNA, 1524 bp, Homo sapiens
atggggaaaaaacagagcagaaaaactggaaactctaaaacgcagagtgcctctcctcctccaaaggaactcagttcctcaccagcaatggaacaaagctggacggagaatgactttgatgagctgagagaagaaggcttcagacgatcaaattactctgagctacgggaggacattcaaacgaaaggcaaagaagttgaaaactttgaaaaaaatttagaagaatgtataactagaataaccaacacagagaagtgcttaaaggagctgatggagctgaaaaccaaggctcaagaactacgtgaagaatgcagaagcctcaggagccgatgcgatcaactggaagaaagggtatcagcaatggaagatgaaatcaatgaaatgaagcgagaagggaagtttagagaaaaaagcataagaagaaatgagcaaagcctccaagaaatatgggactatgtgaaaagaccaaatctacgtctgattggtgtacctgaaagtgacagggagaatggaatcaagttggaaaacactctgcaggatattatccaggagaacttccccaatctagcaaggcaggccaacattcagattcaggaaatacagagaacgccacaaagatactcctcaagaagagcaactccaagacacataattgtcagattcaccaaagttgaaatgaaggaaaaaatgttaagggcagccagagagaaaggtcgggttaccctcaaagggaagcccatcagactaagagcggatctcttggcagaaactctacaagccagaagacagatcaacaaaattgctagaccgctagcaagactaataaagaagaaaagggagaagaatcaaatagatgcgataaaaaatgataaagaggatatcaccaccgatcccacagaaatacaaactaccatcagagaatactacaaacacctctacgccaataaactagaaaatctagaagaaatggataaattcctggacacatacactctcccaagactaaaccaggaagaagttgaatctctgaatagaccaataacaggagctgaaattgtggcaataatcaatagcttaccaaccaaaaagagtccaggaccagatggattcacagccgaattctaccagaggtacaaggaggaactggtaccattccttctgaaactatgccaatcaatagaaaaagagggaatcctccctaactcattttatgaggccagcatcatcctgataccaaagcctggcagagacacaaccaaaaaagagaattttagaccaatagccttgatgaacattgatgcaaaaatcctcaataaaatactggcaaaccaaatccagcagcacatcaaaaagcttatccaccatgatcaagtgggcttcattcctgggatgcaaggctggttcaatatatgcaaatcaataaatgtaatccagcatataaacagaaccaaagacaaaagccacatgataatctcaatagatgcagaaaaggcctctgacaaaattcaacaaccttcatgctaa

SEQ ID NO: 116252 - DNA, 2106 bp, Homo sapiens
atggggaaaaaacagagcagaaaaactggaaactctaaaaagcagagcgcctctcctcctccaaaggaacacagttcctcaccagcaacagaacaaagctggacggagaatgactttgacgagttgagagaagaaggcttcagacgatcaaactactccgagctacaggaggaaattcaaaccaaaggcaaacaagttgaaaactttgaaaaaaatttagacgaatgtataactagaataaccaatacagagaagtgcctaaaggagctgatggagatgaaaggcaaggctcgagaactatgtgaagaatgtagaagcctcaggagccgatgcgatcaactggaagaaagggtatcagtgataaaagatgaaattaatgaaatgaagcgagaagggaagtttagagaaaaaagaataaaaagaaacgaacaaagcctccaagaaatatgggactatgtgaaaagaccaaatctacgtctgactggtgtacctgaaagtgatggggagaatggaaccaagttggaaaacactctgcaggatattatccaggagaacttccccaatctagcaaggcaggccaacattcagaatcaggaaatacagagaatgccacaaagatactcctcgagaagagcaactccaagacacataattgtcagattcaccaaagttgaaatgaaggaaaaaatgttaagggcagccagagagaaaggtcgggttacccacaaagtgaagcccatcagactaacagcggatctctcggcagaaactctacaagccagaagagagtgggggccaatattcaacatgcttaaagaaaagaattttgaatccagaatttcatatccagccaaactaagcttcataagtgaaggagaaataaaatactttacagacaagcaaatgctgagagattttgtcaccaccaggcctgccctaaaagagctcctgaaggaagcactaaacatggaaaggaacaactggatcaacaaaattgatagactgctagcaagactaataaagaagaaaagagagaagaatcaaatagatgcaataaaaaatgataaaggggatatcaccactgatcccacagaaatacgaactaccatcagagaatactacaaacacctctacgcaaataaactagaaaatctagaagaaatggataaattccttgacacatacaccctcccaagactaaaccaggaagaggttgaatctctgaatagaccaataacaggctctgaaattgtggcaataatcaatagcttaccaatgaaaaagagtccaggaccagatggattcacagccgaattctaccagaggtacaaggaggaactggtaccattccttctgaaactattccaatcaatagaaaaagagggaatcctccctaactcattttatgaggccagcatcatcctgataccaaagccgggcagagacacaaccaaaaaagagaattttagaccaatatccttgatgaacattgatgcaaaaatcctcaataaaatactggcaaacagaatccagcagcacatcaaaaagcttatccaccatgatcaagtgggcttcatccctgggatgcaaggctggttcaatatacgcaaatcaataaatgtaatccagcatataaacagaaccaacgacaaaaaccacatgattatctcaaaagatgcagaaaaggcctttgacaaaattcaacaacgcttcatgctaaaaactctcaataaattaggtattgatgggacatatctcaaaataataagagctatctgtgacaaacccacagccaatatcatactgaatgggcaaaaactggaagcattccctttgaaaactggcacaagacagggatgccctctctcaccactcctattcaacatagtgttggaagttctggccagggcaattaggcagaagaaggaaataaagggtattcaattaggaaaagaagaagtcaaattgtccctgtttgcagatgacatgattgtatatctagaaaaccccattgtctcagcccaaaatctccttaagctgataagcaacttcagcaaagtctcaggatacaaaatcaatgtacaaaaatcacaagcattcttataa

SEQ ID NO: 116253 - DNA, 1224 bp, Homo sapiens
atggggaaaaaacagaacagaaaaactggaaactctaaaacgcagagcgcctctcctcctccaaaggaacgcagttcctcaccagcaacagaacaaagctggatggagaatgattttgacgagctgagagaagaaggcttcagacgatcaaattactctgagctacgggaggacattcaaaccaaaggcaaagaagttgaaaactttgaaaaaaatttagaagaatgtataactagaataaccaatacagagaagtgcttaaaggagctgatggagctgaaaaccaaggctcgagaactacgtgaagaatgcagaagcctcaggagcctatgcgatcaactggaagaaagggtatcagcaatggaagatgaaatgaatgaaatgaagcgagaagggaagtttagagaaaaaagaataaaaagaaatgagcaaagcctccaagaaatatgggactatgtgaaaaggccaaatctacgtctgattggtgtacctgaaagtgatgtggagaatggaaccaagttggaaaacactctgcaggatattatccaggagaacttccccaatctagcaaggcaggccaacgttcagattcaggaaatacagagaacgccacaaagatactcctcgagaagagcaactccaagacacataattgtcagattcaccaaagttgaaatgaaggaaaaaatgttaagggcagccagagagaaaggtcgggttaccctcaaagggaagcccatcagactaacagcggatctctcggcgaaggacatgaacagacacttctcaaaagaagacatttatgcagccaaaaaacacatgaagaaatgctcatcatcactggccatcagagaaatgcaaatcaaaaccactatgagatatcatctcacaccagttagaatggcaatcattaaaaagtcaggaaacaacagttatataatggctgcagaagctccaagcatcatggcctctgacaaccatctccaaagacaagagaatatgtctctttgggacacaagttctccacaggacacttctccaggagtctcccagcagacttgctctcgtcactacctagaattctatcacatgccttcattaagcaatcacttgcaagaggaatggaattactatggttggcttactaacaaagattcacccctggaatcatatggccaaccagcatctaaaggaaggagtgaagatagacaagactgctgctga

SEQ ID NO: 116254 - DNA, 1935 bp, Homo sapiens
atgggaaaaaaagagaacagaaagactggaaactctaaaaagcagagcgcctctcctcctccaaaggaacgcagttcctcaccagcaatggaacaaagctggatggagaatgactttgacgagctgagagaagaaggcttcagacgatcaaattactctgagctacaggaggacattcaaaccaaaggcaaagaagttgaaaactttgaaaaaaatttagaagaatgtataactagaataaccaatacagagaagtgcttaaaggagctgatggagctgaaaaccaaggctcaagaactacgtgaagaatgcagaagcctgaggagccgatgcaatcaactggaagaaagggtatcagcaatggaagatgaaatgaatgaaatgaagcgagaagggaagtttagagaaaaaagaataaaaagaaatgagcaaagcctccaagaaatacgggactctgtgaaaagacctaatctacgtcggactggtgtacctgaaagtgatggggacaatggaaccaagttggaaaacactctccaggatattatccgggagaacttccccaatctagcaaggcaggccaacgttcagattcaggaaatacagagaacgccacaaagatactcctcgagaagagcaactccaagacacataattgtcagattcaccaaagttgaaatgaaggaaaaaatgttaagggcagccagagagaaaggtcaggttaccctcaaagggaagcccatcagactaacagcggatctctcggcagaaaccctacaagccagaagagagtgggggccaatattcaacattcttaaagaaaagaattttcaacccagaatttcatatccagccaaactaagcttcataagtgaaggagaaataaaatactttacaaacaagcaaatgctgagagattctgtcaccaccaggcctgccctaaaagagctcctgaaggaaacgctaaacatggaaaggaacaaccggtaccagccactgcaaaatcatgccaaaacagacacacatagcctcaaaataaaaggatggaggaagctctaccaagcaaatggaaaacaaaaaaaggcaggggttgcaatcctagtctctgataaaacagactttaaaccaacaaagatcaaaagagacaaagaaggccattacataatggtaaagggatcaattcaacaagaagagctaactatcctaaatgtatatgcacccaatacaggagcacccagattcataaagcaagtcctgagtgacctacaaagagacttagactcccacacattaataatgggagactttaacaccccactgtcaacattagacagatcaatgagacagaaagtcaacaaggacacccaggaactgaactcagctctgcaccaagcagacctaatagacatctacagaactcttcacctcaaatcaacagaatatacatttttttcagcacgacaccacacctattccaaaattgaccacatacttggaagtaaagctctcctcagcaaatgtaaaagaacagagattataacaaactatctctcagaccacagtgcaatcaaactagaactcacgattaagaatctcactcaaaacccctcaactacatggaaactgaacaacctgctcctgaatgactactgggtacataacgaaatgaagtcagaaataaagatgttctttgaaaccaacgagaacaaagacacaacataccagaatctctgggacgcattcaaagcagtgtgtagaggcaaatttatagcactaaatgcccacaagggaaagcaggaaagatccaaaattgacaccctaacatcacaattaacagaactagaaaagcaagagcaaacacattcaaaagctagcagaaggcaagaaataactaaaatcagagcagaaccgaaggaaatagagacaccaaaaaattaa

SEQ ID NO: 116255 - DNA, 1428 bp, Homo sapiens
atggggaaaaaacagagcagaaaaactggaaactgtaaaaagcagagtgcctctcctcctccaaaggaatgcagctcctcaccagcaatggaacaaagctggatggggaatgactttgacgagctgagagaagaaggcttcagacaatcaaactactccgagctacaggaggaaattcaaacaaatggcaaagaagttaaaaactttgaaaaaaaattagatgattggataactagaataaccaacacagagaagtccttaaaggagctaatggagctgaaagccaaggctcgagaattacttgaagaatgcagaagccccaggagccaatgtgatcaactggaagaaagggtatcagtaatggaagacgaaatgaatgaaatgaagcgagaagggaagtttagagaaaaaagaataaaaagaaatgaacaaatcctccaagaaatatgggactatgtgaaaaggccaaatctacatctgattggtgtacctgaaagtgacggggagaatggaaccaagttggaaaacactctgcaggatattatgcaggagaacttccccaatctagcaaggcaggccaacattcagattcaggaaatacagagaacgccacaaagatactccttgagaagagcaactccaagacacataattgtcagattcaccaaagttgaaatgaaggaaaaaatgttaagggcagccagagagaaaggtcaggttacccacaaagggaagcccatcagactaacagcagatctcttcgcagaaactctacaagccagaagagagtgggggccaatattcaacattcttaaagaaaagatggggaaaaaacagagcagaaaaactggaaactgtaaaaagcagagcgcctctcctcctccaaaggaatgcagctcctcaccagcaatggaacaaagctggatgtggaatgactttgacgagctgagagaagaaggcttcagacgatcaaactactctgagctacaggaggaaattcaaacaaatggcaaagaagttaaaaactttgaaaaaaaattagatgattggataactagaataaccaacgcagagaagtccttaaaggagctaatggagctgaaagccaaggctcgagaattacgtgaagaatgcagaagccccaggagccaatgtgatcaactggaagaaagggtatcagtaatggaagacgaaatgaatgaaatgaagcgcgaagggaagtttagagaaaaaagaataaaacccagaatttcatatccagccgaactaagcttcataagtgaaggagaaataaaatactttacagacaaccaaatgctgagagattttgtcaccaccaggtctgccctaaaagagctcctgaaggaagcactaaacatggaaaggaacaaccggtaccagccactgcaaaaacatgccaaaatgtaa

SEQ ID NO: 116256 - DNA, 858 bp, Homo sapiens
atggtaggatggtctgtggatttaaactttcttccatcggttgatcctgaaacagttcttcagacagggcatgaattgttgtccgaattacagcagcgtcgatttaatggctcagacggaggggtttcatggtctcctatggatgatgaacttcttgcacagccacaggttatgaaattattagattcactccgagagcaatatacccgctaccaggaagtttgtaggcaacgtagcaagcgcacacagttagaagagattcaacagaaggaggaaattcaaaccaaaggcaaagaagttaaaaactttgaaaaaaatttagacgaaagtataactagaataaccaatacagagaagtgcttaaaggagctgatggagctgaaagccaaagttcaagaactacaggaagaatgcagaagcctcaggagccgatgcaatcaactggaagaaatggtatcagtgatgaaagatgaaatgaatgaaatgaagcaagaagggaagtttagagaaaaaagaataaaaagaaatgaacaaagcctccaagaaatatgggactatgtgaaaagaccaaatctacatctgattggtgtacctgaaagtgatggggagaatggaaccaagctggaaaacactctgcaggatattatccaggagaacttcccccacctagcaaggcaggccaagattcacattcaggaaatacagagaacgccacaaagatactcctcaagaagagcaaccccaagacaaataattgtcagattcaccaaagttgaaatgaaagaaaaaatgttaagggcagccagagagaaaggtcgggttaccctcaaagggaagcccatccagactaacagctga

SEQ ID NO: 116257 - DNA, 2305 bp, Homo sapiens
atgcacattgttgtagaaacagctctgtcagcttcatggcagaacaaggccaagcccccagctagggttctgcttcaggtggtccccaatgtgtggttccttgtggctgttgtgtgggaactgtatccatctttggatctcatggatcgttccatagaatgcagttcctcaccagcaacggaacaaagctggacagagaatgactatgacaagctgagagaagaaggcttcagacgatcaaattactctgagctacaggaggacattcaaaccaaaggcaaagatgttgaaaactttgaaaaaaatttagaagaatgtataactagaataactaatacacagaagtgcttaaaggagctgatggagctgaaaaccaaggctcgagaactacgtgaagaatgcagaagcctcaggagccgatgcgatcaactggaagaaagggtatcagtgatggaagatgaaatgaatgaaatgaagcaagaagggaagtttagagaaaaaagaataaaaagaaatgagcaaagcctccaagaaatatgggactatgtgaaaagaccaaatctacgtctgattggtgtacctgaaagtgatggggagaatggaaccaagttgaaaaacactctgcaggatattatccaggagaacttccccaatctagcaaggcaggccaaagttcagattcaggaaatacagagaatgccacaaagatattccttgacaagagcaactccaagacacataattgtcagattcaccaaagttgaaatgaaggaaaaaatgttaagggcagccagagagaaaggagcacccagattcataaagcaagtcctgagtgacctacaaagagacttagactcccacacattaataatgggagactttaacaccccactgtcaacattagacagatcaacgagacagaaagtcaacaaggatacccaggaattgaactcagctctgcaccaagtggacctaatagacatctacagaactctccaccccaaatcaacagaatacacatttttttcagcaccacaccacacgtattccaaaattgaccacatacttggaagtaaagctctcctcagcaaatgtaaaagaacagaaattataacaaactatctctcagaccacagtgcaatcaaactagaactcaggattaagaatctcactcaaaaccgctcaactacatggaaactgaacaacctgctcctgaatgactactgggtacataacgaaatgaagctagaaataaagatgttctttgaaaccaacgagaacaaagacacaacataccagaatctctgggacgcattcaaagcagtgtatagagggaaatttatagcactaaatgcccacaagagaaagcaggaaagatccaaaattgacaccctaacatcacaattaaaagaactagaaaagcaagagcaaacacattcaaaagctagcagaaggcaagaaataactaaaatcagagcagaactgaaggaaatagagacacaaaaaacccttcaaaaaattaatgaatccaggagctggttttttgaaaggatcaacaaaatagatagactgctagcaagactaataaagagaaaaagagagaagaatcaaatagatgcaataaaaaatgataaaggggacatcaccaccaatcccacagaaatacaaactaccatcagagaatactacaaacacctctacgcaaataaactagaaaatctagaagaaatggataaattcctcgacacatacactctcccaagactaaaccaggaagaagttgaatctctgaatagaccaataacaggatctgaaattgtggcaataatcaatagcttaccaaccaaaaagagtccaggaccagatggattcacagccgaattctaccagaggtacaagaaggaactggtaccattccttctgaaactattccaatcaatagaaaaagagggaatcctccctaactcattttatgaggccagcatcattctgataccaaagccaggcagagacacaaccaaaaaagagaattttagaccaatatccttgatgaacattgatgcaaaaaccctcaataaaatactggcagaccgaatccagcagcacatcaaaaagcttatccaccatgatcaagtgggcttcatccctgggatgcaaggctggttcaatatacacatatcaataaatgtaatccagcatataaacagagccaaagacaaaaaccacatgattatctgcatagatgcagaaagggcctttgacaaaattcaacaacccttcatgctaaaaactcttaataaattag

SEQ ID NO: 116258 - DNA, 1374 bp, Homo sapiens
atgcgttctgttactggcaatggtcggctggaaaagtctctatgcgctgatcatgctggcggggttatggctgttgctgccaaaacgaaaaacgccggaaaatggcataaccacataatccggcgtttcgacattaatcctggcgatcgtctttatgatcaaggcggtcgcgctcatcatcctttcgctgtattaccgccaccggtcccggcgctaaaaccgccgccaggcatgcgagaaaagcgcaaatgcggcatcaacttcactgtcagatgcttttgcaccggcggcaataaaagtagaagaccgaggaagtcggtaaaaaagcccggtaataaaagcagcaaccagcatgatcgggatcctcagagtgaccctcagcggcagtcgcgaccagcagcaactagccgggctagggtcacactggtaatgagagtccactatagagtgatacgaaataacagaacaaatgtactaatctgtataccctgtatgaggcgcctcctcgcacattacagaggtcggaatttctcggcgccacgatcggtacttgtttttcgtttccattcacccattcatagacaggtacgaagaggaggaagagaagaaagagagagaagacgacagagagaaaccgacgaaaaacgagagagacgagaggagaagaaccagtccttcacaacaccagaccaaagtggacgggagaatgacgagttgagagaagaaggcttcagacgatcaaactactctgagctacaggaggaaattcaaaccaaaggcaaagaagttgaaaactttgaaaaaaatttagaagaatgtataactagaataaccaatacagagaagtgcttaaaggagctgatggatctgaaagccaaggctcgagaactacgtgaagaatgcagaagcctcaggagccgatgtgaccaactggaagaaagggtatcagcgatggaagatgaaatgaatgaaatgaagcgagaagggaagcttagagaaaaaacaataaaaagaaatgaacaaagcctccaagaaatatgggactatgtgaaaagaccaaatctacgtctgattggtgtacctgaaagtgatggggagaatggaaccaacctggaaaacactctgcaggatattatccaggagaacatccccaatctagcaaggcaggccaacattcagattcaggaaatacagagaacgccacaaagatactcctcgagaagagcaactccaagaaacataattgtcagattcaccaaagttgaaatgaaggaaaaaatgttaagggcagccagagagaaaggttgggttacccacaaagggaagcccatcatactaacagcggatctcttggcagaaactctacagccataa

SEQ ID NO: 116259 - DNA, 3666 bp, Homo sapiens
gaacacagttcctcaccagcaacggaacaaaggtggacggagaatgactttgacgagctgagagaagaagacttcagacgatcaaattactccgagctatgggaggacattcaaaccaaaggcaaagaagttgaaaactttgaaaaaaatttagaagaatgtataactagaataaccaatacagagaagtgcttaaaggagctgatggagctgaaaaccaaggctcgagaactacgtaaagaatgcagaagcctcaggagccgatgcaatcaactggaagaaagggtatcagcgatggaagatggaatgaatgaaatgaagcaagaagggaagtttagagaaaaaagaataaaaagaaacaagcaaagcctccaagaaatatgggactatgtgaaaaggccaaatctacgtctgattggtgtacctgaaagtgacggggagaatggaaccaagttggaaaacactctacaggatattatccaggagaacttccccaatctagcaaggcaggccaatattcagattcaggaaatacagagaacgcgacaaagatactcctcgagaagagcaactccaagacacataattgtcagattcaccaaagttgaaatgaaggaaaaaatgttaagggcagccagagagaaaggtcgggttacccacaaagggaagcccatcagactaacagcagatctctcggcagaaactctacaagccagaagagagcagaaaccttcattctttgaaaccaacgagaacaaagacacaacataccagaatctctgggatgcattcaaagcagtgtgtagagggaaatttatagcactaaatgcccacaagagaaagcaggaaagatccaaaattgacaccctaacatcacaattaaaagaactagaaaagcaagagcaaacacattcaaaagctagcagaaggcaagaaataactaaaatcagagcagaactgaaggaaatagagacacaaaaaaccattcaaaaaattaatgaatccaggagctggttttttgaaaggatcaacaaaattgatagaccgctagcaagactaacaaagaaaaaaagagagaagattcaaatagacgcaataaaaaatgataaaggggatatcaccactgatcccacagaaatacaaactaccatcagagaatactacaaacacctctatgcaaataaactagaaaatctagaagaaatggataaattccttgacacatacactctcccaagactaaaccaggaagaagttgaatctctgaatagaccaataacaggatctgaaattgtggcaataatcaatagcttaccaaccaaaaagagtccaggaccagatggattcacagccgaattctaccagaggtacaaggaggagctggtaccattccttctgaaactattccaatcaacagaaaaagagggaatcctccctaactcattttatgaagccagcatcatcctgataccaaagccaggcagagacacaaccgaaaaagagaattttagaccaatatccttgatgaacattgatgcaaaaatcctcaataaaatactgccaaacagaatccagcagcacatcaaaaaccttttgcaccatgatcaagtgggcttcatccctgggatgcaaggctggttcaatatatgcaaattaataaatgtaatccagcatataaacagaaccaaagacaaaaaccacatgattatctcaatagatgcagaaaaggcctttgacaaaattcaacaacccttcatgctaaaaactctcaataaattaggtattgatggcacatatctcaaaataataagagctatctatgacaaacccacggccaatatcatatggaatgggcaaaaactggaagcattccctttgaaaactggcacaagacagggatgccctctctcaccactcctattcaacatagtgttggaagttctggccagggcaattaggcaggagaaggaaataaagggtattcaattaggaaaagaggaagtcaaattgtccctgtttgcagacgacatgattgtatatctagaaaaccccattgtctcagcccaaaatctccttaagctgataagcaacttcagcaaagtctcagcatacaaaatcaatgtacaaaaatcacaagcattcttatacaccaacaacagacaaacagagagccaaatcaggagtgaactcccattcacaattgcttcaaagagaataaaatacctaggaatccaacttacaagggatgtgaaggacctcttcaaggagaactacaaaccactgctcaatgaaataaaagaggatacaaacaaatggaagaacattccatgctcatgggtaggaagaatcaatatcgtgaaaatggccatactgcccaagataatttacagattcaatgccatccccatcaagctaccaatgactttcttcacagaattggaaaaaactactttcaagttcatatggaaccaaaaaagagcccgcatcgccaagtcaatcctcagccaaaagaataaagctggaggcatcacactacctgacttcaaactatactacaaggctacagtaaccaaaacagcatggtactggtaccaaaacagagatatagatcaatggaacagaacagagccctcagaaataacgccgcctatctacaactatctgatctttgacaaccctgagaaaaacaagcaatggggaaaggattccctatttaataaatggtgctgggaaaactggctagccatatgtagaaagctgaaactggatcccttccttacaccttatacaaaaatcaattcaagatggattaaagacttaaaggttagacctaaaaccataaaaacgctagaagaaagcctaggcattaccattcaggacataggcatgtgcaaggacttcatgtctaaaacaccaaaagcaatggcaacaaaagccaaaattgacaaatgggatctaattaaactaaagagcttctgcacagcaaaagaaactaccatcagactgggagtggagttacacaagcacccctgtggccaccaccactatgacaccactggatcagatctgaagccagcacagcactgggtctcacccaaagcttattataaccactcacaggctattgccaatgttcactcaaggccctgtgactttacaatcagcatgtggcagagccagtcaggcctgtgtccttcccttcaggatggcaaggtttcccatgccctagggcggctggctcccctctggcctagggaaggtcccgaaatgccatccaagtatcaagtcctggaatcaggaactccaagtattcttttgatgctctacccttctgtggccatgcttgtacctaaggtgcaagacaaagtcacctttacttttccctctacttttctcaagcagatggagtttcttcatgcagccagcacagctggtgaggggagaggaggggtggcatcagagattcaggactgttttttctatctcttcagtgcctctttaagtgatatgaagttaaaaccaggtacagtggatgctcactggacttttggttcttatgaagctatcatagccaaaaattcggggaagtcaatggtgtcgttaccattggcatccacttcgttgatcatatcccgtaattcggcttctgacccagtgacctcatga

SEQ ID NO: 116260 - DNA, 4345 bp, Homo sapiens
gtattcctctttgttaacctataagctgcccgtggcagacgtttaccctctatcacagacctttcacaaattagaagcagtgaagcataactttaacctggaagaatacagcctttctcagtgcacactggagaagtttgaacttcctgacagctttgtttacactgtgagaggaaaaccacctattcaagcctcagtaatggcagacacccctcccgtcaccaagctcgagcaccccaggtcgacttcagactgctgtgctggcagtgagaatttcagtctagtggatctgacattgctgggctctgtgaaggaaacaggtcaaaatgagcaagagacgcatgagcgtgggtcagcaaacatgggctcttctctgcaagaactgtctcaaaaaatggagaatgaaaagacagaccttgttgatagcttagagactagccatcaagacctgatcggttatgccaaaagaactcagcagccaatgtggcgaagaacaatcatggggtggcctgatgaaaaaagcatggatgaattggatttgaactattcaatagacgcagtgagagtcatctttactgataccttctcctaccatttgaagttttcttggggacatagaatccccatgatgaaagagcacagagaccattcagctcactgtcaagcagtgaatgaaaaaatgaagtgtgaaggttcagagttctgggagaaaggctttgtagcttttcaagctgccattaatgctgctatcatagaaatcgcaacaaatcattcagtgatggaacagctgatgtcagttactggtgtacatatgaagatattaccttttgttgcccaaggaggagttgcaactgattttttcattttcttttgcattatttctttttctacatttatatactatgtatcagtcaatgttacacaagaaagacaatacattacgtcattgatgacaatgatgggactccgagagtcagcattctggctttcctggggtttgatgtatgctggcttcatccttatcatggccactttaatggctcttattgtaaaatctgcacaaattgtcgtcctgactggttttgtgatggtcttcaccctctttctcctctatggcctgtctttgataactttagctttcctgatgagtgtgttgataaagaaacctttccttacgggcttggttgtgtttctccttattgtcttttgggggatcctgggattcccagcattgtatacacgtcttcctgcatttttggaatggactttgtgtcttcttagcccctttgccttcactgttgggatggcccagcttatacatttggactatgatgtgaattctaatgcccacttggattcttcacaaaatccatacctcataatagctactcttttcatgttggtttttgacacccttctgtatttggtattgacattatattttgacaaaattttgcccgctgaatatggacatcgatgttctcccttgtttttcctgaaatcctgtttttggtttcaacacggaagggctaatcatgtggtccttgagaatgaaacagattctgatcctacacctaatgactgttttgaaccagtgtctccagaattctgtgggaaagaagccatcagaatcaaaaatcttaaaaaagaatatgcagggaagtgtgagagagtagaagctttgaaaggttcagtcactgtctataatcacacactttcaagaatggctgatatagaaaatatcagcaagttcactggattttgtccacaatccaatgtgcaatttggatttctcactgtgaaagaaaacctcaggctgtttgctaaaataaaagggattttgccacatgaagtggagaaagaggtacaacgagttgtacaggaattagaaatggaaaatattcaagacatccttgctcaaaacttaagtggtggacaaaataggaaactaacttttgggattgccattttaggagatcctcaagttttgctattggatgaaccgactgctggattggatcctctttcaaggcaccgaatatggaatctcctgaaagaggggaaatcagacagagtaattctcttcagcacccagtttatagatgaggctgacattctggcggacaggaaggtgttcatatccaatgggaagctgaagtgtgcaggctcttctctgttccttaagaagaaatggggcataggctaccatttaagtttgcatctgaatgaaaggtgtgatccagagagtataacatcactggttaagcagcacatctctgatgccaaattgacagcacaaagtgaagaaaaacttgtatatattttgcctttggaaaggacaaacaaatttccagaactttacagggatcttgatagatgttctaaccaaggcattgaggattatggtgtttccataacaactttgaatgaggtgtttctgaaattagaaggaaaatcaactattgatgaatcagatattggaatttggggacaattacaaactgatggggcaaaagatataggaagccttgttgagctggaacaagttttgtcttccttccacgaaacaaggaaaacaatcagtggcgtggcgctctggaggcagcaggtctgtgcaatagcaaaagttcgcttcctaaagttaaagaaagaaagaaaaagcctgtggactatattattgctttttggtattagctttatccctcaacttttggaacatctattctacgagtcatatcagaaaagttacccgtgggaactgtctccaaatacatacttcctctcaccaggacaacaaccacaggatcctctgacccatttactggtcatcaataagacagggtcaaccattgataactttttacattcactgaggcgacagaacatagctatagaagtggatgcctttggaactagaaatggcacagatgacccatcttacaatggtgctatcattgtgtcaggtgatgaaaaggatcacagattttcaatagcatgtaatacaaaacggctgaattgctttcctgtcctcctggatgtcattagcaatggactacttggaatttttaattcgtcagaacacattcagactgacagaagcacattttttgaagagcatatggattatgagtatgggtaccgaagtaacaccttcttctggataccgatggcagcctctttcactccatacattgcaatgagcagcattggtgactacaaaaaaaaagctcattcccagctacggatttcaggcctctacccttctgcatactggtttggccaagcactggtggatgtttccctgtactttttgatcctcctgctaatgcaaataatggattatatttttagcccagaggagattatatttataattcaaaacctgttaattcaagagtgcagctcctcaccagcaacggaacaaagctggatggagaatgactttgacaagctgagagaagaaggcttcagacgatcaaattactctgagctacgggaagacatgcaaaccaaaggcaaagaagttgaaaactttgaaaaaaatttagaagaaagtataactagaataacgaatacagagaagtgcttaaaggagctgatagagctgaaaaccaaggctcgagaactacgtgaagaatgcagaagcctcaggagcccacgtgatcaactggaagaaagggtatcagcgatggaagatgaaatgaatgaaatgaagcgagaagggaagtttagagaaaaaagaataaaaagaaatcagcaaaacctccaagaaatatgggactatgtgaaaagaccaaatctacgtctgattggtgtacctgaaagtgatggggagaatggaaccaagttggaaaacactctgcaggatagtatccaggagaatttccccaatctagcaaggcaggccaacgttcagattcaggaaatacagagaacgccacaaagatactcctcgagaagagcaactccaagacacataattgtcagattcaccaaagttgaaatgaaggaaaaaatgttaagggcagccagagagaaaggtcgggttaccctcaaagggaagcccatcagactaacagtggatctctcggcagaaaccctacaagccagaagagagtgggggccaatattcaacattcttaaagaaaagaattttcaacccagaatttcatatccagccaaactaagcttcataagtgaaggagaaataaaatcctttacagacaagcaaatgctgagagattttgtcaccaccaggcctgccctaaaagagctcctgaaggaagtgctaaatatggaaaggaacaactggtaccagcctctgcaaaatcatgccaaaatgtaa

SEQ ID NO: 116261 - DNA, 1311 bp, Homo sapiens
atgcttgttgatcttgtcactggggcctgcatgtcagggaaacatcctcagagcatgtctgagggcagagctctgacggtaatcagagcaggcagatgtcaccgacagctggagctaatgggctgtcagacagggccggaccaacctgggacatcctccgtgctccctggcacgagtccagtccagaccgagggcactcaagcatgggacgccaggggaacggctttgatgcctactggaaaagccaaacttggttgctttggcaacaggggtcttggtgagaagctggtacacaagcaggtgcttccagtgtgccagagaaaggcacagggccttcttcgccccgagtcttcttacttctctgatggagctgagtcatgcatcacctcttgtttaatggtggtgaaatatactcaggaatgcagttcctcaccagcaacagaacaaagcttgacggagaatgactttgacgagttgagagaagaaggcttcagacgatcaaactactccgagctacaggaggaaattcaaagcaaaggcaaaaaagttaaacactttgaaaaaaatttagacgaatgtataactagaatcaccaatagagagaagtgcttaaaggagctgatggagctgaaagccaaggctcgagaactacgtgaagaatgcagaagcctcaggagccaatgcgatcgactggaagaaagggtatcagtgatggaagatgaaatgaatgaaatgaagcgagaagggaagtttagagaaaaaggaataaaaagaaacgaacaaagcctccaagaaatatgggactatgtgaaaagaccaaatctacatctgattggtgtacctgaaagtgacagggagaatggaactaagttggaaaacactctgcaggatattatccaggagaacttccccaatctagcaaggcaggccaacattcagattcaggaaatacagagaatgccacaaagatactcctcgagaagagcaactccaagacacataattgttagatacaccaaagttgaaatgaaggaaaaaatgttaagggcagccagagagaaaggtcgagttacccacaaagggaagcccatcagactaacagctgatctcttggcagaaactctacaagccagaagagagtgggggccaatattcaacattcttaaagaaaagaattttcaacccagaatttcatatccagacaaactacgcttcataagtgaaggagaaataaaatactttacagacaagcaaatgctgagagattttgtcaccaccaggcctgccctaaaagagctcctgaagcactaa

SEQ ID NO: 116262 - DNA, 2742 bp, Homo sapiens
atggggaaaaaacacaacagaaaaactggaaactctaaaaagcagagcgcctctcctcctccaaaggaacgcagttcctcaccagcaacggaacaaacctggatggagaatgactttgacgagctgagagaagaaggcttcagacgatcaaattactctgagctacgggaggacattcaaaccaaagtcaaagaagttgaaaactttgaaaaaaatttagaagaatgtataactagaataaccaatacagagaagtgcttaaaggagctgatggagctgaaaaccaaggctcgagaactacgtgaagaatgcagaagcctcaggagccgatgcaatcaactggaagaaagggtatcagcgatggaagatgaaatgaatgaaatgaagcgagaagggaagtttagagaaaaaagaataaaaagaaatgagcaaagcctccaagaaatatgggactatgtgaaaagaccaaaatctacgtctgatttggtgtacctgaaagaagaagttgaatctctgaatagaccaataacaggagctgaaattgtggcaataatcaatagcttaccaaccaaaaagagtccaggaccagatggattcacagccgaattctaccagaggtacaaggaggaactagtaccattccttctgaaactattccaatcaatagaaaaagagggaatcctccctaactcattttatgaggccagcatcattctgataccaaagccaggcagagacacagcaaaaaaagagaattttagaccaatatctttgatgaacattgatgcaaaaatcctcaataaaatactgacaaaacgaatccagcagcacatcaaaaagcttatccaccatgatcaagtgggcttcatccctgggatgcaaggctggttcaatatacgcaaatcaataaatgtaatccagcatataaacagagccaaagacaaaaaccacatgattatctcaatagatgcagaaaaagcctttgacaaaattcaacaaccctccatgctaaaaactctcagtaaattaggtattgatgggacgtatttcaaaataataagagctatctatgacaaacccacagccaatatcatactgaatgggcagaaactggaagcattccctttgaaaactggcacaagacagggatgccctctctcaccactcctattcaacacagtgttggaagttctggccagggcaattaggcaggagaaggaaataaagggtattcaattaggaaaagaggaagtcaaattgtccctctttgcagacaacataattgtatatctagaaaaccccattgtctcagcccaaaatctccttaagctgataagcaacttcagcaaagtctcaggatacaaagtcaatgtacaaaaatcacaagcattcttatacaccaacaacagacaaacagagagccaaatcatgagtgaactcccattcacaattgcttcaaagagaataaaatacctaggaatccaacttacaagggatgggaaggacctctccaaggagaactacaaaccactgctcaaggaaataaaagaggatacaaacaaatggaagaacattccatgctcatgggtaggaagaatcaatatcgtgaaaatggccatactgcccaaggtaatttacagattcaatgccatccccatcaagctaccaatgactttcttcacagaattggaaaaaactactttaaagttcatatggaaccaaaaaagagcccgcatcgccaagtcaatcctaagccaaaagaacaaagctggaggcatcacactacctgacttcaaactatactataaggctacagtaaccaaaacagcatggtactggtaccaaaacagagatatagaccaatggaacagaacagagccctcagaaataatgccgcatatctacaactatctgatctttgacaaacctgagaaaaacaagcaatggggaaaggattccctatttaataaatggtgctgggaaaactggctagccatatgtagaaagctgaaactggatcccttccttacaccttatacaaaaatcaattcaagatggattaaagacttaaacgttagacctaaaaccataaaaaccctagaagaaaacctaggcattaccattcaggacacaggcaggggcaaggacttcatgtctaaaacaccaaaagcaatggcaacaaaagccaaaactgacaaatgggatctgattaaactaaagagcttctgcacagcaaaagaaactaccatcagagtgaacaggcaacctacaaaatgggagaaaattttcacaacctactcctctgacaaagggctaatatccagaatctacaatgaactcaaacaaatttacaagaaaaaaacaaacaaccccatcaaaaagtgggcaaaggatatgaacagacacttctcaaaagaagacatttatgcagccaaaaaacacatgaaaaaatgctcatcatcactggccatcagagaaatgcaaatcaaaaccacaatgagataccatctcataccagttagaatggcaatcattaaaaagtcaggaaacaacaggtttgatgacaaatacaccttgaagctgaccttcatcagtgggagaacaaagcagcagcgggaagccgagttcacaaagtccattgctaagttttttgaccacagtgggacactggtcatggatgcatatgagcctgaaatatccaggctccatgacagtcttgccatagaaagaaaaataaagtag

SEQ ID NO: 116263 - DNA, 1878 bp, Homo sapiens
atgaaactcatggaaacacttaaccagtgcataaacgctggtcatgaaatgacgaaggctatcgccattgcacagtttaatgatgacagcccggaagcgaggaaaataacccggcgctggagaataggtgaagcagcggatttagttggggtttcttctcaggctatcagagatgccgagaaagcagggcgactaccgcacccggatatggaaattcgaggacgggttgagcaacgtgttggttatacaattgaacaaattaatcatatgcgtgatgtgtttggtacgcgattgcgacgtgctgaagacgtatttccaccggtgatcggggttgctgcccataaaggtggcgtttacaaaacctcagtttctgttcatcttgctcaggatctggctctgaaggggctacgtgttttgctcgtggaaggtaacgacccccagggaacagcctcaatgtatcacggatgggtaccagatcttcatattcatgcagaagacactctcctgcctttctatcttggggaaaaggacgatgtcacttatgcaataaagcccacttgctggccggggcttgacattattccttcctgtctggctctgcaccgtattgaaactgagttaatgggcaaatttgatgaaggtaaactgcccaccgatccacacctgatgctccgactggccattgaaactgttgctcatgactatgatgtcatagttattgacagcgcgcctaacctgggtatcggcacgattaatgtcgtatgtgctgctgatgtgctgattgttcccacgcctgctgagttgtttgactacacctccgcactgcagtttttcgatatgcttcgtgatctgctcaagaacgttgatcttaaaggctcccagtgtgagcgacacagaagacgggtgatttctgcatttccatctgaggaacgcagttcctcaccagcaacggaacaaagctggatggagaatgattttgacgagctgagagaagaaggcttcagacgatcaaattactctgagctacgggaggacattcaaatcaaaggcaaagaagttgaaaactttgaaaaaaatttagaagaatgtataactagaataaccaatacagagaagtgcttaaaggagctgatggagctgaaaaccaaggctcgagaactacgtgaagaatgcagaagcctcaggagccgatgcgatcaactggaagaaagggtatcagcaatggaagatgaaatgaatgaaatgaagcgagaagggaagtttagagaaaaaagaataaaaagaaatgagcaaagcctccaagaaatatggaactatgtgaaaagaccaaatctacgtctgatttgtgtacctgaaagtgatgcggagaatggaaccaagttggaaaacactctgcaggatgttatccaggagaacttccccaatctagcaaggcaggccaacgttcagattcaggaaatacagagaatgccacaaagatactcctcgagaagaacaactccaagacacataattgtcagattcaccaaagttgaaatgaaggaaaaaatgttaagggcagccagagagaaaggtcgggttaccctcaaagggaagcccatcagactaacagcggatctctcggcagaaaccctacaagccagaagagagtgggggccaatattcaacattcttaaagaaaagaattttcaacccagaatttcatatccagccaaactaagcttcataagtgaaggagaaataaaatactttacagacaagcaaaggctgagagattttgtcaccacaaggcctgccctaaaagagctcctgaaggaagcgctaaacatggaaaggaacaaccagtaccagccgctgcaaaatcatgccaaaatgtaa

SEQ ID NO: 116264 - DNA, 1074 bp, Homo sapiens
  misc_feature (1)...(1074): n = a,t,c or g
atggtcctgcctctgaaactgctctttgcccaggggctgtcatctctactgtactgccaggactgccagcgctgccatgggaatgcacatgtttatgcccgggtgctcttgatgttctcagagctgcgggcactgcccttaccagaggactgcgggtacaaagaagtgcacaagagcccccaccccatcgccactactaccaatacagccagtccctcgcggtgtggcgtacaccaccctggctgcttcctgctgctgcccctgccttgtccactccccctgcgcggagagccccgggctccctcgccccgagagcgcggctcagcggggagcccagggggcctaggggctcagatctgctggagccaccgacgccaaggggaacacaaatcctcaccagcaacggaacaaagctggacggaaaatgactttgatgagttgagagaagaaggcttcagacgatcaaactactccgagctacaggaggaaattcaaaccaaaggcaaagcagttaaaaactttgaaaaaagtttagacgaatgtataactagaataaccaatacagagaagtgcttaaaggagctgatggagctgaaagccaaggctcgagaactacgtgaagaatgcagaagcctcaggagccaatgcgatcaactggaagaaagggtatcagtgatggaagatgaaatgaatgaaatgaagcaagaagggaagtttagagaaaaaagattaaaaagaaacgaacaaagcctccaagaaatatgggactatgtgaaaagaccaaatctacgtctgattggtgtacctgaaagtgacggggagaatgggaccaagttggaaaacactctgcaagatattatccaggagaactttcccaatctagcaaggcaggccaccgttcacattcgggaaatacagagaacgccacaaagattctccttaagaagaagcactccaagacacctanttgaaaactatctgaacaagcgcttaactaaaggggctcccataaagggccggcccttggggacttttcgactgggaaaacggggcaacggcggcctgagtggctga

SEQ ID NO: 116265 - DNA, 2217 bp, Homo sapiens
atgactctctgcaatgataatggcttttatcaaaagcagaagttgaagaacaggaaagctcagcatcagaaaagtagtccagccctgaggatgagtttcacctgcaggccagtaatggtgcacaatctcactggaagcagtggcgtgctggagtgggctcgcagtaccattagggttgactctgtgcatctcttcccagctgcattttttccaatattccctgatggatacactacaggaagaaaagaaatcaaggctgacttctatgataaatccctggtgctagaacggatatcctgcaagaagcaatcatcaaataccagaaccaatgacaaaaacgacatgattgtctcaatagatgcagaaaaggccttcgataaaattcaacaccgcttcatgctaaaaactctgaataaactagaccccctctcccttactctgtgcatgttcggacactccaggtctctgtctggctgccactttgccaacacctgtgccaagaagccttcccaggtgatgccacctcgtcgtgcatgggcctccacatcctgccctgaagtccatcaaggcacccttccttgcttgcaaaccctctcccctcgtgaccttaagactgaatcacacagcgaaggaagaaaaggcaaagaagttgaaaactttgaaaaaaatttagaagaatgtataactagaataaccaatacagagaagtgtttaaaggagctgatggagctgaaaaccaaggcccgagaactacgtgaagaatgcagaagcctcaggagccgatgcgatcaactggaagaaagggtatcagcaatggaagatgaaatgaatgaaatgaagcgagaaggaaagtttagagaaaaaagaataaaaagaaatgaggaaagcctccaagaaatatgggactatgtgaaaagaccaaatctacgtctgattggtgtacctgaaagtcatggggagaatggaaccaagttggaaaacactctgcaggatattatccaggagaatttccccaatctagcaaggcaggccaacgttcagattcaggaaatacagagaatgccacaaagatactcctggagaagagcaactccaagacacataattgtcagattcaccaaagttgaaatgaaggaaaaaaggttaagggcagccagagagaaagaaatacaaactaccatcagagaatactacaaacacttctacacaaataaactagaaaatctagaagaaatggataaattccttgacacatacactctcccaagactaaaccaggaagaagttcaatctctgaatagaccaataacaggagctgaaattgtggcaataatcaatagcttaccaaccaaaaagagtccaggactagatggcttcacagccaaattctaccagaggtacaaggaggaactggtaccattccttctgaaattattccaatcaatagaaaaagagggaatcctccctaactcattttatgaggccagcatcattctgatacaaaagccgggcagagacacaaccaaaaaagagaattttagaccaatatccttgatgaacattgatgcaaaaatcctcaataaaatactggcaaaccgaatccagcagcatatcaaaaagcttatccaccatgatcaagtgggcttcatccctgggatgcaaggctggttcaatatacgcaaatcaataaatgtaatccagcatataaacagagccaaagacagaaaccacatgattatctcaatagatgcagaaaaggcctttgacaaaattcaacaacccttcatgctaaaaactctcaataaagtaggtactgatgggacatatttcaaaataataagagctatctgtgacaaacccacagccaatatcatactgaatgggcaaaaactggaagcatttcctttgaaaactggcacaagacagggatgccctctctcaccactcctattcaacatagtgttggaagttctggccagggcaattaggcaggagaaggaaataaagggtattcaattaggaaaagaggaagtcaaattgtccctgtttgcagatgacatgaatgtatatctagaaaaccccatcgtctcagcccaaaatctccttaaagctgataagcaacttcagcaaagtctcaggatacaaaatcaatgtgcaaaaatcacaagcattcctatacaccaacaacagacaaacagagagccaaatcatgagtga

SEQ ID NO: 116266 - DNA, 2005 bp, Homo sapiens
atggggaaaaaacagagcagaaaaaccggaaactctaaaaagcagagcgccactcctcctccaaaggaacgcagttcctcaccagcaacggaacaaagctggacagagaatgactttgacgagttgagagaagaaggcttcagacgatcaaactactctgagctacaggaggaaactcaaaccaaaggcagagaagttgaaaactttgaaaaaaatttagacgagtgtataactagaacaaccaatacagagaagtgcttaaaggagctgatggagctgaaagccaaggcttgggaactacgtgaagaatgcagaagcctcaggagccgatgcaatcaactggaagaaagggtatcagtgatggaagatgaaatgaatgaaatgaagcgagaagggaagtttagagaaaaaagaataaaaagaaatgaacaaagcccccaagtaatacgggactatgtgaaaagaccaaatctacgtctgattggtgtacctgaaagtgacgggaagaatggaaccaagttggaaaacactctgcaggatattatccaggagaacttccccaatctagcaaggcaggccaacattcagattcaggaaataccgagaacgtcaaaagatactcttcagaagagcactccattattggccttattggtcgattcccaagttgaaggacggacatgtttagggccccaaaaaagcgggaacaaaaaaggaacaacagaaagattcaaaaagaagaaggaggacgaaccgcaccaactgggatctgagctgggcatttctgaaagaaacacagcagccccagtcagggactgtgggcgcagctttagcagacttaaacgttcctgcctgctggctctgaagacagcagcagatctcccagtacagcattcgagctatgctaagggacagactgcctcctcaagtaggtacctgacccatgtgcctcctcatggggagacacctcccagcagagatcgacagacatctcatacaggagagctccagctggcatctggtgagtgcccctctgggatgaagcttccagaagaaagaaaaggcagcaatcttttctgttctgcagcctccgctggtgatactcaggcaaacagggtctggagtggacctccagcaaactccaacagacctgcagctgagggtcctgactgttggaaggaaaactaacaaacagaaaggacatccacaccaaaaccccaactgtacgtcaccatcatcaaagaccaaagacaaaacttccagaggaatgatcaggcagcagcatttgcaggtcaccaatatccgctgttctacagccactgctgctgatacccaggcaaacagggtctggagtggacctctagcaaactccaacagacctgcagctgagggtcctgaggaaattcaaatcaatggcaaagaagttaaaaagtttgaaaaaaaattagacgaatggataactagaataaccaatgcagagaagtccttaaaggagctgatggagctgaaagccaaggctcgagaactatgtgaagaatgcagaagcctcaggagccgatgtgatcaactggaagaaagggtatcagtgatggaagatgaaatgaatgaaatgaagcgagaagggaagtttagagaaaaaagaataaaaagaaatgaacaaagcctccaagaaatatgggactatgtaaaaagaccaaatctacgtctgattggtgtacctgaaagtgacagagagaatggaaccaagttggaaaacactctgcaggatattatccaggagaacttccccaatctagcaaggcaggccaacattcagattcaggaaatacagagaacgccacaaagatactcctcgagaagagcaactccaagacacataattgttagattcaccaaagttgaaatgaaggaaaaaatgttaagggcagccagaaagaaaggtcaggtaacccacaaagggaagcccatcagactaacagcggatctctcagtagaaactctataa

SEQ ID NO: 116267 - DNA, 1941 bp, Homo sapiens
atgggggccagggcagggggcagctgcagctgtttaatgtggctcctcttggcttctggacactttatgggctgtgtggctgctggtgacactgttggaccagagaagttcagatcctgctataccattacccttttacagtcgaagctctcatattcatttgggaagaacaataaaaatttccagttaaggaaatgcttacagacagttgataacctctttgtgcccaaccagaacggatactactgtcactctcagacaagcttggatagagcccagattgacctcaacggtcggatccgtaatggcagtgtctacagtgcacacagcaccaactccttaaataatcctcagccctacttgcagccctcgccgatgtcgtccaaccctagcatcaccgggagtgacgtcatgaggcctgactacctcccgtcccatcggcacagcgccgtgatacccccgtcctaccgccccaccccagactatgagactgtgatgaagcagctcaacaggggcctggtgcatgcggaacggcagagccactcgctgcgaaacctcaacatcggcagctcgtacgcctacagcaggcccgcggcgctggtctacagccagcccgagatccgcgagcacgcacagctcccctcgccagcggccgcacactgcccgttcagcctgagctacagcttccacagcccgtctccctacccctaccctgccgagcggcggcccgtggtgggcgcggtcagcgtgccggagctgaccaatgcgcagctgcaggcgcaggactacccgtctcccaacatcatgcggacgcaggtgtaccggccacccccaccctacccgccccccaggcccgccaacagcacgccagacctgtcccgccacctttacatcagcagcagcaaccccgacctcatcacgcggcgcgtgcaccactcggtgcaaacgttccaggaggacagcctgcccgtggcgcactcgctgcaggaggaacgcagttcctcaccagcaacggaacaaagctggacggagaatgactttgacgagctgagagaagaaggcttcagacgatcaaattactccgagctacgggaggacattcaaaccaaaggcaaagaagttgaaaactttgaaaaaagtttagaagaatgtataactagaataaccaatacagagaagtacttaaaggagctgatggagctgaaaaccaaggctcgagaactatgtgaagaatgcagaagcctcaggagccaatgcgatcaactggaagaaagggtatcagcgatggaagatgaaatgaatgaaatgaagcgggaagggaagtttagagaaaaaagaataaaaagaaacgagcaaagcctccaagaaatatgggactatgtgaaaagaccaaatctacgtctgattggtgtacctgaaagtgacggggagaatggaaccaagttggaaaacactctgcaagatattatccaggagaacttccccaatctagcaaagcaggccaacgttcagattcaggaaatacagagaacgccacaaagatactcctcgagaagagcaactccaagacacataattgtcagattcaccaaagttgaaatgaaggaaaaaatgttaagggcagccagagagaaaggtcgggttaccctcaaagggaaacccatcagactaacagcggatctctcggcagaaactctacaagccagaagagagtgggggccaatattcgacattcttaaagaaaagaattttcaacccagaatttcatatccagccaaactaagcttcagaagtgaaggagaaataaaatcctttacagacaagcaaatgctgagagattttgtcaccaccaggcctgccctaaaagagctcctgaaggaagcgctaaacatggaaaggaacaaccggtaccagccgctgcaaaatcatgccaaaatgtaa

SEQ ID NO: 116268 - DNA, 1737 bp, Homo sapiens
atgagtgtccactcctggaagccctcttggatcagacccatccgtagcctttctcccaagcgtcctctagggacccaagggacctctgaagtcccaccagatactcacatctgccagacaaaatttcacagtctttcttcaggaccacttctcttgtcagtccatccagttggaaagctatccgcagttgttggcagagtcttcatacacatactctcccagcgtgagcgacgaagaagacgggtgatttcagcatttccatctgaggtaccgggttcatctcaccagggagtgccagacagcgggtgcaggtcagtgggtgcgcaccccgtgcgcgagccgaagcagggcgaggcattgcctcactcaggaagcccaagggaaggaaaactaacaaacagaaaggacatccacaccaaaaacccatctgtacatcaccatcatcaaagaccaaaagtagataaaaccacaaagattgggaaaaaacagaacagaaaaactggaaactctaaaacgcagagcgcctctcctcctccaaaggaatgtagttcctcaccagcaacggaacaaagctggatggagaatgactttgatgagctgagagaagaaggcttcagacaatcaaattactctgagctacggaaggacattcaaaccaaaggcaaagaagttgaaaactttgaaaaaaatttagaagaatgtaaaactagaataaccaatacagagaagtgcttaaaggagctgatggagctgaaaaccaaggctcgagaactatgtgaagaatgcagaagcctcaggagccgatgcaatcaactggaagaaagggtatcagtgatggaagatgaaatgaatgaaatgaagcgagaagggaagtttagagaaaaaagaataaaaagaaatgagcaaagcctccaagaaatatgggactatgtgaaaagaccaaatctacgtctgattggtgtacctgaaagtgatggggagaatggaaccaagttggaaaacactctgcaggatattatccaggagaatttccccaatatagcaaggcaggccaacgttcagattcaggaaatacagagaacgccacaaagatactcctcgagaagagcaactccaagacacataattgtcagattcaccaaagttgaaatgaaggaaaaaatgttaagggcagccagagagaaaggtcgggttaccctcaaaggaaagcccatcagactaacagcggatctctcggcagaaaccctacaagccagaagagaatgcagagcaggcagctgcaggaagatattcgcaaccataccaatcagcaccaccacaatacccgccatcagcataccgccgaggaacgacatatctttgcgggtggtcagcacatatgcagagcagcagaagaacactaacgccgttccgcccagcgtctaccttgggtttggtgtgggttctgcctggcgtgctgtgctgtggcgtgtttggtggtcccttgtggttgtcgtggggtttgtgtctatcgctgcggcgggggtctgtgttcgtgggggtgtctgtatgacttccgtggaggaagtgactctggatgtggtagaaatagcaaaagaacaagaattagaagtggagcctgaaaatgtggctgaattgctgccatttatgataaacgtgacgatagggcgccagtggccgtcccccaagtttttcgcccccaaaaaacaatgtccccagtttaagacccttctttaa

SEQ ID NO: 116269 - DNA, 1422 bp, Homo sapiens
atggcagaaggcaaggaggagcaagtcccatcttacatggatggcagcaggcaaagaaagaatgaggaagatgtaaaagcagaaacccctgataaaaccatcagctctcgggcagcactcaggagaggcacttcttctgatggaagaaaactgaatgggacatttgcagtaaggggtgctggtgggtactacatgtggggccacactcgagctgccttctcagtcaacccctttggcagcttgggccaagtctctttgaagaggaagactgtgatatctgaactcaaacaggcagtgcccagagagagaagcacaggtccacgcaggcagccaaagccatcttcttggttgaaagatactcttttcggggggaggagccaagatggccgagtaggaacagctccggtctacagctcccagcgtgagcgacaaagaagacgggtgatttctgcatttgcatctgaggaacgcagttccttcaccagcaaccggaaccaaaagcttggattggagaatgactttgacgagctgagagaagaaggcttcagacgatcaaattactctgagctacgggaggacattcaaaccaaaggcaaagaagttgaaaactttgaaaaaaatttagaagaatgtataactagaataaccaatacagagaagtgcttaaaggagctgatggagctgaaaaccaaggctcaagaactacgtgaagaatgcagaagcctcaggagccgatgtgatcaactggaagaaagggtatcagcaatggaagatgaaatgaatgaaatcaagcgagaaggaaagtttagagaaaaaagaataaaaagaaatgagcaaagcctccaagaaatatgggactatgtgaaaagaccaaatctacgtctgattggtgtacctgaaagtgatgcggagaatggaaccaagttggaaaacactctgcaggatattatccaggagaacttccccaatctagcaaggcaggccaacgttcagattcaggaaatacagagaacgccacaaagatactcctcgagaagagcaactccgagacacataattgtcagattcaccaaagttgaaatgaaggaaaaaatgttaagggcagccagagagaaaggtcgggttaccctcaaagggaagcccatgagactaacagcgaatctctcggcagaaaccctacaagccagaagagagtgggggccaatattcaacactcttaaagaaaagaattttcaacccagaatttcatatccagccaaactaagcttcataagcgaaggagaaataaaatactttacagacaagcaaatgctgagagattttgtcaccaccagacctgccttacaagagctcctgaaggaagcacgaaacatggaaaggaacaaccggtaccagctgctgcaaaattatgccaaaatgtaa

SEQ ID NO: 116270 - DNA, 9087 bp, Homo sapiens
atggtgttgctcacttcaagaatgaagctgcagaccttactggttcgtggtcttgctcacttctttaatgaagctgcagaccttactgatgtgtccagagattcttccttctggcagtttcctggtcttcctcacttcaagaatgaagctgccgaccttagtgatgtttccagagtttcttccttctggcaggttcgtggtcttgctcacatctttaatgaagctgcagaccttactgatgtgtccagagtttcttccttcttgcagtttcgtggtcttcctcacttcaagaatgaagctgcagaccttactgatgtgtccagagtttcttccttcttgcaggttcgtggtcttgctcacttccttaatgaagctgcagaccttactgatgtgtccagagttttttccttctggcaggttcgtggtcttgctcacttccttaatgaagctgcagaccttactgatatgtccagtgtttcttccttctggcaggttcatggtgttgctcactttaagaatgaagctgcagaccttaatgatgtgtccagagtttcttccttcttgcaggttcgtggtcttgctcacttccttaatgaagctgcagaccttaatgatgtgcccagagtttcttccttcttgcaggttcgtgttcttgctcacttccttaatgaagctgcagaccttactgagtttgatccttcagatatttccagagtttcttccttctggcaggttcgtgttcttgctcacttctttaatgaagctgcagaacttactgatgtgtccagagtttcttccttctggcagtttcgtggtcttcctcacttcaagaatgaagctgcagaccttagtgatgtttccagagtttcttccttctggcaggttcgtggtcttgctcacttctttaatgaagctgcagaccttactgatgtttccagagtttcttccttctggcaggttcgtggtcttgctcacatctttaatgaagctgcagaccttactgatgtgtccagagttacttccttctggcaggttcatggtgttgctcacttcaagaatcaagctgcagaccttactgatgtttccagagtttcttccttctggcaggtacgtggtcttgctcacttctttaatgaagctgcagaccttactgatgtgtccagagtgtcttccttctggcaggttcatggtcttgctcacttcactaatgaagctgcagaccttacagatgtgtccagggtttctgtcttctggcaggttcatggacttcctcacttcaagaatgaagctgccgaccttagtgatgtgtccagggtttctgtcttctggcaggttcatggtcttcctcacttcaagaatgaagctgcagaccttagtgatgtttccagagtttcttccttctgtcaggttcgtggtgttgctcacttctttaatgaagctgcagaccttactgatgtgtccagagtttcttccttctggcagtttcgtggtcttcctcacttcaagaatgaagctgcagaccttactgatgtgtccagagttgcttccttctggcaggttcgtggtcttgctcacttccttaatgaagctgcagaccttactgatgtgtccagtgtttcttccttctggcaggttcatggtgttgctcacttgaagaatgaagctgcagaccttcctgatgtgcccagagtttcttccttcttgcaggttcgtgttcttgctcacttccttaatgaagctgcagaccttactgatgtttccagagtttcttccttctggcaggttcgtggtcttgctcacatctttaatgaagctgcagaccttactgatgtgtccagagtgtcttccttctggcaggttcatggtcttgctcacttcaagaatgaagctgcagaccttactggtgtgtccagggtttctgtcttctggcaggttcatcgtcttgctcacttcaagaatgaagctgccgacctttgtgatgtgtccagagtttcttccttcttggaggttcgtggtcttgttcacttccttaatgaagctgcagaccttaccggatcatggtcttgctcattgaagaatgaagctgccgaccttagtgatgtgtccagagtgtcttccttctggcagcttcatggtcttgctcacttcactaatgaagctgcagaccttactgatgtgtccagaggttcttccttctggcaggttcatggtgttgctcacttcaagaatgaagctgcagaccttagtgatgattccagagtttcttccttcttgcaggttcgtggtcttgctcacttccttaatgaagctgcagaccttactgatgtgtccagagtttcttctttctggcagtttcgtggtcttcctcacttcaagaatgaagctgcagaccttactgatatgtccagcgtttcttccttctggcaggttcatggtcttgctcatttcaagaatgaagctgcagacttttacgatgtgtccagagattcttccttctggcagtttcctggtcttcctcacttcaagaatgaagctgcagactttactgatgtgtccagggtttctgtcttctggcaggttcatggtcttgctcaattcaagaatgaagctgccgatattagtgatgtgtccagagtttcttccttcttgcatgttcgtggtcttgctcacttccttaatgaagctgcagaccttactgatgtgtccagagttacatccttctggcaggttcatggtgttgctcacttcaagaatcaagctgcagaccttactgatgtttccagagtttcttccttctggcaggttcgtggtcttgctcacttctttaatgaagctgcagaccttactgatgtgtccagagtgtcttccttctggcaggttcgtggtcttgctcacttcactaatgaagctgcagaccttactgatgtgtccagcgtttcttccttctggcaggttcatggtcttcctcacttcaagaatgaagctgcagaccttactgatgtttccagagtttcttccttctggcaggttcgtcttcttgctctcttctttaatgaagctgcagaccttactgatgtgtccagagtttcttccttctggcagtttcgtggtcttcctcacttcaagaatgaagctgcagaccttactgatgtgtccagagtgtcttccttctggcaggttcatggtcttgctcacttcactaatgaagctgcagaccttactgatgtgtccagggtttctgtcttctggcaggttcatggacttcctcacttcaagaatgaagctgccgaccttagtgatgtgtccagcgtttcttccttctggcaggttcatggtcttcctcacttcaagaatgaagctgcagaccttactgatgtttccagagtttcttccttctggcaggttcgtggtgttgctcacttctttaatgaagctacagaccttactgatgtgtccagagtttcttccttctggcagtttcgtggtcttcctcacttcaagaatgaagctgcagaccttactgatgtgtccagagtgtcttccttctggcaggttcatggtcttactcacttcaagaatgaagctgcagaccttactgatgtgtccagagtttcttccttctggcaggttcgtggtcttgctcacttccttaatgaagctgcagaccttactgatgtgtccagtgtttcttccttctggcaggttcatggtgttgctcacttcaagaatgaagctgcagaccttactgatgtgtccagagtttcttccttcttgcaggttcgtggtcttgctcacttccttaatgaagctgtagaccttaatggtgagtgttacagcacttcaaggtgttatgtccagagttttttccttcagatgtgtcctgagtgtcttccttctggcaggttcatggtcttgctcacttcactaacgaagctgcagaccttactggtacatggtcttgctcacttcaagaatgaagctgccgaacttagtgatgtgtccagagtttcttccttcttgcaggttcgtggtctggctcacttccttaatgaagctgcagaccttaatgatgtgtccagagtttcttccttcttgcaggttcgtggtcttgctcacttccttaatgaagctgcagaccttactgatgtgtccagagttgcttccttctggcaggttcgtggtcttgctcacttccttaatgaagctgcagaccttactgatgtgtccagtgtttcttccttctggcaggttcatggtgttgctcacttgaagaatgaagctgcagaccttcctgatgtttccagagtttcttccttcttgcaggttcgtggtcttgctcacttccttaatgaagctgcagaccttaatgatgtgtccagtgtttcttccttctggcaggttcatggtcttgctcacttcaagaatgaagctgcagaccttactgatgtgtccagagtttcttccttctggcagtttcgtggtcttcctcacttcaagaacgaagctgcagaccttactgatgtgtccagaatttcttcattcttggaggttcgtggtcttgctcacttccttaatgaagctgcagaccttaccgatgtgtccagagtgtcttccttctggcagcttcatggtcttgctcacttcactaatgaagctgcagaccttactgatgtgtccagagtttcttccttcttgcaggttcctggtcttgctcacttccttaatgaagctgcagaccttactgatgtgtccagagtgtcttccttctggcagattcatggtcttgttcacttcactaatgaagctgcagaccttactgatgtttccagagtttcttcattctggcactttcgtggtcttcctcacttcaagaatgaagctgcagaccttaccgatgtgtccagggtttctgtcttctggcaggttcatggtgttgctcacttcaagaatgaagctgccgaccttagtgatgtgtccagagtttcttccttctggcagtttcgtggtcttcctcacttcaagaacgaagctgcagaccttactgatgtgtccagagattcttccttctggcagtttcctggtcttcctcacttcaagaatgaagctgcagactttactgatgtgtccagggtttctgtcttctggcaggttcatggtcttgctcaattcaagaatgaagctgccgaaattagtgatgtgtccagagtttattccttcttgcaggttcgtggtcttgctcacttccttaatgaagctgcagaccttaccgatatgtccggagattcttccttctggcaggttctttgtcttgctcattgcaagaatgaaactgcagaccttagtgatgtgtccagaatgtcttccttctggcagcttcatagtcttgctcacttcactaatgaagctgcagaccttactgatgtgtccagaggttcttccttctggcaggttcatggtgttgctcacttcaaaaatgaagctgcagaccttagtgatgtgtccagagtttcttccttcttgcaggttcgtggtcttgctcacttccttaatgaagcttcagaccttactgatgtgtccagagtgtcttccttctggcaggttcatgttcttgttcacttcactaatgaagctgcaaaccttactgatgtttccagagtttcttccttcttgcaggttcgtggtcttgctcacttccttaatgaagctgcagaccttactgatgtgtccagtgtttcttccttctggcaggttcatggtcttgctcacttcaagaatgaagctgcaggccttactgatgtgtccagagtttcttctttctgggagtttcgtggtcttcctcacttcaagaatgaagctgcagaccttactgatatgtccagcgtttcttccttctggcaggttcatggtcttgctcatttcaagaatgaagctgcagacttttacgatgtgtccagagattcttccttctggcagtttcctggtcttcctcacttcaagaatgaagctgcagactttactgatgtgtccagggtttctgtcttctggcaggttcatggtcttgctcagttcaagaatgaagctgccgaaattagtgatgtgtccagagtttattccttcttgcaggttcgtggtcttgctcacttccttaatgaagctgcagaccttaccgatgtgtccagggtttgtgtcttctggcaggttcatggtcttgctcacttcaagaatgaagctgccgaccttagtgatgtgtccagggtttctgtcttctggcagtttcatggtcttgctcacttcaagaatgaagctgccgaccttagtgatgtgtccagagtttcttccttcttgcaggttcgtggtcttgctcacttccttaatgaagctgcagaccttaccgatgtgtccagtgtttcttccttctggcaggttgattgtcttgctcacttcaagaatgaagctgcagaccttactgatgtttccagagtttcttccttctggcaggttcgtgatcttgctcacttctttaatgaagctgcagaccttactgatgtttccagagtttcttctttctggcagtttcttggtcttcctcacttcaagaatgaagctgcagacattactgatgtgtccagagtttcttccttctggcagtttcgtggtcttcctcacttcaagaatgaagctgcagaccttactggtgagtgttacagcacttatagttgttatgtccagagtttgttccttcggatgtgtccagagtgtcttccttctggcaggttcatggtcttcctcacttcactaatgaagctgcagaccttactggttcatggtgttgctcacttcaagaatgaagctgcagaccttagtgttgagtgttacagcacttacaggtgttgtgtccagagtttgttccttcagatgtgtctagagtttcttccttctttcaggttcgtggtcttgctcacttccttaatgaagctgcagaccttaccggttcatggtcttgctcacttcaagaatgaagctgcagaccttactgatgtgtccagagtttcttctttctggcagtttcgtggtcttcctcacttcaagaatgaagctgcagacattactgatgtgtccagagtttcttccttctggcaggttcatggtgttgctcacttcaagaatgaagctgcagaccttactggtatttccagagtttcttccttctggcaggttcgtggtcttcctcacttctttaatgaagctgccgaccttactgatgtgtccagagtttcttccttctggcagtttcgtggtcttcctcacttcaagaatgaagctgcagaccttactgatgtgtccagagtttcttccttcttgcaggttcgtggtcttgctcacttccttaatgaagctgcagaccttaccgatgtgtccagtctttcttccttctggcaggttcatggtcttgctcacttcaagaatgaagctgcagaccttactgatgtttccagagtttcttccttctggcaggttcgtggtcttgctcacttctttaatgaagctgcagaccttactgatgtgtccagagtttcttctttctggcagtttcgtggtcttcctcacttcaagaatgaagctgcagacattactgatgcgtccagagtttcttccttctggcaggttcatggtgttgctcacttcaagaatgaagctgcagaccttactggtttttccagagtttcttccttctggcaggttcgtggtcttgctcacttctttaatgaagctgcagaccttactgatgtgtcaagagtttcttccttctggcagtttcgtggtcttcctcacttcaagaatgaagctgcagaccttactgatatgtccagagtgtcttccttctggcaggttcatggtcttgctcacttcactaatgaaggtgcagaccttactgatgtctccagagtttcttccttctggcaggttcgtggtcttgctcacttcaagaatgatgctgcagaccttagtggtgagtgtttcaacactaaaaggtgttatgtccagagtttgttccttcagaagtatccagggtttcttccttctggcaggttcatggtcttgctcactttaagaatgaagctgcagaccttactgaaacgcagttcctcaccagcaatggaacaaagctggatggagaatgactttgacgagctgagagaagaaggctacagacgatcaaattactctgagctacgggaggacattcaaaccaaaggcaaagaagttgaaaactttgaaaaaaatttagaagaatgtgtaactagaataaccaatacagagaagtgcttaaaggagctgatagagctgaaaaccaaggctcgagaactacatgaagaatgcagaagcctcaggagccgatgcgatcaactggaagaaagggtatcagcaatggaagatgaaatgaatgatatgaagcgagaagggaaggttagagaaaaaagaataaaaagaaatgagcaaagcctccaagaaatatgggactatgtgaaaagaccaaatctacgtctgattggtgtacctgaaagtgatgcggagaatggaaccaagttggaaaacactctacaggatattatccaggagaacttccccaatctagcaaagcaggccaacgttcagattcaggaaatacagagaacgccacaaagatactcctcgagaagagcaactccaagacacataattctcagattcaccaaagttgaaatgaaggaaaaaatgttaagggcagccagagagaaaggttgggttaccctcaaagggaagcccatcagactaacagcggatctctcggcagaaaccctacaagccagaagagagtggggaccaatattcaacattcttaaagaaaagaattttcaacccagaatttcatatccagccaaactaagcttcataagtgaaggagaaataaaatactttacagacaagcaaatgctgagagattttgtcaccaccaggcctgccctaaaagagctcctgaaggaagcgctaaacatggaaaggaacaaccagtaccagccgctgcaaaatcatgccaaaatgtaa

SEQ ID NO: 116271 - DNA, 4954 bp, Homo sapiens
atgaaagagaatttcaaacacaggcacgtggtggcgttcattagcagtcaggaagctcaggaagattcaagagaggaagaagaccgactggagtctcggttttactttctttttctcttggagctgagctataagacaacaggactgaacagggagccaactgtttctttgaacagtaaatcaggaacaccaatggaccaaaatgaacacagtcactggggaccacatgcaaagggccaatgtgccagcagatctgagctgagaatcatcctggtgggcaaaacaggaactggcaaaagtgctgcagggaacagcatcctcaggaagcaagcatttgaatcgaagctgggttcccagaccttgactaagacttgcagcaaaagtcagggaagctggggaaatagagagattgtcattattgacacaccagatatgttttcttggaaggaccactgtgaagctctgtacaaagaggtgcagaggtgctacttgctgtctgcaccaggaccccatgtgctgctcctggtgactcagctgggccgctatacctcacaggaccagcaggctgcacagagggtgaaggagatctttggagaggatgccatgggacacacaattgtcctctttacccacaaggaagacctcaatggtggctccctgatggattacatgcacgactcagataacaaagccctaagcaagctggtggcagcatgtggtgggcgaatctgtgcctttaataaccgtgctgaagggagcaatcaggatgaccaagtgaaggaactaatggactgtattgaggatctgttgatggagaaaaatggtgatcactataccaatgggttgtacagcctaatacagaggtctaaatgtggacctgtgggatcagatgaaagagtaaaggaattcaaacagagccttataaagtacatggaaactcaaagaagttacacagccttggctgaagcaaactgcctaaaaggagccttaatcaaaacacaactaccaaaagtagataaaaccacaaagatagggaaaaaacagagcagaaaaactggaaactctaaaaagcagagcacctctcctcctccaaaggaacgcagttcctcaccagcaatggaacaaagctggacagagaatgactttgacgagctgagagaagaaggcttcagacgatcacattactctgagctaccggaggacattcaaaccgaaggcagagaagttgaaaactttgaaaaaagtttagaagaatgtataactagaataacccacacagagaagtgcttaaaggagctgatggagctgaaaaccaaggctcgagaactacgtgaagaatgcagaagcctcaggagccaatgcgatcaactggaagaaagggtgtcagcaatggaagatgaaatgaatgaaatgaagcgagaagggaagtttaaagaaaaaaagaataaaaagaaatgagcaaagccttcaagaaatatgggactatgtgaaaagaccaaatctacgtccgattggtgtatctgaaagtgatggggagaatggaaccaagttggaaaacactctgcaggatattatcccggagaatttccccaatctagcaaggcaggccaacgttcagattcaggaaatacagagaatgccacaaagatactcctcgagaagagcaactccaagacacataattgtcagattcaccaaagttgaaatgaaggaaaaaatgttaagggcagccagacagaaagcaccacaccacacctattccaaaattgaccacatagttggaagtaaagctctcctcagcaaatgtaaaagaacagaaattataacaaactatctctcagaccacagtgcaatcaaactagaactcaggattaagaatctcactcaaagccgctcaactacatggaaactgaacaacctgctcctgaatgactactgggtacataacgaaatgaaggcagaaataaagatgttctttgaaaccaacgagaacaaagacaccacataccagaatctctgggacacattcaaagcagtgtgtagagggaaatttatagcactaaatgcctacaagagaaagcaggaaacatccaaaattgacaccataacatcacaattaaaagaactagaaaagcaagagcaaacacattcaaaagctagcagaaggcaagaaataactaaaatcagagcagaactgaaggaaatagagacacaaaaaacccttcaaaaaatcaatgaatccaggagctggttttttgaaaggatcaacaaaattgatagaccgctagcaagactaataaagaaaaaaagagagaagaatcaaatagacacaataaaaaatgataaaggggatatcaccaccgatcccacagaaatacaaactaccatcagagaatactacaaacacctctacgcaaataaactagaaaatctagaagaaatggatacattcctcgacacatacactctcccaagactaaaccaggaagaagttgaatctctgaatagaccaataacaggctctgaaattgtggcaataatcaatagtttaccaaccaaaaagagtccaggaccagatggattcacagccgaattctaccagaggtacaaggaggaactggtaccattccttctgcaactattccaatcaatagaaaaagagggaatcctccctaactcattttatgaggccagcatcattctgataccaaagccgggcagagacacaaccaaaaaagagaattttagaccaatatccttgatgaacattgatgcaaaaatcctcaataaaatactggcaaaccgaatccagcagcacatcaaaaagcttatccaccatgatcaagtgggcttcatccctgggacgcaaggctggttcaatatacgcaaatcaataaatgtaatccagcatataaacagagccaaagacaaaaaccacatgattatctcaatagatgcagaaaaagcctttgacaaaattcaacaacccttcatgctaaaaactctcaataaattaggtattgatgggacatatttcaaaataataagagctatctatgacaaacccacagccaatatcatactgaatgggcaaaaactggaagcattccctttgaaaactggcacaagacagggatgccctctctcaccgctcctattcaacatagtgttggaagttctggccagggcaatcaggcaggagaaggaaataaagggtattcaattaggaaaagaggaagtcaaattgtccctgtttgcagacgacatgattgtttatctagaaaaccccatcgtctcagcccaaaatctccttaagctgataagcaacttcagcaaagtctcaggatacaaaatcaatgtacaaaaatcacaagcattcttatacaccaataacagacaaacagagagccaaatcatgagtgaactcccattcacaattgcttcaaagagaataaaatacctaggaatccaacttacaagggatgtgaaggacctcttcaaggagaactacaaaccactgctcaaggaaataaaagaggacacaaacaaatggaagaacattccatgctcatgggtaggaagaatcaatatcgtgaaaatggccatactgcccaaggtaatttacagattcaatgccatccccatcaagctaccaatgactttcttcacagaattggaaaaaactactttaaagttcatatggaaccaaaaaagagcctgcatctccaagtcaatcctaagccaaaagaacaaagctggaggcatcacactacctgacttcaaactatactacaaggctacagtaaccaaaacagcatggtactggtaccaaaacagagatatagatcaatggaacagaacagagccctcagaaataatgccacatatctacaactatctgatctttgacaaacctgagaaaaacaagcaatggggaaaggattccctatttaataaatggtgctgggaaaactggctagccatatgtagaaagctgaaactggatcccttccttacaccttatacaaaaatcaattcaagatggattaaagatttaaacgttagacctaaaaccataaaaaccctagaagaaaacctaggcattaccattcaggacataggcgtgggcaaggacttcatgtccaaaacaccaaaagcaatggcaacaaaagccaaaattgacaaatgggatctaattaaactaaagagcttctgcacagcaaaagaaactaccatcagagtgaacaggcaacctacaacatgggagaaaattttcacaacctactcatctgacaaagggctaatatccagaatctacaatgaactcaaacaaatttacaagaaaaaaacaaacaaccccatcaaaaagtgggcgaaggacatgaacagacacttctcaaaagaagacatttatgcagccaaaaaacacatgaagaaatgctcatcatcactggccatcagagaaatgcaaatcaaaaccactatgagatatcatctcgcaccagttagaatggcaatcattaaaaagtcaggaaacaacagcaaaatggtggaagcagatgggcctggcaatcttttcactggtgtcctccatttagaaaccaatgaaaagtcgcttaaagcagtatttgggaaatatggtcccatattggaagacaactttttggatggaaaagcaatgaaagtagaacaagttaacaaaccgtcttttcaaagtggtggtaatgtggagatcaccatcttcttggagaaacaggagcccttcaggaagtctgagacaggaaaaaaattttttaagttgttcctgctgacattagcaaacttttttaaatttagtgaccatgatgactatagtgggggccttggtagagatcattctgaacatccaaatgggagttcttacagagatgcatatcagagttatgggaccttctatggtgcaccacctgcatga

SEQ ID NO: 116272 - DNA, 1945 bp, Homo sapiens
  misc_feature (1)...(1945): n = a,t,c or g
atgggcaaatttgatgaaggtaaactgcccaccgacccacacctgatgctccgactggccattgaaactgttgctcatgactatgatgtcatagttattgacagcgcgcctaacctgggtatagggacgattaatgtcatatgtgctgctgatgtgctgattgttcccacgcctgctgtgttgttcgactacacctccgcactgcagttcttcgatctgctctgtgatctgctcaagaacgttgatcttaaatgggtcaccgtcgacagcgacacacttgcatcggatgcagcccggttaacgtgccggcacggcctgggtaaccagcctactgggcgctctaaagaacccccaagcccagttctgacttttacgactgcacttctggcaggaggagcgactcaagccttcgcgaaagaaaataaccaaaaagcatacaaagaaacgtacggcgtctctcatattacacgccatgatatgctgcagatccctaaacagcagcaaaacgaaaaataccaagtgcctcaattcgatcaatcaacgattaaaaatattgagtctgcaaaaggacttgatgtgtgggacagctggccgctgcaaaacgctgacggaacagtagctgaatacaacggctatcacgttgtgtttgctcttgcgggaagcccgaaagacgctgatgacacatcaatctacatgttttatcaaaaggtcggcgacaactcaatcgacagctggaaaaacgcgggccgtgtctttaaagacagcgataagttcgacgccaacgatccgatcctgaaagatcagacgcaagaatggtccggttctgcaacctttacatctgacggaaaaatccgtttattctacactgactattccggtaaacattacggcaaacaaagcctgacaacagcgcagccttgccctcacacacacttggagctgagcagtcagtatcagcagctatcaagtgcaggaggagtcacaagaagaaagatgccaactccatcttcccccaagggcaggaaggccaccaactacaagcccaagnatcccccaggcttcatacgatcaaactacactgagctacaggaggaaattcaaaccaaaggcaaagaagttaaaaactttgataaaaatttagacgaatgtgtaactagaataaccaatagagagaagtgcttaaaggagctgatggagctgaaagccaaggctcaagaactacgtgaagaatgcagaagcctcaggagccgatgcgatcaactggaagaaagggtatcagtgatggaagatgaaatgaatgaaatgaagcgagaagggaagtttagagaaaaaagaataaaaagaaatgaacaaagcctccaagaaatatgggattatgtgaaaagaccaaatctacgtctcattggtgtacctgaaagtgacgaggagaatggaaccaagttggaaaacactctgcaggatgttatccaggagaacttccccaatctagcaaggcaggccaacattcagattcaggaaatacagagaacgccacaaagatactcctttgagaagagcaactccaagacacataattgtccagattcaccaaactttgaaattgaaggaaaaaacgtttaagggcagcccagagagaaaggtcgggttacccacaaaggggaagcccatcagactaacagcagatctctgggcagaaactctacaagccagaagagagtgggggccaatattcaacattcttaaagaaaagaattttcaacccagaatttcatatccagccaaactaagcttcataagtgaaggagaaataaaatactttatagagaagcaaatgctgagagattttgtcaccaccaggcctgccctaaaagagctcctgaaggaagcgctaaacatggaaaggaacaaccggtaccagccgctgcaaaatcatgccaaaatgtaa

SEQ ID NO: 116273 - DNA, 939 bp, Homo sapiens
atggggaaaaaacagaacagaaaaactggaaactctaaaacacagagcaactctcctcctccaaaggaacgcagttcctcaccagcaacggaacgaagctggatggagaatgactttgacgagctgagagaagaaggcttcagacgatcaaattactctgagctacgggaggacattcaaaccaaatgcaaagaagttgaaaactttgaaaaaaatttagaagaatgtataactagaataaccaatacagagaagtgcttaaaggagctgatggagctgaaaaccaaggctcgagatctacatgaagaatgcagaagcgtcaggagccgatgcgatcaactggaagaaagggtatcagtgatggaagatgaaatgaatgaaatgaaaccaaatctacgtctgactggtgtacctgaaagtgatggggagaatggaaccaagttggaaaacactctgcaggatattatccaggagaacttccccaatctagcaaggcaggccaacgttcagattcaggaaatacagagaatgccacaaagatactcctcgagaagagcaactccaagacacataattgtcagattcaccaaagttgaaaaaaaggaaaaaatgttaagggcagccagagagaaaggtcgggttaccctcaaagggaagcccatcagactaacagcagatctctcggcagaaaccctacaagccagaagagagtgggggccaatattcaacattcttaaagaaaagaattttcaacccagaatttcatatccagccaaactaagcttcataagtgaaggagaaataaaatactttacagacaagcaaatgctgagagattttgtcaccagcaggcctgccctaaaagagctcctgaaggaagcactaaacatggaaaggaacaaccggaaccagccactgcaaaatcatgccaaaatgtaa

SEQ ID NO: 116274 - DNA, 2895 bp, Homo sapiens
atggcactttcaccttatgcttgctcctgctatgggatatgctggctacccatcacctgtcgccttgattggaaacttcgtgaagcctctccagcaacagaagccgtcctcgtggattcctgtcagccctgcacttgcaagatccccctgagagaagaaggcttcagacgatcaaattactctgagctacaggaggacattcaaaccaaaggcaaagaagttgaaaactttgaaaaaaatttagaagaatgtatgactagaataaccaatacagagaagtgcttaaaggagctgatggagctgaaaaccaaggctcgagaactacatgaagaatgtagaagcctcaggagccgatgcgatcaactggaagaaagggtatcagcaatggaagatgaaatgaatgaaatgaagcgagaagggaagtttagagaaaaaagaataaaaagaaatgagcaaagcctccaagaaatatgggactatgtgaaaagaccaaatctacatctgatgggtgtacctgaaagtgatggggagaatggaagcaagttggaaaacacgctgcaggatattatccaggagaacttccccaatctagcaaggcttatttctggcactgcctataaccaattagaaaaagatctggctctgaaggggctacgtgttttgctcgtggaaggtaacgacccccagggaacagcctcaatgtatcacggatgggtaccagatcttcatattcatgcagaagacactctcctgcctttctatcttggggaaaaggacgatgtcacttatgcaataaagcccacttgctggccggggcttgacattattccttcctgtctggctctgcaccgtattgaaactgagttaatgggcaaatttgatgaaggtaaactgcccaccgatccacacctgatgctccgactggccattgaaactgttgctcatgactatgatgtcatagttattgacagcgcgcctaacctgggtatcggcacgattaatgtcgtatgtgctgctgatgtgctgattgttcccacgcctgctgagttgtttgactacacctccgcactgcagtttttcgatatgcttcgtgatctgctcaagaacgttgatcttaaagggttcgagcctgatgtacgtattttgcttacagaatacagcaatagtaatggctctcagtccccgtggatggaggaacaaattccggatgcctggggaagcatggttctaaaaaatgttgtacgtgaaacggatgaagttggtaaaggaatatttgctttacaattttttgatgctgacaattacttgaataggatccacgcagttgaaaactttgaaaaaaatttagaagaatgtataactagaataaccaatacagagaagtgcttaaaggagctgatggagctgaaaaccaaggctcgagaactatgtgaagaatgcagaagcctcaggagccgatgcgatcaactggaagaaagggtatcagcaatggaagatgaaatggatgaaatgaatgaaatgaagcgagaagggaagtttagagaaagaagaataaaaagaaatgagcaaagcctccaagaaatatgggactatgtgaaaagaccaaatctacgtctgattggtgtacctgaaagtgagggggagaattgaaccaagttggaaaacactctgcaggatattatccaggagaacttccccaatctagcaaggcaggccaacgttcagattcaggaaatacagagaacgccacaaagattctcctcgagaagagcaactccaagacacataattgtcagattcaccaaagttgaaatgaaggaaaaaatattaagggcagccagagagaaaggtcgggttaccctcaaaggaaagcccatcagactaacagcggatctctcggcagaaaccctacaagccagaagagagtgggggccaatattcaacattcttaaagaaaagaattttcaacccagaatttcatatccagccaaactaagcttcataagtgaaggagaaataaaatactctatagacaagcaaatgctgagagattttgtcaccaccaggcctgccctaatagaagctctgaaggaagtgctaaacatggaaaggaacaaccgatcccccagttcctcaccagcaacggaacaaagctggatggagaatgattttgacgagctgagagaagaaggcttcagacgatcaaattactctgagctacgggaggacattcaaaccaaaggcaaagaagttgaaaactttgaaaaaaatttagaagaatgtataactagaataaccaatacagagaagtgcttaaaggagctgatggagctgaaaaccaaggctcgagaactacgtgaggaatgcagaagcctcaggagccgatgcgatcaactggaagaaagggtatcagcaatggaagatgaaatgaatgaaatgaagcgagaagggaagtttagagaaaaaagaataaaaagaaatgagcaaagcctccaagaaatatgggactatgtgaaaagaccaaatctacgtctgattggtgtacctgaaagtgatgtggagaatggaaccaagttggaaaacactctgcaggatattatccaggagaacttccccaatctagcaaggcaggccaacgttcagattcaggaaatacagagaacgccacatagattctcctcgagaagagcaactccaagacacataatttctcatccagatctcatcaaacatgaaccattgttttcttcaccaagtgtccaaagggtcagtatcaatggtcaagggtccactctaaatgccctggccctgcagccacccttaagaacttttgttaacatttccactggagtatttgggaatattcgccaagagttacaaagaaaacatggctag

SEQ ID NO: 116275 - DNA, 6223 bp, Homo sapiens
atggggaaaaaacagagcagaaaaactggaaactttaaaaagcagaggcacctttccttctccaaagggatcgcagttcttcaccagcaatggaacaaagctggacagagattgacttttgacgagttgagagaaggcttcagaccatcaaactattccaagctacagaaggaaattcaaaccaaaggcaaagaagttgaaaactttgaaaaaaattcagatgaatgtataactagaataaccaatacaaagaagtgcttaaaggagctgatggagctgaaagccaaggctcgagaactacgtgaagaatgcagaagcctcaggagccgatgtgatcaactggaagaaagggtatcagggatggaagatgaagcgaatgaaatgaagcgagaagggaagtttggagaaaaaagaataaaaagaaacgaacaaagcctccaagaaatatgggactatgtgaaaagaccaaatctacgtctgattggtgtacctgaaagtgacggagagaatggaaccaagttgaaaaacactctgcaggatattatccaggagaacttccccaatctagcaaggcaggccaacattcagattcaggaaatacagagaacgccacaaagatactcctcgagaagagcaactccaagacacataattgtcagattcaccaaagtcgaaggaaaaaatattaagggcagccagagagaaagggcggaaatacaaaccaccatcagagaatactacaaacacctctactcaaataaactagaaaatctagaagaaatggataaattcctcgacacatacaccctcccaagcctaaaccaagaagaagttgaatctctgaatagaacaataacaggatctgaaattgtggcaataattaatagcttaccaaccaaaaagagtccaggaccagatggatttacagctgaattctaccagaggtacaaggaggaagtggtaccattccttctgaaactattccaatcaatagaaaaagaggttatcctccctaactcattttatgaggccagaatcatcctgataccaaagcctggcagagacacaaccaaaaaagagaattttagaccaatatccttgatgaacattgatgcaaaaatcctcaataaaatactggcaaaccgaatccagcagcacatcaaaaagcttatccaccatgatcaagtgggcttcatccctgggatgcaaggctggttcaacatatgcaaatcaataaacataatccatcacataaacagaaccaacgacaaaaaccacacgattatctcaatagatgcagaaaaggccttcgataaaattcaacagcccttcatcctaaaaactcgcaataaactagttcattccacagataattcagctgcgcgcttcctctgtgcgaggcattgccggagagcggggagcgaattgaacgtggaacctgccagtaggggcttgccgcccaatacgaaattcaaaatatgtattggaatatttgttagtgtccccagacgaagttacattggttcaattttcggcgtgtgggagttttcgccactagcattcagcaccccagtttcaaccgttaaagctaccgactccacatacaggaaatgcatcttaaaatttggaaaaaaaatccccaaaacactgacatccaaacactttaaagctgccaaggtaggggaaacttccgcgaatttaggacagagagcaatcctgttattaaggcttgcaagtcgagagaaaggagagatggatcactttgcaggcagcagtagcagaaggacagacttggcgggttggttgtttggggcagacacccaggtgaccaagatggagttttctggaagaaagtggaggaagctgaggttggcaggtgaccagaggaatgcttcctaccctcattgccttcagttttacttgcagccaccttctgaaaacatatctttaatagaatttgaaaacttggctattgatagagttaaattgttaaaatcagttgaaaatcttggagtgagctatgtgaaaggaactgaacaataccagagtaagttggagagtgagcttcggaagctcaagttttcctacagagaaaacttagaagatgaatatgaaccacgaagaagagatcatatttctcattttattttgcggcttgcttattgccagtctgaagaacttagacgctggttcattcaacaagaaatggatctccttcgatttagatttagtattttacccaaggataaaattcaggatttcttaaaggatagccaattgcagtttgaggctctacgggaggacattcaaaccaaaggcaaagaagtggaaaactttgaaaaaaatttagaagaatgtataactagaataaccaatacagagaagtgcttaaaggagctgatggagctgaaaaccaaggctcgagaactacgtgaagaatgcagaagcctcaggagccgatgcgatcaactggaagaaaagatatcagcaatggaagatgaaatgaatgaaatgaagcgagaagggaagtttagagaaaaaagaataaaaagaaatgagcaaagcctccaagaaatatgggactatgtgaaaagaccaaatctgcgtctgattggtgtacctgaaagtgacggggagaatggaaccaagttggaaaacactctgcaggatattatccaggagaacttccccaatctagcaaggcaggccaacattcagattcaggaaatacagagaacgccacaaagatactcctcgagaagagcaactgcaagacacatagttgtcagattcaccaaagttgaaatgaaggaaacaatgttaagggcagccagagagaaaggttgggttaccctcaaagggaagcccatcagactaacagtggatctctcggcacaaactctccaagccagaagagagtgggggccaatattcaacattcttaaagaaaagaatttttcaaccgagaatttcatatccagccaaactaagcttcataagtgaaggagaaataaaatcctttacagacaagcaaatgctgagagattttgtcaacaccaggcctgccctaaaagagctcctgaaggaagtgctaaacatggaaaggaacaactggtaccagccactgcaaaatcatgccaaaatacagatcaacgagacagaaagtcaacaaggatacccaggaattgaactcagctctgcaccaagcggacctaatagacatctacagaactctccacaccaaatcaacagaatatactttttttcagcaccacaccacacctattccaaaattgaccacatagttggaagtaaagctctcctcagcaaatgtaaaagaacagaaattataacaaactatctctcagaccacagtgcaatcaaactagaactcaggattaagaatctcaatcaaagccgctcaactacatggaaactgaacaacctgctcctgaatgactactgggtacataacgaaatgaaggcagaaataaagatgttctttgaaaccaacgagaacaaagacacaacataccagaatctctgggacgcattcaaagcagtgtgtagagggaaatttatagcactaaatgcccacaagagaaagcaggaaagatccaaaattgacaccctaacatcacaattaaaagaactagaaaagcaagagcaaacacattcaaaagctagcagaaggcaagaaataactaaaatcagagcagaactgaaggaaatagagacacaaaaaacccttcaaaaaatcaatgaatccaggagctggttttttgaaaggatcaacaaaattgatagaccgctagcaagactaataaagaaaaaaagagaggagaatcaaatagacacaataaaaaatgataaaggggatatcaccaccgatcccacagaaatacaaactaccatcagagaatactacaaacacctctatgcaaataaactagaaaatctagaagaaatggataaattccttgacacatacactctcccaagactaaaccaggaagaagttgaatctctgaatagaccaataacaggagctgaaattgtggcaataatcaatagtttaccaaccaaaaagagtccaggaccagatggattcacagctgaattctaccagaggtacaaggaggaactggtaccattccttctgaaactattccaatcaatagaaaaagagggaatcctccctaactcattttatgaggccagcatcattctgataccaaagccgggcagagacacaaccaaaaaagagaattttagaccaatatccttgatgaacattgatgcaaaaatcctcaataaaatactggcaaaccgaatccagcagcacatcaaaaagcttatccaccatgatcaagtgggcttcatccctgggatgcaaggctggttcaatatacgcaaatcaataaatgtaatccagcatataaacagagccaaagacaaaaaccacatgattatctcaatagatgcagaaaaagcctttgacaaaattcaacaacccttcatgctaaaaactctcaataaattaggtattgatgggacgtatttcaaaataataagagctatctatgacaaacccacagccaatatcatactgaatgggaaaaaactggaagcattccctttgaaaactggcacaagacagggatgccctctctcactgctcctattcaacatagtgttggaagttctggccagggcaatcaggcaggagaaggaaataaagggtattcagttaggaaaagaggaagtcaaattgtccctgtttgcagacgacatgattgtttatctagaaaaccccatcgtctcagcccaaaatctccttaagctgataagcaacttcagcaaagtctcaggatacaaaatcaatgtacaaaaatcacaagcattcttatacaccaacaacagacaaacagagagccaaatcatgagtgaactcccattcacaattgcttcaaagagaataaaatacctaggaatccaacttacaagggatgtgaaggacctcttcaaggagaactacaaaccactgctcaaggaaataaaagaggatacaaacaaatggaagaacattccatgctcatgggtaggaagaatcaatatcgtgaaaatggccatactgcccaaggtaatttacagattcaatgccatccccatcaagctaccaatgactttcttcacagaattggaaaaaactactttaaagttcatatggaaccaaaaaagagcccgcatcgccaagtcaatcctaagccaaaagaacaaagctggaggcatcacactacctgacttcaaactatactacaaggctacagtaaccaaaacagcatggtactggtaccaaaacagagatatagatcaatggaacagaatagagccctcagaaataacgccgcatacctacaactatctgatctttgacaaacctgagaaaaacaagcaatggggaaaggattccctatttaataaatggtgctgggaaaactggctagccatatgtagaaaactgaaactggatcccttccttacaccttatacaaaaatcaattcaagatggattaaagatttaaacgttagacctaaaaccataaaaaccctagaagaaaacctaggcattaccattcaggacataggcgtgggcaaggacttcatgtccaaaacaccaaaagcaatggcaacaaaagccaaaattggcaaatggtacctaattaaactaaagagcttctgcacagcaaaagaaactaccatcagagtgaacaggcaacctacaacatgggagaaaattttcgcaacgtactcatctgacaaagggctaatatccagaatctacaatgaactcaaacaaatttacaagaaaaaaacaaacaaccccatcaaaaagtgggcgaaggacatgaacagacacttctcaaaagaagacatttatgcagccaaaaaatacgtgaaaaaatgctcatcatcactggccatcagagaaatgcaaatcaaaaccactatgagataccatctcacaccagttagaatggcaatcattaaaaagtcaggaaacaacagtgatctctaccttatgtctgcaggaaccagttgtttaatgggcagacactgggacagtggacaagaaacgtgtgtccaaaatgtcgtgctggacacgtgcagcccctctgaacaactcttaagagctattgctgatcttgtcccgcaaccctga

SEQ ID NO: 116276 - DNA, 4966 bp, Homo sapiens
tttcgtaacaacagccgccaccacagcagcctgatgcccatcagcagcttccccccagcgcccccaactcgggggtggccctgccagcccttgtgcccgggctgccagggacagaggccagcgcgctgcaacacaagatcaagaactccatctgcaaaactgtacaatctaaagtggactgcattttgcaagaagttgagaagtttacagacctagagaaactctacctctaccttcagctgccttctggtctcagcaatggagagaaaagtgatcagaatgccatgtcatctagtcgggcacaacaaatgcatgccttttcctggattcggaataccctagaggaacatccggagacttcacttgccaaacaggaagtctatgatgagtacaaaccaaaagtagataaaaccacaaagatggggaaaaaacagaacagaaaaactggaaactctaaaaaccagagcgcctctcctcctccaaaggaacgcagttcctcaccagcaacggaacaaagctggatggagaatgtctttgaggagcagagagaagaaggcttcagacgatcaaattactctgagctacgggaggacattcaaaccaaaggcaaagaagttgaaaactttgaaaaacatttagaagaatgtataactagaataaccaatacagagaagtgcttaaaggagctgatggagctgaaaaccaaggttcgagagctacgtgaagaatgcagaagcctcaggagccgatgcgatcaactggaagaaagagtatcagcgatggatgatgaaatgaatgaaatgaagcgagaagggaattttagagaaaaaagaataaaaagaaatgagcaaagcctccaagaaatatggggactatgtgaaaaagaccaaatctacgtctgattggtgtacctgaaagtgatggggagaatggaaccaagttggaaaacactctgcaggatattatccaggagaacttccccaatctagcaaggcaggccaacattcagattcaggaaatacagagaacgccacaaagatactcctcgagaagagcaactccaaggcacataattgtcagattcagcaaagttgaaatgaaggaaaaaatgttaagggcagccagagagaaagaaatacaaactaacatcagagaatactacaaacaccgctacgcaaataaactagaaaatctagaagaaatggataaattcctcaacatatacacccttcgaagactaaaccaggaagaagttgaatctctgaacagaccaataagaggctctgaaattgtggcaataatcaatagtttaccaaccaaaaagagtccaggaccagatggattcacagccgaatactaccagaggtataaggaggaactggtaccattccttctgaaactattccaatcaatagaaaaagagggaatcctccctaactcattttatgaggccagcatcatcctgataccaaagccgggcagagacacaaccaaaaaagagaattttagaacaatatccttgatgaacattgatgcaaaaatcctcaataaaatactggcaaaccgaatccagcagcacatcaaaaagcttatccaccatgatcaagtgggcttcatccctgggatgcaaggctggttcaatatacgcaaatcaataaatgtaatccagcatataaacagaaccaaagacaaaaaccacgtgattatctcaatagatgcagaaaaggcctttgacaaaattcaacaactcttcttgctaaaaactctcaataaattaggtattgatgggacatatctcaaaataaaaagagctatctatgacaaacccacagccaatatcatactgaatgggcaaaaactggaagcattccctttgaaaactggcacaagacagggatgccctctctcaccactcctattcaacatagtgttggaagttctggccagggcaattaggcaggagaaggaaataaagggtattcaattaggaaaagaggaagtcaaattgtccctgtttgcagatgacatgattgtatatctagaaaaccccattgtctcagcccaaaatctccttaagctgataagcaacttcagcaaagtctcaggatacaaaatcaatgtacaaaaatcacaagcattcttatacaccaataacagacaaacagaaacccaaatcatgagtgaactcccattcacaattgcttcaaagagaataaaatacctaggaatccaacttacaagggacgtgaaggacctcttcaaggagaactacaaaccactgctcaatgaaataaaagaggatacaaagaaatggaagaatattccatgctcatgggtaggaagaatcaatatcatgaaaatggccatactgcacaaggtaatttatagattcaatgccatccccatcaagctaccaatgactttcttcacagaattggaaaaaactactttaaagttcacatggaaccaaaaaagagcccgcattgccaagtcaatcctaagccaaaagaacaaagctggaggcatcatgctacctgacttcaaactatactacaaggctacagtaaccaaaacagcatggtactggtaccaaaacagagatatagatcaatggaacagaacagagccctcagaaataacgccgcatatctacaactatctgatctttgacaaacctgagaaaaacaagcaatggggaaaggattccctattcaataaatggtgctgggaaaactggctagccatatggagaaagctgaaactggatcccttctttacaccttatacaaaaattaattcaagatggattaaagacttaaacgttagacctaaaaccataaaaaccctagaagaaaacctaggcattaccattcaggacataggtatgggcaaggacttcatgtctaaaacaccaaaagcaatagcaacaaaagccaaaattgacaaattggatctaattaaactaaagagcttctgcacagcaaaagaaactaccatcagagtgaacaggcaacctacagaatgggagaaaattttcgcaacctactcatctgacaaagggctaatatccagaatctacaatgaactcaaacaaatttacaagaaaaaaacaaacaaccccatcaaaaagtgggcaaaggacatgaacagacacttctcaaaagaagacatttatgcagccaaaaaacacatgaaaaaatgctcaccatcactggctatcagagaaatgcaaatcaaaaacacaatgagataccatctcacaccacttagaatggcaatcattaaaaagtcaggaaacaacagatgctggagaggatgtggagaaataggaacacttttacaccattggaattgtcgtgtgaaaatgacgcaacaaatgcaaaatttacatctctgtcagtcaaaaaaacatagtgctccctcatctcccaacgcagccaaacgcctgtacaggaacctctctgagaaactgaaagggagccactcttccttcgatgaggcctattttaggacaagaactgatcggctgagtctcaggaagacctcggtgaatttccagggcaatgaagccatgtttgaggcagtcgaacagcaggacatggatgctgtgcagatcctcctgtatcagtacacaccagaagaacttgacctcaacacacctaacagcgagggcttgacacccctggatattgccatcatgaccaacaatgtgcccattgcaaggattcttctgaggacaggggcccgagaaagtccacactttgtcagcctggaaagccgagcaatgcacctcaacacactggtccaggaagcccaggagagggtgagtgaactgtctgcccaggtggagaatgaaggattcactctggacaacacagagaaagagaagcagctgaaagcttgggagtggaggtatcggctctacagacgcatgaaaacaggctttgagcatgccagagcccctgagatgccaaccaatgtctgtctcatggtaaccagcagcacatcactcactgtcagcttccaagagcctcttagcgtcaatgcagctgtagtaaccaggtataaagaacgcagttcctcaccagcaacggaacaaagctggacagagaatgactttgatgagttgagagaagaaggcatcagacgatcaaactactccgagctacaggaggcaattcaaaccaaaggcaaacaagttgaaaactttgaaaaaaatttagatgaatgtataactagaataaccaatacagggaattgcttaaaggagctgatggagctgaaagccaaggctcgagaactacgtgaagaatgcagaagcctcaggagccgatgcaatcaactggaagaaagggtatcagtgatagaagatgaaatgaatgaaatgaagcgagaagggaagtttagagaaaaaagaataaaaagaaacgaacaaagcctccaagaaatatgggactatgtgaaaagaccaaatctacgtctgattggtgtacctgaatgtgacggggagaatggaaccaagttggaaaacactctgcaggatattatccaggagaacttccccaatctagcaaggcaggccaacattcagattcaggaaatacagagaacgccacaaagatactcctcgagaagagcaactccaagacacataattgtcagattcaccaaagttgaaatgaaggaaaaaatgttaagggcagccagagagaaagggtttattgagaatatgtttttcgtctcagccaatccctgggtgagtttcaccagttttgatttaaacgtggccaatatggacaacttcttcgcccccgttttcaccatgggcaaatattatacgcaaggcgacaaggtgctgatgccgctggcgattcaggttcatcatgccgtttgtgatggcttccatgtcggcagaatgcttaatgaattacaacagtactgcgatgagtggcagggcggggcgtaa

SEQ ID NO: 116277 - DNA, 9479 bp, Homo sapiens
  misc_feature (1)...(9479): n = a,t,c or g
ttacattttggcatgattttgcagcggctggtactggttgttcctttccatgtttagtgcttccttcaggagctcttttagggcaggcctagtggtgacaaaatctctcagcatttgcttgtctgtaaagtattttatttctccttcacttatgaagcttagtttggctggatatgaaattctggtttgaaaattcttttctttaagaatgttgaatattggcccccactctcttctggcttgtagggtttctgccaagagatccgctgttagtgtgatgggcttccctttgagggtaacccgacctttctctctggctgcccttaacattttttccttcatttcaactttggtgaatctgacaattatgtgtcttggagttgctcttttcgaggagtatctttgtggtattctctgtatttcctgaatctgaacgttggcctgccttgctagattggggaagttctcctggataatatcctgcagagtgttttccaacttgtttccattctccccatcacttttaggtacaccaatcagacgtagatttggtcttttcacatagtcccatgtttcttggaggctttgctcatttctttttattcttttttctctaaactttccttctcgcttcatttcattcatttcgtcttccattactgataccctttcttccagttgatcacattggctcctgaggcttctgcattcttcacgtagttcttgagccttgattttcagctccatcagctcctttaagcacttctctgtattgtttattctagttatatattcttctaaatttttttcaaagttttcaacttctttgcctttggtttgaatgtcctcccgtaactcagagtcatttgatcgtctgaagccttcttctctcagctcgtcaaagtcattctccatccagctttgttccattgctggtgaggaactgcgttcctcagatggaaatgcagaaatcacccgtcttctgcgtcgctcacgctgggagctgtagaccggagctgttcctattcggccatcttggctcctccgactggcagcattttgcacctgctctagagacctgtggaactttgaaataatatggtttgtctctgtgtccccaccaaaatctcctctcgaattgtaatcctcaggtgtcaagggaggaaccatctctgtgtagtgaggaaaacttatgtaaaactggaacgggtgaaggggtgaaactaggaaggtttcatagctgttagaagagggggagcaggattgggtgggtaaagccttcagctgtgaggcctgttgacattttttgatggggttgtttgtttttttcttgtaaatttgtttgagttcattgtagattctggatattagccctttgtcagatgagtagcttgtgaaaattttctcccattttgtaggttgcctgttcattctgatggtagtttcttttgctgtgcagaagctctttagtttaattagatcccatttgtcaattgtgtcttttgttgccattgcttttggtgttttggacatgaagtccttgcccatgcctaggtcctgaatggtgatgcctaggttttcttctagggtttttatggttttaggtctaacgtttaagtctttaatccatcttgaattgatttttgtataaggtgtaaggaagggatccagtttcagctttctacatatggctagccagttttcccagcaccatttattaaatagggaatcctttccccattgcttgtttttctcaggtttgtcaaagatcagatagctgtagatatgcggcattatttctgagggctctgttctgttccattgatctatatctctgttttggtaccagtaccatgctgttttggttactgtagccttgtagtatagtttgaagtcaggtagtgtgatgcctccagctttgttcttttggcttaggattgacttggcgatgcgggctcttttttggttccatatgaactttaaagtagttttttccaattctgtgaagaaaggcattggtagcttgatggggatggcattgaatctgtaaattaccttgggcagtatggccattttcacgatattgattcttcctacccatgagcatggaatattcttccatttgtttgtatcctcttttatttccttgagcagtggtttgtagttctgcttgaagaggtccttcacatcccttgtaagttggattcctaggtattttattctctttgaagcaattgtgaatgggagttcactcatgatttggctctctgtttgtctgttgttggtgtataagaatgcttgtgatttttgtacattgattttgtatcctgagactttgctgaagttgcttatcagcttaaggagattttgggctgagacaatggggttttctagatatacaatcattttgtctgcaaacagggacaatttcgcttcctcttttcctaattgaatactctttatttccttctcctgcctaattgccctggccagaacttccaacactatgttgaataggagtggtgagagagggcatccctgtcttgtgccagttttcaaagggaatgcttccagtttttgcccattcagtatgatattggctgtgggttggtcatagatagctcttattattttgaaatacgtcccatcaatacctaatttattgagagtttttagcatgaagggttgttgaattttgtcaaaggctttttctgcatctattgagataatcatgtggtttttgtctttggctcccagtattttattgaggatttttgcatcaatgttcatcaaggatattggtctaaaattctctggtcctggactctttttggttggtaaactattgattattgccacaacttcagctcctgttattggtctattcagagattcaacttcttcctggtttagtcttgggagggtgtatgtgtcgaggaatttatccatttcttctagattttctagtttatttgcgtagaggtgtttgtagtattctctgatgctagtttgtatttctgtgggatcagtggtgatatcccctttatcattttttatcgtgtctatttgattcttctctctttttttctttattagtcttgctagcggtctatcaattttgttgatcctttcaaaaaaccagctcctggattcattgattttttgaagggttttttgtgtctctatttccttcagttctgctctgattttagttatttcttgcctcctgctagcttttgaatgtgtttgctcttgcttttctagttcttttaattgtgatgctagggtgtcaattttggatctttcctgctttctcttgtgggcatttagtgctataaatttccctctacacactgctttgaatgtgtcccagagattctggtatgttgtgtctttgttctcgttggtttcaaagaacatctttatttctgccttcatttcgttatgtacccagtagtcattcaggggcaggttgttcagtttccatgtagttgagcggctttgagtgggattcttaatcctgagttctagtttgattgcactgtggtctgagagatagtttgttataatttctgttattttacatttgctgaggagagctttacttccaactatgtggtcaattttggaataggtgtggtgtggtgctgaaaaaaatgtatattctgttgatttcgggtggagagttctgtagatgtctattaggtctgcttggtgcagagctgagttcaattcctgggtatccttgttgactttctgtctcgttgatctgtctaatgttgacagtggggtgttaaagtctcccattattaatgtgtgggagtctaagtctctttgtaggtcactcaggacttgctttatgaatctgggtgctcctgtattgggtgcatatatatttaggatagttagttcttcttgttgaattgatccctttaccattatgtaatggccttctttgtctcttttgatcgttgttggtttaaagtctgttttatcagagactaggattgcaacccctgcctttttttgttttccatttgcttggtagatcttcctccatccttttattttgagcctatgtgtgtctctgcacatgagatgggtttcctgaatacagcacactgatgggtcttgactctttatccaacttgccagtctgtgtcttttaattggagaatttagtccatttacatttaaagttaatattgttatgtgtgaatttgatcctgtcattatgatgttagctggtgattttgctcgttagttgatgcagtttcttcctagtctcgatggtctttacattttggcatgattttgcagtggctggtaccggttgttcctttccatgtttagcgcttccttcaggagctcttttagggcaggcctgctggtgacaaaatcggtcagcatttgcttgtctgtaaagtattttatttctccttcacttatgaagcttagtttggctggatatgaaattctgggttgaaaattcttttctttaagaatgttcaatattggcccccactctcttctggcttgtagggtttctgccgagagatccgctgttagtctgatgggcttccctttgagggtaactcgacctttctctctggctgcccttaacattttttccttcatttcaactttggtgaatctgacaattatgtgtcttggagttgctcttctcgaggagtatctttgtggcgttctctgtatttcctgaatctgaacgttggcctgccttgctagattggggaaagtctcctggataatatcctgcagagtgttttccaacttggttccattctccgcatcactttcaggtacaccaatcagacgtagatttggtcttttcacatagtcccatatttcttggaggctttgctcgtttctttttattcttttttctctaaacttcccttcttgcttcatttcattcatttcatcttccattgctgataccctttcttccagttgatcgcattggctcctgaggcttctgcattcttcacgtagttctcgagccttggttttcagctccatcagctcctttaagcacttctctgtattggttattctagttatacattcttctaaattttttttcaaagttttcaaattctttgcctttggtttgaatgtcctcccgtagctcggagtaatttgatcatctcaagccttcttctctcagctcgtcaaagtcattctccatccagctttgttccgttgctggtgaggaactgcgttcctttggaggaggagaggcgctctgctttttagagtttccagtttttctgctctgtttttttccccatctttgtggttttatctacttttggtctttgatgatggcaatgtacagatgggtttttggtgtggatgtcctttctgtttgttagttttccttctaacagacgggaccctcagctgcaggtttgttggagtaccctgccgtgtgtgaggtgtcagtgtgcccctgctggggggtgcctcccagttaggctgctcagggggtcaggggtcagggacccacttgaggaggcagtctgcccgttctcagatctccagctgcgtgctgggagaaccactgctctcttcaaagctgtcagacagggacatttaagtctgcagaggttactgctgtctttttgtttgtctgtgccctgcccccagaggtggagcctacagaggcaggcaggcctccttgagctgtggtgggctgcacccagttcgagcttccccggctgctttgtttacctaagcaagcctgggcaatggcgggcgcccctcccccagccttgctgcggccttgcagtttgatctcagaccgctgtgctagcaatcagcgagattccgtgggcgtaggaccctccgaaggccaggtgtgggatatagtctcgtggtgcgccgttttttaagccggtctgaaaagcgcaatattcgggtgggagtgacccgattttccagatggaaatgcagaaatcacccgtcttctgcgtcgctcacgctgggagctgtagaccggagctgttcctattcggccatcttggcaaagatggggaaaaaacagaacagaaaaacgggaaacttctaaaaatcagagcgcctctcctcctccaaaggaatgcagcttcctcaccagcaatggaacaaagctggacggagaatgactttgaagagctgagagaagaaggcttcagacgatcaaattacttctgagctacgggaggacattcaaaccaaaggcaaagaagtcaaaaactttgaaaaaaatatagaagaatgtacaactataataaccaatacagagaggtgcttaaaggagctgatggagctgaaaaccaaggctcgagaactacgtgaagaatgcagaagcctcaggagccgatgtgatcaactggaagaaagggtatcagcaatggaagatgaaatgaatgaaatgaagggagaaggaaagtttagagaaaaaagaataaaaagaaatgaacaaagcctccaagaaacatgggactatgtgaaaagaccaaatctacgtctgattgatgtacctgaaagtgacggggagaatggaaccaagctggaaaacactgtgcaggatattatccaggagaacttccccaatctagcaaggcaggccaacattcacattcaggaaatacagagaacgtcacaaagatactcctcaagaagagcaactccaagacatataattgtcagattcaccaaagttgaaatgaaggaaaaaatgttaagggcagccagagagaaagacagatcaacgagacagaaagttaacaaggatacccaggaattcaactcagctctgcaccaagtggacctaatagacatctacagaattctccaccccaaatcaacagaatatacatttttttcagcaccacaccacacctattccaaaattgaccacatagttcgaagtaaagctctcctcagcacatgtaaaagaacagaaattataacaaactatctctcagaccacagtgcaatcaaactagaactcagtattaagaaactcactcaaaaccactcaactacatggaaactgaacaacctgctcctgaatgactactgggtacataacgaaatgaaggcagaaataaagatgttctttgaaaccaacgagaacaaagacacaacataccagaatctctggaacacattcaaagcagtgtgtagacggaaatttatagcactaaatgcccacaagagaaagcaggaaagatccaaaattgacatcctaacatcacaattaaaagaattagaaaagcaagagcaaacacattcaaaagctagcagaaggcaagaaataactaaaatcagagcagaactgaaggaaatagagacacaaaaaacccttcaaaaaattaatgaatccaggagcttgttttttgaaaggatcaacaaaattgatagaccgctagcaagactaataaagaagaaaagagagaagaatcaaatagacgcaataaaaaatgataaaggggatatcaccaccaatcccacagaaatacaaactaccatcagagaatactacaaacacctctacacaagtaaactagaaaatctagaagaaatggataaattcctcgacacatacaccctcccaagactaaaccaggaagaagttgaatctctgaatagaccaataacaggctctgaaattgtggcaataatcaatagcttaccaaccaaaaagagtccaggaccagatggattcacagctgaattctaccagaggtacaaggaggagctggtaccattccttctgaaactattccaatcaatagaaaaagagggaatcctccctaactcattttatgaggccagcatcatcctgataccaaagccaggcagagacacaaccaaaaaaaagaattttagaccaatatccttgatgaacattgatgcaaaaatcctcaataaaatactggcaaaccgaatccagcagcacatcaaaaaccttatccaccatgatcaagtgggcttcatccctgggatgcaagggctggttcaatatacgcaaatcaataaatgtaatccagcatataaacagaaccaaagacaaaaaccacatgattatctcaatagatgcagaaaaggcctttgacaaaattcaacaacccttcatgctaaaatctctcaataaattaggtattgatgggacgtatctcaaaataataagagctatctatgacaaacccacagccaatatcatgctgaatgggcaaaaactggaagcattccctttgaaaaccggcacaagacagggatgccctctctcaccgctcctattcaacatagtgttggaagttctggccagggcaatcaggcaggagaaggaaataaaggctattcaattaggaaaagaggaagtcaaattgtccctgtttgcagacgacatgattgtttatctagaaaaccccatcgtctcagcccaaaatctccttaagctgataagcaacttcagcnaactctcaggatacaaaatcaatgtacaaaaatcacaagcattcttatacaccaacaacagacaaacagagagccaaatcatgggtgaactcccattcacaattgcttcaaagagaataaaatacctaggaatccaacttacaagggatgtgaaggacctcttcaaggagaactacaaaccactgctcaaggaaataaaagaggagacaaacaaatggaagaacattccatgctcatgggtaggaagaatcaatatcgtgaaaatggccatactgcccaaggtaatttacagattcaatgccatccccatcaagctaccaatgactttcttcacagaattggaaaaaactactttaaagttcatatggaaccaaaaaagagcccgcattgccaagtcaatcctaagccaaaagaacaaagctggaggcatcacactacctgacttcaaactatactacaaggctacagtaaccaaaacagcatgtgggtaccagaagcagggagcagacacctcggagcctgcaggggcagtgaggggaaaccttccgaacttcccaagcccccaagagtgcagagatgccaggtccacagccatggcttggctggctgcagctgtgcctaagaagggaaagactcacattctcttgcctaatagtacaaggctagcctcagacattctgggagctggactggagaagcgatgttggggattcaccattcaatatgaactttgtgttcagtacagtctctctccttctttgtgtctggtgtctcagtgtcagactgctgttgtccaagcccccaagcaccgtggacatgttcagtggtgtctgatcccatcggcacagagcttggcttctcaggaggctcctcagagtcgcgtaaatagggtttccgatgcccggcctcaccagcttacagacgtgtctgaatctccttttcactcaggccacacttatattcactcttccctcctgaacattcgttag

SEQ ID NO: 116278 - DNA, 4903 bp, Homo sapiens
atggctttatacacagaagagcctaaaaacaaaaaggaaggagaaatatcgcctgccttatcacctccttttccctcagtcctactattaccgggccaaaataacaaagaggaaatggagagttttcctgacctccctcttactataagtagaaaaaaaggcaagaaacatacttcagctatgggaccttgtcttaaacaagcggcattagaaggggagcttttagcatatctggtaatgcaagaccaacatggtcatcaagcacatgaacctgtttcctttcactcttacgaagaactaagaaaaagcattaaagaaaacagagccactagaccatctgcaaaaagaatgattgaggccttagcagaccacttctgtatggcccaatgggactggtcaatgctgcctaaagcaactctggagactagcccatacctcctctggacggtagaatatgatgaactgtgcgaacaacaagacaaccagaatcaggcagccaggcaaaatacaactgttgataagctccaggggaggtattctcatgctgatgtacaacaacaactaaattttgagccccaggcctatgctcaaagcagcctctactgggagtgcaggactcgatttactctgcccggacaaattagtgctaaaagagggagaagccctaaaagggttgcaactgggatctgtggcctgctgcctccaggaacagcaggattagtcctggggcagtctagcctatccagtaaaggaattaatgtgctccctgggttaattgacagcgattaccaaggtccctcagctgcagggctgttggcatttgctggaggtctatgccagaccctgtttgcctgggtatcagcagcagaggctgcagaacagcggatactgcatgtatgtttgaacaatatgaaatctaggcaccttgaaaaagaacaggataacagcaattttcagggaacaagggagataaccattggatctgactgcctgggagctgggcaggaaagatccatacttctcttactgccggaaacgggatctctccaggctagagaaaatctggcctgcattccaggtcctgggaggtgcagtgggactatgcggctgagctacaggaaatcttggcaaccagttccttctcagcttgacggtccccttttgaggagtctagaggtaccaacctatgagcttattgatggagactcaatggattttgatttttctgtccttcaccaggacagggccagcagtgtttccactgcagaacgtggtggggaatgcagttccctcaagagccaacggaacaaagcctggatggagaatcactttgactttgacgagctgagagcagaaggcttcaaacgatcaaaattactctgagcctacggggggacattcaaacccaagggccaaggaagtttgaaaactttggaaaaaaattttagcaagaatgtataactaggattacccattaccagggaagtgcttaaaggagcagctgatggagcttgaaagccaaggcctcgagaacttcgtgaagacatgcagaagccctcaggatgccgatgcgatcaacttggaagaaagggtattcagcaatggaagatgaaatgaatgaaatgaagccgagaaggaaagtttagagaaaaaaagaataaaaagaaatgagcaaagccttgaaggaattatgggactatgtggaaaagaccaaaatctacgtctgattgggtgtacctgaaagtgatgagtgatggggagaatggaaccaagttggaaaacactcctgcaggatattattccaggagaacttccgccaatcttagcaagggcaggcccaacggttcagattcaggaaatacagagaacgccacaaagatactcctcgaggaagagcaactccaaggacacattaattgtcagattcaccaaagttggaaatggaagggaaaaaatgtttaaggggcagccagagagagaaaggtctggttacccctcaaaggggaagcccatcacacttaacagcgggatctctcggcagaaaaccttcagcccagaagagagtgggggccaaatattcaacattcttaaagaaaagaattttcaacccagaatttcatatctagccaaactaagcttcataagtgaaggagaaataaataagatcctttacagacaagcaaatgccgagagatttttgtcaccactaggccctgccctaaaagagctcctgaaggaagcgctaaacatggaaaggaacaaccggagaaagcaggaaagatccaaaattgacaccctaacatcacaattaaaagaactagaaaagcaagagcaaacacattcaaaagctagcagaaggcaagaaataactaaaatcagagcagaactgaaggaaatagagacacaaaaaacccttcaaaaaatcaatgaatccaggagctggttttttgaaaggatcaacaaaattgatagaccgctagcaagactaataaagaaaaaaagagagaagaatcaaatagacacaataaaaaatgataaaggggatatcaccactgatcccacagaaatacaaactaccatcagagaatactacaaacacctctacgcaaataaactagaaaatctagaagaaatggatacattcctcgacacatacactctcccaagactaaaccaggaagaagttgaatctctgaatagaccaataacaggctctgaaattgtggcaataatcaatagtttaccaaccaaaaagagtccaggaccagatggattcacagccgaattctaccagaggtacaaggaggaactggtaccattccttctgaaactattccaatcaatagaaaaagagggaatcctccctaactcattttatgaggccagcatcattctgataccaaagccgggcagagacacaaccaaaaaagagaattttagaccaatatccttgatgaacattgatgcaaaaatcctcaataaaatactggcaaaccgaatccagcagcacatcaaaaagcttatccaccatgatcaagtgggcttcatccctgggatgcaaggctggttcaatatacgcaaatcaataaatgtaatccagcatataaacagagccaaagacaaaaaccacatgattatctcaatagatgcagaaaaagcctttgacaaaattcaacaacccttcatgctaaaaactctcaataaattaggtattgatgggaagtatttcaaaataataagagctatctatgacaaacccacagccaatatcatactgaatgggcaaaaactggaagcattccctttgaaaactggcacaagacagggatgccctctctcaccgctcctattcaacatagtgttggaagttctggccagggcaatcaagcaggagaaggaaataaagggtattcagttaggaaaagaggaagtcaaattgtccgtgtttgcagacgacatgattgtttatctagaaaaccccatcgtctcagcccaaaatctccttaagctgataagcaacttcagcaaagtctcaggatacaaaatcaatgtacaaaaatcacaagcattcttatacaccaacaaccgacaaacagagagccaaatcatgagtgaactcccattcacaattgcttcaaagagaataaaatacctaggaatccaacttacaagggatgtgaaggacctcttcaaggagaactacaaaccactgctcaaggaaataaaagaggacacaaacaaatggaagaacattccatgctcatgggtaggaagaatcaatatcgtgaaaatggccatactgcccaaggtaatttacagattcaatgccatccccatcaagctaccaatgactttcttcacagaattggaaaaaactactttaaagttcatatggaaccaaaaaagagcccgcatcgccaagtcaatcctaagccaaaagaacaaagctggaggcatcacactacctgacttcaaactatactacaaggctacagtaaccaaaacagcatggtactggtaccaaaacagagatatagatcaatggaacagaacagagccctcagaaataatgccgcatatctacaactatctgatctttgacaaacctgagaaaaacaagcaatggggaaaggattccctatttaataaatggtgctgggaaaactggctagccatatgtagaaagctgaaactggatcccttccttacaccttatacaaaaatcaattcaagatggattaaagatttaaacgttagacttaaaaccataaaaaccctagaagaaaacctaggcattaccattcaggacataggcgtaggcaaggacttcatgtccaaaacaccaaaagcaatggcaacaaaagccaaaattgacaaatgggatctaattaaactaaagagcttctgcacagcaaaagaaactaccatcagagtgaacaggcaacctacaacatgggagaaaattttcgcaacctactcatctgacaaagggctaatatccagaatctacaatgaactcaaacaaatttacaagaaaaaaacaaacaaccccatcaaaaagtgggcaaaggacatgaacagacacttctcaaaagaagacatttatgcagccaaaaaacacatgaagaaatgctcatcatcactggccatcagagaaatgcaaatcaaaaccactatgagatatcatctcacaccagttagaatggcaatcattaaaaagtcaggaaacaacagcagccagatgccactgactagctcagataacactgctgtcaactgtaaaaaattaagatccaaaccagatgaaattgccaaagagtcagaagctcctccaggcttagccagctttcacctttgctcatcatacatctatggggctcctcttaactcacagatgggctag

SEQ ID NO: 116279 - DNA, 516 bp, Homo sapiens
ttacagccgtgagccactgcgccctgccaaaagagggctttagggcaccccagaacgcgagatccccctcatctgtaatctttaaagaggaggaagtgtactccaaatcaagcgatagtccattcgtccttggcacggtgactgccgggaggccaggaccaaatgtgtctccttccggcttttgcaccacactaactaaccggcgccaggccgcagagccgccctggccttcggcgagaactcaggcgagcgcggcgcacgctgctccggagtcccaccgcggaagttgaggccgcggattccgagggcggggtggagaggaatctggaaggacctggacccggtggaacgcactgcgcggacggcgcctgcgtccgcactcagctgttcagccctctttcttcaggctctcccctgaaagccgtccccatgccggtctcttttttctgccttcttgtttccctccggcgagtcagcgcgactgtgaatttccgtttccggcggtgtccatgctga

SEQ ID NO: 116280 - DNA, 428 bp, Homo sapiens
ctttgactttgaaagccgatctgagattgcaaacctcatcttggctgagaactgcgaggctgccctggctcttcatctctataggggaggcaggcttttgcaaggccaccgaatcccttttggagtcatctttggtggaactgatgtaaatgaagatgccaaccaggcggaaaaaaacacagtcatgggcagagttcttgaggaagccagatttgctgtcgctttcacagagtcaatgaaggaaatggcacaagcgcagtgggttcgatccagtgtttacaagggaagttgaaagccaaagtgaaaagagcccgctggggtaccgattgattggagagatgcctcaagaagatctgcacgcggtggtgaagaattgcttcgcggtggtgaatagctctgtctctgaaggcatgtcagctgcaattttg

SEQ ID NO: 116281 - DNA, 811 bp, Homo sapiens
atgggggtacagttcagctcagtcactgatgaggcaaagattgagattttgaaggggctgtatctggccttgtcacaggatgtaaatacactgaaaagtaaaattgcaaaggttgcaaaagatgcaggatttgctgaaattggtgaaatcgatgttggagaattacttggaccacaggcaccaggccctcctgggacagctgacacctcttctgtcaggagcgaggaggacactgatggccagaggcagcctggactctgggaccagacgtcacctttgatgtgtcctcctcagtgtgctccggctgagttacagttctcattttcagcggaaaggggtatccctgatccagagcagaggtcacaggctggcagcaaatctccccacgaatgtgtaagcagctcccctgactgcaccattgaaactgtgctcaaggtcactaaggacctccatgttggccaccgaatcccttttggagtcatctttggtggaactgatgtaaatgaagatgccaaccaggcggaaaaaaacacagtcatgggcagagttcttgaggaagccagatttgctgtcgctttcacagagtcaatgaaggaaatggcacaagcgcagtggagattaaccaaagtgctgataatttgcacatatttcttctgatatgtggacttcgacaagttaaggatcctctctatctggtggacgcattttcagcctggcatcaggaggagcccaatgtgcacctggtgattgtgggtcctgaagtcgatccagtgtttacaagggaagtgaaagccaaagtgaaaagagccgc

SEQ ID NO: 116282 - DNA, 1011 bp, Homo sapiens
atgaggaacactgtctttgtgtcacctcatagtagtaccaccttacaacttactaattattaccgaaaggtaattacatttaggcatgctcagtccctggctgcgctgcaggcttactctcactggttagcacagtattgcagtgaagttcaccggcagaacacgcagcagttcgtgacactcatctctactaccatggatgcaatcacacctctaatcagcaccaaggtccaagacaagctgctgctatctgcgtgccacttactggtctcactggccaccaccgtgcggcccgtctttctgatcagcatccctgcagtgcagaaagtattcaacagaatcactgatgcctctgccctgcgacttgtcgataaggcccaggtgttggtgtgccgagccctctctaacatcttgctgcttccgtggccaaaccttccagagaatgagcagcagtggcccgtgcgctccatcaaccacgccagcctcatctctgcactctcccgggactatcgcaacctgaagcccagtgctgttgccccacagagaaagatgccactggatgacaactcaggtggcctaagtgcctgccagcccctctgggccacgcagggaacagcacacgggcagtggctcagaggctatgtgccaatgcggccggccggctgtgggtcgtacacagcagatctacccatcttccatggcacctctggtggtggagactgttttgtgggatcaatgaccctccttgaatgtgaaaacaggaccatccgccggtccctccgagctcctccaaagccttctgctgttgcagaaacgtcacttgctattccatctggactaggctgcgtttctgttcctcccaactgtcctccctttttcttctttctgtttcaagaaagccccttctgcaagctctgggtggaggcagtgagggtgggggccctgggctgggatcccggcactgtgccctactccctaagtgacccagtgcaagtcatctcagtgtcctaa

SEQ ID NO: 116283 - DNA, 1303 bp, Homo sapiens
atgggccctcctagggttctgctgtttgggatctcagactcaggtggcctaagtgcctgccagcccctctgggccacgcagggaacagcacacgggcagtggctcagaggctatgtgccaatgcggccggccggctgtgggtcgtacacagcagatctacccatcttccatggcacctctggtggtggagactgttttgtgggatcaatgaccctccttgaatgtgaaaacaggaccatccgccggtccctccgagctcctccaaagccttctgctgttgcagaaacgtcgcagctgggcttggggatcaaaggcaattcagagcatccctcaagcctctatggagaaaacagacatgtctcagcacttcatgtgggggcggcatgttatgggctccggtttccaggtgacttactgagtaacctgttgcagagtcccagttcagccaaactgttgaatcagccaattcccatccttgatgtggagagtgagtatatctgttccctggctttggagtgcctggcccatctcttcagttggattcctctgtctgccagcatcaccccatccctccttaccaccatcttccactttgcacgatttggctgtgacatccgggccagaaagatggcgtcagttaacggcagcaagccagaactgtgtctcgggtcaggagcgcggccggctgggggtcctggccatgtcctgcatcaatgaactcatgtccaagaactgtgtgcctatggaatttgaggagtatttactgcgtatgttccagcagactttctacctcctgcagaaaatcaccaaggataacaatgcccacacagtgaagagcaggctagaagagctcgatgagaggtctgaggtggtgcagggactgagactgctgctcctgcgtagccaagaacaggagaagaggtccgtggagtcctgcctcatgacagccgccactgcccgagagagcctcccagcccagccgcctgcagggcatcctccgccctgggttgggggctgtgagctcacatgctttggggactacagggtcatgaaactgagcaaaggggctggtgtaagaggattgagcaatggacacactgcctcggcggtcagggacaaaagggagtgtgaggaccgtgatgaactggagcacatgggcccatccgaaagaggcagacatggtccagatcgagtcagtcgtggccatgtgtggcccagtcctgctagatccttcctgtcgtccaagagaagtcagaaccctggtttttgggtggaatcacctgatgtttcaagtttgaagtga

SEQ ID NO: 116284 - DNA, 415 bp, Homo sapiens
gcctctgacagagctcaattcggtggtttttcctctacttctcctccaggggcctccaatccaaactgatggatcgctgcctcccattggctccgcgtctctttcacaagatcagatttcgggctgtcaatcaggcggcttgctgccccttcccgcgggtctccctcgcccctctgccctagggggtgctcgcccggtaggcgctgggtcctcagcctgaaagcgccacggagagactcgatttcctctgtaacccgctgcttattgttaaggcgcctggggatactgaaaccgtgtgtttcgagtcgccagttcccattattggggtgttaggtccactattgggctggtttccttaaagtactgttgagcggttctggtatacccttagagccgcgatccacaaagcacgaaa

SEQ ID NO: 116285 - DNA, 321 bp, Homo sapiens
atgccccccagcacacacatgaagggcgaggctgccagtggggcagggaggattctcaggggcgactcggggcactgctcctcagatgaggataacaaggcctttgaagtgtggcagcagctgccggtctctggctcccagctgactttaaaaagcggaaaagaatatctgtgccatgagcttgttgccaagattaagtgcccagagccttcttctctacctgccccccaccccatcccttcagagaaatgtgagaaactcattcttaccaagtgccaggcattgacggcatgtcgaggagtgatccttccagatggctag

SEQ ID NO: 116286 - DNA, 522 bp, Homo sapiens
gaggacggctcgcgagagtccacgtgaaaacggggcggacccagcactggcggagactgacgcagttcttctacctgctttcccaagggcgacactcggctccactccagttgggccgctggacgccctaggggcccggcagttgctaggcaacgccggaagccctcaggaacgtagttccacgggcgacgtaggatggcggatccggatggggcggaccccaaagctggctcccaactccgctcaccccctcctatacagggctcttggttcacggtctcttggttcgtcctgctgcaagttgggaagaaagataataggaatgctaattccttcttgatgaaacgaccacaacacgctggagccggccttggaccctacgtttcaagattggcctgcttccagcgtctgccagctccactgcacaagctgcggcagccgctgtccccgttcgcttccacgggagtcccagcaagactatgcgacccagttcaaataccatcttccatgtaccgttcgtga

SEQ ID NO: 116287 - DNA, 1343 bp, Homo sapiens
agatcatcccaagggaccaatggggataagatcagttacccttcgggacgatgagatggagcggacatcttccagaactgagcggggaggagacagcctcttcaagggaaggggatgggcagagggcctgttctcgcggagatgacagggcagctatcttctggggccgatagggaaggggaggacggtcccccaagctaaagggacagagtggcccaaaggaggaaccgttacccagagctagaaggggcagcgactccgccatcgcatccctgcgcctccgcccccactgcgcaaggctttctgggaaatgtagtctcgccttttggggcggggcttgggaaggaagtgagacctatttccgtcgcaaaagtgacgacttcggtctgcgccggaagtgcatgagctgccgatgtggtgctagtgattgcggtttcggtcgctctcccgtgtttcccgggctgggtatttcctcgcaccatggcggtgggagcagtttgacaagaaatacctgagtcagctgctgatgcgacgatcagcctaccgcatccgggaccagatctgggatgtgtactacaggcttaacatccgggatgccatcagcttttggaccaggtgggccagcagcttccagggctggcccctgcagcaaggctgtcagcagggccatggccttggtttgcagctgcggttcatcctatggcaagaagagggctcagtggaacattcaggctccagcctgctccctgcatctggaccccagccccagaggcttacaccttatctggagcccattacggctgatgacctccctgcaaagatcatgtccgaggccagcggaacaaggcgcctcagggcttcccgcgcccttcaggactgttactctgcagcccacccaagagctgctcagcctaaggtcctggcaggaacggagcaggagcagagcctgctaagcggcttacacagtgtggggaacccctggcggtacacccccctacagggccaccccttctcccctgccatgcctttaacgcgcagcaacacctgccggacccgtagccccccagcctgtacccccgagactcgactccctggacacaccaccagcccgcggccccggaactggcatcacatcctgctcagtgggcctctgtaccaccctgtgggttttcttggacacctggccagtgctgaagggctgttgtgatgttctgaggttgggctcaggctgggtgctctgccatgggctgagtggcccagatattcttctgtccatctttggcctgctggtgccagcaggggacacagactgcaaagagaagcacaaagtttgagccttgatt

SEQ ID NO: 116288 - DNA, 514 bp, Homo sapiens
  misc_feature (1)...(514): n = a,t,c or g
caaaagcatgacgacttcggtctgcgccggaagtgcatgagctgccgatgtggtgcttagtgattgcggtttcggtcgctctcccgtgtttcccgggctgggtatttgcctcgcaccatggcgcccaagggcaaagtgggcacgagagggaagaagcagatatttgaagagaacagagagactctgaagttctacctgcggatcatactgggggccaatgccatttactgccttgtgacgttggtcttcttttactcatctgcctcattttgggcctggttggccctgggctttagtctggcagtgtatggggccagcttaccactctatgagctcgatggcacgagcagcgtttctctgaggatggggccctgatgggatggtggcatgggacctcaacattggaagcagggcaatggcagagcaccttaaggatgtgatcctactgacagccatcgtgcaggtgctcagctgcttctctctctatgtctggncctttctgcttctggctcct

SEQ ID NO: 116289 - DNA, 620 bp, Homo sapiens
tttttttttgaggcaaggtctagctttgttgcccaggctggggtgcagtagcgcgatcgcagttcactgcaacctccgcctccctgactcgagcgattctcccacctcagcctctggagtgctgcgaccccaggcgccgccacctaattaatagacgcgttgcctccgtttttcaaatgtccctttcaggacgccgtccccttcctggtacgcgaagcgctgggagcgaaagggacttccgggagatctaggaagtcgcttctttttctggtagaaggcggggttctcctctgtacgctgcggagtctctgcggggtgtagaccggaatcctgctgacgggcagagtggatcagggagggagggtcgagacacggtggctgcaggtctgagacaaggctgctccgaggtagtagctctcttgcctggaggtggccattcattcctggagtgctgctgaggagcgagggcccatctgggggtctctggaagtcggtgcccaggcctgaaggatagccccccttgcgcttcccctgggctgccggccggccttctcagaacgaaaggcgtccttccaccccgcggcgcaggaaaccgctgccaaggcctcgtgccccattgg

SEQ ID NO: 116290 - DNA, 1121 bp, Homo sapiens
tttttttttgccagtattattattttacctacaaaatgagcaaagatgtttagaagtacaatagaattcagccctgctgagggtaacaaaaggagggtacttttccggtgaggctttgtgcaaaaggcaaattaataaagggagcattcagtaattacacctctaggaatcagccgtacgaaaatgcaggatgcatttataaatacatacatacacaaagatttatgtatgaagatattcagcccagccttatcttttaaattatcatctaaatatcaatagcagaatgggcgagatatctacacaccaggattcatgccaccatgccaccatgaatcactgggaaaaaacggtgatatataagcatttagggatgtaacatgttcatcgaggaaaggaggctacaaaagtaatgtctattttgagttttaaatttttcatgtaacgatttagaaactcatctaatttgataacgtgacttaggcaaatcattcaaatctttttgcgtttcctctgcaatggcgattgtggaggttaaatgggataactggcgttgaaacgttccaggcccatgagcaggactcaatgttccttcccttcccctttagtgtatggcttcttacatctggggaagagtcccaccaaagatcgattccaagcttcgcttcttggatgagcgagggaaactaggcgctaacttacctattcacccccgcgcccgttcccggcagccgggactcagggaagccaggccctgctcgcgagtccccaccccgattgcgcacccgcgacttcagcccgaggggcggggattttcttggagcgacgggacgcgacgccaatcgcgacgaggcttcgccccgtggcgcggtttgaaattttgcggggctcaacggctcgcggagcggctacgcggagtgacatcgccggtgtttgcgggattccggtctacaccccgcagagactccgcagcgtacgaggagaaccccgccttctaccagaaaaagaagcgacttcctagatctcccggaagtccctttcgctcccagcgcttcgcgtaccaggaaggggacggcgtcctgaaagggacatttgaaaaacggaggcaacgcgtctattaa

SEQ ID NO: 116291 - DNA, 1500 bp, Homo sapiens
atgcaggaactacaagaaaaaaagaggaatggaggtactacccatgatattaaaaagaggtccgtggaagatttcaaaaggtcactcacgaagccacatctggtggctcaacaaaagccagttggtctgaaacactctttttcacagggctggtggtcggtgctggctgtgacagctagaaagaaaccacaggaccggataaacagcccctcccaaagtgctgagaaaagcaaacagtggatgtacagcagtgacctgagcacatcgagacggacacagcacaaacgtgggggtcgtagacagcagcaggatgaaggattgccagtcagggagcacacagaagtgtatcctcagatgggcagcatcagtagcttggggaagcttgttaggttctctgtggatatagcccaagaatcaatgcaaactctcccagggatccttatgcctgctgaaggacccactgatttaatgggcatggaacttgcacaaaaagagttgcacaggaaatccatttatccagcactttctgcaggctccctggtcaacctgatattgggttgcaatgcaaaaacacttgctgtaaaagaaaatggaacactatggaaaattctccagggtgtgctaagtgaaaggagcagattactacctgggcagcctctttccaagggaagtgctgctggatgcctggacagcccatctcatgaccatgacgagacagccaacacaatcagagtgaagcgatcccagcagcctcacattgctgagctgccagaatgcgctgagcacaccaggcttggatgtctccccgagcagcagccatggagcaagccactgtgcactgtgaacaaggtgcttctggagatgctggtgaagttcatattccaggtgcaccaggggcacatggttaagagtggaggctctggagccagaatgcctgatttgaattctagttttgccaattattggctgtgtaacactgagcagttcagatggagttggagtgactgtagaatagtttgcaaagagaaactccttgtacaaggagccagagctagggctcctgaccagatgctacatctaccttccctgaagaaagagctgagcagcaggaatgggtggaagcatagtgcagtagaagggcacatggatctcagggatttagagtttatgaaatccacagcagcatgttatcgtgtgtttgaatgcacaactgcagaaccacatgaggtggaagttggctgttttcggaaagatttggtaaaacctgcagtttatgctggctggcaaagtgtgtgcagaacacgcaaaatcaccaggacccaggaaagcagagtgggcaggaggaaacctagagaggtgagcctggccaaggggaatatcggatccacttgggaaaggtcattattttctgggaatgcaaactctcagattgattatgaaaatgcagctgcctctggccaccttcctcggttgcctaaagaaactttgtatgaagtgtga

SEQ ID NO: 116292 - DNA, 417 bp, Homo sapiens
ccctgtgctagagccggagccgcagcctcagcattagccgggagaactgcagcgcccggaggctggcctggggtctgacatcaacgacacaggcggggagtggaagtccttccgcacaacatggtgtggggctgcgggggtgtggacgcgcccagctgtgtccccgggagggagtgggtgcttttcggggtgccgggggagggctgggcgtgcttcgcggttttttgtcgtagaggctcaaagatgctgcaaatcaaatcccaaacgggagccgcaacagcgcagactggatcggaagtcgtttgctccggttcacttgcctggctctgacgcgacgggtcccaggcccccggctccgcttcccactcagagctctcctcccctctcttccccgccacccgtttctacgcagatctg

SEQ ID NO: 116293 - DNA, 591 bp, Homo sapiens
atggtggtggtggagtctcaagagttggcaatatttagccatgtgcaggtcattaccacccaccacaagagtggtagaagcaagagcctggttacagtggccttaagagaaaaagggaagaaagaagtggaggcagggagtacggacaccattttgagtcttaatgtaaagagagccacgatgaaagattactgtcttacctttgaacccaaggatgtctcttatggctccagtttgctgactactgtgaagggaaggatggtttggaatcatactatagagtcatgggctctaaagtacgtgttattgctaatgattggtgttgctgtgaggcacatcttcctactagatcgtgatacttcaacaagtatcacttcaactgctctccaggccagctgccactctggtactacctaccacctggggcctaccctccataagtgtgcagcagccatgcaggcatggcaagttctgggggtggaaagaatgtcattcagagaatataatggtttttgtacttcaaagcaagtgaaccggagcaaacgacttccgatccagtctgcgctgttgcggctcccgtttgggatttga

SEQ ID NO: 116294 - DNA, 479 bp, Homo sapiens
gggcgggagcagcggcggcggcggcacaggctcggggccagccgggcgcgcatccccgggcgccctgcgcggtggagagcttggcgggctgcgggtgccgcaggacaggagtggacaaagcaagatggcagggatcttagcctggttctggaacgagaggttttggctcccgcacaatgtcacctgggcggacctgaagaacacggaggaggccaccttcccgcaggctgaggacctctatctcgcttttcccctggccttctgtatcttcatggtgcggctcatcttcgagagatttgtagccaaaccgtgcgccatagccctcaacattcaggccaatggaccacaaattgctccgcccaatgccattctggaaaaggtcttcactgcaattacaaagcatcctgatgaaaagagattggaaggcctctccaagcaactggactgggatgttcgaagcattcagcgctggtttcgaa

SEQ ID NO: 116295 - DNA, 1137 bp, Homo sapiens
atggtaatcccgcttcatctggttgagggaggattaaatgagattgtgcacagggctctggagatgtggacttcgttaaggcctggtcctgctctcttgggggccccacacacaggagagggatgcacctgttacaccaactcttctgtgggaagtgtggccacagcattctgggggtcattgggttggataggggagctggaaaggtttgggcccttagagaaggccagatttgtagccaaaccgtgcgccatagccctcaacattcaggccaatggaccacaaattgctccgcccaatgccattctggaaaaggtcttcactgcaattacaaagataatgtcgtttgaagcagggataatgggatcaagaggtgacaagcttaaggacaaaacccaaaatggtagagcagagaggcagaaaggctctacgtctctatggctttgtaaagctagtgcagcaaaaccagaacaactgacctacatgcttctgttatacaagatcatcagttttcacctagtcagtatcaatcagggcctgaaggtttctaaaggctattccatttctaatttagatctttccactgttcctgtcagaaatgaaggctctctcttggctcgcagaccttgggaaatctttgcaggggaagctccccagagcctcagcacctttggcttgctactgtgtagcgatgtgacagaagtggatgaagaaaggaagagagagggcaagtctcttatgtccctcagtcagtctgtagcttttgaagatactgaggatgtaaaaccaacctatggagcctactttgcatatgaccaccttgaaggaaaacgttaccatgttcataaagtacttttgtgtcttttagttcattatccactcctctcgctgcgtgtcagtgatgtcaaggtgctctctgcttgctgggctcgttcctgcctcttggcctttgcgcttgctttcccatcatcctggaacgttctgctccacattttcaactttctgcatctccctagtgccccccaatccatagtccccttgataatcacaacgccacttttccgcccaagaaatatactctatgccaacttctgcgctaatcattgtcttagtttgactcacatccttgccatttaa

SEQ ID NO: 116296 - DNA, 579 bp, Homo sapiens
atgccagtaataatgacacatgaagatgctagctatagaataccagaagaccggaaggccatggttcagtgttgccttcaacatatagctagactggaagctctaattggtattcgaacagttatggatttatcgcggggggacagaagaaagaaacaagaaaggctcgaatgtcaagtgagggtgcgaaatgaagaacagaccctaattccaagtcagctggatggacaggcaagctcgtcagctgctagtaaaccgccgcgggcccgcgggctccgcacgaaccgaccagaccccaacaccgggcaaggggcagccccggaggcaagccgggccagaaccacaccctccacggagctggctcgtacccggacccgcccacagagtcgccccgcccagactgcgcagtgtatcctgggtgctgtagtctttgttcggtttggtggttggccggtgggccggagacgcaccgtagaaaccgaaccctcttacccaattgggcgccgtccccagtacgctttgcgtagtttgtggtggcgtcgtaccgcttcggtgaaagttaatttgacgggcatctga

SEQ ID NO: 116297 - DNA, 531 bp, Homo sapiens
tcagcttattgtcttaacagcaaggacaaaccacttaactgtctgggctttggtttccacaactggaaagagatagttcacattatgttgcctcttctgtacctcacaaggtcgggtcttagctgccttcctgcgaggcacggctcgggacctgcagcccgccatgcctgagcctccccctgttccgtgggctcctgtgcggcccgagcctccccgataagcgccgccccctgctccacggcgcccagtcccatcgaccacccaagggctgaggagtgctgggcgcacggcacggaactggcaggcagctccacctgcagccccggtgcggatccactgggtgaagccagctgggctcctgagtctggtggggacctggagaacctttatgtctatctcagggattgtaaacacaccaatcagcaccctgtgtctagctcagggattgtaaatacaccaatcggcactctgtatctagctcaaggtttgcaaacaccaatcagcatcctgcgtctagctcagggtttgtga

SEQ ID NO: 116298 - DNA, 928 bp, Homo sapiens
atagtcgctttgcatgacagtaatttaaccactcaagttgtctttcaccttgggggctgcactacgaatgatcagcaaggtgggaggaatcaagcaacgccactagatggaccgatatcaagaacacacctccagggctttgacccagaaagcaggaagccaggattacgaagctgttgccagccccccggctgcccttgtacatctctgtcatgaagcagtttctcatcacctccagtgttctgatgagacgtgggtcttcctgcttcaccctctcttaatagagtggcagaacacaaaaccaccgagctgcattacccaactcgcattgcaatctccaagtccctttggtttcagtgtcattctttttgatgagcagaacaatgacctcaaggagttggcacatttggctagtcttccttttgtcatctatgtaatgaataaacggtctgattctaaaaaagtgtccttgcatctttaccagtcgaatcagtcaggactttaccttagccatgccttgtctcatgtgtgcttgacagaaactaagtggagctgtgggaccaacatggtagtcgtaggccgagtctcccctcaacctcatccccactccatagataaaaggcagaagagtgggagggaggtttacagggagatgaacaaaagtaacaattatattgagaggagagtattgtttagtcttactcttttggttacccccagttctcggcctctcaatccactccttctgacccacattggaagttacctcactgcgcccagtcccatcaaccacccaagggctgaggagtgtgggctcacggcggcggactggcaagcagctccacctgtagccctagtgcgtgatccactgggtgaagccagctgggctcctgagtctggtgcggacgtggagaacctttacgtctag

SEQ ID NO: 116299 - DNA, 337 bp, Homo sapiens
ccggaaccggcgccgaggctctagcgctggcggcagagctgcagggcgaggcgacgtgctccatctgcctagagctctttcgtgagccggtgtccgtcgagtgcggccacagcttctgccgcgcctgcatagggcgctgctgggagcgcccgggcgcggggtctgttggggccgccacccgcgcgccccccttcccactgccctgtccgcagtgccgcgagcccgcgcgccccagtcagctgcggcccaaccggcagctggcggcagtggccacgctcctgcggcgcttcagcctgcccgcggctgccccgggagagcacgggtctcaggcggccgc

SEQ ID NO: 116300 - DNA, 441 bp, Homo sapiens
cctttcttttccgtggaccggaacacctcacagtcctccagttccttcttcaagaccctcagcctggactccaagagctcctgtagatgaagggaaacaatgtaaggtgggggtgaggggcttctggaaacccccacctctgccttcctggagccagccaggagaaagggaaggccctgctcactgagggggaggccgggtagaagtcatctctacaggctacaggttacactgcgaggtgactctgaaggtctcgggatcttgcttccccaaaagcatctgctggaccagccagactgaaacacaagctccggcagccctacccctagtcgtctcctctactctccgcccccccaccaaaaagcaccgtggatgggagagttggagcaggatgggccagcaaggagagactggggactgccgcccgagcctccccgcccc

SEQ ID NO: 116301 - DNA, 2723 bp, Homo sapiens
atcttgacaggcactggacggggcctgcaggggtctccacagagaccatcaggatgtcgtattttggggagcatttttggggcgagaaaaatcatggctttgaggtcctgtaccacagcgtgaagcaggggcccatctccaccaaggagctggcggacttcatccgggagagggccaccatcgaggagacctactcgaaggcgatggcgaaactctccaagctggccagcaacgggacccccatggggaccttcgccccgctctgggaggtcttccgcgtctcctcggacaagctggcgctgtgccacctggaactgacacggaagttacaggatctcatcaaggacgttctccgctacggcgaggaacagctcaagacccacaagaagtgcaaggaggaagtggtgagcaccttggatgctgtgcaggtactctcgggcgtcagccagctcctgcccaagtcccgcgagaactacctgaaccgttgcatggaccaggagcggctgcggagggagagtaccagccagaaggagatggacaaggcggagactaaaaccaagaaggcggcagagagcctgcggcgctcagtggaaaaatacaactcagcccgagctgactttgagcagaagatgctggactcagccctgcgcttccaagccatggaggagacacacctgaggcacatgaaggcactgctgggctcatatgctcactcggtggaggacacgcacgtgcagattgggcaggtgcatgaggaatttaagcagaacatcgagaacgtcagcgtggagatgctactcaggaagtttgcagagagtaagggcacaggccgggagaagcctggacctctggacttcgaggcatacagtgcggctgccctgcaggaagcgatgaaacgtttgcggggagccaaggcctttcgccttccaggactaagccggcgggagcgggagccagagccacctgcagctgtagatttcctggagcctgattcagggacatgtccagaggtggatgaagaaggtttcactgtccggcctgatgtgacccagaacagcacggccgagccctcccgtttctcgtccagcgactccgacttcgacgatgaagagccccgcaagttctatgtgcacatcaagcctgccccggcccgggctccagcctgcagccccgaggcagcagcggcacagctcagggccaccgcgggcagcctcatccttcctcctggcccagggggcaccatgaaacgccattcttcacgggacgctgctgggaaaccccagagacctcggtctgcccccagaaccagcagctgtgcagagagattgcagtcagaggagcaggtgtccaagaacctctttgggccgcccctggagtcagcctttgaccacgaagattttacaggctctagcagcctgggcttcacctccagcccctcccctttctcctcctcgtcgcccgaaaacgtggaggattccggcctggactctccgtcccacgcggcacctggcccctccccagattcctgggtcccccgcccaggcaccccgcagagcccgcccagctgtagggcgccacccccagaggccaggggtatccgggcaccgcctctgccagactcgccgcagcccctcgcctcgtctccaggcccctgggggctggaggccttggccggaggagacctgatgcctgcacctgctgaccccacagccagggagggcctggcagccccacccaggagacttcgctctaggaaggtgtcctgccctctcacacgtagcaatggggacctgtctcgttccctgagcccctccccactgggctcttcagccgccagcactgccttggaacggcccagcttcttatcccagacaggacacggagtctcccggggtccgagccctgtggtcctgggctcccaggatgccctgcccatagccacagccttcacggagtatgtccacgcctacttccgtggccacagccccagctgcctggctcgagtaactggggagctgaccatgaccttccctgctggcatcgtgcgtgtgttcagcgggaccccaccaccacctgtcctcagcttccggcttgtacacacaaccgctattgagcacttccagcccaacgccgatctgctgttcagtgacccctcccagagtgaccctgagaccaaagacttctggctcaacatggcagctctgaccgaagccctgcagcgccaggcagagcagaaccccactgcctcctactacaacgtggtgctgctgcgataccagttctcccgcccgggtccccagtctgtgcctctgcagctcagtgcccactggcagtgtggagccaccctcacccaggtctcagtggagtacggctaccggcccggtgccacggctgtgcccacaccactcacgaacgtccagatcctgctgcctgtgggggagcctgtgaccaacgtccgcttgcagccggctgccacctggaacctggaggagaagcggctcacttggaggcttccagatgtgtccgaggcaggcggttctggccgcctctctgccagctgggagccgctctcagggcccagcacacccagccccgtggctgcacagttcaccagcgaggggaccactctgtcgggcgtggacttggaactggtgggcagcggttaccgcatgtcgctggtgaagaggaggtttgccacagggatgtacctggtgagctgctga

SEQ ID NO: 116302 - DNA, 541 bp, Homo sapiens
cgaggcgtcgagagttcccagcgaaggagcgcgagagcgcgtcgatgtcaagccccgaagagtaaccaacatggccaagggtgccccaccaagccagccgccgccgaacagtgtgcctgcagattgagcagatccgtaaggctgagccacccaaggacgaggagagtttcaggccgagagaggatgaggaaggccaggaggggcaggactccatgtccagggccaaggccaactggctgcgtgccttcaacaaggtgcggatgcagctgcaggaggcccggggagaaggagagatgtctaaatccctatggttcaaaggcggcccagggggcggtctcatcatcatcgacagcatgccagacatccgcaagaggaaacctatcccactcgtgagcgacttggccatgtccctggtccagtccaggaaagcgggcatcacctcggccttggcctccagcacgttgaacaacgaggagctgaaaaaccacgtttacaagaagaccctgcaagccttaatctaccccatctcgtgcacgacgcc

SEQ ID NO: 116303 - DNA, 546 bp, Homo sapiens
cggccgcggcccgggcagcggctgcccgctgcgggcagcatggcgaacccttcaagctctactgccaggacgacggacgcgccatctgcgtggtgtgcgaccgcgcccgcgagcaccgcgagcacgccgtgctgccgctggacgaggcggtgcaggaggccaaggagctcttggagtccaggctgagggtcttgaagaaggaactggaggactgtgaggtgttccggtccacggaaaagaaggagagcaaggagctgctggtgagccaggcacccgcaggccccccgtgggacattacagaggcctgagaactcagcaccagggctcggtgtgtgtggtgttggagtgtgtgctatggaaccgcagaatcgatttcagaaagataatagagtccatattatataggggtgtccacataattgttgtacaaaccagagctttttaaagtgaaaagcagtgctaaaataattattgcaaaacaactggcttaaactggagctgtcccagcgaatcaggacgctcagtcactctgatattacgtaacat

SEQ ID NO: 116304 - DNA, 1972 bp, Homo sapiens
ttacggggtgcattgatgttcctggcactgtgcaaagctccatggagtagacggataccgagagacgtcaatttgttcagccagcgtttgctggtgccatctggatgctggaactaagcttgtcaccaggttctgccaggcgacattgtccctagcatggaagtgggaatgaacaagcaggcagaggaagtcaaggacgattatgagggatgggaagggtctgcccaatctgcacgtgcgtgtcctccaccgagtgagatatgagcccagcagtgccttcatgtgcctcaggtgtgtctcctccatgcttggaagcgagcagcccctcgcctcgtagcagtaggtgggcgtggtggccgtccacacttcgaagttgtgtgcgtcgtgcacgagatggggtagattaaggcttgcagggtcttcttgtaacgtggtttttgagtgggataggtttcctttgcggatgtctggcatgctgtcgatgatgatgagaccgccccctgactgcaaggggtcacggctccctctggcagcttcgggagtgagggcagaaaccagagactggggggcaaccagggaggcaagtaggcgatgggggtaagggtggcagtgggagagcaggtggaaaggtcgctgtccctctaactggcaggtgtcacctggttggccgcagaagggcctgccagccgaggaccacatcagtgtaagaagcagcttccacaggagctcagccaggatccttggaaaacgtcggaccttgccaggccatggtcaggtttgggatgccctccaggcaagtgacccaagctgctccgggcacaaaggcggcaagcgtcaacagtcggagaagcacgacacacacatgaacctgggtgccgccagtgcaaaggagattggcagcgtccagttcagcacatggtctcgtaaggaaggcgtccatggattgggccacctggaggcccgtggtgaccttgaccgagaatcagacgcacacaagaagggctcccgccctgcgccgaaaggagcggccttcggggtcacagaggcagcaaggatccctgatcagcaggactgccctcgcttccaagcaatccagggtcttcctgaaagtcccggcggatcaaatacagtcagccgccggggaatgccacggaagacagatgaacgattaaaaagtgcaagaaggctcgggttggaaatccttgtggaagttcacgccgtggaaggtgtgcaccggcgggccaatagtgatgcggtaactacaacgtgtaccacacatcaagtagtctgcagctcgtcggcttcgggccgtgggacgcggcgggtgattgggagcccgatccccaggggcctcttcagcaatctcagggaaaatgcgcaaaggcttcagagaagaagccggagggtgccgcgagcccgcgcgcccagtcagctgcggcccaaccggcagctggcggcagtggccacgctccgcggcgcttcagcctgcccgcggctgccccgggagagcacgggtctcagcggccgcggcccgggcagcggctgcccgctgcgggcagcatggcgaaccttcaagctctactgccaggacgacggacgcgccatctgcgtggtgtgcgccgcgcccgcgagcaccgcgagcacgccgtgctgccgctggacgaggcgtgcaggaggccaaggagctcttggagtccaggctgagggtcttgaagaaggactggaggactgtgaggtgttccggtccacggaaaagaaggagagcaagagctgctggaattcaaaagcacctgagcagcccctcggaggtgcttcacatgccctcagtgccgaaagagcttcctcggcggagcttccgccccaacctgcagctggccaatatggtccagtgattcggcagatgcacccaacccctggtcgagggagccgcgtgaccgacagggcatctgtcccaaacaccaagaagccctga

SEQ ID NO: 116305 - DNA, 1417 bp, Homo sapiens
atggacagtctccaaggtcacattggaaagggcgtgcatacaggaagcagcggagagctgcagtcatttttgcaaccaacgtcacaggacttccacatctggtgtctgaatattgtcacttcaacaactactaaactttctgctgaaacatggagaacctgctcaggcaagctgggaatctacgtccaggatctggacctgccaacgaggctgagggactctaatcaggcagtgaggctggccttagcaatgcagctgggcttcgaaggcccgaggttcagtggggagaaatccaggcaagaagggtgctgggaagtgtgccaggcccagctgagcaaggagagattctttgaggaaaccactaatgggaatgcgatgatgccgtgtttccgaggatggctgctgctagggagggaagcaggctcgtacctggagggtcaaggtattggagattataaaagtacatttttgcaaattgatgcattccagccctactggaaacatactacttttgagggaggctaccctgtgcaccacatcctgttccagacccccatcttcacagccctggcactacgtgtagcagagtcggtctcccagcccagtgctcccgtgacccacatgtggtacttctccctcccggcctgctgtgagattcttataaaattgtctctgattaatcaccctgtacagcttttaaaagttacttttattacccaaaacaacacttcagaaactaagctgacggttgaatcattgaaggagtcacagcattctttcatcccagagagaaaaaagggaattggtttcttgcctccaggaaatggcagtaacatcggggacagcagcagttgcaggacgacagacgtgtcactgagggtgcagggtgctatggctggagctgctgctgttctccctatcactcgtggggaagccaggcctggcgaggtgcaggcacttgctgaggtcacggcggccagactggagcccagaactctgtctgcacctaagcacagtgtcccttacctccagcatctgagtcccatcgtctaagagaacctgctcaggcaagctgggaatctacgtccaggatctggacctgccaacgaggctgagggactctaatcaggcagtgaggctggccttagcaatgcagctgggcttcgaaggcccgaggttcagtggggagaaatccaggcaagaagggtgctgggaagtgtgccaggcccagctgagcaaggagagattctttgaggaaaccactaatgggaatgcgatgatgccgtgtttccgaggatggctgctgctagggagggaagcaggctcgtacctggagggtcaaggtattggagattataaaagtacatttttgcaaattgatgcattccagccctactggaaacatactacttttgag

SEQ ID NO: 116306 - DNA, 399 bp, Homo sapiens
  misc_feature (1)...(399): n = a,t,c or g
tccccttgnaactccacaaggcggaggttgcagtgnagcccgagatggcacccacttgcactcccctcccaccctggctgacagaggcaagactcccatcttaaaaaaaaaaaagttagaagacatggaaagagatcccccaagtttcaacatggatcccaggaattccagaaagcatcaagagaatggagaaaaggtatgctgaacaaataacagctgagaatttccaaaaccaaaaatatgaattgtcagacttaaagggcccaacagtttatgttttcaaaactcacatccagaaatattacagtaagtttcagtatattaagagtttctattataggacttaaagtttgtaacatgtgaaacaatttatattacaggatatattataagaaaacc

SEQ ID NO: 116307 - DNA, 578 bp, Homo sapiens
tttaaaatggttttcttaaatttatttatttttttaaacataacacgaggaaggtgttaaaactggtgtaatagctcaatagaataagtattccagatttcgggagggatgaagagggagatattcagaacccttcaccagattccccccaacttgatcatagtggattaatggtgtgctttgtggatgtggttagtcaatgacaccagcttgacggatctttctttctgcaccaaaccccattgagttatctggtccccttggctgacgaagaaccattaggcgaggagcactggcatcatccagagtgatattcttcaagcgattgaccaaccgatcaggtcgaggagctgcaacagccttggggccctcacagactcgccaaacattacaggcgctgcacttgccagtgcgctgattaagaatcactgagaactccacctcatctcctgcctgtagctcaatgccatcctgaacttctttcacatggaaaaagagcttgacgttctgaacactggaataaatccgtaagaggttaacagtttttcaataaccccagtttcacgcatggctgctga

SEQ ID NO: 116308 - DNA, 5442 bp, Homo sapiens
atggagaacgtttttactgtgtcatcagatcctcatccctctcctgcagcccctccttcactttctttacccttatcttcatcttctacctcatctgggactaaaaaacaaaagaggaccccaacttatcagagatctatgagctttgatccaaaccttctccacaacaatggacataatgggtaccctaatggtacttcagcagcactgcgtgaaactggggttattgaaaaactgttaacctcttacggatttattcagtgttcagaacgtcaagctagacttttcttccactgttcacagtataatggcaacctgcaagacttaaaagtaggagatgatgttgaatttgaagtatcatcggaccgacggactgggaaacccattgctgttaaactggtgaagataaaacaagaaatcctccctgaagaacgaatgaatggacaagaagtgttttatctgacttacacccctgaagatgtcgaagggaacgttcagctggaaactggagataaaataaactttgtaattgataacaataaacatactggtgctgtaagtgctcgcaacattatgctgttgaaaaagaaacaagcccgctgtcagggagtagtttgtgccatgaaggaggcatttggctttattgaaagaggtgatgttgtaaaagagatattctttcactatagtgaatttaagggtgacttagaaaccttacagcctggcgatgatgtggaattcacaatcaaggacagaaatggtaaagaagttgcaacagatgtcagactattgcctcaaggaacagtcatttttgaagatatcagcattgaacattttgaaggaactgtaaccaaagttatcccaaaagtacccagtaaaaaccagaatgacccattgccaggacgcatcaaagttgactttgtgatccctaaagaacttccctttggagacaaagatacgaaatccaaggtgaccctgctggaaggtgaccatgttaggtttaatatttcaacagaccgacgtgacaaattagagcgagcaaccaatatagaagttctgtcaaatacatttcagttcactaatgaagcccgagaaatgggtgtgattgctgccatgagagatggttttggtttcatcaagtgtgtggatcgtgatgttcgtatgttcttccacttcagtgaaattctggatgggaaccagctccatattgcagatgaagtagagtttactgtggttcctgttgaatttagtattagtgacaaacagaggcctggacagcaggttgcaacttgtgtgcgacttttaggtcgtaattctaactccaagaggctcttgggttatgtggcaactctgaaggataattttggatttattgaaacagccaatcatgataaggaaatctttttccattacagtgagttctctggtgatgttgatagcctggaactgggggacatggtcgagtatagcttgtccaaaggcaaaggcaacaaagtcagtgcagaaaaagtgaacaaaacacactcagtgaatggcattactgaggaagctgatcccaccatttactctggcaaagtaattcgccccctgaggagtgttgatccaacacagactgagtaccaaggaatgattgagattgtggaggagggcgatatgaaaggtgaggtctatccatttggcatcgttgggatggccaacaaaggggattgcctgcagaaaggggagagcgtcaagttccaattgtgtgtcctgggccaaaatgcacaaactatggcttacaacatcacacccctgcgcagggccacagtggaatgtgtgaaagatcagtttggcttcattaactatgaagtaggagatagcaagaagctctttttccatgtgaaagaagttcaggatggcattgagctacaggcaggagatgaggtggagttctcagtgattcttaatcagcgcactggcaagtgcagcgcctgtaatgtttggcgagtctgtgagggccccaaggctgttgcagctcctcgacctgatcggttggtcaatcgcttgaagaatatcactctggatgatgccagtgctcctcgcctaatggttcttcgtcagccaaggggaccagataactcaatgttttctgttaatggcgaaagaatggaagcgaataaagttttactgatttttgagacactagcacctagcgctttcattattgaaacgtcccgtgtgggaggggcgggtctgggttcttgctggtgtgaaatgactgagtacaaactggtggtggttggagcaggtggtgttgggaaaagcgcactgacaatccagctaatccagaaccactttgtagatgaatatgatcccaccatagaggattcttacagaaaacaagtggttatagatggtgaaacctgtttgttggacatactggatacagctggacaagaagagtacagtgccatgagagaccaatacatgaggacaggcgaaggcttcctctgtgtatttgccatcaataatagcaagtcatttgcggatattaacctctacagggagcagattaagcgagtaaaagactcggatgatgtacctatggtgctagtgggaaacaagtgtgatttgccaacaaggacagttgatacaaaacaagcccacgaactggccaagagttacgggattccattcattgaaacctcagccaagaccagacagggtgttgaagatgctttttacacactggtaagagaaatacgccagtaccgaatgaaaaaactcaacagcagtgatgatgggactcagggttgtatgggattgccatgtgtgtccttggagtgtaaagaagactttgcagagaggctgaacggctgtggttctgctcctcctcccttgtcccccaacttcaaggaaggaggaggagaaattgatgatgcaatgcgcaactttgctgaaaaagtgtttgcctctgaagtcaaagatgaaggaggtcgtcaggagatttccccctttgatgtggatgagatctgtccgatttctcatcatgagatgcaagcacacatattccatctggagactctgtccacctccacagaagccaggagaaaaaagcgtttccaaggacggaagactgttaatttgtccattccactaagtgaaacatcttccaccaaactgtcccacattgatgaatacatttcctcatctccaacctaccagaccgtgcctgattttcagagagtgcagattactggtgactatgcctctgggaaaagggagcctctggggaggcacggagtctctggggaaaagaaggacccaagcagacctaggatagtgagaagggttgcagatagcataaaccaaccaaagaaaacagatccagagaaagagagagggaagagaaaaaagaaggaaccagagaaaagaaggaagatgagagagagaacagttggtcaattaataaatctctgccacatggacttgcagaatcagcatcatattggtgaaactgctgtgcagccgtccgtcgatgctccaaatatagttttaatgaccagtgctgggtccccttctcatgtaactgacccacttagggttacagttgaagattttgaaattgtttgcaaaggtctgtatcgggcactatgcatacgtgagaaatacatgcagaagtcgtttcagaggttccctaaaaccccttccaaatacttgcggaacattgatggtgaggcttgggtagcaaatgagagcttctatccagtctttactcctcctgtgaagaagggagaggaccccttccgaacagacaaccttcctgaaaacctgggctatcacctcaaaatgaaggacggtgtagtttacgtctatcctaatgaagcagcagtcagcaaagatgagcctaagccacttccttacccaaatctggacaccttcttagacgatatgaattttttacttgctttaattgctcaaggacctgttaagacctatacccaccggcgcctgaagttcctctcctccaagttccaggtccatcagatgcttaacgagatggacgagttaaaggagctgaaaaacaacccccaccgagatttttataactgcaggaaggtggacacccatatccatgcagccgcttgcatgaaccagaaacatctgctgcgttttattaagaaatcttaccaaattgatgctgacagagtggtctatagcaccaaagagaagaatctgaccctaaaggaactttttgctaaattaaaaatgcatccttatgacctgactgttgattctctggatgttcatgctggacgccagaccttccagcgttttgataagttcaatgacaaatataatcctgtaggagcaagtgagctacgggacctctacttgaagacagacaattacattaatggggaatattttgccactatcatcaaggaggtaggtgcggacctggtggaggccaagtaccagcatgctgagccccgcctgtccatctatggccgcagtcctgatgagtggagcaaactctcctcctggttcgtctgcaatcgcatccactgccccaacatgacatggatgatccaggttcccaggatctatgatgtgttccgttccaagaatttccttccacattttggaaaaatgctggagaatattttcatgccagtgtttgaggccaccatcaacccccaggctgacccagaactcagtgtcttcctcaagcatatcactggctttgacagtgtggatgatgagtccaaacacagtggccacatgttctcctccaagagtcccaagccccaggagtggacattggaaaagaatccatcttacacttactatgcctactacatgtatgcaaacatcatggtgctcaacagcctgagaaaggaacgaggcatgaatacgtttctgttccgacctcactgtggagaagctggagccctcacccatctcatgacagcattcatgatagcagatgatatctctcatggcctaaatttaaaaaagagtcccgtgctacagtacttgtttttcttagcccaaattcccatcgccatgtcaccactaagtaacaatagcctatttctagagtatgccaaaaatccttttttggatttccttcagaaagggctaatgatctcactgtctacagatgacccaatgcaattccactttaccaaggagcccctaatggaagaatatgctattgctgcacaagtcttcaagctgagcacctgtgatatgtgcgaagtggcaaggaacagtgtcttgcagtgtggaatttctcatgaggagaaagtaaagtttctgggcgacaattaccttgaggaaggccctgctggaaatgatatccggaggacaaatgtagcccaaatccgcatggcctatcgctatgaaacctggtgttatgaactcaatttaattgctgagggtcttaaatcaacagaataa

SEQ ID NO: 116309 - DNA, 4076 bp, Homo sapiens
gcttatggcggcgctggagagggggcgctgagctgttgggtatgaagtgtaacagaacagactttaccacctgaaactgctgcttcaagttcagatcaggcaaggaacaaacctcgtaacaactaacaagaccaaagaagagtacacttaagttgaagacacaacacttgatctgaaacaagaagtttgtgcctactcaacagctttgaaagagcacttcccaacgctgctagtagtctttgttttcttcagtgctgtactgtgagattgcccggtacagcagcagttgtattctttattagcttggtagatcattttctctcgctcttttttttaatactagcaactttcatcctttgaaacgtgtgctgaaaaagaagaatcagcaaatactactgaaagtgcaatatttgagtatcactgcgagatgagctttgatccaaaccttctccacaacaatggacataatgggtaccctaatggtacttcagcagcactgcgtgaaactggggttattgaaaaactgttaacctcttacggatttattcagtgttcagaacgtcaagctagacttttcttccactgttcacagtataatggcaacctgcaagacttaaaagtaggagatgatgttgaatttgaagtatcatcggaccgacggactgggaaacccattgctgttaaactggtgaagataaaacaagaaatcctccctgaagaacgaatgaatggacaagttgtgtgcgctgttcctcacaacttagagagtaaatctccagctgccccgggtcagagtccaacagggagtgtatgctacgaacgtaatggggaagtgttttatctgacttacacccctgaagatgtcgaagggaacgttcagctggaaactggagataaaataaactttgtaattgataacaataaacatactggtgctgtaagtgctcgcaacattatgctgttgaaaaagaaacaagcccgctgtcagggagtagtttgtgccatgaaggaggcatttggctttattgaaagaggtgatgttgtaaaagagatattctttcactatagtgaatttaagggtgacttagaaaccttacagcctggcgatgatgtggaattcacaatcaaggacagaaatggtaaagaagttgcaacagatgtcagactattgcctcaaggaacagtcatttttgaagatatcagcattgaacattttgaaggaactgtaaccaaagttatcccaaaagtacccagtaaaaaccagaatgacccattgccaggacgcatcaaagttgactttgtgatccctaaagaacttccctttggagacaaagatacgaaatccaaggtgaccctgctggaaggtgaccatgttaggtttaatatttcaacagaccgacgtgacaaattagagcgagcaaccaatatagaagttctgtcaaatacatttcagttcactaatgaagcccgagaaatgggtgtgattgctgccatgagagatggttttggtttcatcaagtgtgtggatcgtgatgttcgtatgttcttccacttcagtgaaattctggatgggaaccagctccatattgcagatgaagtagagtttactgtggttcctgatatgctctctgctcaaagaaatcatgctattaggattaaaaaacttcccaagggcacggtttcatttcattcccattcagatcaccgttttctgggcacggtagaaaaagaagccactttttccaatcctaaaaccactagcccaaataaaggcaaagagaaggaggctgaggatggcattattgcttatgatgactgtggggtgaaactgactattgcttttcaagccaaggatgtggaaggatctacttctcctcaaataggagataaggttgaatttagtattagtgacaaacagaggcctggacagcaggttgcaacttgtgtgcgacttttaggtcgtaattctaactccaagaggctcttgggttatgtggcaactctgaaggataattttggatttattgaaacagccaatcatgataaggaaatctttttccattacagtgagttctctggtgatgttgatagcctggaactgggggacatggtcgagtatagcttgtccaaaggcaaaggcaacaaagtcagtgcagaaaaagtgaacaaaacacactcagtgaatggcattactgaggaagctgatcccaccatttactctggcaaagtaattcgccccctgaggagtgttgatccaacacagactgagtaccaaggaatgattgagattgtggaggagggcgatatgaaaggtgaggtctatccatttggcatcgttgggatggccaacaaaggggattgcctgcagaaaggggagagcgtcaagttccaattgtgtgtcctgggccaaaatgcacaaactatggcttacaacatcacacccctgcgcagggccacagtggaatgtgtgaaagatcagtttggcttcattaactatgaagtaggagatagcaagaagctctttttccatgtgaaagaagttcaggatggcattgagctacaggcaggagatgaggtggagttctcagtgattcttaatcagcgcactggcaagtgcagcgcctgtaatgtttggcgagtctgtgagggccccaaggctgttgcagctcctcgacctgatcggttggtcaatcgcttgaagaatatcactctggatgatgccagtgctcctcgcctaatggttcttcgtcagccaaggggaccagataactcaatggggtttggtgcagaaagaaagatccgtcaagctggtgtcattgactaaccacatccacaaagcacaccattaatccactatgatcaagttggggggaatctggtgaagggttctgaatatctccctcttcatccctcccgaaatctggaatacttattctattgagctattacaccagttttaacaccttcctcgtgttatgtttaaaaaaataaataaatttaagaaaaccattttaaataatgcacagttgcagcctggaaaaacttaaggtggcgccttatagtatcaattttaggagctttatttggtgcatttaacgcaactggtaattgcagaatccactttgcctgtgtaagtgaaaaatatagactgttatcttgttggccctatgaaattctgcacttttcattatatactctaccttcattaattacttctggcaagatgttctgccttagcactcagttgcattcttttcctttttcttcctgttcattatgctttaattctgaggaccatatgagggtagaatatattatcttttaaaaattacaaaaatttgtataggcaaaccatttcttaaagttgatggccaaattttaaaatgttatttttcatatcatttataatcttgtcacaatccacttaaagaagtttggttatatttcagtgaaaattttcttccagagtaggttttttttcgtgggttggggggtaactttactacaattagtaagtatggtgcagaatttcatgcaaatgaggagtgccagcagtgtgataatttaaacatatttaaacaaaaacaaaaaaaatgaatgcacaaacttgctgctgcttagatcactgcagcttctaggacccggtttcttttactgatttaaaaacaaaacaaaaaaaaataaaaaagttgtgcctgaaatgaatcttgtttttttttataagtagccgcctggttactgtgtcctgtaaaatacagacacttgacccttggtgtagcttctgttcaactttatatcacgggaatggatgggtctgatttcttggccctcttcttgaattggccatatacagggtccctggccagtggactgaaggctttgtctaagatgacaagggtcagctcaggggatgtgggggagggcggttttatcttcccccttgtcgtttgaggttttgatctctgggtaaagaggccgtttatctttgtaaacacgaaacatttttgctttctccagttttctgttaatggcgaaagaatggaagcgaataaagttttactgatttttgagacact

SEQ ID NO: 116310 - DNA, 974 bp, Homo sapiens
atatttattttaaaatggttttcttaaatttattttttttaacagcttcctcgtgttatgtttaaaactggtgtaatagctcaaaagaattaagtattccagatttcgggagggatgaagagggagatattcagaaaccttcaccagattcctcccaacttgatcatagtggattaatgacgtgctttgtggatgtggttagtcaatgacaccagcttgacggatctttctttctgcaccaaaccccattgagttatctggtccccttggctgacgaagagccattaggcgaggatcactggcatcatccagggtgatgttcttcaagcgactgaccaaccgatcaggtcgaggagctgcaacagccttggggccctcacagactcgccaaaccattcccaggccactgcacttgccagtgccgctgatgaagaatcaccggagaactccacctcatctcctgcctggagctcaaggccatcctcaacttctttcatatggaaaaagagcttcttgctatcccctacttcatagtttaatgaaagccaaactgatcttgcacacattccagtgggccctacgcagggggtgtgatgttgtaagccatagtttgtgcattttggccctggtctggacttttcaaaaagcaaatgtagtaaaacaaaaagtggtctctgctagattaagacaagagacataaccaaatggaaagtgtgatcctttattagcttctgattcataaaaaaacctataagagacatttggggggatatttggggaaataggaagatggaatgggtagtagataatgtggtatatttgatttttctagaagtgataattgagttacgtaggataatgttctaattcttaggagatgcatgcagaagttttttttttaagttttgaaaagtcatgatgttgacagcatattttcaaataaatatgtacaaaatcaaaaaaaaaaaaaaaag

SEQ ID NO: 116311 - DNA, 3609 bp, Homo sapiens
gcggcgctggagagggggcgctgagctgttgggtatgaagtgtaacagaacagactttaccacctgaaactgctgcttcaagttcagatcaggcaaggaacaaacctcgtaacaactaacaagaccaaagaagagtacacttaagttgaagacacaacacttgatctgaaacaagaagtttgtgcctactcaacagctttgaaagagcacttcccaacgctgctagtagtctttgttttcttcagtgctgtactgtgagattgcccggtacagcagcagttgtattctttattagcttggtagatcattttctctcgctcttttttttaatactagcaactttcatcctttgaaacgtgtgctgaaaaagaagaatcagcaaatactactgaaagtgcaatatttgagtatcactgcgagatgagctttgatccaaaccttctccacaacaatggacataatgggtaccctaatggtacttcagcagcactgcgtgaaactggggttattggaaaactgttaacctcttacggatttattcagtgttcagaacgtcaagctagacttttcttccactgttcacagtataatggcaacctgcaagacttaaaagtaggagatgatgttgaatttgaagtatcatcggaccgacggactgggaaacccattgctgttaaactggtgaagataaaaacaagaaatcctcccgaagaacgaatgaatggacaagaagtgttttatctgacttacacccctgaagatgtcgaagggaacgttcagctggaaactggagataaaataaactttgtaattgataacaataaacatactggtgctgtaagtgctcgcaacattatgctgttgaaaaagaaacaagcccgctgtcagggagtagtttgtgccatgaaggaggcatttggctttattgaaagaggtgatgttgtaaaagagatattctttcactatagtgaatttaagggtgacttagaaaccttacagcctggcgatgatgtggaattcacaatcaaggacagaaatggtaaagaagttgcaccagatgtcagactattgcctcaaggaacagtcatttttgaagatatcagcattgaacattttgaaggaactgtaaccaaagttatcccaaaagtacccagtaaaaaccagaatgacccattgccaggacgcatcaaagttgactttgtgatccctaaagaacttccctttggagacaaagatacgaaatccaaggtgaccctgctggaaggtgaccatgttaggtttaatatttcaacagaccgacgtgacaaattagagcgagcaaccaatatagaagttctgtcaaatacatttcagttcactaatgaagcccgagaaatgggtgtgattgctgccatgagagatggttttggtttccatccaagtgtgtggatccgtgaatgttccgtatgttccttcccacttccagtgaaattctggatgggaaccagctcccatattgcagatgaagtagagtttactgtggttcctgatatgctctctgctcaaagaaatcatgctattaggattaaaaaacttcccaagggcacggtttcatttcattcccattcagatcaccgttttctgggcacggtagaaaaagaagccactttttccaatcctaaaaccactagcccaaataaaggcaaagagaaggaggctgaggatggcattattgcttatgatgactgtggggtgaaactgactattgcttttcaagccaaggatgtggaaggatctacttctcctcaaataggagataaggttgaatttagtattagtgacaaacagaggcctggacagcaggttgcaacttgtgtgcgacttttaggtcgtaattctaactccaagaggctcttgggttatgtggcaactctgaaggataattttggatttattgaaacagccaatcatgataaggaaatctttttccattacagtgagttctctggtgatgttgatagcctggaactgggggacatggtcgagtatagcttgtccaaaggcaaaggcaacaaagtcagtgcagaaaaagtgaacaaaacacactcagtgaatggcattactgaggaagctgatcccaccatttactctggcaaagtaattcgccccctgaggagtgttgatccaacacagactgagtaccaaggaatgattgagattgtggaggagggcgatatgaaaggtgaggtctatccatttggcatcgttgggatggccaacaaaggggattgccctgcaagaaaggggagagcgtcaagttccagttgtgtgtcctgggccaaaatgcacaaactatggcttacaacatcacaccccctgcgcagggcagcagtggaatgtgtgaaagatcagtttggcttcatttaactatgaagtaggggatagcaagaagctcttttcccatgtgaaagaagttcaggatggcattgagctacaggcaggagatgaggtggagttctccagtgattcttaatccagcgcactggcaagtgcagcgccctgtaatgtttggcgagtctgtgaggggccccaaggctgttgcagctcctcgacctgaatcggttggtcaatcgcttgaagaatatcactctgggatgatgccagtgctcctcgcctaatggttcttcgtcagccaagggggaccagataacttcaatgggggttttggtgcaggaaaggaaagatcccttcaagctggtggtcattgactaaccacatccacaaagcacaccatttaatccactatgattcaagttggggggaatctggtgaagggttctgaatatctccctcttcatccctcccgaaatctgggattacttattctattgaggctattacaccagttttacacacctctcctcggtgttatggttttaaaaaaataaataaattttagaaaacccttttaaataatgcacagttgcagcctggaaaaacttaaggtggcgccttatagtatcaattttaggagctttatttggtgcatttaacgcaactggtaattgcagaatccactttgcctgtgtaagtgaaaaatatagactgttatcttgttggccctatgaaattctgcacttttcattatatactctaccttcattaattacttctggcaagatgttctgccttagcactcagttgcattcttttcctttttcttcctgttcattatgctttaattctgaggaccatatgagggtagaatatattatcttttaaaaattacaaaaatttgtataggcaaaccatttcttaaagttgatgggccaaattttaaaatgttatttttcatatcatttataatcttgtcacaatccacttaaagaagtttggttatatttcagtgaaaattttcttccagagtaggttttttttcgtgggttgggggggtaactttactacaattaggtaagtatggtgcagaatttcatgcaaatgaggagtgccagcagtgtgataatttaaacatatttaaacaaaaacaaaaaaatgaatgcacaaacttgctgctgcttagatcactgcagcttctaggacccggtttcttttactgatttaaaaaaaaaa

SEQ ID NO: 116312 - DNA, 598 bp, Homo sapiens
cacaattacagggtgctatgtaagatgctaaggggtggataaatctcagaataaataaataaaagtaactttccatggactgagggagacggtcaccatgcagtacgccacagttccagggcatgtctgtagagcagggaaaagtactgcaaaggccccaatctttctttgatgtgtgtccctttcttccctttgagttgggttcctgctgatcctgagggaacccctcttgctgctcctcggcttgaccatctcagcgcctccttagagctccagctgactctcatcctgctcccccatgcagggctggttacatgatttgtggatcccagtgcacaatgaaacaagtataaaaataggtcggatgcaggaggtggagcttgcagacaagcaccataaggagtatcagttaattgaaaaagtctttactagatgccaggagctgtgtcagttggataaaacacaagggcgaaacaatgcagagagattggaaaggaacttggcagtcaccaagtacctaatttacatgtcaggatttcgagctgaagtaggcattctcttcctgcattccaactctccccttcctgcttacttctga

SEQ ID NO: 116313 - DNA, 891 bp, Homo sapiens
atgggaagtcacagaaaaggtcattcaagctgtagtaccaagagcagtaggggagactgggccagactagagcagacctggactgtggctgtggttcagctgaatgatggagttgggccttggagcccaaggagcactcagatgaagtttcagaaaggaagaggaggactcctaactcttatcaatggagaaggcagccttaataccactggtcatcagggaggaccagagcagtcagaagcagcaacagcagcacagagaatgctgatgaggtatctgcaggacacgagaagcatgccggaaggtggagcccagaagagaaggtgtccactgtggggcccagccctgccccagtaccacctggccagggaccccaggaccctctggcagggaacaatagggaacctagtggaactgaagtctgatcctgatgctgtctccttcccaaatttgtcttcctccatcccctcccacccatccgcagttgcatcctctgctgcactccatcttccagaccatagttcttccacagctttcatcactcgctcagctacagtctgcagaacaggttacaaggagagagactggcttacccgatggggtgagcggtctgctgggttaggtgccagagacggcagcgcaggcaccggcctctccttgatgcacaatggctctgcttcgccccacgatgctgaggttaacagaacccgcagtagcttcgctctgctggttcggggatgcagtagcgaagacgagcgtcctagcgtgtttgtgtgtgcgaaagataatacactctatggtactgaccagaacaaattcacagtaactttaagaaacgtcaggggaaccaacccgccagaggtggacgaaatccccaagcctgagaaatga

SEQ ID NO: 116314 - DNA, 744 bp, Homo sapiens
atggaactgaagttcacagagtttgctgacttgctcacggttgcacaggaaggtgaagatggaggtctcttcgtgctctccctcactgccttcaagattctggagaatcttgtgtttggcaaaggatcccaagcaaagaccttccctgagattctcctgtgcctcctgttggctctctttgcatctggcctcatccaccgagtctgtgtcaccacctgcttcatcttctccgtggttggtctgtgctacatcaacaagatctccactctgtatcaggcagcagctgcagtcctcacaggaccttggctcttgccaagtttcactgcaaatccacagaagcaggtttgcgagctcgaatacctttgctccactgccacacgcagcaccgggactgggcgtctggagcttaagtctgggggtctgagcctgggaccggcaaatccgcgcagcgcatcgcgcccagtctcggagactgcaaccaccgccaaggagtacgcgcggcaggaaacttctgcggcccaatttcttccccagctttggcatctccgaaggcacgtacccgccctcggcacaagctctctcgtcttccacttcgacctcgaggtggagaaagaggctggcaagggctgtgcgcgtcgctggtgtggggagggcagcaggctgcccctccccgcttctgcagcgagttttcccagccaggaaaagggagggagctgtttcaggaatttcagtgccttcacctag

SEQ ID NO: 116315 - DNA, 551 bp, Homo sapiens
acggaattcccgggttgacgatttcgtatgcgcatagctaaccgcacccggttcagctcgccgtttcttggccagaggcgcctggttggactcacgggcggggcatgatggtggtgtgtgacgggcacctcgctggccgcttctcctccctcctgtccctgctgctctttgctgggatgcagatgtacagccgtcagctggcctccaccgagtggctcaccatccagggcggcctgcttggttcgggtctcttcgtgttctcgctcactgccttcaataatctaggagaatcttgtctttggcaaaggattccaagcaaagatcttccctgagattctcctgtgcctcctgttggctctctttgcaatctggcctcatccaccgagtctgtgtcaccacctgcttcatcttctccatggttggtctgtactacatcaacaagatctcctccaccctgtaccaggcagcagctccagtcctcacacccagccaaggtcacaggcaagagcaagaagagaaactgaccctgaatgttcaataaagttgattct

SEQ ID NO: 116316 - DNA, 507 bp, Homo sapiens
tttcgtggctgcggaggtggcggccgggctgggatagcgcgagtgtccgcggccgagcagcagagatttttgctgtgagaattaattaccagtaacagttcaatatgggggacattctggctcatgaatctgaattacttggactagtgaaagagtatttagattttgctgaatttgaagacaccttgaaaacattttcaaaagaatgcaaaataaaaggaaaaccattgtgtaaaacagtaggcggatctttcagagactccaaatcattgacaattcagaaggatcttgtcgctgcatttgacaacggagaccagaaggtgttcttcgatctgtgggaggagcacatttcaagttccatccgagatggggactcctttgcccagaagctggaattctatctccacatccattttgccatctatcttttgaagtactctgtggggagaccggacaaagaggagctggatgaaaagatttcctacttcaaaacctacctggagacca

SEQ ID NO: 116317 - DNA, 1140 bp, Homo sapiens
tcaacatctgtgttcccagcagggacgcagtgttcctctagatttgctattttgttgaagggactggggagggtccaagggcttccctttgctccctctgtcataatagcccttactttttgggtcacagagccagtgtggagattccacctgtagcttaggggatctattccaactctttgttactttgtccattctccttctgggatgaaaaagaagttcaggaaaacaggcattcagggaacggtacttggggtatcggacatcctggaagagttctttaaatgaggggtgcaccatagggttgggaaacaaaaaggaagggcatagaaagggaaagaaactctgtggtctggctcaaggctgcccctttggtctcccaggtaggttttgaagtaggaaaatcttttcatccagctcctctttgtccggtctcccccacagagtacttcaaaagatagatggcaaaatggatgtggaagatagaattccagcttctgggcaaaggagtccccatctcggatggaaacttgaaatgtgctcctcccacagatcgaagaacaccttctggtctccgttgtcaaatgcagcgacaagatccttctgaatagcatcgtcgcccctggatctgactttgatggcgaaatcagggacttcaagcctgaacctaatgttgtcacagaaagatactttggaagttctgtttttgcctttagggatgacccttagttgggactctgtagggtttgctggtgctccctctctcctcagttgggactctgtagggtttgctggtgctctctctctcctcagttgggactccctgtaggatttgctggtgctccctctctcctcagttgggactccctgtaggatttcctggtgctcccctctctcccaagttgggactccctgtagggtttgctggtgctccctttggcccatccctggatcatctttgctctgaattgtcaatgatttggagtctctgaaagatccgcctactgttttacacaatggttttccttttattttgcattcttttgaaaatgttttcaaggtgtcttcaaattcagcaaaatctaaatactctttcactagtccaagtaattcagattcatgagccagaatgtcccccat

SEQ ID NO: 116318 - DNA, 645 bp, Homo sapiens
atggcggaaggtgaaaggcatgtcccatatggtggcagacaaaagagaacttgtgcagggaaattcccctttttaaaaccatcagatcttgtgagacttattcacaatcatgagaacagcacaggaaagatctgcccccatgatttagtacctcccccgctgggtcctgtgggaattcaagatgagatttggcatcctgatgaaaagagattggaaggcctctccaagcaactggactgggatgttcgaagcattcagcgctggtttcgacaaagacgcaatcaggagaagccaagcacgctgacgaggttctgtgagagcataaccagcctcatcagagtgcctgaagacggctgtagaaaggttatgttttatgcttcatcttcaggatcttatttctggcagacaaaatcagatataagcaaatatgaaatccgtgttaggctcacattagaagacattcacacttttaccacaagcctggtagcaggaccagtgggtcagtatggtggtgaaggcagtgggctgtggagcctgggagtctgcattggagtcttctctctgataaaaacctctcgggtatttgggagggttgctggccactggattcgtaaaatgggcacattaatagtgtctgcttcatag

SEQ ID NO: 116319 - DNA, 716 bp, Homo sapiens
tcaccaaccaagtactgaattggttcgcttcctcctgcaccttacagcctttccttccattccctccaacggatccccaagccacaaaccacgaccgggagcttctccatcgatgagccgctgtttgctcaaataaactcttgcggccgagggaactcgggtcccagaccccggagtcgccgcagggaggcctaggtccctccacagccggttccggccggttccaaccagcccctcccccaggtctggggacgcctgacccctcacacgcaccatttctcggcttccaggtgtcccggcgtcctccctacgactcccgcgacctgtacaggtcacggcgcgacagaggctgcggcggagacaccttgggcctctcggagaaacggagacgcgagcccgggtggggacggtcgccagaaacaaaggcttcgactctagaggatccccttctcgtatgttgaccaggctgggatatcgtccaccccctaacctgctcactgaagggctcagtgaccacccttccaagagacactgcattttgcctccatctgcctgaagtacattttgcttttcaagttcttgcatcacctcagtgggatgggttttcctgtccttgggataagttttctcacttcaccagtctaaaagaatccagagggcaagaatcatatctgtttttcccctcaataccatcatccatttggctggacaccaat

SEQ ID NO: 116320 - DNA, 496 bp, Homo sapiens
cccggcagaggagggcagggcctgcgcctccctacggagcctttgtttctggcgaccgtccccacccgggctcgcgtcttcgtttctccgataggcccaaggtgtctccgccgcagcctctgtcgcgccgtgacctgtacaggtcgcgggagtcgtatggaggacgccgggacacctggaagccgagaaatggattcagtggcctttgaggatgtggctgtgaacttcaccctggaggagtggactttgctggatccttcccagaataatctctacagggatgtgatgcgggaaaccttcaggaacctggcttctgtaggaaaacagtgggaagaccagaacatttgaagaccccattcaaaattcccaggagaaatattaagtcatattccagagagactctgtgaaagtaaagaaggtggttcaaggtgaagaaaaccttcagccagattccagatggtattctgaacaagaaaacttcctggggtaaaaccgt

SEQ ID NO: 116321 - DNA, 426 bp, Homo sapiens
cttgttctcctacccctcgcaggagggggagcgcaggtgagagagtgcagtggttgggcgactgcttttgggtgtcagcaagagcaaactccatactagctccgagacaccatctagggtagggtgctcatgacccttgaagcccgaggggaaacattacagcacccttttaactttgccatccgcagacggcttaagagttaacagctcagtggagggtcagcgtgacagccttttgcacccacattcgtggcatctgaattcttgcccagcacccaggaggaatgaggtcacacgaacaaacaggaaatgataaatgcgggagattttattgccgatgaaagtggctctcagtgtgaagaggagctgaaaaggagacagagcaggaaggtattcttcccctggagtccagccaaccagacgaaa

SEQ ID NO: 116322 - DNA, 1344 bp, Homo sapiens
atgacacatatacagaatgaagttcatctagtgtcatatcgcgactctagaggatccccttccggacgatgtagcaaggtctttgccgaatatcccaacgtgatcaacgagattatcaatcttcgttatccaacggtgcgacgctgggggaagctgtggggcgtggatacgaactacaaatctgtcagcaagttccattattccatgactccaccaacttctatggcagcacgggtaatgcgcgcggcaggcggtggtgaatatctccaacgcggccttcccgattctgatggcgctaatgataaaaactactggctggccttcggcgaaaaacgcgcctgggataaaacgagctggcgtacattacggaagcgccttctcttgttgagccggaaacgttacgcgctgagagatcccctcataatttccccaaaacgcctagtccgtaggcaggacttttcaagtctcgaaggtttcttcaatctgcattcgcttcgaatagatattaacaagttgttgggtgttcgaatttcaacagtgcgactgaactcgcaataccataagccgtttttgctcacggatatcagaccagtcaacagtacaatgggcatcgtattgcccgaacagataaagctagcatgccaacgtatacagcgagtcgctctttgtggaggtgacgattacctaacaatcggcgattcgtttgatgttatgttttgttctcgctttggttggcaggttacgccaagttcgccgcttaatgccgccgcttggaaatccttgccggaatttgcccgatttgtccccggaaaaagttgccaaatcacagccccgaccctccgtgaccaaacacttaacgtcatcaaacggttcctgcatgaagccagcgaaatcgttcacgcggggacccggatcgtgaaggcaagtgcgctgtgtctcgataggtctctgtcgttttacgggggtgtgtgctcagccagtgtggttgtctacgggctcgtcttggtgtactttctgcgttggtattgtgattgtgtcacgctttcccgtagtgagtcctatccggaggccccaaaaggagacccaagaagagcaaagtggcccaagaggccgcccccaaggaccccgaccactgtacctcccaaatccccccaaaggaggggcccaaagccacatgctaagaaaggagtccaccagacatcaaaccagccaactagcctccaaaatgaaggagaaaaaaatctgtcacgacaagcaaatgcggagaattttgtcaacaccaggcccgcccctaaaaggctcctgaaggaaccactaaacatggaaaggaacaagcagtactag

SEQ ID NO: 116323 - DNA, 2834 bp, Homo sapiens
  misc_feature (1)...(2834): n = a,t,c or g
gatccccagccattactattgctgtatttggtaagcaaaatacgtacatcaggctcgaaccctttaagatcaacgttcttgagcagatcacgaagcatatcgaaaaactgcagtgcggaggtgtagtcaaacaactcagcaggcgtgggaacaatcagcacatcagcagcacatacgacattaatcgtgccgatacccaggttaggcgcgctgtcaataactatgacatcatagtcatgagcaacagtttcaatggccagctcggagcatcagatagaaaggcaggagagtgtcttctgcatgaatatgaagatctggtacccatccgtgatacattgaggctgttccctgggggtcgttaccttccacgagcaaaacacgtagccccttcagagccagatcctgagcaagatgaacagaaactgaggttttgtaaacgccacctttatgggcagcaaccccgatcaccggtggaaatacgtcttcagcacgtcgcaatcgcgtctgcatattgtacttttcctcttactcgacttaaccagtaccaacccagcttctcaacggatttataccatggcactttaaagccagcatcactgacaatgagcggtgtggtgttactcggtagaatgctcgcaagaccagtcaacaagtacaatgggcatcgtattgcccgaacagataaagctagcatgccaacggtatacagcgagtcgctctttgtggagaacaccccgttatcgacaccagctgccccgatggtggattcgttaattgcgcgcgtaggagtaatggctcgcggtaatgccattactttgcctgtatgtggtcgggatgtgaagtttactcttgaagtgctccggggtgatagtgttgagaagacctctcgggtatggtcaggtaatgaacgtgaccaggagctgcttactgaggacgcactggatgatctcatcccttcttttctactgactggtcaacagacaccggcgttgcggtcgaagaaaattgccgatgggagtcgccgtcgtaaagctgctgcacttaccgaaagtgattatcgtgttctggttggcgagctggatgatgagcagatggctgcattatccagattgggtaacgattatcgcccaacaagtgcttatgaacgtggtcagcgttatgcaagccgattgcagaatgaatttgctggaaatatttctgcgctggctgatgcggaaaatatttcacataaagaggaattacttaagcagcaagcatctaaccttcatgagcagaaaaaagctggggtggatattggagctgaagaacattattattcctatagtacagatgaagagaaagattcagagaagttaagcaacttgcccatgtcgactctagaggacccccttgactggtctgatatccgtgagcaaaaacggcttatggtattgcgagcttcagtcgcactacacggtcgttctgttactctttatgagaaagcgttcccgctttcagagcaatgttcaaagaaagctcatgaccaatttctagccgaccttgcgagcattctaccgagtaacaccacaccgctcattgtcagtgatgctggctttaaagtgccatggtataaatccgttgagaagctggcgtcggcaaaggagccatggattctagcaactaacttacctgttgaaattcgaacacccaaacaacttgttaatatctattcgaagcgaatgcagattgaagaaaccttccgagacttgaaaacactttcaggctacacagtcagggatcgaaacgtactctccacagttcgcttaggcatgggagtttgcggcattctggctacacataacaggggagacttagaattcggcttgaatccctttggtgcgactctaaaggcccccacatcggtcgattcgtttgatgttatgttttgttctcgctttggttggcaggttacggccaagttcgaaaataaccaaaaagcatacaaagaaacgtacggcgtctctcatattacacgccatgatatgctgcagatccctaaacagcagcaaaacgaaaaataccaagtgcctcaattcgatcaatcaacgattaaaaatattgagtctgcaaaaggacttgatgtgtgggacagctggccgctgcaaaacgctgacggaacagtagctgaatacaacggctatcacgttgtgtttgctcttgcgggaagcccgaaagacgctgatgacacatcaatctacatgttttatcaaaagatccctaaacagcagcaaaacgaaaaataccaagtgcctcaattcgatcaatcaacgattaaaaatattgagtctgcaaaaggacttgatgtgtgggacagctggccgctgcaaaacgctgacggaacagtagctgaatacaacggctatcacgttgtgtttgctcttgcgggaagcccgaaagacgctgatgacacatcaatctacatgttttatcaaaaggtcggcgacaactcaatcgacagctggaaaaacgcgggccgtgtctttaaagacagcgataagttcgacgccaacgatccgatcctgaaagatcagacgcaagaatggtccggttctgcaacctttacatctgacggaaaaatccgtttattctacactgactattncgagaaagaagagccacgatggccagctaaaaggagggaggaagagcttctcccatcgagagaacagaccatcaagatcaccagtaaacttcaagcaaatctttgggaggaaggcattgagagtgaacagagaaaggacgcagaccctgggctgaaggaggaggaagctgggaactcaacacagggttactga

SEQ ID NO: 116324 - DNA, 2922 bp, Homo sapiens
atgctgttagcaactgctctgaggggctttctaaagaatggggaccgaggccatgtagacacagaggaatggagaagctacccttgggcggcaagttttggccaactcaggagcagtcagaactgtccgggcgcgtctgcaagcggacggacgggcgttccaaccgtgctggtggcccgtaccgatgctgatgcgtcggatctgatcacctccgattgcgacccgtatgacagcgaatttatgaccggcgagcgtaccagtgaaggcttcttccgtactcatgcgggcattgagcaagcgatcagccgtggcctggcgtatgcgccatatgctgacctggtctggtgtgaaacctccacgccggatctggaactggcgcgtcgctttgcacaagctatccacgcgaaatatccgggcaaactgctggcttataactgctcgccgtcgttcaactggcagaaaaacctcgacgacaaaactattgccagcttccagcagcagctgtcggatatgggctacaagttccagttcatcaccctggcaggtatccacagcatgtggttcaacatgtttgacctggcaaacgcctatgcccagggcgagggtatgaagcactacgttgagaaagtgcagcagccggaatttgccgccgcgaaagatggctataccttcgtatctcaccagcaggaagtgggtacaggttacttcgataaagtgacgactattattcagggcggcacgccggataaggcgttcacgccgcatccggcaagcaaaccagctcataagccgggagaacaacctatgaaaaacaatccgctgatctcaatctatatgccgacctggaaccgccaacaactggcgattcgggcaataaaatcggttttgcgccaggactacagcaactgggagatgatcatcgtggatgattgctccacctcctgggaacaactgcaacagtacgtcaccgccctcaacgatccgcgtatcacttacattcacaacgacattaacagcggggcgtgcgcggtacgtaaccaggcgattatgctggcgcaaggggaatatatcaccgggattgatgacgatgacgaatggacacccaaccgtctgagcgtcttcctcgcccataaacagcaactggtcacacacgcctttttgtacgctaacgactacgtttgccagggcgaagtctattcccaaccggcaagcttgccgctgtatcccaaatcgccgtattcacgccgcctgttctacaaacgcaatatcattggcaaccaggtctttacctgggcatggcgtttcaaagagtgtttgttcgataccgaactgaaagcggcacaggattacgacatcttcctgcggatggtggtggagtacggcgaaccgtggaaagtagaagaggcgacgcagatcctggctatcaatcacggtgaaatgccgattcactcgtcacgagaacatttccgggtacttcccttttgccgaagcacaagaccatttcgacaggccaggaaaatatcgagggtaatcgtcacctccacaaagagcgactcgctgtataccgttggcatgctagctttatctgttcgggcaatacgatgcccattgtacttgttgactggtctgatatccgtgagcaaaaacggcttatggtattgcgagcttcaggtcgcactacacggtcgttctgttactctttatgagaaagcgttcccgctttcagagcaatgttcaaagaaagctcatgaccaatttctagccgaccttgcgagcattctaccgagtaacaccacaccgctcattgtcagtgatgctggctttaaagtgccatggtataaatccgttgagaagctgggttggtactggttaagtcgacgaatgcagattgaagaaaccttccgagacttgaaaagtcctgcctacggactaggcctacgccatagccgaacgagcagctcagagcgttttgatatcatgctgctaatcgccctgatgcttcaactaacatgttggcttgcgggcgttcatgctcagaaacaagggctggatctcggtgtctatggcgcgccagaaacgtttcttattgacggcaacggcatcattcgctatcgccatgcgggcgatctgaatcctcgcgtctgggaagaagagatcaagccgctgtgggagaaatacacgctggcgaccatcgatgtgttgcagtttaaagatgaagcacaggaacaacagttccgtcagctcactgaagaactgcgctgcccgaaatgccagaacaacagcattgccgattccaactcgatgattgccaccgacctgcgtcagaaagtgtatgaactgatgcaggaaggtaaaagtaaaaaagagattgtcgattatatggtggcgcgttacggcaacttcgtcacttacgatccgccgttaacgccgctgaccgtgctgctgtgggtgctgccagtagtggctattggcattggcggttgggtcatatacgcccgctcgcggcgtcgggtacgcgtggtgccggaagcgtttcctgaacaaagcgtgccggaaggtaagcgtgccggatatgttgtttatctgccgggtattgtggtggcgttaattgtggctggcgtcagctactaccagactggcaattatcagcaggtgaaaatctggcagcaggccacggcacaggctccggcgttgctggacagggcgctggatccgaaagccgatccgctcaacgaagaagagatgtcgcgtcttgcgctggggatgcgtactcaactgcaaaaaaatccgggagatatagaaggctggattatgttgggccgcgttggcatggcgctgggtaacgccagtatcgccaccgattgctacgccactgggtatcggctcgatcggacaacagtgatgctggatggggataggtga

SEQ ID NO: 116325 - DNA, 3499 bp, Homo sapiens
  misc_feature (1)...(3499): n = a,t,c or g
aaaaaagaaatttccggttggtgaaagcgagtcgaaatttaatcagattaacattatcaatcacggggaagacgttgcccaaatcgatgctttcgttgcaaaaaccaggctggatcgcgttaaagacaaagattatatcaatgtcaatctcacctacgaacttgataagttaacaaaagggaatcagcaactcggtagtggtgagtggtcattgattgctgaatctattgatccctcagcagtgcgccaatttatcatccagtataacattgcgatgcagaagcagcttgctgcacaccctgagttagcaaacgatgaagttgctctgcaagaagtgaatgctgcattgttcaaagagtatttaccgttattacaaaaaagctcccgtttcacgcaagaaaaacatcagcaaacccactccacttttcaaaacttgttgccaccaaaggcggcaggcattgcgatggcgctaaatgtactgggtaaacaattcgataaactgcttaatgttacgctgtgttatccggacaataaccgtcagccgttcttcgatatgttaagcggtaaactgacgcggattgtcgtacatgtggatttacagcctattgccgatgagttacatggcgactacatcaatgacaaaagctttaagcgccattttcagcaatggctgaactcattgtggcaggaaaaagaccggcttctgacgtctctcatgtcatcacagcgtcagaataacagtaaaaattctgactatacctggaggttttcatggcgtgtcgctgccaacaaacgttcggtaatgacgctgttttccggtcctactgacatctatagccatcaggtccgcattgtgctggctgagaaaggtgtaagtttcgagatcgaacacgtggaaaaggacaatccgcctcaggatctgattgacctcaacccgaatcagagcgttccgaccctggtggatcgtgagctgaccctgtgggaatctcgcatcattatggaatatctggatgagcgtttcccgcatccgccactgatgcctgtttacccggtagctcgcggtgaaagccgtctgtacatgcatcgcatcgaaaaagactggtacacgctgatgaacaccatcatcaacggttcagcttctgaagcagatgccgcacgtaagcaactgcgcgaagaactgctggcgattgcgccggtcttcggtcagaagccgtacttcctgagcgatgagttcagcctggtcgattgctatcttgctccgctgctgtggcgtctgccgcaatgggcatcgagttcagcggccgggtgcgaaaagagcttgaaaggggctatattgacccgcgtctttgagcctcacgccgacctggtggcggatgtgaagctcctggacgtgcagttcctatggaatttgcgcgtgcgggcaaatcggtcttcacattgcgcacttgtgtcgcaactggaactgcgatggaaaaccagctatggacacactaggctgttttcctacgggacaacagacctactgccatcgtatagcgccgattttggccgaaggcgcgcctttaagccgtcgagctacggcttgatggaagttaaactgggctttatctgttcgggcaatacgatgcccattgtacttgttgactggtctgatattcgtgagcaaaaacgacttatggtattgcgagcttcagtcgcactacacggtcgttctgttactctttatgagaaagcgttcccgctttcagagcaatgttcaaagaaagctcatgaccaatttctagccgaccttgcgagcattctaccgagtaacaccacaccgctcattgtcagtgatgctggctttaaagtgccatggtataaatccgttgagaatctgggttggtactggttaagtcgacgctcgacacggactcattgtcaccacccgtcacctaaaatctactcagcgtcggcaaaggagccatgggttctagcaactaacttacctgttgaaattcgaacacccaaacaacttgttaatatctattcgaagcgaatgcagattgaagtaaccttccgagacttgaaaagtcctgcctacggactaggcctacgccatagccgaacgagcagctcagagcgttttgatatcatgctgctaatcgccctgatgcttcactacatagtgacggcgtccagtatcgaacgcacttctgcaattcgaggaacccctgtgcctctgtccaccactcctgtctacgacgatgtagcccgacaagatctatatcgtgatcggtccaccatgactagtgtcggcatttatgcaactaacatgagtacgggctataggtgggggagagagagagagagagacagaaaagagaaagaaagaaagaaaaagaaagcagacgacaacgacatcccacctgacgaacagaaacgacaacgactacgacgaacacgagcacaacacntgcaacaacgaaacgaaacagcgacaccaaccgactggacagcgaccaacgacaaaggaacgcaaccgacacgcgacgacgacaccagcggtggatcacgacggacagatggcaggtcacgggacgagcacaggagggaccgggaccgacacagacccggcagcagaggaacgcgaacgcgaacggacaccacgaacagcggaccacgacacggcgacgaccactctcgcgacaccggacaccaacggagacgacgcgacgaccgccccggcacgcgaccggcccctcgtcggacgccgtcaacgccccacgccagggtaccgacatgggcaagcgaatgcgacagcagaggccaacgcaagtcacaagaagaaaccacccaagaccgaaacaaccacagaacagaaagaaaggcacagcacccaaccaaggacaggaacgacaccgagaacaaactcagctcgggcacaaggcaacatcagaccaggacaggcacgaccacgaacgaacacgcacaaaccacaccacacaacacatcacagcacacaccaaatctccactcctctcctccttgtctgtgctatcatcaccagggacagcaggagagcaaacatagagacgcacaatacagcgtcgagcacaacgaaactgacaagaaagtaaacaaacgagaacgagaagacaaaatcatcagaacaagaaagtacaagcaagaaagactttatatcaagtcctgtattatagactgctttgaaaaacaaagtattcctgggatttctcgcaaggacagtgtaagcctggagctgctggggctacaactggaagaacacttgcaggataacgaagccaatataatgaaaagcaaagcccaggaagaggtggggtgtggaaagaacgaaaacgaacacgcaacagcagcagcagcaacggaaggggaactgagcaactgggaacggggaacggggaacgcgagcaagcgagagcgcaacaccacgcgaacacgcgaacaggaacgaacggaaccaacggaacgcgaaaggtga

SEQ ID NO: 116326 - DNA, 1611 bp, Homo sapiens
atgaacatgaacatcaaaaaaattgtaaaacaagccacagttctgacttttacgactgcacttctggcaggaggagcgactcaagccttcgcgaaagaaaataaccaaaaagcatacaaagaaacgtacggcgtctctcatattacacgccatgatatgctgcagatccctaaacagcagcaaaacgaaaaataccaagtgcctcaattcgatcaatcaacgattaaaaatattgagtctgcaaaaggacttgatgtgtgggacagctggccgctgcaaaacgctgacggaacagtagctgaatacaacggctatcacgttgtgtttgctcttgcgggaagcccgaaagacgctgatgacacatcaatctacatgttttatcaaaaggtcggcgacaactcaatcgacagctggaaaaacgcgggccgtgtcctgatgaatcccctaatgattttggtaaaaatcattaagttaagcttaacgttggcttgccacgcattacttgactgtaaaactctcactcttaccgaacttggccgtaacctgccaaccaaagcgagaacaaaacataacatcaaacgaatcgaccgattgttaggtaatcgtcacctccacaaagagcgactcgctgtataccgttggcatgctagctttatctgttcgggcaatacgatgcccattgtacttgttgactggtctgatattcgtgagcaaaaacgacttatggtattgcgagcttcagtcgcactacacggtcgttctgttactctttatgagaaagcgttcccgctttcagagcaatgttcaaagaaagctcatgaccaatttctagccgaccttgcgagcattctaccgagtaacaccacaccgctcattgtcagtgatgctggctttaaagtgccatggtataaatccgttgagaagctgggttggtactggttaagtcgagtaagaggaaaagtacaatatgcagacctaggagcggaaaactggaaacctatcagcaacttacatgatatgtcatctagtcactcaaagactttaggctataagaggctgactaaaagcaatccaatctcatgccaaattctattgtataaatctcgctctaaaggccgaaaaaatcagcgctcgacacggactcattgtcaccacccgtcacctaaaatctactcagcgtcggcaaaggagccatgggttctagcaactaacttacctgttgaaattcgaacacccaaacaacttgttaatatctattcgaagcgaatgcagattgaagaaaccttccgagacttgaaaagtcctgcctacggactaggcctacgccatagccgaacgagcagctcagagcgttttgatatcatgctgctaatcgccctgatgcttcaactaacatgttggcttgcgggcgttcatgctcagaaacaaggttgggacaagcacttccaggctaacacagtcagaaatcgaaacgtactctcaacagttcgcttaggcatggaagttttgcggcattctggctacacaataacaagggaagacttactcgtggctgcaaccctactagctcaaaatttattcacacatggttacgctttggggaaattatga

SEQ ID NO: 116327 - DNA, 1575 bp, Homo sapiens
atgtgcgaactcgatattttacacgactctctttaccaattctgccccgaattacacttaaaacgactcaacagcttaacgttggcttgccacgcattacttgactgtaaaactctcactcttaccgaacttggccgtaacctgccaaccaaagcgagaacaaaacataacatcaaacgaatcgaccgattgttaggtaatcgtcacctccacaaagagcgactcgctgtataccgttggcatgctagctttatctgttcgggcaatacgatgcccattgtacttgttgactggtctgatattcgtgagcaaaaacgacttatggtattgcgagcttcagtcgcactacacggtcgttctgttactctttatgagaaagcgttcccgctttcagagcaatgttcaaagaaagctcatgaccaatttctagccgaccttgcgagcattctaccgagtaacaccacaccgctcattgtcagtgatgctggctttaaagtgccatggtataaatccgttgagaagctgggttggtactggttaagtcgagtaagaggaaaagtacaatatgcagacctaggagcggaaaactggaaacctatcagcaacttacatgatatgtcatctagtcactcaaagactttaggctataagaggctgactaaaagcaatccaatctcatgccaaattctattgtataaatctcgctctaaaggccgaaaaaatcagcgctcgacacggactcattgtcaccacccgtcacctaaaatctactcagcgtcggcaaaggagccatgggttctagcaactaacttacctgttgaaattcgaacacccaaacaacttgttaatatctattcgaagcgaatgcagattgaagaaaccttccgagacttgaaaagtcctgcctacggactaagcctacgccatagccgaacgagcagctcagagcgttttgatatcatgctgctaatcgccctgatgcttcaactaacatgttggcttgcgggcgttcatgctcagaaacaaggttgggacaagcacttccaggctaacacagtcagaaatcgaaacggaagacttactcgtggctgcaaccctactagctcaaaatttattcacacatggttacgctttggggaaattatgaggggatctctcagtaaacagcagcaaaacgaaaaataccaagtgcctcaattcgatcaatcaacgattaaaaatattgagtctgcaaaaggacttgatgtgtgggacagctggccgctgcaaaacgctgacggaacagtagctgaatacaacggctatcacgttgtgtttgctcttgcgggaagcccgaaagacgctgatgacacatcaatctacatgttttatcaaaaggtcggcgacaactcaatcgacagctggaaaaacgcgggccgtgtctttaaagacagcgataagttcgacgccaacgatccgatcctgaaagatcagacgcaagaatggtccggttctgcaacctttacatctgacggaaaaatccgtttattcctaacactgactattccggtaaacattacggcaaacaaagcctga

SEQ ID NO: 116328 - DNA, 1314 bp, Homo sapiens
atgtgcgaactcgatattttacacgactctctttaccaattctgccccgaattacacttaaaacgactcaacagcttaacgttggcttgccacgccttacttgactgtaaaactctcactcttaccgaacttggccgtaacctgccaaccaaagcgagaacaaaacataacatcaaacgaatcgaccgattgttaggtaatcgtcacctccacaaagagcgactcgctgtataccgttggcatgctagctttatctgttcgggcaatacgatgcccattgtacttgttgactggtctgatatccgtgagcaaaaacggcttatggtattgcgagcttcagtcgcactacacggtcgttctgttactctttatgagaaagcgttcccgctttcagagcaatgttcaaagaaagctcatgaccaatttctagccgaccttgcgagcattctaccgagtaacaccacaccgctcattgtcagtgatgctggctttaaagtgccatggtataaatccgttgagaagctgggttggtactggttaagtcgagtaagaggaaaagtacaatatgcagacctaggagcggaaaactggaaacctatcagcaacttacatgatatgtcatctagtcactcaaagactttaggctataagaggctgactaaaagcaatccaatctcatgccaaattctattgtataaatctcgctctaaaggccgaaaaaatcagcgctcgacacggactcattgtcaccacccgtcacctaaaatctactcagcgtcggcaaaggagccatggattctagcaactaacttacctgttgaaattcgaacacccaaacaacttgttaatatctattcgaagcgaatgcagattgaagaaaccttccgagacttgaaaagtcctgcctacggactaggcctacgccatagccgaacgagcagctcagagcgttttgatatcatgctgctaatcgccctgatgcttcaactaacatgttggcttgcgggcgttcatgctcagaaacaagagcaagccaccccctaccaccttcttgattctaccatctttctagaaaattctgtgtgggcttacatggtgaacacgttccatcaaagagggaattccaaggaatgggaggagaacacagccactccccatgacagcttgaagttcaacaccatgggaatgcggaagcacgtgaagaagggttataatgatacaggagttaaaaagaaattatttaggcaggaaacccttgctacaactccagatgacaatgggtttgatgttgcattcccccacaccaacacctag

SEQ ID NO: 116329 - DNA, 1312 bp, Homo sapiens
atgtgcgaactcgatattttacacgactctctttaccaattctgccccgaattacacttaaaacgactcaacagcttaacgttggcttgccacgcattacttgactgtaaaactctcactcttaccgaacttggccgtaacctgccaaccaaagcgagaacaaaacataacatcaaacgaatcgaccgattgttaggtaatcgtcacctccacaaagagcgactcgctgtataccgttggcatgctagctttatctgttcgggcaatacgatgcccattgtacttgttgactggtctgatattcgtgagcaaaaacgacttatggtattgcgagcttcagtcgcactacacggtcgttctgttactctttatgagaaagcgttcccgctttcagagcaatgttcaaagaaagctcatgaccaatttctagccgaccttgcgagcattctaccgagtaacaccacaccgctcattgtcagtgatgctggctttaaagtgccatggtataaatccgttgagaagctgggttggtactggttaagtcgaccgggcggtgaatccatacagatatttcataatcctcgagtgctggtggaaccggaaccaaaaagcatgcgtaatctgccatccggagtcgttcctgccgttcgccagccgctggcggaagacaaaacattgctgccgttttttagtaacgaacgggtgattcgtgctgctggcggcgttggcgcattgtccgactggctattacgtcatgttacatcctgccagtggcctaatggcgattaccatcacactgaaacagtcattcaccgttatggtaccggcgcaatggtgttgtgctggcactgcgacaaccaactgcgtgaccagacatcggaatcactggagctgcttgctcaacaaaatctgacagcatgggtgattgacgtcatccgtcacgcaataagcggtacgcaggagcgggaattatctttggctgaattatcctggtgggcggtctgcaatcaggtggtggatgcactacctgaggctgtatcgcgtcgttcgctgggattaccagcggaaaaaatctgctcggtgtaccgcgaaagcgacatcgtaccgggagagcagaccgccaccagcatattgaaacaacgcacaaaaaatcttgcaccgttgccttacgcccaccagcaacaaaaatcaccacaggaaaagacggtggtaagcatcaccgttgatccagagtctccggaatctttcatgaagctgcctaaacgtcgccgctgggttaaggagaaatacacacgttgggttaagacacagc

SEQ ID NO: 116330 - DNA, 2022 bp, Homo sapiens
atgtgcgaactcgatatttacacgactctctttaccaattctgccccggaattacacttaaaacgactcaacagcttaacgttggcttgccacgccttacttgactgtcaaactctcactcttaccgaacttggccgtaacctgccaaccaaagcgagaacaaaacataacatcaaacgaatcgaccgattgttaggtaatcgtcacctccacaaagagcgactcgctgtataccgttggcatgctagctttatctgttcgggcaatacgatgcccattgtacttgttgactggtctgatatccgtgagcaaaaacggcttatggtattgcgagcttcagtcgcactacacggtcgtactgttactctttatgagaaagcgttcccgctttcagagcaatgttcaaagaaagctcatgaccaatttctagccgaccttgcgagcattctaccgagtaacaccacaccgctcattgtcagtgatgctggctttaaagtgccatggtataaatccgttgagaagctgggttggtactggttaagtcgagtaagaggtaaagtacaatatgcagacctaggagcggaaaactggaaacctatcagcaacttacatgatatgtcatctagtcactcaaagactttaggctataagagactgactaaaagcaacccaatctcatgccaaattctattgtataaatctcgctctaaaggccgaaaaaatcagcgctcgacacggactcattgtcaccacccgtcacctaaaatctactcagcgtcggcaaaggagccatgggttctagcaactaacttacctgttgaaattcgaacacccaaacaacttgttaatatctattcgaagcgaatgcagattgaagaaaccttccgagacttgaaaattcgcttaggcatggaagttttgcggcattctggctacacaataacaagggaagacttactcgtggctgcaaccctactagctcaaatttattcacacatggttacgctttggggaaattatgaggggatctctcagcgctttggtgggaaggttatcaacgttatcaatggcaaaacggatacgttgttagaaatctctgtattaccgttggatagctatgcgaagcctgatattgaagccaactatcagggccgactgctcgccagacaaagcggcttccttgatccagtgaactatcgtaatcactttgttaccatcctcggcaccattcagggtgaacaacctggctttatcaataaagtcccgtataacttcctggaagtgaatatgcagggcatccaggtgtggcatttgagagaagtggttaataccacctataacctgtgggattacggctatggtgcattctggccggaaccgggctggggtgcgccttactacaccaatgcgctggctaaagaactagcaataagttccaagaactgggccagccgcttgtcgcttgctgcgccgctgcgtgcggcgcgtgccgccaccggcgacgtcgttatcccgcctctcccgtcggcatcgctctactgtcactactcctgtgcgtgtggagtcctggacgaatctgaaagatgtgacaaagagcggaccgtgaacactttgctgcggtctcactgcttgcaggattccgccccgatcccgtccttccatatcgggactggcaacgacacctacgtgagggaattcgccaggcagggaaccttctggatccaatccgagcctcctttggtacaccgctggatgggccgtttcctttcctcatcgccgcataacggtgttagcttcctatttggtccgctacaaaccagtgtcgggcatagcggctctgccggggcgctgttccagaaaaacgccagtgatgcgcagttatgtaccacacttaaactttcaggccgcaagatgttactggtccgtcagcgggaagaggccgcgcaggcgctgttcgcacttaatgatgttcgcactgagcgtctgcgcgatcgcataacgcaatggcaattatttcactga

SEQ ID NO: 116331 - DNA, 1938 bp, Homo sapiens
atgtgcgaactcgatattttacacgactctctttaccaattctgccccgaattacacttaaaacgactcaacagcttaacgttggcttgccacgccttacttgactgtaaaactctcactcttaccgaacttggccgtaacctgccaaccaaagcgagaacaaaacataacatcaaacgaatcgaccgattgttaggtaatcgtcacctccacaaagagcgactcgctgtataccgttggcatgctagctttatctgttcgggcaatacgatgcccattgtacttgttgactggtctgatatccgtgagcaaaaacggcttatggtattgcgagcttcagtcgcactacacggtcgttctgttactctttatgagaaagcgttcccgctttcagagcaatgttcaaagaaagctcatgaccaatttctagccgaccttgcgagcattctaccgagtaacaccacaccgctcattgtcagtgatgctggctttaaagtgccatggtataaatccgttgagaagctgggttggtactggttaagtcgagtaagaggaaaagtacaatatgcagacctaggagcggaaaactggaaacctatcagcaacttacatgatatgtcatctagtcactcaaagactttaggctataagaggctgactaaaagcaatccaatctcatgccaaattctattgtataaatctcgctctaaaggccgaaaaaatcagcgctcgacacggactcattgtcaccacccgtcacctaaaatctactcagcgtcggcaaaggagccatgggttctagcaactaacttacctgttgaaattcgaacacccaaacaacttgttaatatctattcgaagcgaatgcagattgaagaaaccttccgagacttgaaaagtcctgcctacggactaggcctacgccatagccgaacgagcagctcagagcgttttgatatcatgctgctaatcgccctgatgcttcaactaacatgttggcttgcgggcgttcatgctcagaaaccaggttgggacaagcattccagggttaaagaagtcgaaatcgaaacgcccggcgacctggaacacggcgtatttatcggtgcggcgggcgatggcaaaatcgcctcagcatcgcgggcagattatgcgggagctgctgcacgcgtgattagcgaagccggtcacgaaggcaaggtttacgaactggcgggcgatagtgcctggacgttgacacagttagcggcagagctgaccaaacagagcggcaaacaggttacctatcaaaatctgagcgaagccgatttcgccgcggcactgaaaagcgtcggactgcccgacggactggcggatatgctggcggattctgacgttggcgcatcgaaaggcgatcaatggatgccagtaatgattagcggcgtgctgtacgccctgttagcagggttgatgtgggggcttatttttgtcgggccgttgatcgtgccggaatacccggcgatgttgcagtcgatggggcgttatctggcgttagggttaattgcgctgcccattgcctggctgggacgcgtgcgtctgcgtcagttggcgcgtcgcgactggcttaccgccttgatgctcactatgatgggcaacctcatctattacttctgccttgccagtgccattcaacgtacggtgccgagcggggcgacgcggtgtgttagaggagttcttgtggtgatcacactgtgctatgaagaagttgagtgtgagggggaggccgatgtcgcgcgggggagagggacgcccccgacggtaaaggtcctgtgtgggacagtcaccggatcggtgttaatagaggcacggcttggaaaggaggggcgtaaccactgctggtattatatctgtgaaaagcactcacatcagatccaagagaagtgggaagaagttgtccattga

SEQ ID NO: 116332 - DNA, 3204 bp, Homo sapiens
atgtgcgaactcgatattttacacgactctctttaccaattctgccccgaattacacttaaaacgactcaacagcttaacgttggcttgccacgccttacttgactgtaaaactctcactcttaccgaacttggccgtaacctgccaaccaaagcgagaacaaaacataacatcaaacgaatcgaccgattgttaggtaatcgtcacctccacaaagagcgactcgctgtataccgttggcatgctagctttatctgttcgggcaatacgatgcccattgtacttgttgactggtctgatatccgtgagcaaaaacggcttatggtattgcgagcttcagtcgcactacacggtcgttctgttactctttatgagaaagcgttcccgctttcagagcaatgttcaaagaaagctcatgaccaatttctagccgaccttgcgagcattctaccgagtaacaccacaccgctcattgtcagtgatgctggctttaaagtgccatggtataaatccgttgagaagctgggttggtactggttaagtcgagtaagaggaaaagtacaatatgcagacctaggagcggaaaactggaaacctatcagcaacttacatgatatgtcatctagtcactcaaagactttaggctataagaggctgactaaaagcaatccaatctcatgccaaattctattgtataaatctcgctctaaaggccgaaaaaatcagcgctcgacacggactcattgtcaccacccgtcacctaaaatctactcagcgtcggcaaaggagccatggattctagcaactaacttacctgttgaaattcgaacacccaaacaacttgttaatatctattcgaagcgaatgcagattgaagaaaccttccgagacttgaaaagtcctgcctacggactaggcctacgccatagccgaacgagcagctcagagcgttttgatatcatgctgctaatcgccctgatgcttcaactaacatgttggcttgcgggcgttcatgctcagaaacaaggttgggacaagcacttccaggctaacacagtcagaaatcgaaacctcaaaatttattcacacatggttacgctttggggaaattatgaggggatctctcagactcaagccttcgcgaaagaaaataaccaaaaagcatacaaagaaacgtacggcgtctctcatattacacgccatgatatgctgcagatccctaaacagcagcaaaacgaaaaataccaagtgcctcaattcgatcaatcaacgattaaaaatattgagtctgcaaaaggacttgatgtgtgggacagctggccgctgcaaaacgctgacggaacagtagctgaatacaacggctatcacgttgtgtttgctcttgcgggaagcccgaaagacgctgatgacacatcaatctacatgttttatcaaaaggtcggcgacaactcaatcgacagctggaaaaacgcgggccgtgtctttaaagacagcgataagttcgacgccaacgatccgatcctgaaagatcagacgcaagaatggtccggttctgcaacctttacatctgacggaaaaatccgtttattctacactgactattccggtaaacattacggcaaacaaagcctgacaacagcgcagaaagcataccggcttgaaattgtcagcttggaaatgcagaaaaatggagccgcagatgcagcaccgtaccgacaaattgagtactgggctctggggcatggtgacgacattaaaaaagctgttgccttctggtcctctgggtggccagtcggcttctccaaaatggagaaggcagggaaaatactcaggtcccaagtgaagtttccagaatatatggaagaatcctcctgtctaggtagagggtcactgatgtctctcaacaacacaagttctagcaatggcagttttatttttgtgttgcccctgaagttgctgagagttggggacacctacaattcttccgatcagtcaagaatggcctggcggctcaccatagagtttgggggttctgagttgcatctgggggtgagggaggaagcaggccaccagaaagggctagtccatgagtccgggaatcccgcccgaagctctggcagtgacccgcaacatgccaggcaccggcagccctcggctaccagggctgctgctgctgctgctgctgctgctgctgctctgcctgcgccgctgtcacttccagttcctacttctgcgatccaggtccgggtcactgcttacccgctgctggcccagtgcctccaggccgctttccctccgctgctcggctccggctgcgggcaggaggggaccggcgcgggaggcggcggcggcgcggctggagtgagggagcagctggaggacaggcgggcagcggccgagccaggtgacctgcctgggggcaaaagggtcaggggaaggggagcgcgcgagggcccgggggtgggtgccgaaggaccccctttggagaggaaccgcccttcttccccactgccgtggctcgcagccccagctgcgggggcctcacagttcgctgagatccagggtgccgggaagggggagatgagggccaaggacgcagagcgaggacgcgccaaacttaggggcgagttgtccagctctggccgcaagatatttgatcctgatgacctttattcaggggtcaatttctccaaggtactgagtactcttttagctgtcaacaaagcaacagaagatcagctatcagaaagaccatgtggacgttcctcttctcttagtgctgctaatacttctcagacaaacccacagggagcagtttctagcacagtttcagggctgcaaaggcagtcaaagacagtggagatgacggaaaatggaagtcatcagttgatagtaaaagcaagattcaactttaagcagactaatgaggatgaactgtcagtttgtaagggggacatcatttacgtcacacgagttgaagaaggaggctggtgggaaggcacattaaatgggagaacaggctggttccccagtaattatgtccgtgaaattaaatccagtgagagacctctctccccaaaagccgtcaaaggatttgaaactgctccacttaccaagaattattatactgtgatgtctagaagtcttacatctactgtgctgaaaaattcaaaggtagcacggattcacagcaagccctattaa

SEQ ID NO: 116333 - DNA, 1806 bp, Homo sapiens
atgtgcgaactcgatattttacacgactctctttaccaattctgccccgaattacacttaaaacgactcaacagcttaacgttggcttgccacgcattacttgactgtaaaactctcactcttaccgaacttggccgtaacctgccaaccaaagcgagaacaaaacataacatcaaacgaatcgaccgattgttaggtaatcgtcacctccacaaagagcgactcgctgtataccgttggcatgctagctttatctgttcgggcaatacgatgcccattgtacttgttgactggtctgatattcgtgagcaaaaacgacttatggtattgcgagcttcagtcgcactacacggtcgttctgttactctttatgagaaagcgttcccgctttcagagcaatgttcaaagaaagctcatgaccaatttctagccgaccttgcgagcattctaccgagtaacaccacaccgctcattgtcagtgatgctggctttaaagtgccatggtataaatccgttgagaagctgggttggtactggttaagtcgagtaagaggaaaagtacaatatgcagacctaggagcggaaaactggaaacctatcagcaacttacatgatatgtcatctagtcactcaaagactttaggctataagaggctgactaaaagcaatccaatctcatgccaaattctattgtataaatctcgctctaaaggccgaaaaaatcagcgctcgacacggactcattgtcaccacccgtcacctaaaatctactcagcgtcggcaaaggagccatgggttctagcaactaacttacctgttgaaattcgaacacccaaacaacttgttaatatctattcgaagcgaatgcagattgaagaaaccttccgagacttgaaaagtcctgcctacggactaggcctacgccatagccgaacgagcagctcagagcgttttgatatcatgctgctaatcgccctgatgcttcaactaacatgttggcttgcgggcgttcatgctcagaaacaaggacttgatgtgtgggacagctggccgctgcaaaacgctgacggaacagtagctgaatacaacggctatcacgttgtgtttgctcttgcgggaagcccgaaagacgctgatgacacatcaatctacatgttttatcaaaaggtcggcgacaactcaatcgacagctggaaaaacgcgggccgtgtctttaaagacagcgataagttcgacgccaacgatccgatcctgaaagatcagacgcaagaatggtccggttctgcaacctttacatctgacggaaaaatccgtttattctacactgactattccggtaaacattacggcaaacaaagcctgacaacagcgcaggtaaatgtgtcaaaatctgatgacacactcaaaatcaacggagtggaagatcacaaaacgattttagacggcgacggaaaaacatatcagaacgttcagcagtttatcgatgaaggcagtataacatccggccctcctgatagctatgaggatgatgaggatgatgatggaggaagaggaggggaaggagaagaaagaaaaggagaaggaagagaaggagaagaaagaggagtaggagaagaagaaggaggaggagaaggaggaggaggagacaaagaagatgatgttggtgatgataaagatgttggtggtgatgacaatgttgatgatgatgatgaaagaggaagaggggaggggaaaaaggagcaggagaaaagggggaagatgatgtcagtggctgtaatgatgttgttgacgatgatgataaaatga

SEQ ID NO: 116334 - DNA, 2361 bp, Homo sapiens
atgtgcgaactcgatattttacacgactctctttaccaattctgccccgaattacacttaaaacgactcaacagcttaacgttggcttgccacgcattacttgactgtaaaactctcactcttaccgaacttggccgtaacctgccaaccaaagcgagaacaaaacataacatcaaacgaatcgaccgattgttaggtaatcgtcacctccacaaagagcgactcgctgtataccgttggcatgctagctttatctgttcgggcaatacgatgcccattgtacttgttgactggtctgatattcgtgagcaaaaacgacttatggtattgcgagcttcagtcgcactacacggtcgttctgttactctttatgagaaagcgttcccgctttcagagcaatgttcaaagaaagctcatgaccaatttctagccgaccttgcgagcattctaccgagtaacaccacaccgctcattgtcagtgatgctggctttaaagtgccatggtataaatccgttgagaagctgggttggtactggttaagtcgagtaagaggaaaagtacaatatgcagacctaggagcggaaaactggaaacctatcagcaacttacatgatatgtcatctagtcactcaaagactttaggctataagaggctgactaaaagcaatccaatctcatgccaaattctattgtataaatctcgctctaaaggccgaaaaaatcagcgctcgacacggactcattgtcaccacccgtcacctaaaatctactcagcgtcggcaaaggagccatgggttctagcaactaacttacctgttgaaattcgaacacccaaacaacttgttaatatctattcgaagcgaatgcagattgaagaaaccttccgagacttgaaaagtcctgcctacggactaggcctacgccatagccgaacgagcagctcagagcgttttgatatcatgctgctaatcgccctgatgcttcaactaacatgttggcttgcgggcgttcatgctcagaaacaaggttgggacaagcacttccaggctaacacagtcagaaatcgaaacctcaaaatttattcacacatggttacgctttggggaaattatgaggggatctctcagtaccaagtgcctcaattcgatcaatcaacgattaaaaatattgagtctgcaaaaggacttgatgtgtgggacagctggccgctgcaaaacgctgacggaacagtagctgaatacaacggctatcacgttgtgtttgctcttgcgggaagcccgaaagacgctgatgacacatcaatctacatgttttatcaaaaggtcggcgacaactcaatcgacagctggaaaaacgcgggccgtgtctttaaagacagcgataagttcgacgccaacgatccgatcctgaaagatcagacgcaagaatggtccggttctgcaacctttacatctgacggaaaaatccgtttattctacactgactattccggtaaacattacggcaaacaaagcctgacaacagcgcaggtaaatgtgtcaaaatctgatgacacactcaaaatcaacggagtggaagatcacaaaacgatttttgacggagacggaaaaacatatcagaacgttcagcagtttatcgatgaaggcaattatacatccggcgacaaccatacgctgagagaccctcactacgttgaagacaaaggccataaataccttgtattcgaagccaacacgggaacagaaaacggataccaaggcgaagaatctttatttaacaaagcgtactacggcggcggcacgaacttcttccgtaaagaaagccagaagcttcagcagagcgctaaaaaacgcgatgctgagttagcgaacggcgccctcggtatcatagagttaaataatgattacacattgaaaaaagtaatgaagccgctgatcacttcaaacacggtaactgatgaaatcgagcgcgcgaatgttttcaaaatgaacggcaaatggtacttgttcactgattcacgcggttcaaaaatgacgatcgatggtattaactcaaacgatatttacatgcttggttatgtatcaaactctttaaccggcccttacaagccgctgaacaaaacagggcttgtgctgcaaatgggtcttgatccaaacgatgtgacattcacttactctcacttcgcagtgccgcaagccaaaggcaacaatgtggttatcacaagctacatgacaaacagaggcttcttcgaggataaaaaggcaacatttgcgccaagcttcttaatgaacatcaaaggcaataaaacatccgttgtcaaaaacagcatcctggagcaaggacagctgacagtcaactaa

SEQ ID NO: 116335 - DNA, 5860 bp, Homo sapiens
atgtgcgaactcgatattttacacgactctctttaccaattctgccccgaattacacttaaaacgactcaacagcttaacgttggcttgccacgcattacttgactgtaaaactctcactcttaccgaacttggccgtaacctgccaaccaaagcgagaacaaaacataacatcaaacgaatcgaccgattgttaggtaatcgtcacctccacaaagagcgactcgctgtataccgttggcatgctagctttatctgttcgggcaatacgatgcccattgtacttgttgactggtctgatattcgtgagcaaaaacgacttatggtattgcgagcttcagtcgcactacacggtcgttctgttactctttatgagaaagctagttcatatggggcggagcagtatgctctggtcgtcggttccgatgtactggcgcgcacctgcgatccaaccgatcgtgggactattattatttttggcgatggcgcgggcgctgcggtgctggctgcctctgaagagccgggaatcatttccacccatctgcatgccgacggtagttatggtgaattgctgacgctgccaaactttttccgcgtgaatccagagaattcaattcatctgacgatggcgggcaacgaagtcttcaaggttgcggtaacggaactggcgcacatcgttgatgagacgctggcggcgaataatcttgaccgttctcaactggactggctggttccgcatcaggctaacctgcgtattatcagtgcaacggcgaaaaaactcggtatgtctatggataatgtcgtggtgacgctggatcgccacggtaatacctctgcggcctctgtcccgtgcgcgctggatgaagctgtacgcgacgggcgcattaagcccgggcagttgggttctcaaaccgttggaatgctggctgatatggcggcgagctatccaattgtcgaagaaacgtttgctgaagcttctgcggcgctgggctacgacctgtgggcgctgacccagcaggggccagctgaagaactgaataaaacctggcaaactcagcctgcgctgttgactgcatctgttgcgctgtatcgcgtatggcagcagcagggcggtaaagcaccggcaatgatggccggtcacagcctgggggaatactccgcgctggtttgcgctggtgtgattgatttcgctgatgcggtgcgtctggttgagatgcgcggcaagttcatgcaagaagcgtaccggaaggcacgggcgctatggcggcaatcatcggtctggatgatgcgtctattgcgaaagcgtgtgaagaagctgcagaaggtggttattgccggtcataaagaagcggttgagcgtgtggcgctgcctgtaaagcggcggcgcaaaacgcgcgctgccgttaccatgagcgtaccgtctcactgtgcgctgatgaaaccagcagccgacaaactggcagtagaattagcgaaaatcacctttaacgcaccaacagttcctgttgtgaataacgttgatgtgaaatgcgaaaccaatggtgatgccatccgtgacgcactgttcattattgaaggcgcgctggttgtcgtttcgcacgaccgtcatttgctgcgttccaccactgacgatctctacctggttcacgatcgtaaagtcgaaccgttcgacggcgatctggaagattatcaacagtggttgagcgacgtacaaaagcaggaaaaccagaccgacgaagcgccaaaagagaatgcgaacagcgcccaggctcgtaaagatcagaagcgtcgggaagctgagctgcgtgcgcaaacccagccactgcgtaaagagattgcccgtctggaaaaagagatggagaagctgaacgcgcaactggcgcaggcggaagagaaactcggcgacagcgaactgtatgaccagagccgtaaagcggagttgaccgcctgcctgcaacagcaagccagcgccaaatccggcctggaagagccaaagcaactgatggcgcagataacgacgaccgatgccaatgaattcagcagcagtgctgaattcatccccatgcgcggctttagcaattgtcatctgcaaaccatgctgccgcgtctgtttcgtcgtcaggtgaaattcaccccgtactggcagcggctggagttgcccgacgggcgatttgtcgatctgcgtggagtgaaaaccctgcacagggcgcacataaacctcgtctgcggtgacccaaaccgtatgcaccgcatttaccattcgggcgaaaccgaagacgccagttggtttttacgctggctgcaacgcgaatttggtcatgcgccaacggctgccgtcggctattcgctcggcggtaatatgctggcctgtttgctggcaaaggaaggcaatgatctcccggttgatgcggcggtgattgtctctgcgccgtttatgctggaagcctgtagctatcatatggaaaagggcttttcccgcgtttatcagcgttacttgctgaacctgttaaaagccaatgccgcgcgcaagctggcagcctaccccggaacgctgccgattaatctcgcgcagttaaaatcggtacgtcgcatccgtgaatttgacgatctcatcaccgccagaattcacggctacgccgacgctatcgactattatcgtcagtgtagcgccatgccgatgctgaaccggatcgccaaaccgacgctgattattcacgccaaagacgatccgtttatggatcatcaggtgatcccgaaaccggaaagtctccccccgcaggtggagtatcaactgactgaacatggcggtcatgaggctgtattggagtggctccaagtagcgaagcgagcaggcctggtcgtcggccaaatcggtcggacagtgctccgagaacgggtgcgcatagaaattgcatcaacgcatatagcgctagcagcacgccatagtgactggcgatgctgtcggaatggacgatatcccgcaagaggcccggcagtaccggcataaccaagcctatgcctacagcatccagggtgacggtgccgaggatgacgatgagcgcattgttagatttcatacacggtgcctgactctggtagaattcggctgtaaatccatctggtcctggactctttttggttggtaagctattgattattgccacaatttcagatcctgttattggtctattcagagattcaacttcttcctggtttagtcttgggagggtgtatgtgtcgaggaatttatccatttcttctagattttctagtttatttgtgtagtggtgtttgtagtattctctgatggtagtttgtatttctgtgggatcggtggtgatatcccctttataattttttattacgtctattagattcttctctctttttttctttattagtcttgctagcggtttatcaattttcttgatcctttcaaaaaaccagctcctggattcattaattttttgaaggtttttttgtgtctctatttcctccatttctgctctgattttagttatttcttgccttctgctagcttttgaatgtgtttgctcttgcttttctagttcttttaactgtgatgttagggtgtcaattttggatctttcctgctttctcttgtgggcatttagtgctataaatttccctctacacactgctttgaatgcatcccagagattctggtatgttgtgtctttgttctcgttggtttcaaagaacatctttatttctgccttcatttcgttatgtacccagtagtcattcaggagcaggttgttcagtttccatgtagttgagcggttttgagtgagtttcttaaccctgagttctagtttgattgccctgtggtctgagagatagtttgttataatttctgttcttttacatttgctgaggagagctttacttccaagtatgtggtcaattttggaataggtgtggtgtggtgctgaaaaaaatgtatattctgttgatttggggtggagagttctgtagatgtctattaggtctgcttggtgcagagctgattttaattcctgggtatccttgttgactttctgtctcgttgatctgtctaatgttgacagtggggtgttaaagtctcccattattaatgtgtgggagtctaagtctctttgtaggtcactcaggacttgctttatgaatctgggtgctcctgtattgggtgcatatatatttaggatagttagttcttcttgttgaattgatccttttaccattatgaaatagccttctttgtctcttttgatctttgttggtttaaagtctgttttatcagagactaggattgcaacccctgcctttttgtgttttccatttgcttggtagatcttcctccatccttttattttgagcctatgtgtgtctccagagttgtattctttaagccagttcagaagggcatctttgttgaaggctgctgcagcagccacattgctactgttcagctgaatgtcagcaattgtttcagaggtgctcacaacttcaatgaggccagagcgatctcctgttgctaaacagccataaggcaacatccaatgtggccaaccaggcccataaaaaaggaggctcaaacactcattaagcccttgtttctgttcatgaacgcccgcaagccaacatgttagttgaagcatcagggcgattagcagcatgatatcaaaacgctctgagctgctcgttcggctatggcgtaggcctagtccgtaggcaggacttttcaagtctcggaaggtttcttcaatctgcattcgcttcgaatagatattaacaagttgtttgggtgttcgaatttcaacaggtaagttagttgctagaacccatggctcctttgccgacgccagcttctcaacggatttataccatggcactttaaagccagcatcactgacaatgagcggtgtggtgttactcggtagaatgctcgcaaggtcggctagaaattggtcatgagctttctttgaacattgctctgaaagcgggaacgctttctcataaagagtaacagaacgaccgtgtagtgcgactgaagctcgcaataccataagtcgtttttgctcacgaatatcagaccagtcaacaagtacaatgggcatcgtattgcccgaacagataaagctagcatgccaacggtatacagcgagtcgctctttgtggaggtgacgattacctaacaatcggtcgattcgtttgatgttatgttttgttctcgctttggttggcaggttacggccaagttcggtaagagtgagagttttacagtcaagtaatgcgtggcaagccaacgttaagctgttgagtcgttttaagtgtaattcggggcagaattggtaaagagagtcgtgtaaaatatcgagttcgcacatcttgttgtcttgtgatccacccaccttatcctcccaaagtgctgggattacaggtgtaagccaccacgcctggccattaatgccttctttcaccttgccaaagaccatatgcttgccatccaaccactcagtcttggcagtgcagatgaaaaactgggaactgtttgtgttggatccagcctttgccatggacaagatgccaggacctgtatgcattaggatgaagttctcatcatcaaatttctccctgtagatggacttgctaccagtgccattatggcgtgtgaagtcaccaccctgacacataaaccctggaataattatctgaaagcaggaacccttataaccaaatcctttctctccaatgctcagagcatgaaagttttctgctgtctttggaaacttgtctgcaaaaggctcaaaggagacacacctcaagggctcaccatcgacggcgatgtcgaagaacat

SEQ ID NO: 116336 - DNA, 4786 bp, Homo sapiens
atgagccgcctgctctggaggaaggtggccggcgccaccgtcgggccagggccggttccagctccggggcgctgggtctccagctccgtccccgcgtccgaccccagcgacgggcagcggcggcggcagcagcagcagcagcagcagcagcagcagcaacagcagcctcagcagccgcaagtgctatcctcggagggcgggcagctgcggcacaacccattggacatccagatgctctcgagagggctgcacgagcaaatcttcgggcaaggaggggagatgcctggcgaggccgcggtgcgccgcagcgtcgagcacctgcagaagcacgggctctgggggcagccagccgtgcccttgcccgacgtggagctgcgcctgccgcccctctacggggacaacctggaccagcacttccgcctcctggcccagaagcagagcctgccctacctggaggcggccaacttgctgttgcaggcccagctgcccccgaagcccccggcttgggcctgggcggagggctggacccggtacggccccgagggggaggccgtacccgtggccatccccgaggagcgggccctggtgttcgacgtggaggtctgcttggcagagggaacttgccccacattggcggtggccatatccccctcggcctgcttaacgttggcttgccacgcattacttgactgtaaaactctcactcttaccgaacttggccgtaacctgccaaccaaagcgagaacaaaacataacatcaaacgaatcgaccgattgttaggtaatcgtcacctccacaaagagcgactcgctgtataccgttggcatgctagctttatctgttcgggcaatacgatgcccattgtacttgttgactggtctgatatccgtgagcaaaaacggcttatggtattgcgagcttcagtcgcactacacggtcgttctgttactctttatgagaaagcgttcccgctttcagagcaatgttcaaagaaagctcatgaccaatttctagccgaccttgcgagcattctaccgagtaacaccacaccgctcattgtcagtgatgctggctttaaagtgccatggtataaatccgttgagaagctgggttggtactggttaagtcgagtaagaggaaaagtacaatatgcagacctaggagcggaaaactggaaacctatcagcaacttacatgactatgtcatctagtcactcaaagactttaggctataagaggctgactaaaagcaatccaatctcatgccaaattctattgtataaatctcgctctaaaggccgaaaaaatcagcgctcgacacggactcattgtcaccacccgtcacctaaaatctactcagcgtcggcaaaggagccatgggttctagcaactaacttacctgttgaaattcgaacacccaaacaacttgttaatatctattcgaagcgaatgcagattgaagaaaccttccgagacttgaaaagtcctgcctacggactaggcctacgccatagccgaacgagcagctcagagcgttttgatatcatgctgctaatcgccctgatgcttcaactaacatgttggcttgcgggcgttcatgctcagaaacaaggttgggacaagcacttccaggctaacacagtcagaaatcgaaacgtactctcaacagttcgcttaggcatggaagttttgcggcattctggctacacaataacaagggaagacttactcgtggctgcaaccctactagctcaaaatttattcacacatgtcggtgagggcaaactgatggttatcggtaacccacactacaacagcattttgcgttgcccgaacggttacagctggaacgggggcgttaataaagatgggcagtgtacgctcaacagcgacccggatgacatgaagaacttcatggagaacgtgctgcgctatctgtccgacgataaatggaagccggacgcgaaagccagcatgaccgtaggcaccaacctggatactgtctattttaaacgtcatggtcaggttacaggaaacagcgctgcgttcgacttccatccggattttgcgggcatctctgttgagcatttaagtagctatggcgatctcgatccgcaggaaatgccgctgctgatccttaacggctttgaatatgtgactcaggtgggtaacgatccttatgcaatcccgctgcgtgcagataccagcaaaccgaagctgactcagcaggatgtgaccgatctgatcgcctatctgaacaaaggtggatcggtgctgatcatggaaaacgtgatgagcaatcttaaggaagagagcgcgtctggttttgtgcgtctgttggatgccgcaggtctgtcgatggcactgaacaagtcggtagtaaataacgatccgcaagggtatccgaaccgcgttcgtcagcagcgcgcaacgggcatttgggtctatgaacgttatcctgccgtagatggtgcgctgccgtacaccatcgatagtaagacaggggaagttaagtggaaatatcaggtagaaaacaaacctgatgacaaaccgaagctggaagttgccagctggctggaagatgtagatggcaaacaggaaacgcgttatgcctttattgatgaggccgatcataaaacagaggattctctgaaggctgcgaaggagaaaattttcgccgcgttcccggggctgaaagagtgtactaatccggcatatcactatgaggtcaactgcctggaatatcgtcctggcacgggggttccggttactggtggcatgtatgttccacagtatacgcaactaagccttaacgccgacactgcaaaagcgatggtgcaggctgcggatttaggcaccaacattcagcgtctgtatcagcatgagctctacttccggaccaatggtcgcaaaggtgagcgtctgagcagcgtcgatctggaacgtctgtaccagaacatgtcggtctggctgtggaacgatacgagctatcgttatgaagaaggcaaaaatgacgagctgggctttaaaacgttcaccgagttcctgaactgctacgccaatgatgcctatgcaggcggcaccaagtgttctgcagatctgaaaaaatcgctggtcgataacaacatgatctacggtgacggtagcagcaaagcgggcatgatgaacccgagctacccgctcaactatatggaaaaaccgctgacacgcctgatgctgggccgttcctggtgggatctgaacatcaaagttgatgtcgagaagtatccgggagcagtatcggaagagggacagaacgttactaaaggaccagtcaacaagtacaatgggcatcgtattgcccgaacagataaagctagcatgccaacggtatacagcgagtcgctctttgtggaggtgacgattaccttcatcaaatttgcccattaactcagtttcaatcgggtgcagagccagacaggaaggaaaaatgtcaagccccggccagcaagtgggctttattgcataagtgacatcgtccttttccccaagatagaaaggcaggagagtgtcttctgcatgaatatgaagatctggtacccatccgtgatacattgaggctgttccctgggggtcgttaccttccacgagcaaaacacgtagccccttcagagccagatcctgagcaagatgaacagaaactgaggttttgtaaacgccacctttatgggcagcaaccccgatcaccggtggaaatacgtcttcagcacgtcgcaatcgcgtaccaaacacatcacgcatatgattaatttgttcaatggtataaccaacacgggggatcagcatgatatcaaaacgctctgagctgctcgttcggctatggcgtaggcctagtccgtaggcaggacttttcaagtctcggaaggtttcttcaatctgcattcgcttcgaatagatattaacaagttgtttgggtgttcgaatttcaacaggtaagttagttgctagaacccatggctcctttgccgacgctgagtagattttaggtgacgggtggtgacaatgagtccgtgtcgagcgctgattttttcggcctttagagcgagatttatacaatagaatttggcatgagattggattgcttttagtcagcctcttatagcctaaagtctttgagtgactagatgacatatcatgtaagttgctgataggtttccagttttccgctcctaggtctgcatattgtacttttcctcttactcgacttaaccagtaccaacccagcttctcaacggatttataccatggcactttaaagccagcatcactgacaatgagcggtgtggtgttactcggtagaatgctcgcaaggtcggctagaaattggtcatgagctttctttgaacattgctctgaaagcgggaacgctttctcataaagagtaacagaacgaccgtgtagtgcgactgaagctcgcaataccataagtcgtttttgctcacgaatatcagaccagtcaacaagtacaatgggcatcgtattgcccgaacagataaagctagcatgccaacggtatacagcgagtcgctctttgtggaggtgacgattacctaacaatcggtcgattcgtttgatgttatgttttgttctcgctttggttggcaggttacggccaagttcggtaagagtgagagttttacagtcaagtaatgcgtggcaagccaacgttaagctgttgagtcgttttaagtgtaattcggggcagaattggtaaagagagtcgtgtaaaatatcgagttcgcacat

SEQ ID NO: 116337 - DNA, 507 bp, Homo sapiens
atgcctcttactcatccgaaccacggaccagacactctacagcgatggacatcctcccagactccaacatcactgagttccaaattaaatcctgaacccgaagcagacgccgcatcgatcctaatcgccacctccatcctttacaagcagagtgatccataccttgacatcctcgcacgggtttatggtccacctacggcggccgaggagaacctaaaatgtttaaaagagcaaggacaagcgcatttacggcatttcctactctgtaaaatggccgcgcccatagccgtggtcctgacggcagccatgtttgaaaattggacgcacagaaggcagtggcaggtttttgagccaggagccagggaagaagagaagtcactgaaatcgcctcgtttcctggcacttaaagtcttgcgaaagggggcagattttcagagactcaggctttatcaggcaaatatggggcaagctaaattgcctttagcgcttttccatccactttgttaa

SEQ ID NO: 116338 - DNA, 430 bp, Homo sapiens
cgccacaccgcaggccacgttactgcagacgccaccacaccaggccacgctgccttttccagccacagtcccagttaagcccaccctgagtgccgctcccacctttccttccttcagctgctgcagaaagggctgcaggtatgaggatgcccacctcagccccgtgtgtgggaccaccacccagtggcaggggtgggctcggagcagccccacagtcaagtcacacacagagcagaggccagggggcaagacgcccaagcgtcaccgaagcaacatccgcgtcagcatcccagcagctgagctggcatgccgttaacgtgagaaccacatcggcatcccagcagttgagctggcgtgccgttaacatgagaactacattggcgtcccagcagccgaggtggcaagccattaacgtgagaaccacacgaaa

SEQ ID NO: 116339 - DNA, 352 bp, Homo sapiens
atggcccttccctggtttaatagtcgtagagccatagcaaggagacattgctgcttgctgaagtttctcaccttaatgtcaaagctaactggcagtgaacgtgctgaagaagcagaagaaaataaacctgacacacccacctatggagactccttcccatatgcacactccagtagtgaactggtgcagtcatgccaagaggtgttcggcgtccacctgaacaaagtggcagctggacaagaagctgggctgtgggtgcctcctcctgtatggtgtgttcctgtgcttctccatcatgactgagttcaacgtgttcacctttgtgaacctgcccatgtgcggggaccactga

SEQ ID NO: 116340 - DNA, 579 bp, Homo sapiens
ctgcgctgccggaggaaacggaagaaggagcaagctatggaggggaacagggatgaggctgagaaatgtgtcgagatcgcccgggaggccctgaacgccggcaaccgcgagaaggcccagcgcttcctgcagaaggccgagaagctctacccactgccctcggcccgcgaatcacctggggagcttctgaaaaatgctgatgcccagctccagattgatttaaatgagcagaaaatgattcctaggggtgtcactcacatccgccatgatgaacccccttctctcgcaggatcaatctccacgcctggaagagaaactcccggtgactcttccctctttggcttcctcgtcctccccacccacaacttaatacgcgagatcagccctggtcagaaccagggcttggcccagcgagcccagtgggagtcggagtgccccagcacccccacaggacactttaagacagttcctctcagcccccgcacagaacatgacctctttgccctcaggagcactttaccttggttgcataccctgcgttcgactctagtagaatccccgctagcaatgaaattttaa

SEQ ID NO: 116341 - DNA, 660 bp, Homo sapiens
atgaacggattgttgaacagccagagaagccagcttagacagcacacattggcagagaacgcaatgcagggtttttccaacaagccaagagtggaaacagccaccttcaaggggtcactcagggctgcatattggaaggacaagaatgggacgaaaggcaactggaagctggagctgctgcagtcggcctggcaagcccgttggctctgcagagtgagcagtccctggcagcccctggagcagctgccagttagacggcccagagttctgatagaatgcattgcttcagttcagtgccaagtgttggacgtgttggattcagttcccagagggctggagcgtgctatgaggcgaaccctggaagggagttgggggtggaaggtgggaggcgcgcccagggatgagcgagatgaggagggcgcgaaccagcaatctggggctgtggttttagacccgctcagcgccctgggcgagggcaggcagcccctcggaggcaagctggcggcggcctcggctgggagcccgcggcgcctcggcgtcggcggtcaggcgctcccggggcccattcgtgctcggcgcaagcctgggacgctcgtctttggcctcgacgagcttacgggagcgggtgtagcagatgaggcctccggccaagcagcgtag

SEQ ID NO: 116342 - DNA, 740 bp, Homo sapiens
tttattggttaaacaaccgtttattacctgcctctgacatttccccagggttacagagcagggggcatctgagcctcaagttccacggatgaagcagacactgcaataacaactgaatcaatagaggagaggcatttggaagtactcggggtgatacacccagtaatggtaatcctcagcagaagatggcatagctaccaaaaatcaggcgttaccactgggatgaaaactggggaggcaagaaaatcatacagttggagtcatagatcatttccctccccgttgagcactcctcccccttccggtcccccattaagttcattctatcccacagactggtcctagtgtcctgctagctccctgctgaaagagagagggagggaaaagatgtctgaggtctctttcatttcctttgtctctgtcccctaaggcaactggaagctggagctgctgcagtcggcctggcaagcccgttggctctgcagagtgagcagtccctggcagcccctggagcagctgccagttagacggcccagagttctgatagaatgcattgcttcagttcagtgccaagtgttggacgtgttggattcagttcccagagggctggagcgtgctgtcagggctgtctgaagacaagagagcagaggcagtttagtgcagttggatgtgcggggtaggggtggaggcgcaggggtgaagagggagaaactggcccgaatgggtaaggtggtgcttct

SEQ ID NO: 116343 - DNA, 1032 bp, Homo sapiens
atgacggtgtttggaggtggacatttaggaggtatgcctgggttgaccttagtcgaatcccgacttattgcgcattaccgcaacatcccccattcgccagactggagtaatagacggaagaggactcgcaacgatctgacccgtgccggacaagtgcccaagcccagaacggcgaaaggcgcagaaagcggtatggtcgccggaagcatacagcgttaccccaccacgcagatgggaaccaccgccacagccaagctagaagccccacagttcagactacaacgacgatcccccgggacccgagcccgattgcgccaactagcaagagaacaagcatgcactgccgtcgttccccccccagattttcttggctcaggacatctgaaggtggtccagtccttgttaaatcatggagcatctgtcaacaacacgactttaaccaattcaactcctcttcgagctgcgtgtttcgatggccatttggaaatagtgaagtaccttgtagaacacaaagctgatttggaagtgtcaaaccgacatgggcatacgtgcttgatgatttcatgttacaaaggacataaagagattgctcagtatttacttgaaaagggggcagatgttaatagaaaaagtgtcaaagtgactttggaactgggtaacaggcagaggttggaagagtttggagggcttagaagaagacaggaagatgaaggaagtttggaacttcctagagactggttaaatggttgtgaccaaaatgctgatagtgatatggacagtgaaatccaggcttatcaggtctcagatggaaatgaggaacttattgggaactggagcaaaggttactcttatgccttagcaaagaacttggctatattgtgtccatgtcctagggatctgtggaaatttgaacttgagaacaataacctagggtatctggcagaagaaatttctaagaagcaaagtattcaagatgctcatggctgcttcaaacaacgtatgctcagatgcagaaggaaagaaataacttaa

SEQ ID NO: 116344 - DNA, 1227 bp, Homo sapiens
atgactgagttcagggctgggatatggacaagacatattggaactgccaattggcagcaggagaaagaagccaaaaacaggcctgcaggacagcgaggctgcgaaattgtcgtccagagccaacgcctcgcgggcttccacgtacgcactccaacgcgtgttcccggagaagaacgcatccgggtcacgggagccggtgtctcaggctccgccccttcaccccccgaaaggctaatccccacttccgaccctctcaggccttttccgcttctcttttacctccccaggctgctcgcactgctgctactggtgcctggacccggcggcgcctctgagatcaccttcgagcttcctgacaacgccaagcagtgcttctacgaggacatcgctcagggcaccaagtgcaccctggagttccagtgtaggaagccatcagagggttataagcagttcagtgatatgacgagaatattcttggtagctgcattaataataacttgtgcaggtagcttcagaacctcttttattcacacccttactcgttctatgttcctaaaataccagactaccagaaattctctgaacaagtctttgctttacatctgcactgacacgtgcgagttcaatcacgggcttgtgcgtaatagcaatcacacggatcaaaatgacagtgtttgcaaatctacagtttattactgtaggcagaggttggaagagtttggagggcttagaagaagacaggaagatgaaggaagtttggaacttcctagagactggttaaatggttgtgaccaaaatgctgatagtgatatggacagtgaaatccaggcttatcaggtctcagatggaaatgaggaacttattgggaactggagcaaaggttactcttatgccttagcaaagaacttggctatattgtgtccatgtcctagggatctgtggaaatttgaacttgagaacaataacctagggtatctggcagaagaaatttctaagaagcaaagtattcaagatgctcatggctgcttcaaacaacccttggctcaaaggaccccagatatagttcatgctgctgcttcagagggtgcacgatgtaagccttggcagcttccatgtggtgttaagcctgtgggtacacagaatgcaagagtgaaggcttggcagcttctgcctagatttcagaggatgtatgaaaaagcctggtgtctaggcagaagccggctgtag

SEQ ID NO: 116345 - DNA, 391 bp, Homo sapiens
  misc_feature (1)...(391): n = a,t,c or g
ncaagtctccagcacagttgtagtccatgtggctgctcaagttttcaagtgttttgatctgttggcagcctcttcatctcaacacaggcttccatggtcgctccagtcaaggaagacagcaagggaaattcttgcttaaatgtttttgtccacaagtgacatatgccatttctgttcacatttcattggccaaagtgggtcacacagccatacctaacgtcttgatggtaactcccaagatgagaagtaaaaccagaatcttgctgagtagtagtaataccaccacaacaacctgagaactgggcagcctcgtcctgagaatgacggagaaggggacctggggctagggaatccctgattcaatcatgccgctccccaggagacgttcgga

SEQ ID NO: 116346 - DNA, 499 bp, Homo sapiens
tttcgtgtgtttacaagtggcccagagaaaaatgggttcaaccttggcttcatcaagaatatccagcaggtgtttggagataagaagaagttctggttaatacctattggttccagccctggtgatggacactccttccctatgaggtctatgaatgagtcacagaacccactgctagcaaatgaagaaacctgggaagacaacgaggatgacaaccaagattatccagaaggctcatcatctcttgctgtggaaacggaaacatagcagttttcacatttcctgcatctctcagacaggactcaccatctctgcctcccatgaggcttacagagttcaatgttggaaatcattgtaatcttcaaaataagtcaccgtgttggattgaaagcttcaaaatttgaaagaattccatcaaatacttgctgtgtaaatgtttctggactttatgttatttaatttactgactgaaatccaatttggaatttggtagcagtta

SEQ ID NO: 116347 - DNA, 1275 bp, Homo sapiens
atgagcaaagagaaggcctttatcaatatcatcatcattggccatgtggactctggcaagtccaccaccactgggcctctcacaaatgtgggcgagggctccttcaagtatgcctgggtgttggacaagctgagggcagaaagagaacgcaggatcaccattgatatctccctgtggaagttcaagactagcacatactacagcattatcatcgatgctccaggccacagagacttcatcatgaccatgatcaggggcacttcccaggccgactgcgcggtgctcttcgtggcaggcggctgggcggaggccggcatcttcaagaacccgcagacccacgagctcgcgctgctggccaactggcgggacgtcacgcagctcatcgtgatcttcaacgaaattgactccaccgagcccgcctacagcggctcgcgcctccaggtgatcaccaaggaagtaagcgcctgcatcaagaagatcggctacaactggctgcctggccttcagtccatctcgagctggcacggcgacagcatgctggagcccagcactgacgcgagtgtggcgcgggtcggcagggacagccggggtggaggcgagcggaccacaccccggactcacctcccctcgacatcccgaagatgccctggttcaagtgctggaagggtttgttcaaggaagtgtctgaaggaagaaccaggactcctttcctctggtttgaagagaaggagaataaagaagcaggatgaggaggtgacacacatctgtcctaatccagatgttaatgattcagagttgactacatcaatcagactccaagttcttcagttttggaacttggactggctctccttgctccttagcctgcagatggcctattgtgggaccttgtcatcatgtgacatcatgtgggaccttgtcaattcatgggaaagccactcatatggagcaaaaagtgaccctagaagaagtttcacaaacaagtacagcatttcagaagtggacaaaggggactgggaagaaatgagtggatgctcctggtttatcaccaaaaacctatggatccaagaaaaaattccaattagtggattgtcagtgccgaaccctggcaaaccaggtaacagctatgggcccaggaaactgaagacagccttcaatccatatttactgagcacgtgccatgcattcaactcagcactgaaagatagggataaggagaggaagtgtggacatgctgttgccaagaaattgatgcctccttctcctccaaattag

SEQ ID NO: 116348 - DNA, 1299 bp, Homo sapiens
atgcgcctgcactcctcagcccttgggtggtcgatgggactgggcgccgtgaagcgggggcggcgatcgtcggggaggctccctcccgcacaggagcccacggaggagggcggggaggctcagtcatggcgggctgcaggtcctgacccctgccccgcgggaaggcagctaaggcctggcgagaaatcgagggcagcgcccgtgattgattttgaaagggtaaagaacgcacagggtaatactctggatctgagggagaatattcaaaaatatatgaacttgaagaagtatctccctcaaggttggaattcagacctggaaagagaaggtcataggatggaggagaaattcactgagttttccaaccataactggttcaaagtctgctggtcaagattggcacacaagaatctacaggccaggactgataaactcaaagcctctcatagcagaacctgtgggtttaggctgcttcaaaagcagatactgagcctcaaatttgctaggcttgccctgaatgagggtcttatctccagtagagaaacaactgaaagtgtggaaaatcagacacaggctcttatcatgacagtggctgagctgcaacaaaaggtgcaccttgccagacctcttccatcacggaaaaggcagaggtttgtcctcactgaaatagacacttactccaggtatgggcttgcctactcttcatgcaatgcttctgccaagactaccatctgtggactcacggaatgccttatccaccatcatggtattccacacagcattgccccgaccaatgcactcactttacgactaaagaagattcacaggtccaggagtcaaggggtggatgtggaagtggcaccaatcaccaacaccccaagtgatccactagcaaagtttttgcttcctgttcctgcgacattacattctggtgggctagaggtcttagttccagaaggacgtacactgcaactaggagacacaacagttttgttaaactggaagttaggattgccacctggacagtttgggctcctcctacctttggatcaaccggctaagaaggaagttactgtgttggctggggtgtctgacctggactatcaagatgaaatcagtctactactccagaacagagactctaagttcttcagttttggaacttggactggctctccttgctcctcagtctgcagttggcctattgtgggaccttgtgatcatgttccaaccactagaatggatgatttgtctctggccaagattggtctaaatgctccttctctggacgccagctga

SEQ ID NO: 116349 - DNA, 613 bp, Homo sapiens
tttttttttttttttttaaggaagacagacacattttttatttgacaacttgttcgcttgattttaaccttttaaatatttagatagtgggcctccatttgtactattgccccaagcctcaccagtgttaggtggtcagcctgccagatgccacctctggaatcatagctacagctgccccaagcctgctgtgggtccaggcaagtctccagcacagttgtagtccatgtggctgctcaagttttcaagtgttttgatctggttggagcctcttcatctcaacacaggcttccatggtcgctccagtcaaggaagacagcaagggaaattcttgcttaaatgtttttgtccacacgtgacatatgccatttctgttcacatttcattggccaaagtgggtcacacagccatacctaacgtcttgatggtaactcccaagatgagaagtaaaaccagaatcttgctgagtagtagtaataccaccacaacaacacgatcacaaggtcccacaataggccgtctgcaggctgaggagcaaggagagacagtccgagttccaaaactgaagaacttggagtccaacattcaagggcaggaaacatccaggatggga

SEQ ID NO: 116350 - DNA, 717 bp, Homo sapiens
atgaggtctatgaatgagtcacagaacccactgctagcaaatgaagaaacctgggaagacaacgaggatgacaaccaagaggccttctgcactccagtgtttacaagtggcccagagaaaaatgggttcaaccttggcttcatcaagaatatccagcaggtgtttggagataagaagaagttctggttaatacctattggttccagcgtagaggcagcagaggaggagatcttagtagtggttgtgaccaagggtcgtttacttgactcctggaggctttactccagagagatacaggtcagcaattgctcagtgcagtcagcccaaggtgaagggtttatgcccaagccaggggttccctgtctggtgatgagccatgggtggtgtttaggacctgtgggagatggactggcctcctctccttgggtcaactacagcttgttggaggaagtggctggagaccacagttgggaggtcccggccagtgaagatgaacaggattgggaactgcttaaaaagcagtctgatcctgttttgatagagcagctgcgttgtgctgggggtccacttcagcccttggtcacctcacactctgaagcccaaaggctggaatggtgctggatgctttctgtccttgaatgttggactccaagttcttcagttttggatctcggactggctctccttgctcctcagcctgcagacagcctattttga

SEQ ID NO: 116351 - DNA, 318 bp, Homo sapiens
tcaaatgggctctgcgctggccaccgaatcctgaatgaggcggggctcctctgccccaactccagcagcgggaacttggttcccctgggcagccgggggcagggggcgccaaggccgtggcgataatgaaggctgagacggccaaggccagcgggtcggcgcggggcactcccgggccggagtggccatcggccggagttcaggaggtaactgaatttataagcggttcttagagctttctagctcgaggatttttatttacctctactgcttctccatttcactaagctcgttctttgaattccaccacagggacta

SEQ ID NO: 116352 - DNA, 387 bp, Homo sapiens
atggaggctgttaataagctgagcttgaggcttcaaaggactcttgtagcctgtgctggatctagcagtgaccagtatgccagtggccatggatgcccaggcccatgttcagtagtgaagcaggtgctagcagcagaagcaatagaaatggaaactgggagatctgctgtggatgaatctcattatcttctttctctgaccctctttggactaaataaactcccagtattcttgaccaacagaggtagggttggaacagaacctcaaaagtcatcattagacttcctactaatagggcattggaagttcaagcgactaactaggaaacagttcctttacgcggaaagctatttacagcagccacagtctctgtttggtttggcatga

SEQ ID NO: 116353 - DNA, 279 bp, Homo sapiens
gatcctggagcactgagcatgctggtgctgttgccggaagaacggagagaaccccggaggcacggctgcagcagctctaacctagctctagatcctaaaggcttaagaaagcagaaagcagctccccctcttcctcaggcagcagatttgaggactagatggagctgccggccggcgcagaacccccaggagcacaggtctctccgggccgctgtcctgcgtaactgttctccagagcgccagccagccacgggcctgattccagaggagccgaactga

SEQ ID NO: 116354 - DNA, 612 bp, Homo sapiens; identical to SEQ ID NO: 116135

SEQ ID NO: 116355 - DNA, 571 bp, Homo sapiens
cctttttatatgatgcgttttattaaacaggacccaccgggctcttttagtttcctcccaccttggtaggttgattgccgatgtgcagggttagtgtcgatcgtttctttaaattttcacaggcatatgatagatttgtcccacataaatgtgtttcctttcgtggagtgagtcctaacaagagagcctgaccttaggctgtacacacactgtggaatttcttcaagggagctgccggccggcgcagaacccccaggagcacaggtctctccgggccgctgtcctgcgtaactgttctccagagcgccagccagccacgggcctgattccagaggagccgaactgacaggacacagcaggctggagttggtgttagattgcttcacattctgttgtcaccaccaagaactccaagtttttcgttttgttttgttttcaaagtgcttacaatgcatgtagacattgttctttgtggtctgactctatgatcgatcacagtgacttagattcaggaaagaacattaacgtcacaagttctaagtagttttcacagcaaaaaaaaaaaaaaaaa

SEQ ID NO: 116356 - DNA, 341 bp, Homo sapiens
ctcggagcttgcccaatacttcccagaaggacgaggctgctgaacttctcattcggggctccgggacctggactgtacccctttctggcgtcacctcctcctgtcgcctggccctcgccatgcagaccccgcgagcagcccctccccgcccggccctcctgcttctgctgctgctactgaggggcgcccacggcctctttcctgaggagccgccgccgcttatgcgtggcccccagggactacctgaaccactatcccgtgtttgtgggcagcgggcccggacgcctgacccccgcagaaagtgctgacgacctcaacatccagcgagtcctgcggggcat

SEQ ID NO: 116357 - DNA, 2145 bp, Homo sapiens
atgacgggaagcggtgtccggcagccgcaggtggcaggtgttggggccgcttctgagcaggcaggcgccgagcggctgcggcagaggctcctcgagtttcacggagagaagcagatggtcttggggatgggggaggcgcacaggcgtcgggtaaccccagatcgagggggaaaatgggctcggagcttgcccaatacttcccagaaggacgagctgctgaacttctcattcggggctccgggacctggactgtaccccttttggtattgctggggacagcaaggaggcctgtgtgacgagcagaatagcgagggggagagagagaggaggcgagggcagggaggggatggagcagtcgtgcagggcctgttgggccattgggaggacttaggctttgacccggagaaggtgggagccacggagggttttagggacaacctctaccgcgtagagctggagccccccacgtccaggagctgcggtaccagaggctataaccgtgcccacacgccccagttagttctggtcacgaccatgccccaccccaatcggccgtaccacacccagggcggatccttctcctccatcccagggcgagtgtcgaaacttcgtaaaggtgctgctccttcgggacgagtccacgctctttgtgtgcggttccaacgccttcaacccggtccaacctccaggcctctgctcgcccacctccgctggccatggcttttccccaggccgtgtcacctcctccaggagccttcctggatatactctccctgcctcctccccctgagctcaagaggatcagcgctgtccaaacgaggcctgtacagggggccggggaagccgtagcacttagagccttactttgtccatgcggtggagtggggcagccatgtctactcttcttccgggagattgcgatggagtttaactacctggagaaggtggtgggtcccgcgtggcccgagtgtgcaagaacgacgtgggaggctccccccgctgctggagaagcagtggacgtccttcctgaaggcgcggctcaactgctcgtacccggagactcccatttctacttcaacgtgctgcaggctgtcacggcgtgcaacaggtcagcgcccaccaatgggagcaaactgggagcatttgggggcatggaacgggccaaagatatcctcatcctctgcctttggggagaggagcagggaggcttcctggaggaggggacattggagctggactttgggtgtggcagcgtgtttgaaggccgcttccgagagcagaagtcccccgagtccatctggacgccggtgccggaggatcaggtgcctcgaccccggcccctttatgagaacctttacgttcgtcctgaccacacccttgtcacccccaggcccgggtgctgcgcagcccccgggatgcagtacaatgcctccagcgccttgccggatgacatcctcaactttgtcaagacccaccctctgatggacgaggcggtgccctcgctgggccatgcgccctggatcctgcggaccctgatgaggtgtggacggcccggcggtggcgagacagggcagcggctgctgagcttggagctggacgcagcttcggggggcctgctggctgccttccccgctgcgtggtccgagtgcctgtggctcgctgccagcagtactcggggtgatgaagaactgtatcggcagtcaggacccctactgcgggtgggcccccgacggctcctgcatcttcctcagcccgggcaccaggtactgcggagagggagagccgcctttgagcaggacgtgtccggggccagcacctcaggttaggggactgcacagctctgggtgcacatctcccccggggctgccaacctctgggctccacactcccactctcctgcggcacccccctctctgctacttccagatcccccaccgctcctgcctcccaggctccgcggggagacttgggcctggagacccgccccgcacgcagatcccgcccgccccggccgcgggttccggggaacgaaggcgccgccagcccgggctgtgggcagagcgcgccctctgccgggatgatcggaaacggcgcggcggcgactcccggaccctcgggactccggaccgactcccacccggctga

SEQ ID NO: 116358 - DNA, 416 bp, Homo sapiens
  misc_feature (1)...(416): n = a,t,c or g
nnnnnnnnnnnnnnnnnnnnnnnnnnnnnnnnnnnnnnnnnnnnnnnnnnnnnnnnnnnnnnnnnnnnnnnnnnnnnnnnnnnnnnnnnnnnnnnnnnnnnnnnnnnnnnnataaatttttaaagaaccttaaaaactgccctttcctcagctgctgccaaggtgcttggtcattccaaggaagctaaggccacattggggtgagagcctcacttcatccggcgattagcacctcatccagcagcgccagccccacacacacccgtgccatggcctccctctccgagctcgcctacatctactcggccctcattctgcataatgataaaatcaatgccctcattaaagcagctggtgtaaatgttgaacctttctggcctggcgtgtttgcaaaggccctagccaatgtcagcatn

SEQ ID NO: 116359 - DNA, 627 bp, Homo sapiens
atgctgcacagaattatgagtgacaacaacatgggttatgccacaaagaatcagctgtcaaaaagaagaggaaacaaatatatcaaagtaggccagaaaatttgctcatcagtgctgtctgctagaactttctgtgataacagaaatgtgctggagcagcagcagcagaggcgggcagaagctcctgctggtacagatagagccagctgctggaccaggtccaccagcccctacattgcagaggaggctccccatgttgactttggccaggcctttgcaaacaagccaggccaaaagggttcaacatttacaccggctgctttaatgagggcattgatcttattctccgtgacggtcacctcatcatcgtgcggaatgagggccagctacacttcaagtgctcattacccacatgcagctagtgaccaccttactggacactgcagatatagaacccttacatcattaagaaactcttggacagcattggttcaggtggactttcttccacctctgccacgaaagatagcaagaccaacccctcctcttcatcctcctcctcagcctactcaacctgaaaataataatgaagccctttatgatgatcagctcctacttaatgcatag

SEQ ID NO: 116360 - DNA, 519 bp, Homo sapiens
ggcacgaggctgccgccaaggtgctcggtccttccgaggaagctaaggcggcgttggggtgaggccctcacttcatccggcgactagcaccgcgtccggcagcgccagccctacactcgcccgcgccatggcctctgtctccgagctcgcctgcatctactcggccctcattctgcacgacgatgaggtgacagtcacggaggataagatcatatgccctcattaaagcagccggtgtaaatgttgagcctttttggcctggcttgtttgcaaaggccctggccaacgtcaacattgggagcctcatctgcaatgtaggggccggtggacctgctccagcagctggtgctgcaccagcaggaggtcctgccccctccactgctgctgctccagctgaggagaagaaagtggaagcaaagaaagaagaatccgaggagtctgatgatgacatgggctttggtctttttgactaaacctcttttataacatgttcaataaaaagctgaacttcaaaaaaaa

SEQ ID NO: 116361 - DNA, 600 bp, Homo sapiens
tttagatttgctaatgtgcatttaatcaccaaaggactgaagatgtctgggcttttttattctgtaatgtttctaagactgtgtccattaaatgcaaacaaagaggaggaagtcttggcagaacaggagaagtgatgcacacttgatgatcgtatcaatttaaatattattcatggcatatagcctagtccatgctctagctgtttctatggcttgggcttcgttggtcttccactgctccgctacatcatttgctaatggatcatctggattgggagcacttaacaaggcctggatcgatagcagaactgtgcggatctgcagtgctggggaccacttattttaggggctgccattgggtattcttctggaaggaataggtccaagttacagagtccctccctcaaagggggaatcctgagggccagcaatgaccacatgaaaataacgggcgttgctctcatctggttcggctttgatgccaggaactggttctgccagcaaacgctgggtttccttgatgatcctgcggggcagcccggccatcttgtcagaacccgagttcggcctctggtctcgtctccggctcctctcgcctca

SEQ ID NO: 116362 - DNA, 2344 bp, Homo sapiens
ttttttttttttttttttatggggaaaatgtaattttgatagttaattcttcatcttacataggagcacaataaaatacaccacaatctgaagaaactccagaattacgagaataagagtgaagaaaattcaaatgggctacaatatccattaccttaaactgcaagagacaaggttgcaacccgaaggttaacatttatgtatttatgactggctacatttatgacttaaaaataacaagaatcaggaattagatatggagtagagctgggacagtaacagttttgtgaggggaggaattcgtcaataaagaagaaaaattactgaattccaaattaaagaataaaacgagctcccacagcaaatactggagggatgaaagcaagaatcattaactgaggacttgatactctcaaagggataaacctttctgatgacacacaagctagatagttgagatctgctcatcaggtttataaggaagactcacaaatgcctcagcaaatcccaaatgatcagatcagtgtttcttaacacacatgaaaggttacagatgaaattttcagataagaaccaagaaaaatgtcataacccaaattttaggcaaaaatgtggcacaactgtgaaagtcctacatgtcagtcacaactgctatctttgctgtgactttcctgtacagtaatttttaaacattgtggcaagacaccaatgatcatctaatcagacaacacaaacacatttatttcaaattcctagaaggttaaaaaaaggtcagatactgatgctttatgcatgctcagggccagtttataaatactccattcagtactatcttaacacaaatctgcatcagtgaaaagaaactggcaaaatccacctctttgccattcaatttgtcagatggtgaagaccaagaaagaatgttccatcagtttcaattttaaaatacggattgtcaaattgggaaaatgaaataaacacagtaaaataaactgtacaaaggcaaagtagaataacaaaaaatattttacttaaaacataaggatttacagaagtttccagacaagccatacaaaatggtcacaagcttttttttggagggggggaatctacacttgacagcaatgttattagtgagggctgtgatgtttgtttaatgttcccattttgggttccaacaatcaagcttgtccatctacagcgtctaaataaagttaggacttggctagagcatatttctaaaggacctgggttaggctgcttttaaccaatggcaattaggatcacccaaaaaaggggggaaagggagcccattaaaattaaactacctcccccctccaaaaataaaattaaaattaaaattaaaattaaaaacaccccacacccctggcaggcttaacctggacaacttaccttcattccacagtgccttttatacttaaaacccggatggggggggaatggaataaaagcagggagggggccactgctttttaaacgttttcacaacaatcccagatgaatacttcctagcctctgctcatgctttatgaacagtgaaatcaggacaagacataagatttgctaatgtgccatttaatcaccaaaggactgaagatgtctgggcttttttattctgtaatgtttctaaagactgtgtccattaaatgcaaacaaagaggagggaagtcttggcagaacaggagaagtgatgcacacttgatgatcgtatcaattttaaatattattcatggcatatagcccagctccatgctctagctgtttctatggctttgggcttcgttggtcttcccaactgctccgctacaatcatttgcctaaatggatcatctggaattgggaagcaacttaaacaaagccctggaacgaatagcaagaactgtgcgggatctgacagctgctggcggaccggcttatctttcaaagatatctaaacgtatttcttccccagcttgtgtaaaattaggaatggaaaaattttggggtcaatgaaagcgtaactttaggggggcctgccatttggggaattccttccggaatggaatagttccaggtttaaagagtcccctccctcaaagaggggaatcctttgattccccagcaatgaccacatgaaaataacgggcgttgctttcatctggttcggcttttgatgccaggaactggttctgccagcaaaacgctgggtttccttgatgaatcctgcggggcagcccggccatcttgtcagaacccgagttcggcctctggtctcgtctccggctcctctcgcctcacgcacgagtggaagtcccgggctccacttccgggggaccctcgtgcc

SEQ ID NO: 116363 - DNA, 669 bp, Homo sapiens
tcgcggacgcgtgggcagcttaagcgattcaggcttgcatattcttcttggtgtctgtgcttttggccccctcagaatggtttctaaacaacacaaatgttgatgctaaaatttaattttactgtagtatggagcaaggaggagagtgctatggggtaagattagataaagggagctagattacctggtaagtcatggtaatgaccttgtattttactctgagatgataactcattgcagggttttcaacagagtggagttacatgctccaaactttatttaaaaggatcattttggcttctgggaagagagagacaggataagcagatggcaaggatagaagcaggggctgttacaatagttaaaaacaataatgaaaactcgagtcagggtagtaatggcaagaaatggttagaatcagcatgtgttttgaaagtagaactgacagaatttgctgatagattagatgaggattatgaaagtaagaaagtagtcaaaggagattcggaggtttttgccttgagcaactacaagattagaattgccacttatagagttgggaaacagtgggaggagcagtgtgagaacgagctaatacaccagtacagcatcattgttattacagatatagtaactaaggaccagagagggaaagcagcttatccatga

SEQ ID NO: 116364 - DNA, 426 bp, Homo sapiens
atggcttttgacacattctcaattgggtctgtggtccaggagatcgagaacccctgcagaagggcactggaccccagccacctgggctgggagcctttctctgggctgtgctggggcagctgtgggagcccccagaatgaggacagcctgcagtgggacctgggcatggagtcgacctcgctagacgacgttctgtatccgtacgccagcttccggaacctggtggaccccatcacacacgacctcatcatcagcctggcacgctacatccactgtcccaagccggtagggtggctgtggtccgagccagccaggtcccggggtgtgcggtgggtgcctttctgggcagagcagctgtatgcccaaggaggactggcagacaggcccaaggaggacaagcccgtcctccaggcaccaagagcttga

SEQ ID NO: 116365 - DNA, 560 bp, Homo sapiens
ccaccgtgccctgacaaaatatttttcttgatggggtaaattacactttgagagtttaagcaagaaattacagtaacagcttttgtgggaatatatacatacactctttaacatgacacttgattaagaaacaatcatgtcatcaggctacgtacgggactgcaaacaagttacattcaaaacttgtaagacacgtcattttgatgcagagttaatatttgatatgaaaaaggtattttcaattgccatagagcaagaatacacctataggtatttgggtctaggaaggcatttcaatcctctccaggtatttacttacattttggaaagacttgttctgatatatcttgcttcttctattatcgactgcagcacataaaagaaaatgatctatgtttggaaatattaccactaccttaagaaataaagaataaagagcaaagatcgttttccttttttaaatcactcgttgaacatctttatggccctctgaagcatttctcacatgcagaaaagtttctctgctcataattctaaatttattagcactaacttaagaa

SEQ ID NO: 116366 - DNA, 458 bp, Homo sapiens
tttcttcaaacattttattcccaaaagcaatgttacaagaaataagaaggccatgctatacagaactctaggagtaagaaaagcctaacttaggaattagatggagatagaatctgcctacttagtataacacacctttggggctggtcttccacagcaggccctgaatgaacgtagacttcatcagcaggacagaaatgaaatctctcagagccctcttgtatgttgtttgtctccccagcttgaatatgagctttccaaaagcatcagcactgtttgtcttatgttggatccttatctcccagcatggtgcctcggcctctcaaagtgctgggattacaggcatgaaccaccacgtctagccttttctaagtgaaagcactattttatagcttgcaaacactgttagaaaaatcttctggaagcaccggatcaggtatctgcttgaggaatgtgag

SEQ ID NO: 116367 - DNA, 432 bp, Homo sapiens
aatagagatgcggtttcgccatgttggccgggctggtcttgaagtcctgacctcaggtgattcacctacctcagcttcccgacgtactgggtttacaggcatgagccaccgttcccggccaaggagggctctgagagatttcatttctgtcctgctgatgaagtctacgttcattcagggcctgctgtggaagaccagccccaaaggagaagttttgctctgttgcccaggctggagtgcagtggtgcaatctcagcttactgcagcctctgcctcccaggttcaagcaattctcctgcctcagccacctgagcagctgggattacagttgctgaacagaagacttttgagagtcagcagaaatcttccactttgcatggttctcttgatgtgaaatcatctatatagccccagaattggaaaagaaaaaaa

SEQ ID NO: 116368 - DNA, 489 bp, Homo sapiens
atgaggacagctgatgtggctggcctgaaaaataaggagggctctgagagatttcatttctgtcctgctgatgaagtctacgttcattcagggcctgctgtggaagaccagccccaaaggttaagattggcatttgagaaacagatttgggaattaataaatgaagctatgagaatagataaggccatcaaggaagcacactggagaaaaaggaagaggtccaaggaaagcagtgcaacatctaaaggcagcgagaaagcccaaaataagaattatcggagtgacgggaaaatggcatttgagaagatcacagaagagagagcatcaaggcatgcagtaggttatatagcgcagagagagaatctgtgcattttggggagtaagagcgcagtgattttgggactttgcattggtactcagtacagccctatcacagtggaaaacaacactgggcagaactcagctggcacccaacaagggagcatctag

SEQ ID NO: 116369 - DNA, 204 bp, Homo sapiens
atgaagcagcaggctgcttcagcccaggaatttgaggttacgggaacaagggcagagccagaatgtcaacggaggagtgtgcaccctttcaactacactctgtgcgcaatgtttaaccggagcctcgtgtattcatttggcactagcagctttgtttcaccccaggccctgatcatggggcccacagagaggggtcccaggtag

SEQ ID NO: 116370 - DNA, 2361 bp, Homo sapiens
atgaggaggagaggagaaggtgatgcaggaggaggagaaaaggaaaaagaagaggagagaaggggcatagatgaagctgtaagccatcattctcagcaaactaacacaggaggagaaaaccaaatgccacatgttctcactcataagtggcagctgaacagaaactctgcctgtgacaagctgcacaagcctcactcagtgcctggcggggttgcagctggagacgtgggaggaaaaacaatttctaatcctggtgtttgtgcaatagagtatcaggtggacggttcacctcacatttgggaagatgtgaacaaaggtgtctacattgaagaggacagagctcctctcatggaacgcagttcctcaccagcaatggaacaaagctggatggagaatgactttgacgagctgagagaagaaggcttcagacgatcaaattactctgagctacgggaggacattcaaaccaaaggcaaagaagttgaaaactttgaaaaaagttcagaagaatatataactagaatagccaatacacagaagtgcttaaaggagctgatggagctgaaaaccaaggctccagaactacgtgaagaatgcagaagcctcaggagccaatgcgatcaactggaagaaagggcatcagtgatagacacacatagtctcaaaataaaaggatggaggaagatctaccaagcaaatggaaaacaaaaaaaggcaggggttgcaatcctagtctctgataaaacagactttaaaccaacaaagatcaaaagagacaaagaaggccattacataatggtaaagggatcaaatcaacaagaagagctaactatcctaaataaatatgcacccaatacaggagcacccagattcataaagcaagtcctgagtgacctacaaagagacttagactcccatacattaataatgggagactttaacaccccactgtcaacattagacagatcaacaagacagaaagtcaacaaggatacccaggaattgaactcagctctgcaccaagcggacctaatagacatctacagaactctccaccccaaatcaacagaatatacatttttttcagcaccacaccacacctatttcaaaactgaccacatagttggaagtaaagttctcctcagcaaatgtaaaagaacagaaattataacaaactgtctctcagaccacagtgcaatcaaactagaactcaggattaagaaactcactcaaaaccactcaactacatggaaactgaacaacttgctcctgaatgactactgcgtacataacgaaatgaaggcagaaataaagatgttttttgaaaccaacgagaacaaagacacaacataccagaatctctgggacgcattcaaagcagtgtgtagagggaaatttatagcactaaatgcccacaagagaaagcaggaaagatccaaaattgacaccctaacatcacaattaaaaaaactagaaaagcaagagcaaacacattcaaaagctagcagaaggcaagaaataactaaaatcagagcagaactgaaggaaatagagacacaaaaaacccttcaaaaaattaatgaatccaggagctggttttttgaaaggatcagcaaaactgataaaccgctagcaagactaataaagaagaaaagagagaagaatcaaatagatgcaataaaaaatgataaaggggatatcaccaccgatcccacagaaatacaaactaccatcagagaatactacaaacacctctacgcaaataaactagaaaatctagaagaaatggataaattcctcgacatatacactctcccaagactaaaccaggaagaagttgaatctctgaatagaccaataacaggagctgaaattgtggcaataatcaatagcttaccaaccaaaaagagtccaggaccagatggattcacagccgaattctaccagaggtacaaggaggaactggtaccattccttctgaaactattccaatcaatagaaaaagagggaatcctccctaactcattttatgaggccagcatcatcctgataccaaagccaggcagagacacaacaaaaaaagagaattttagaccaatatccttgatgaacattgatggaaaaatcctcaataaaatactggcaaaccgaatccagcagcacatcaaaaagcttatccaccatgatcaagtgggcttcatccctgggatacaaggctggttcaatatacgcaaatcaatcaatgtaatccagcatataaacagaaccaaagacaaacaccacatgattatctcaatagatgcagaaaaggcctttgacaaaattcaacagcccttcatgcaaaaactctcaataaattag

SEQ ID NO: 116371 - DNA, 2265 bp, Homo sapiens
atgggagactttaacaccccactgtcaacattagacagatcaacgagacagaaagtcaacaaggatacccaggaattgaactcagctctgcaccaagcagacctaatagacatctacagaactctccaccccaaatcaacagaatatacatttttttcagcaccacaccacacctgctccaaaactgaccacatagttggaaaaaagcaagagcaaacacattcaaaagctagcagaaggcaagaaataactaaaatcagagcagaactgaaggaaatagagacacaaaaaacccttcaaaaaattaatgaatccaggagctggttttttgaaaggatcaacaaaattgatagaccgctagcaagactaataaagaagaaaagagagaagaatcaaatagacgcaataaaaaatgataaaggggatatcactaccagtcccacagaaatacaaacaaccatcagagaatactacaaacacctctacgcaaataaactagaagatctagaagaactggataaattcctcgaaacatacaccctcccaagactaaaccaggaagaaggtgactctctgaatagaccaataacaggatctgaaattgtggcaataatcaatagcttgccaaccaaaaagagtccaggaccagatggattcacagccgaattctaccagaggtacaaggaggaactggtaccattccttctgaaacgattccaatcaatagaaaaagagggaatcctccctaactcattttatgaggccaacatcatcctgataccaaagtcggccagagacacaaccaaaaaagataattttaggccaatatccttgatgaaccttgatgcaaaagcctcaataaaatactggcaaaccgaatccagcagcatatcaaaaagcttatccaccatgatcaagtgggcttcatccctgggatgcaaggctgtgttggaagttctggccagggcaattaggcaggagaaggaaataaagggtattcaattaggaaaagaggaagtcaaattgtccctgtttgcagatgacatgattgtatatctagaaaaccccattgtctcagcccaaaatctccttaagctgataagcaacttcagcaaagtctcaggatacaaaatcaatgtacagaaatcacaagcattcttatacaccaataacagacaaacagagagccaaatcatgagtgaactcccattcacaattgcttcaaagagaataaaatacctaggaatccaacttacaagggatgtgaaggacctcttcaaggagaactacaaaccactgctcaatgaaataaaagaggatacaaacaaatggaagaacattccatgctcatgggtaggaagaatcaatatcgtgaaaatggccatactgcccaaggtaatttatagattcaatgccatccccatcaagctaccaatgactttcttcacagaattggaaaaaactactttaaagttcatatggaaccaaaaaagatcctgcatcgccaagtcaatcctaagccaaaagaacaaagctggaggcatcacactacctgacttcaaactatactacaaggctacagtaaccaaaacagcatggtactggtaccaaaacggagatatagatcaatggaacagaacagagccctcagaaataacgccgcacatctacaactatctgatctttgacaaacctgagaaaaacaagcaatggggaaaggattccctatttaataaatggtgctgtgaaaactggctagccatatatagaaagctgaaactggatcccttctttacaccttatacaaaaatcaattcaagatggactaaagacttaaatgttagacctaaaaccataaaaaccctagaagaaaacctaggcattaccattcaggacataggcatgggcaaggacttcatgtctaaaacaccaaaagcaacggcagcaaaagcccaaattgacaaatgggatctaattaaactaaagagcttctgcacagcaaaagaaactaccatcagagtgaataggcaacctacaaaatgggaggaaattttcgcaacctactcatctgacaaagggctgatatccagaatctacaatgaactcaaacaaatttacaagaaaaaaacaaacaaccccatcaaaaagtgggcaaaggacatgaacagacacttctcaaaacaagacatttatgcagccaaaaaacacatgaaaaaatgctcatcatcactggccatcagagaatgcaaatcaaaaccacaatga

SEQ ID NO: 116372 - DNA, 2268 bp, Homo sapiens
atgggagactttaacaccccactgtcaacattagacagatcaacgagacagaaagccaacaaggatacccaggaattgaactcagctctgcaccaagtggacctaatagacatctacagaactctccaccccaaatcaacagaatatacattcttttcagcaccacaccacacctattccacaactgaccacatacttggaagtaaagctctcctcagcaaatgtagaagaacagaaattataacaaactatctctcagaccacagtgcaatcaaactagaactcagaattaagaatctcactcaaaaccgctcaactacatggaaactgaacaacctcctcctgaatgactacggggtgcataatgaaatgaaggcagaaataaagatgttctttgaaaccaatgagaacaaagacacaacataccagaatctctgggacacattcaaagcagtgtgtagagggaaatttatagcactaaatgcccacaagagaaagcaggaaagatccaaaattgacaccctaacatcacaattaaaagaactagaaaagcaagagcaaacacattcaaaagctagcagaagacaagaaataactaaaatcagagcagaactgaaggaaatagagacacaaaaaacccttcaaaaaattaatgaatccaggagctggttttttgaaaggatcaacaaaatagatagactgctagcaagactaataaagaaaaaaagagagaagaatcaaatagatgcaataaaaaatgataaaggggatatcaccactgatcccacagaaatacaaactaccatcagagaatactacaaacacctctacgcaaataaactagaaaatctagaagaaatggataaattcctgcacacatacactctcccaagactaaaccaggaagaagttgaatctctgaatagaccaataacaggatctgaaattgtggcaataatcaatagcttaccaaccaaaaagagtccaggaccagatggattcacagccgaattcgaccagaggtacaaggaggaactggtaccattccttctgaaactattccaatcaatagaaaaagagggaatcctccctaactcattttatgaggccagcatcatcctgatacgaaagcctggcagagacacaaccaaaaaagagaattttagaccaatatccttgatgaacactgatgcaaaaatcctcaataaaatactggcaaaacgaatccagcagcacatcaaaaagcttatccaccatgatcaagtgggcttcatccctgggatgcaaggctggttcaatatacacaaatcaataaatgtaatccagcatataaacagagccaaagacaaaaaccacatgattatctccatagatgcagaaaaggcctttgacaaaattcaacaacccttcatgctaaaaactctcagtaaattaggtattgacgggacatatttcaaaataataagagctatctatgacaaacccacagccaatatcatactgaatgggcaaaaactggaagcattccctttgaaaactggcacaagacagggatgccctctctcaccactcctattcaacatagtgttggaagttctggccagggcaattaggcaggagaaggaaataaaggggaacttcagcaaagtctcaggatacaaaatcaatgtacaaaaatcacaagcattcttatacaccaacaacagacaagcagagagccaaatcatgagtgaactcccattcacaattgcttcaaagagaataaaatacctaggaatccaacttacaagggatgtgaaggacctcttcgaggagaactacaaaccactgctcaatgaaataaaagaggatacaaacaaatggaagaacattccatgctcatgggtaggaagaatcaatatcgtgaaaatggccatactgcccaagtgtttgccaagccataagctgatattttattttaccttcagttctctgtacattacagcttctctgcctgcaacatccttttcatctggctcctttacatgtcaggtccacccagtagatttccatgtggaatcaaagtcagatgccataaatgactggagtggcagagtctgtcagtggagttacataaactgtgtgtatggcgagtgcagctccagactgaacagtaatgtgcccgctttgagggaggagagtagcactcctcagtactaccaggatggtgccattgcagaatgttgccccagagctgctagatctgctaacagaaacccaaatctgtag

SEQ ID NO: 116373 - DNA, 2337 bp, Homo sapiens
atggagctgaaagccaaggctcgaggactacgtgaagaatgcagaagcctcaggagccgacgcgatcaactggaagaaagggtatcagtgatggaagatgaaatgaatgaaatgaagcgagaagggaagtttagagaaaaaagaataaaaagaaacgaacaaagcctccaagaaatatgggactatgtgaaaagaccaaatcgacgtctgattggtgtacctgaagaactagaaaagcaagagcaaacacattcaaaagctaacagaaggcaagaaataactaaaatcagagcagaactgaaggaaatagagacacaaaaaaccctgcaaaaaattaatgaatccaggagctggttttttgaaaggatcaacaaaattgatagaccgttagcaagactaataaagaagaaaagagagaagaatcaaatagacgcaataaaaaatgataaaggggatatcaccaccgatcccacggaaatacaaactaccatcagagaataccacaaacacctctacgcaaagaaactagaaaatctagaagaaatggatgaattcctcgacacatacaccctcccaagactaaacaaggaagaagttgaatccctgaatagaccaataacaggctctgaaattgtggcaataataaatagcttaccaaccaaaaagagtccaggaccagatggattcacagccgaattctaccagaggtacaaggaggaactggtaccattccttctgaaactattccaatcaatagaaaaagagggaatcctccctaactcattttatgaggccagcatcatcctgataccaaagccgggcagagacacaacaaaaaaagagaattttagaccaatatccttgatgaacattgatgcaaaattcctcaataaaatactggcaaaccgaatccagcagcacatcaaaaagcttatccaccatgatcaagtgggcttcatccctgggatgcaaggctggctcaatatatgcaaatcaatcaatgtaatccagtatataaacagaaccaaagacaaaaaccacatgattatctcaatagatgcagagaaggcctttgaaaaaattcaacaacccttcatgctaaaaactctcaataaattagtgttggaagttctggccagggcaattaggcagaagaaggaaataaagggtattcaattaggaaaagaggaagtcaaattgtccctgtttgcacatgacatgattgtatatctagaaaagcccattgtctcagcccaaaatcttcttaagctgataagcaacttcagcaaagtctcaggatacaaaatcaatgtacaaaaatcacaagcattcttatacaccaatcacagagaaacagagagacaaatcatgagtgaactcccattcacaattgcttcaaagagaatcaaatacctaggaatccaacttacaagggacgtgaaggacctcttcaaggagaactacaaaccactgctcaaggaaataaaagaggatacaaacaaatggaagaacattccatgcttatgggtaggaagaatcaatattgtgaaaatggccatactgcccaaagtaatttatagattcaatgccatccccatcaagctaccaatgactttcttcacagaattggaaaaaactactttaaagttcatatggcaccaaaaaagagcccgcatcgccaagtcaatcctaagccaaaagaataaagctggaggcatcacactacctgacttcaaactatactacaaggaaacagtaaccaaaacagcatggtactggtaccaaaacagagatatagatcaatggaacagaacagagccctcagaagtaatgccgcctatctacaactatctgatctttgacaaacctgagacaaacaagcaatggggaaaggattccctatttaataaatggtgctgggaaaactggctagccatatgtagaaagctgaaactggatcctttccttacaccttatacaaaaattaattcaagatggattaaagacttaaacgttagacttaaaaccataaaaaccctagaaggaaacttaggcattaccattcaggacataggcatgggcaaggacttcgtgtctaaaacaccaaaagcaatggcaacaaaagccaaaattgacaaatgggatctgattaaactaaagagcttctgtacagcaaaagaaactaccaacagagtgaacaggcaacctacaaaattggggaaaattttcacaacctactcatctgacaaagggttaatatccagaatctacaatgaactccaacaaatttacaagaaaaaaacaaacaacctatcaaaaagtgggtggaggacatga

SEQ ID NO: 116374 - DNA, 2196 bp, Homo sapiens
atgggagactttaacaccccactgtcaacattagacagatcaacaagacagaaagtcaacaaggatacccaggaattgaactcagctctgcaccaagtggacctaatagacatctacagaactctccaccccaaatcaacagaatatacatttttttcagcaccacacaacacctattccaaaattgaccacatagttggaagtaaagctctcctcagcaaatgtaaaagaacagaaattataacaaactatctctcagaccacagtgcaatcaaactagaactcagaattaagaatctcactcaaagccactcaactacatggaaactgaacaacctgctcctgaatgactactgggtacataaggaaatgaaggcagaaataaagatgttctttgaaaccaacaagaacaaagacacaacataccagaatctctgggacgcattcaaagcagtgtgtagagggaaatttatagcactaaatgcccacaagacaaagcaggaaagatccaaaattgacaccctaacatcacaattaaaagaactagaaaagcaagagcaaacacattcaaaagctagcagaaggcaagaaataactaaaatcagagcagaactgaaggaactagagacacaaaaacccttcaaaaaatcaatgaatccaggagctgaaatacaaactaccatcagagaatactacaaacacctctacgcaaataaactagaaaatctagaagaaatggatacattcctcgacacatacactctgccaagactaaaccaggaagaagttgaatctctgaatagaccaataacaggagctgaaattgtggcaataatcaatagtttaccaaccaaaaagagtccaggaccagatggattcacagccgaattctaccagaggtacaaggaggaactggtaccattccttctgaaactattccaatcaatagaaaaagagggaatcctccctaactcattttatgaggccagcatcattctgataccaaagccgggcagagacacaaccaaaaaagagaattttagaccaatatccttgatgaacattgatgcaaaaatcctcaataaaatactggcaaaccgaatccagcagcacatcaaaaagcttatccaccatgatcaagtgggcttcatccctgggatgcaaggctggttcaatatacacaaatcaataaatgtaatcccgcatataaacagagccaaagacaaaaaccacatgattatctcaatagatgcagaaaaagcctttgacaaaattcaacaacccttcatgctaaaaactctcaataaattaggtattgatgggacgtatttcaaaataataagagctatctatgacaaacccacagccaatatcatactgaatgggcaaaaactggaagcattccctttgaaaactggcacaagacagggatgccctctctcaccactcctattcaacatagtgttggaagttctggccagggcaatcaggcaggagaaggaaataaagggtattcaattaggaaaagaggaagtcaaattgtccctgtttgcagacgacatgattgtttatctagaaaaccccatcgtctcagcccaaaatctccttaagctgataagcaacttcagcaaagtctcaggatacaaaatcaatgtacaaaaatcacaagcattcttatacaccaacaacagacaaacagagagccaaatcatgagtgaactaccattcacaattgcttcaaagagaataaaatacctaggaatccaacttacaagggatgtgaaggacctcttcaaggagaactacaaaccactgctcaaggaaataaaagaggatacaaacaaatggaagaacattccatgctcatgggtaggaagaatcaatatcgtgaaaatggccatactgcccaaggtaatttacagattcaatgccatccccatcaagctaccaatgactttcttcacagaattggaaaaaactactttaaagttcatatggaaccaaaaaagagcccgcatcgccaagtcaatcttaagccaaaagaacaaagctggaggcatcacactacctgacttcaaactatactacaaggctacagtaaccaaaacagcatggtactggtaccaaaacagagatgtagatcaatggaacagaacagagccctcagaaataacgcccatacctacaactatctga

SEQ ID NO: 116375 - DNA, 2298 bp, Homo sapiens
atgaaggcagaaataaagatgttctttgaaaccagcaagaacaaagacacaacatatcagaatctctgggacgcattcaaagcagtgtgtagagggaaatttatagcactaaatgcccacaagagaaagcaggaaagatccaaaattgacaccgtaacatcacaattaaaagaactagaaaagcaagagcaaacacattcaaaagctagcagaaggcaagaaataactaaaatcagagaagaaatgaaagaaatagagacacaaaaaacccttcaaaaaattaatgaatccaggagctggttttttgaaaggatcaacaaaatagatagaccactagcaagactaataaagaaaaaaagagagaagaatcaaatagacgccataaaaaatgataaaggggatatcaccaccgatcccacagaaatacaaattaccatcagagaatactacaaacatctctatgcaaataaactagaaaatctagaagaaatggataaattcctcgacacatacactctcccaagactaaaccaggaagaagttgaatctctgaatagaccaataacaggatctgaaattgtggcaataatcaatagcttaccaaccaaaaagagtccaggaccagatggattcacagccgaattctaccagaggtacaaggaggaactggtaccattccttctgaaactattccaatcaatagaaaaagagggaatcctccctaactcattttatgaggccagcatcatcctgataccaaagctgggcagagacacaaccaaaaaagagaattttagaccaatatccttgatgaacattgatgcaaaaatcctcaataaaatactggcaaaccgaatccagcagtacatcaaaaagcttattcaccatgatcaagtgggcttcatccctgggatgcaaggctggttcaacatacgcaaatcaataaatgtaatccagcatataaacagaaccaaagacaaaaaccacatgattatctcaatagatgtagaaaaggcctttgacaaaattcaacaacccttcatgctaaaaactctcaataaattagagaataaaataactaggaatccaacttacaagggatgtgaagcacctcttcaaggagaactacaaaccactgctcaaggaaataaaagaggatacaaacaaatggaagaacattccatgctcatgggtaggaagaatcaatatcgtgaaaatggccatactgcccaagaattggaaaaaacgactttaaagttcatatggaaccaaaaaagagcctgcatcaccaagtcaatcctaagccaaatgaacaaagctggaggcatcacactacctgacttcaaactatcttacaaggctacagtaaccaaaacagcatggtactggtaccaaaatagagatatagatcaatggaacagaacagagccctcagaaataacgccacatatctacaactatctgatatttgacaaacctgagaaaaacaagcaatggggaaaggattccctatttaataaatggtgctgggaaaactggctagccatatgtagaaagctgaaactggatcccttccttacaccttatacaaaaatcaattcaagatggattaaagacttaaacattctacctaaaaccataaaaaccctagaagaaaacctaggcattaccattcaggacatagacatgggcaaggacttcatgtctaaaacaccaaaagcaatggcaacaaaagccaaaattgacaaatgggatctaattaaactaaagagcttctgcacagcaaaagaaactaccatcagagtgaacaggcaacctacaaaatgggagaaaattttcacaacctactcatctgacaaagggctaatatccagaatctacaatgaactcaaacaaatttacaagaaaaaaacaaacaaccccatcaaaaagtgggcaaaggacataaacagacacttctcaaaagaagacatctatgcagccaaaaaacacatgaaaaaatgttcatcatcactggccatcagagaaatgcaaatcaaaaccacaatgagataccatctcacaccagttagaatggcaatcattaaaaagtcaggaaacaacagaatcaaagttgtaaaactacaaattgttcttcaaatgaagccccagatgcagtccatgactaagatccaccgcggacccctggacaggcctgctagcccatgttccgatgctagtgacatcgaaggcacccctcccgaggaaatctcaactgcacgacccctactatgcgccagttcagcaggaaacagttag

SEQ ID NO: 116376 - DNA, 2880 bp, Homo sapiens
atggtaaagggatcaattcaacaagaggagctaactatcctaaatatttatgcacccaatacaggagcacccagattcataaagcaagtcctgagtgacctacaaagagacttagactcccacacattaataatgggagactttaacaccccactgtcaacattagacagatcaatgagacagaaagtccacaaggatacccaagaattgaactcagctctgcaccaagcagacctaatagacatctacagaactctccaccccaaatcaacagaatatacatttttttcagcaccacaccacacctattccaaaattgaccacatagttggaagtaaagctctcctcagcaaatgtaaaagaacagaaattataacaaactatctctcagaccacagtgcaatcaaactagaactcaggattaagaatctcactcaaagccgctcaactacatggaaactgaacaacctgctcctgaatgactactgggtacataacgaaatgaaggcagaaataaagatgttctttgaaaccaacgagaacaaagacaccacataccagaatctctgggacgcattcaaagcaaccactagcaagactaataaagaaaaaaagaagaatcaaatagacataataaaaaatgataaaggggatatcaccaccgatcccacagaaatacaaactaccatcagagaatactacaaacacctctacgcaaataaactagaaaatctagaagaaatggatacattcctcgacacatacactctcccaagactaaaccaggaagaagttgaatctctgaatagaccaataacaggctctgaaattgtggcaataatcaatagtttaccaaccaaaaagagtccaggaccagatggattcacagccgaattctaccagaggtacaaggaggaactggtaccattccttctgaaattattccaatcaatagaaaaagagggaatcctccctaactcattttatgaggccagcatcattctgataccaaagccgggcagagacacaaccaaaaaagagaattttagactaatatctttgacgaacattgatgcaaaaatcttcaataaaatactggcaaaccgaatccagcagcacatcaaaaagcttatccaccatgatcaagtgggcttcatccctgggatgcaagcctggttcaatatacgcaaatcaataaatgtaatccagcatataaacagagccaaagacaaaaaccacatgattatctcaatagatgcagaaaaagcctttgacaaaattcaacaacccttcatgctaaaaactctcaataaattaggtattgatgggacgtatttcaaaataataagagctatctatgacaaacccacagccaatatcatactgaatgggcaaaaactggaagcattccctttgaaaactggcacaagacagggatgccctctctcaccgctcctattcaacatagtgttggaagttctggccagggcaatcaggcaggagaaggaaataaagggtattgaattaggaaaagaggaagtcaaattgtccctgtttgcagacgacatgattgtttgtctagaaaaccccatcgtctcagcccaaaatctccttaagctgataagcaacttcagcaaagtctcaggatacaaaatcaatgtacaaaaatcacaagcattcttatacaccaacaacagacaaacagagagccaaatcatgagtgaactcccattcacaattgcttcaaagagaataaaatacctaggaatccaacttacaagggatgtgaaggacctcttcaaggagaactacaaaccactgctcaaggaaataaaagaggacacaaacaaatggaagaacattccatgctcatgggtaggaagaatcaatatcgtgaaaatggccatactgcccaaggtaatttacagattcaatgccatccccatcaagctaccaatgactttcttcacagaattggaaaaaactactttaaagttcatatggaaccaaaaaagagcccgcatcgccaagtcaatcctaagccaaaagaacaaagctggaggcatcacactacctgacttcaaactatactacaaggctacagtaaccaaaacagcatggtactggtaccaaaacagagatatagatcaatgcaacagaacagagccctcagaaataatgccgcatatctacaactatctgatctttgacaaacctgagagaaacaagcaatggggaaaggattccctatttaacaaatggtgctgggaaaactggctagccatatgtagaaagctgaaactggatcccttccttacaccttatacaaaaatcaattcaagatggattaaagatttaaacgttagacctaaaaccataaaaaccctagaagaaaacctaggcattaccattcaggacataggcgtgggcaaggacttcatgtccaaaacaccaaaagcaatggcaacaaaagacaaaattgacaaatgggatctaattaaactaaagagcttctgcacagcaaaagaaactaccatcagagtgaacaggcaacctacaacatgggagaaaattttcgcaacctactcatctgacaaagggctaatatccagaatctacaatgaactcaaacaaatttacaagaaaaaaacaaacaaccccatcaaaaagtgggcgaaggacatgaacagacacttctcaaaagaagacatttatgcagccaaaaaacacatgaagaaatgctcatcatcactggccatcagagaaaggcaaatcaaaaccactatgagatatcatctcacaccagttagaatggcaatcattaaaaagtcaggaaacaacagggacatggatgaaattggaaaccatcattctcagtaa

SEQ ID NO: 116377 - DNA, 2562 bp, Homo sapiens
atgaaggcagaaataaagacgttctttgaaaccaacgagaacaaagacacaacataccagaatctctgggatgcattcaaagcagtgtgtagagggaaatttatagcactaaatgcccacaagagaaagcaggaaagatccaaaattgacaccctaacatcacaattaaaagaactagaaaagcaagagcaaacacattcaaaagctagcagaaagcaagaaataactaaaatcagagcagaactgaaggaaatagagacacaaaacacccttcaaaaaattaatgaatccaggagctggttttttgaaaggatcaacaaaattgatagaccgctagcaagactaataaagaagaaaagagagaagaatcaaatagacactataaaaaatgataaaggggatatcaccacccatcccacagaaatacaaactaccatcagagaatactacaaacacctctacacaaataaactagaaaatctagaagaaatggataaattccttgacacatacactctcccaagactaaaccaggaagaagttgaatctctgaatagaccaataacaggagctgaaattctggcaataatcaatagtttaccaaccaaaaagagtccaggaccagatggattcacagccgaattctaccagaggtacaaggaggaactggtaccattccttctgaaactattccaatcaatagaaaaagagggaatcctccctaactcattttatgaggccagcatcattctgataccaaagccaggcagagacacaaccaaaaaagagaattttagaccaatatccttgatgaacattgatgcaaaaatcctcaataaaatactggcaaaccgaatccagcagcacatcaaaaagcttatccaccatgatcaagtgggcttcatccctgggatgcaaggctggttcaatatacgcaaatcaataaatgtaatccagcatataaacagagccaaagacaaaaaccacatgattatctcaatagatgcaggaaaagcctttgacaaaattcaacaatccttcatgctaaaagctctcaataaattagatattgatgggacggcaattaggcaggagaaggaaataaagggtattcaattaggaaaagaggaagtcaaattgtccctgtttgcagacgacatgattgtatatctagaaaaccccattgtctcagcccaaaatctccttaagctgataagcaacttcagcaaagtctcaggatacaaaatcaatgtgcaaaaatcacaagcattcttatacaccaacaacagacaaacagagagccaaatcatgagtgaactcccattcacaattgcttcaaagagaataaaatacttaggaatccaacttacaagggatgtgaaggacctcttcaaggagaactacaaaccactgctcaaggaaataaaagaggatataaacaaatggaagaacattccatgctcatgggtaggaagaatcaatatcgtgaaaatggccatactgcccaagaattggaaaaaaactactttaaagttcatatggaatcaaaaaagagcccgcatcaccaaggcaatcctaagccaaaagaacaaagctggaggcatcacactacctgacttcaaactatactacaaggctacagtaaccaaaacagcatggtactggtaccaaaacagagatatagatcaatggaacagaacagagccctcagaaataatgccacatatctgcaactatctgatctttgacaaacctgagaaaaacaagcaatggggaaaggattccctatttaataaatggtgctgggaaaactggctagccatatgtagaaagctgaaactggatcccttccttacaccctatacaaaaatcaattcaagatggattaaagacttaaacattagacctaaaaccataaaaaccctagaagaaaacctaggcattaccattcgggacataggcatgggcaaggacttcatgtccaaaacaccaaaagcattggcaacaaaagccaaaattgacaaatgggatctaattaaactaaagagcttctgcacagcaaaagaaactaccattagagtgaacaggcaacctacaaaatgggagaagattttcgcaacctactcatctgacaaagggctaatatccagaatctacaatgaactcaaacaaatttacaagaaaaaaacaaacaaccccatcaaaaagtgggtgaaggacatgaacagacacttctcaaaagaagacatttatgcagccaaaaaacacatgaaaaaatgctcatcatcactggccatcagagaaatgcaaatcaaaaccacacttcccactgggcggttaatagaaacattccaaagcaatgagcaccagtcagaagtaaagctcttaaaacaggacaagaagaaatgggtgggaagctggaatgagaacattcatcagcagctcaaagcacagacttctaagggaatctttcctcaccctctgcctctttgttgtgtcatgatttccaatggttctcaaagtgtggcctgcaaaatcttgtggttctccaataccccttag

SEQ ID NO: 116378 - DNA, 2835 bp, Homo sapiens
atgcaccaagcggacctaatagacatctacagaactctccaccccaaatcaacagaatatacatttttttcagcaccacatcacacctattccaaaattgaccacatagttggaagtaaagctctcctcagcaaatgtaatagaacagaaattataacaaactgtctctcagaccacagtgcaatcaaactagaactcaggatcaagaatctcactcaaagccgctcaactacatggaaactgaacaacctgctcctgaatgactactgggtacataacgaaatgaaggcagaaataaagatgttctttgaaaccaacgagaacaaagacacaacataccagaatctctgggacgcattcaaagcagtgtgtagagggaaatttatagcactaaatgcccacaagagaaagcaggaaagatccaaaattgacaccctaacatcacaattaaaagaactagaaaagcaagagcaaacacattcaaaagctagcagaaggcaagaaataactaaaatcagagcagaactgaaggaaatagagacacaaaaaacccttcaaaaaatcaatgaatccaggagctggttttttgaaaggatcaacaaaattgatagaccgctagcaagactaataaagaaaaaaagagagaagaatcaaatagacacaataaaaaatgataaaggggatatcaccaccaatcccacagaaatacaaactaccatcagagaatactacaaacacctctacgcaaataaactagaaaatctagaagaaatggatacattcctcgacacatacactctcccaagactaaaccaggaagaagttgaatctctgaatagaccaataacaggagctgaaattgtggcaataatcaatagtttaccaaccaaaaagagtccaggaccagatggattcacagccgaattctaccagaggtacaaggaggaactggtaccattccttctgaaactattccaatcaatagaaaaagagggaatcctccctaactcattttatgaggccagcatcattctgacaccaaagccgggcagagacacaaccaaaaaagagaattttagaccaatatccttgatgaacattgatgcaaaaatcctcaataaaatactggcaaaccgaatccagcagcacatcaaaaagcttatcccccatgatcaaagccaaagacaaaagcacatgattatctcaatagatgcagaaaaagcctttgacaaaattcaacaacacttcatgctaaaaactctcaataaattaggtattgatgggacatatttcaaaataataagagctatctatgacaaacccacagccaatatcatactgaatgggcaaaaactggaagcattccctttgaaaactggcacaagacagggatgccctctctcaccgctcctattcaacatagtgttggaagttctggccagggcaatcaggcgggagaaggaaataaagggtattcaattaggaaaagaggaagtcaaattgtccctgtttgcagacgacatgattgtttatctagaaaaccccatcgtctcagcccaaaatctccttaagctgataagcaacttcagcaaagtctcaggatataaaatcaatgtacaaaaatcacaagcattcttatacaccaacaacagacaaacagagagccaaatcatgagtgaactcccagtcacaattgcttcaaagagaataaaatacctaggaatccaacttacaagggatgtgaaggacctcttcaaggagaactacaaaccactgctcaaggaaataaaagaggatacaaacaaatggaagaacattccatgctcatgggtaggaagaatcaatatcgtgaaaatggccatactgcccaaggtaatttacagattcaatgccatccccatcaagctaccaatgactttcttcacagaattggaaaaaactactttaaagttcatatggaaccaaaaaagagcccgcatcgccaagtcaatcctaagccaaaagaacaaaactggaggcatcacactacctgacttcaaactatactacaaggctacagtaaccaaaacagcatggtactggtaccaaaacagagatatagatcaatggaacagaacagagccctcagaaataacaccccatatctacaactatctgatctttgacaaacgtgagaaaaacaagcaatggggaaaggattccctatttaataaatggtgctgggaaaactggctagccatatgtagaaagctgaaactggatcccttccttacaccttatacaaaaatcaattcaagatggattaaagatttaaacgttagacctaaaaccataaaaaccctagaagaaaacctaggcattaccattcaggacataggcgtgggcaaggacttcatgtccaaaacaccaaaagcaatggcaacaaaagccaaaattgacaaatgggatctaattaaactgaagagcttctgcacagcaaaagaaactaccatcagagtgaacaggcaacctacaacgtgggagaaaattttcgcaacctactcatctgacaaagggctaatatccagaatctacaatgaactcaaacaaatttacaagaaaaaaacaaacaaccccatcaaaaagtgggcgaaggacatgaacagacagttttcaaaagaagacatttatgcagccaaaaaacacatgaaaaaatgctcatcatcactggccatcagagaaatgcaaatcaaaaccactatgagatatcatctcacaccagttagaatggcaatcattaaaaagtcaggaaacaacagggacatggatgaaattggaaaccatcattctcagtaa

SEQ ID NO: 116379 - DNA, 2241 bp, Homo sapiens
atggaagatgaaatgaatgaaatgaagcaagaagagaagtttagagaaaaaagaataaaaagaaatgagcaaaccctccaagaaatatgggactatgtgaaaagaccaaatctacatctgattggtgtacctgaaagtgatggggagaatggaaccaagttggaaaacactctgcaggatattatccaggagaacttccccaatctagcaaggcaggccaacgttcagattcaggaaatacagagaatgccacaaagatactcctcgagaagagcaactccaagacacataattgtcagattcaccaaagttgaaatgaaggaaaaaatgttaagggcagccagagagaaagacagatcaatgagacaaaaagtcaacaaggatacccaggaattgaactcagctctgcaccaagcggacctaatagacatctacagaactctccaccccaaatcaacagaatatacatttttttcagcaccacaccacacctataccaaaattgaccacatacttggaagtaaagctctcctccgcaaatgtaaaagaacagagattataacaaactatctctcagaccacagtgcaatcaaactagaactcaggattaagaatctcactcaaaaccgctcaactacatggaaactgaacaacctgcttctgaatgactactgggtacataacaaaatgaaggcagaaataaagatgttctttgaaaccaacgagaacaaagacacaacataccagaatctctgggacgcattcaaagcaaaatacaaactaccatcaaggaatactacaaacacctctatgcaaataaactcgaaaatctggaagaaatggataaattcctggacacataacactctcccaagactaaaccaggaagaagttgaatctctgaatagaccaataacaggagctgaaattgtggcaataatcaatagtttaccaaccaaaaagagtccaggaccagatggattcacagccgaattctaccagaggtacaaggaggaactggtaccattccttctgaaactattccaatcaatagaaaaacagggaatcctccctaactcattttatgaggccagcaccattctgataccaaagccgggcagagacacaaccgaaaaagagaattttagaccaatatccttgatgaacattgatgcaaaaatcctcaataaaatactggcaaaacgaatccagcagcacatcaaaaagcttatccaccatgatcaagtgggcttcatccctgggatgcaaggctggttcaatatacacaaatcaataaatgtaatccagcatataaacagagccaaagacaaaaaccacatgattatctcaatagatgcagaaaaagcctttgacaaaattcaacaacgcttcatgctaaaaactctcaataaattaggtattgatgggacgtatttcaaaataataagagctatctatgacaaacccacagccaatatcatactgaatgggcaaaaactggaagcaatccctttgaaagctggcacaagacagggatgtcctctctcaccactcctattcaacatagtgttggaagttctggccagggtaattaggcaggagaaggaaataaagggtattcaattaggaaaagaggaagtcaaattgtccctgtttgcagatgacatgattgtatatctagaaaaccccattgtcacagcccaaaatctccttaagctgataagcaacttcagcaaagtctcaggatacaaaatcaatgtacaaaaatcacaagcattcttatacaccaacaacagacaaacagagagccaaatcatgagtgaactcccattcacaattgcttcaaagagaataaaatacctaggaatccaacttacaagggatgtgaaggacctcttcaaggagaactacaaaccactgctcaaggaaataaaagaggatacaaacaaatggaagaacattccatgctcatgggtaggaagaatcaatatcatgaaaatggccatactgcccaaggtaatttacagattcaatgccatccccatcaagctaccaatgactttcttcacagaattggaaaaaactaaagttcatatggaaccaaaaaagtgcccacatcaccaagggaatcctaagccaaaagaacaaagctggaggcatcacactacctgacttcaaactatactacaaggctacagtaaccaaaacagcatggtactggtaccaaaacagagatataga

SEQ ID NO: 116380 - DNA, 2568 bp, Homo sapiens
ctttgaaaccaatgagaacaaagacacaacataccagaatctctgggacacattcaaaacagtgtgtagagggaaatttatagcactaaatgcccacaagagaaagcaggaaagatccaacatcgacaccctaacatcacaattaaaagaactagaaaagcaagagcaaacacattcaaaagctagcagaaggcaagaagtaactaaaataagagcagaactgaaggaaatagagacaccaaaaacccttcaaaaaatcaatgaatccaggagctggttttttgaaaggatcaacaaaattgatagactgctagcaagacaaataaagaaaaaaagagagaagaatcaaagagacgcaataaaaaatgataaaggggatatcaccaccgatcccacagaaatacaaagtaccatcagagaatactacaaacacctctacgcaaataaactagaaaatctagaagaaatggataaattcctcgacacatacactctcccaagactaaaccaggaaaaagttgaatctctgaatagaccaataacaggctctgaaattatggcaataatcaatagcttaccaaccaaaaagagtccaggaccagatggattcacagccgaattctaccagaggtaaaaggaggaactggtaccataaaccacgattatctcaatagatgcagaaaaggcctttgacaaaattcaacagcccttcaagctaaaaactctcaataaattaggtattgatgggatgtatcgcaaaataataagagctatctatgacaaacccacagccaatatcatactgaatgggcaaaaactggaagcattccctttgaaaactggcacaagacagggatgccctctctcaccactcctattcaacatagtgttggaagtgctggccagcgcaattaggcaggagaaggaaataaagggtattcaattaggaaacgaggaagtcaaattgtccctgtttgcagatgacatgactgtatatctagaaaaccccattgtctcagcccaaaatgtccttaaggtgataagcaacttcagcaaagtctcaggatacaaaatcaatgtgcaaaaatcacaagcattcttatacaccaacaacagacaaacagagagccaaatcatgagtgaactcccattcacaattgcttcaaagagaataaaatacctaggaatccagcttacaaggaatgtgaaggacctcttccaggagaactacaaaccactgctcaaggaaataaaagaggatacaaacaaatggaagaacattccatgctcatgggtaggaagaatcaatatcgtgaaaatggccatactgcccaaggtaatttacagattcaatgccatccccatcaagctaccaatgactttcttcacagaattggaaaaaactactttaaagttcatatggaaccaaaaaagagcccgcattgccaagtcaatcctaagccaaaagaacaaagctggaggcatcacactacctgacttcaaactatgctacaaggctacagtaaccaaaacagcatggtactggtaccaaaacagagatatagatcaatggaacagaacagagccctcagaaataacgccacatatctacaactatctgatctttgacaaacctgacaaaaacaagaaatggggaaacgattccctatttaataaatggtgctgggaaaactggctagccatatgtagaaagctgaaactggatcccttccttacaccttatacaaaaatcaattcaagatggattaaagacttaaatgttagacctaaaaccataaaaaccctagaagaaaacctaggcattaccattcaggacataggcacgggcaaggacttcatgtctaaaacaccaaaagcaatggcaacaaaagccaaaattgacaaatgggatctaattaaactaaagagcttctgcacagcaaaagaaactaccatcagagtgaacaggcaacctaccaaatgggagaaaattttcacaacctactcatctgacaaagggctaatatccagaatctacaatgaactccaacaaatttacaagaaaaaaacaaacaaccccatcaaaaagtgggcgaaggacatgaaaagacacttctcaaaagaagacatttatgcagccaaaaaacacatgaaaaaatgctcaccatcactggccatcagagaaatgcaaatcaaaaccacaatgagataccatctcacaccagttagaatggtgatcattaaaaagtcaggaaatgaaaaggtgggagatgagaaagcttcggtccctggattgctacttagtcacccatggtatgaaactacagctgtgctgccattagataccaaaggtaaatgttaccagtggaatttaatggtcaggcgtaaggataatgcaaatctggccagtttactaaagagatacccacaagggacacagctctatggacacctgaaggatgcattaaagcagaacatgtcgacacccatcagaactcctttccatgttcataaggtgattacaatcaacaagcaaatttcctaagtaattgcttaacatggccacct

SEQ ID NO: 116381 - DNA, 2709 bp, Homo sapiens
atggggaaaaaacagaacagaaaaactggaaactctaaaaagcagagtgcctctcctcctccaaaggaatgcagttcctcaccagcaacggaacaaagctggacggagaatgactttgacgagctgagagaagaaggcttcagacgatcaaattactctgagctatgggaggacattcaaaccaaaggcaaagaagttgaaaactttgaaaaaaatttagaagaatgtataactagaataaccaatacagagaagtgcttaaaggagctgatggagctgaagaccaaggctcgagaactacgtgaagaatgtagaagcctcaggagccgatgcgatcaactggaagaaagggtatcagcaatggaagatgaaatgaatgaaatgaagcgagaagggaagtttagagaaaaaagaataaaaagaaatgagcaaagcctccaagaaatatgggactatgtgaaaagaccaaatctacgtctgattggtgtacctgaaagtgatgtggagaatggaaccaagttggaaaacactctgcaggatattatccaggagaacttccccaatctagcaaggcaggccaacgttcagattcaggaaatacagagaacgccacaaagatactcctcgagaagagcaactccaagacacataattgtcagattcaccaaagttgaaatgaaggaaaaaatgttaagggcagccagagagaaagaaatacaaactaccatcagagaatactacaaacacctctacgcaaataaactagaaaatctagaagaaatggatacattcctcgacacatacactctcccaagactaaaccaggaagaagttgaatctctgaatagaccaataacaggctctgaaattgtggcaataatcaatagtttaccaaccaaaaagagtccaggaccagatggattcacagccgaattctaccagaggtacaaggaggaactggtaccattccttctgaaactattccaatcaatagaaaaagagggaatcctccctaactcattttatgaggccagcatcattctgataccaaagccgggcagagacacaaccaaaaaagagaattttagaccaatatccttgatgaacattgatgcaaaaatcctcaataaaatactggcaaaccgaatccagcagcacatcaaaaagcttatccaccatgatcaagtgggcttcatccctgggatgcaaggctggttcaatatacgcaaatcaataaatgtaatccagcatataaacagagccaaagacaaaaaccacatgattatctcaatagatgcagaaaaagcctttgacaaaattcaacaacccttcatgctaaaaactctcaataaattaggtattgatgggacgtatttcaaaataataagagctatctatgacaaacccacagccaatatcatactgaatgggcaaaaactggaagcattccctttgaaaactggcacaagacagggatgccctctctcaccgctcctattcaacatagtattggaagttctggccagggcaatcaggcaggagaaggaaataaagggtattcaattaggaaaagaggaagtcaaattgtccctgtttgcagacgacatgattgtttatctagaaaaccccatcgtctcagcccaaaatctccttaagctgataagcaacttcagcaaagtctcaggatacaaaatcaatgtacaaaaatcacaagcattcttatacaccaacaacagacaaacagagagccaaatcatgggtgaactcccattcacaattgcttcaaagagaataaaatacctaggaatccaacttataagggatgtgaaggacctcttcaaggagaactacaaaccactgctcaaggaaataaaagaggacacaaacaaatggaagaacattccatgctcatgggtaggaagaatcaatatcgtgaaaatggccatactgcccaaggtaatttataggttcaatgccatccccatcaagctaccaatgactttcttcacagaattggaaaaaactactttaaagttcatatggaaccaaaaaagagcctgcatcgccaagtcaatcctaagccaaaagaacaaagctggaggcatcacactacctgacttcaaactatacgacaaggctacagtaaccaaaacagcacggtactggtaccaaaacagagatatagatcaatggaacagaacagagccctcagaaataacgccacatatctacaactatctgatctttgacaaacctgagaaaaacaagcaatggggaaaggattccctatttaataaatggtgctgggaaaactggctggccatatgtagaaagctgaaactggatcccttccttacaccttatacaaaaatcaattcaagatggattaaagacttaaatgttagacctaaaaccataaaaaccctagaagaaaacctaggcattaccattcaggacataggcatgggcaaggacttcatgtctaaaacaccaaaagcaatggcaacaaaagccaaaattgacaaatgggatctaattaaactaaagagcttctgcacagcaaaagaaactaccatcagagtgaacaggaagctactggaggatgtacttcagcaacatgagggagaaagagcaagacatggatttcaaaaagcaggaacttcaacacatgaggacaatgaagggaaatccagattgacagctatgtag

SEQ ID NO: 116382 - DNA, 2478 bp, Homo sapiens
atgaaggcagaaataaagatgttctttgaaaccaacgagaacaaagacacagcataccagaatctctgggacgcattcaaagcagtgtgtagagggaaatgtatagcactaaatgcccacaagagaaagcaggaaagatccaaaattgacaccctaacatcacaattaaaagtactagaaaagcaagagcaaacacattcaaaagctagcagaaggcaagaaataactaaaatcagagcagaactgaaggaaatagagacacaaaaaacacttcaaaaaatcaatgaatccaggagctgtttttttgaaagcatcaacaaaattgatagaccactagcaagactaataaagaaaaaaagagagaagaatcaaatagacacaataaaaaatgataaaggggatatcaccaccgatcccacagacatacaaactaccatcagagaatactacaaacacctctacgcaaataaactagaaaatctagaagaaatggataaattcctcgacacatacactctcccaagactaaaccaggaagaagttgaatctctgaatagaccaataacaggagctgaaattgtggcaataatcaatagtttaccaaccaaaaagagtccaggaccagatggattcacagccgaattctaccagaggtacaaggaggaactggtaccattccttctgaaactattccaatcaatagaaaaagagggaatcctccctaactcattttatgaggccagcatcattctgataccaaagccgggtagagacacaaccaaaaaagagaattttagaccaatatccttgatgaacattgatgcaaaaatcctcaataaaatactggcaaaccgaatccagcagcacatcaaaaagcttatccaccatgatcaagtgggcttcatctctgggatgcaaggctggttcaatatacgcaaatcaataaatgtaatccagcatataaacagagccaaagacaaaaaccacatgattatctcaatagatgcagaaaaagcctttgacaaaattcaacaacccttcatgctaaaaactctcaataaattagtgttggaagttctggccagggcaatcaggcaggagaaggaaataaagggtattcaattaggaaaagaggaagtcaaattgtccctgtttgcagacgacatgattgtttatctagaaaagcccatcgtctcagcccaaaatctccttaagctgataagcaacttcagcatagtctcaggatacaaaatcaatgtacaaaaatcacaagcattcttatacaccaacaacagacaaacagagagccaaatcatgagtgaactcccattcacaattgcttcaaagagaataaaatacctaggaatccaacttacaagggatgtgaaggacctcttcaaggagaactacaaaccactgctcaaggaaataaaagaggacacaaacaaatggaagaacattccatgctcatgggtaggaagaatcaatgtcatgaaaatggccatactgcccaaggtaatttacagattcaatgccatccccatcaagctaccaatgactttcttcacagaattggaaaaaactactttaaagttcatatggaaccaaaaaagagcccgcatcgccaagtcaatcctaagccaaaagaacaaagctggaggcatcacactacctgacttcaaactatactacaagtctacagtaaccaaaacagcatggtactggtaccaaaacagagatatagatcaatggaacagaacagagccctcagaaataacgccacatacctacaactatctgatctttgacaaacctgagaaaaacaagcaatggggaaaggattccctatttaataaatggtgctgggaaaactggctagccatatgtagaaagctgaaactggatcccttccttacaccttatagaaaaatcaattcaagatggattaaagatttaaacgttagacctaaaaccataaaaaccctagaagaaaacctaggcattaccattcaggacataggcgtgggcaaggacttcatgtccaaaacaccaaaagcaatggcaaccaaagccaaaattgacaaatgggatctaattaaactaaagagcttctgcacagcaaaagaaactaccatcagagtgaacaggcaacctacaaaatgggagaacattttcgcaacctactcatctgacaaagggctaatatccagaatctacaatgaactcaaacaaatttacaagaaaaaaacaaacaaccccatcaaaaagtgggtgaaggacatgaacagacacttctcaaaagaagacatttatgcagccaaaaaatacatgaaaaaatgctcatcatcactggccatcagagaaatgcaaatcaaaaccactatgagatatcatctcacaccagttagaatggcaatcattaaaaagtcaggaaacaacaggtgctggagaggatgtggagaaataggaacactttga

SEQ ID NO: 116383 - DNA, 2748 bp, Homo sapiens
atgggagactttaacaccccactgtcaacattagacagatcaacgagacagaaagtcaacaaggatacccaggaattgaactcagctctgcaccaagcggacctaatagacatctacagaactctccaccccaaatcaacagaatatacatttttttcagcaccacaccacacctattccaaaattgaccacatagttggaagtaaagctctcctcagcaaatgtaaaagaacagaaattataacaaactatctctcagaccacagtgcaatcaaactagaactcaggattaagaatctcactcaaagccactcaactacatggaaactgaacaacctgctcctgaatgactactgggtacataacgaaatgaagtcagaaataaagatgttctttgaaaccaacgagaacaaagacacaacataccagaatctctgggatgcattcaaagcagtgtgtagagggaaatttatagcactaaatgcccacaagagaaagcaggaaagatccaaaattgacaccctaacatcacaattaaaagaactagaaaagcaagagcaaacacattcaaaagctagcagaaggcaagaaataactaaaatcagagcagaactgaaggaaatagagacacaaaaaacccttcaaaaaatcaatgaatccaggagctggttttttgaaaggatcaacaaaattgatagaccactagcaagactaataaagaaaaaaagagagaagaatcaaatagacacaataaaaaatgataaaggggatatcaccaccgatcccacagaaatacaaactaccatcagagaatactacaaacacctctacgcaaataaactagaaaatctagaagaaatggataaattcctcgacacatacactctcccaagactaaaccaggaagaagttgaatctcttaatagaccaataacaggagctgaaattgtggcaataatcaatagcttaccaaccaaaaagagtccaggaccagatggattcacagccgaattctaccagaggtacaaggaggaactggtaccattccttctgaaactattccaatcaatagaaaaagagggaatcctccctaactcattttatgaggccagcatcattctgataccaaagccgggcagagacacaacaaaaaaagagaattttagaccaatatccttgatgaacactgatgcaaaaatcctcaataaaatactggcaaaccgaatccagcagcacatcaaaaagcttatccaccatgatcaagtgggcttcatccctgggatgcaaggctggttcaatatacgcaaatcaataaatgtaatccagcacataaacagaaccaaagacaaaaaccacatgattatctcaatagatgcagaaaaagcctttgacaaaattcaacaacccttcatgctaaaaactctcaataaattagaattggaaaaaactactttaaacttcatatggaaccaaaaaagagcccgcattgccaagtcaatcctaagccaaaagaacaaagctggaggcatcacactacctgacttcaaactttactacaaggctacagtaaccaaaacagcatggtattggtaccaaaacagagatatagatcaatggaacagaacagagccctcagaaataacaccgcatacctacaactgtctgatctttgacaaacctgagaaaaacaagaaatggggaaaggattccctatttaataaatggtgctgggaaaactggctagccatatgtagaaagctgaaactggatcccttccttacaccttatacaaaaatcaattcaagatggattaaagatttaaacgttagacctaaaaccataaaaaccctagaagaaaacctaggcattaccattcaggacataggcatgggcaaggacttcatgtccaaaacaccaaaagcaatggcaacaaaagacaaaattgacaaatgggatctaattaaactaaagagcttctgcacagcaaaagaaactaccatcagagtgaacaggcaacctacaacatgggagaaaattttcgcaacctactcatctgacaaagggctaatatccagaatctacaatgaactcaaccaaatttacaagaaaaaaacaaacaaccccatcaaaaagtgggcgaaggacatgaacagacacttctcaaaagaagacatttatgcagccaaaaaacacatgaaaaaatgctcatcatcactggccatcagagaaatgcaaatcaaaaccacaatgagataccatctcacaccagttagaatggcaatcattaaaaagtcaggaaacaacaggtgctggagaggatgtggagaaatacgaacacttttacattgttggtgggactgtaaactagttcaaccattgtggaagtcagtgtggcgattcctcagggatctagaactagaaataccatttgacccagccatcccattactgggtatatacccaaatgactataaatcatgctgctataaagacacatgcacacgtatgtttattgcggcattattcacaatagcaaagacttggaaccaacccaaatgtccaacaatgatagactggattaagaaaatgtggcacatatacaccatggaatactatgcagccataaaaaatgatgagttcatgtcctttgtagggacatggatgaaattggaaatcatcattctcagtaaactatcacaagaacaaaaaaccaaacaccgcatattctcactcataggtgggaattga

SEQ ID NO: 116384 - DNA, 5984 bp, Homo sapiens
cctccggtctacagctcccagcgtgagcgacgcagaagacgggtgatttctgcatttccatctgaggtaccgggttcatctcactagggagtgccagacagtgggcgcaggccagtgggtgcgcgcaccgtgcggagccgaagcagggcgaggcattgcctcacctgggaagcgcaaggggtcagggagttccctttccgagtcaaagaaaggggtgacggacgcacctggaaaatcgggtcactcccacccgaatattgcgcttttcagaccggcttaaaaaacggcgcaccacgagactatatcccacacctggccttcggagggtcctacgcccacggaatctcgctgattgctagcacagcggtctgagatcaaactgcaaggccgcagcaaggctgggggaggggcgcccgccattgcccaggcttgcttaggtaaacaaagcagccggggaagctcgaactgggtgcagcccaccacagctcaaggaggcctgcctgcctctgtaggctccacctctgggggcagggcacagacaaacaaaaagacagcagtaacctctgcagacttaaatgtccctgtctgacagctttgaagagagcagtggttctcccagcacgcagctggagatctgagaacgggcagactgcctcctcaagtgggtccctgacccctgacccccgagcagcctaactgggaggcaccccccagcaggggcacactgacacctcacacggcagggtattccaacagacctgcagctgagggtcctgtctgttagaaggaaaactaacaaacagaaaggacatccacaccgaaaacgcatctgtacatcaccatcatcaaagaccaaaagtagataaaaccacaaagatggggaaaaaacagaacagaaaaactggaaactctaaaacgcagagcacctctcctcctccaaaggaacgcagttcctcaccagcaacggaccaaagctggatggagaatgattttgacgagctgagagaagaaggcttcagacgctcaaattactctgagctacgggaggacattcaaaccaaaggcaaagaagttgaaaactttgaaaaaaatttagaagaatgtataactagaataaccaatacagagaagtgcttaaaggagctgatggagctgaaaaccaaggctcgagaactacgtgaagaatgcagaagcctcaggagccaatgcgatcaactggaagaaagggtatcagcaatggaagatgaaatgaatgaaatgaagcaagaagggaagtttagagaaaaaagaataaaaagaaacgagcaaagcctccaagaaatatgggactatgtgaaaagaccaaatctacgtctgattggtgtacctgaaagtgatgcggagaatggaaccaagttggaaaacactctgcaggatattatccaggagactttccccaatctagcaaggcaggccaacgttcagattcaggaaatacagagaacgccacaaagatactcctcgagaagagcaactccaagacacataattgtcagattcaccaaagttgaaatgaaggaaaaaatgttaagggcagccagagagaaaggtcgagttaccctcaaagggaagcccatcagactaacagcggatctctcggcagaaaccctacaagccagaagagagtgggggccaatattgaacattcttaaagaaaagaattttcaacccagaatttcatatccagccaaactaagcttcataagtgaaggagaaataaaatactttacagacaagcaaatgctgaccgattttgtcaccagcaggcctgccctaaaagagctcctgaaggaagcgctaaacatggaaaggaacaaccggtaccagccactgcaaaatcatgccaaaatgtaaagaccatcgagactaggaagaaactgcatcaactaacgagcaaaatcaccagctaacatcataatgacaggatcaaattcacacataacaatattaactttaaatgtaaatggactaaattctccaattaaaagacacagactggcaagttggataaagagtcaagacccatcagtgtgctgtattcaggaaacccatctcatgtgcagagacacacataggctcaaaataaaaggatggaggaagatctaccaagcaaatggaaaacaaaaaaaggcaggggttgcaatcctagtctctgataaaacagactttaaaccaacaaagatcaaaagagacaaagaaggccattacatgatggtaaagggatcaattcaacaagaggagctaactatcctaaatatgtatgcacccaatacaggagcacccagattcataaagcaagtcctgagtgacctacaaagagacttagactcccacacattaataatgggagactttaacaccccactgtcaacattagacagatcaacgagacagaaagtcaacaaggatacccaggaattgaactcagctctgcaccaagcagacctaatagacatctacagaactctccaccccaaatcaacagaatatacatttttttcagcaccacaccacagctattccaaaattgaccacatacttggaagtgaagctctcctcagcaaatgtaaaagaacagaaattataacaaactatctctcagaccacagtgcaatcaaactagaactcaggattaagaatctcactcaaagccgctcaactacatggaaactgaacaacctgctcctgaatgactactgggtacataacgaaatgaaggcagaaataaagatgttctttgaaaccaacgagaacaaagacacaacataccagaatctctaggacgcattcaaagcagtgtgtagagggaaatttatagcactaaatgcccacaagagaaagcaggaaagatccaaaattgacaccctaacatcacaattaaaagaactagaaaagcaagagcaaacacattcaaaagctagcagaaggcaagaaataactaaaatcagagcagaactgaaggaaatagagacacaaaaaacccttcaaaaaatcaatgaatccaggagctggttttttgaaaggatcaacaaaattgatagaccgctagcaagactaataaagaaaaaaagagagaagaatcaaatagacacaataaaaaatgataaaggggatatcaccaccgatcccacagaaatacaaactaccatcagagaatactacaaacacctctacgcaaataaactagaaaatctagaagaaatggatacattccttgacacatacactctcccaagactaaaccaggaagaagttgaatctctgaatagaccaataacaggagctgaaattgtggcaataatcaatagtttatcaaccaaaaagagtccaggaccagatggattcacagccgaattctaccagaggtacaaggaggaactggtaccattctttctgaaactattccaatcaatagaaaaagagggaatcctccctaactcattttatgaggccagcatcattctgataccaaagccgggcagagacacaaccaaaaaagagaattttagaccaatatccttgatgaacattgatgcaaaaatcctcaataaaatactggcaaaccaaatccagcagcacatcaaaaagcttatccaccatgatcaagtgggcttcatccctgggatgcaaggctggttcaatatacgcaaatcaataaatgtaatccagcatataaacagagccaaagacaaaaaccacatgattgtctcaatagatgcagaaaaagcctttgacaaaattcaacaacccttcatgctaaaaactatcaataaaataggtattgatgggatgtatttcaaaataataagagctatctatgacaaaaccacagccaatatcatactgaatgggcaaaaactggaagcattccctttgaaaaccggcacaagacagggatgccctctctcaccgctcctattcaacatagtgttggaatttctggccagggcaatcaggcaggagaaggaaataaagggtattcaattaggaaaagaggaagtcaaattgtccctgtttgcagatgacatgattgttgatctagaaaaccccatcgtctcagcccaaaatctccttaagctgataagcaacttcagcaaagtctcaggatacaaaatcaatgtacaaaaatcacaagcattcttatacaccaataacagacaaacagagagccaaatcatgagtgaactcccattcacaattgcttcaaagcgaataaaatacctaggaatccaacttacaagggatgtgaaggacctcttcaaggagaactacaaaccactgctcaatgaaataaaagaggatacaaacaaatggaagaacattccatgctcatgggtaggaagaatcaatatcatgaaaatggccatactgcccaaggtaatttatagattcaatgccatccccatcaagctaccaatgactttcttcacagaattggaaaaaactactttaaagttttcatatgggaaccaaaaaaagagcccgcatcgccaagtcaatcctaagccaaaagaacaaagctggaggcatcacactacctgacttcaaactatactacaaggctacagtaaccaaaacagcatggtactggtaccaaaacaaagatatagatgaatggaacagaacagagccctcagaaataacgccgcatatctacaactatctgatctttgacaaacctgagaaaaaacaagcaatggggaaaggattccctatttaataaatggtgctgggaaaactggctagccatatgtagaaagctgaaactggatcccttccttacaccttatacaaaaattaattcaagatggattaaagacttaaacgttagacctaaaaccataaaaaccctagaagaaaacctaggcaataccattcaggacataggcatgggcaaggacttcatgtctaaaacaccaaaagcaatggcaacaaaagccaaaattgacaaatgggatctaattaaactaaagagcttctgcacagcaaaagaaactaccatcagagtgaacaggcaacctacacaatgggagaaaattttcgcaacctactcatctgacaaagagctaatatccagaatctacaatgaactccaacaaatttacaagaaaaaaaacaaacaaccccatcaaaaagtgggcgaaggacatgaacagacacttctcaaaagaagacatttatgcagccgaaaaaacacatgaaaaaatgctcaccatcactggccatcaagagaaatgcaaatcaaaaccactatgagatatcatctcacaccagttagaatggcaatcattaaaaagtcaggaaacaacaggtgctggagaggatgtggagaaataggaacacttttacactgttggtgggactgtaaactagttcaaccattgtggaagtcagtgtggcgattccttagggatctagaactagaaataccatttgacccagccatcccattactgggtatatacccaaatgactataaatcatgctgctataaagacacatgcacacgtatgtttattgcggcattattcacaatagcaaagacttggaaccaacccaaatgtccaacaatgatagactggattaagaaaatgtggcacatatacaccatggaatactatgcagccataaaaaatgatgagttcatgtcctttgtagggacatggatgaaattggaaaccatcattctcagtaaactatcgcaagaacaaaaaaccaaacaccgcatattctcactcataggtgggaattgaacaatgagatcacatggacacaggaaggggaatatcacactctggggactatggtggggaggggggaggggggagggatagcattgggagatatacctaatgctagatgacgagttagtggtgcagtgcaccagcatggcacatgtatacatatgtaactaacctgcacaatgtgcacatgtaccctaaaac

SEQ ID NO: 116385 - DNA, 2927 bp, Homo sapiens
  misc_feature (1)...(2927): n = a,t,c or g
atggcgtccatggcggcggcgatcgcggcttcgcgctcggcggtcatgagcaggaaccggcctctgcacgaccgggagcgaaagcgcttcacttacttctcgtcgctgagccccatggccaggaagatcatgcaggacaaggagaagatccgcgagaagtacgggcccgagtgggcgcggctgccgcccgcgcagcaggacgagatcatcgaccggtgcctggtggggccgcgcgccccggcgccccgagaccccggggactcggaggagctcacgcgcttccccggcttgcgcgggcccacgggccagaaggtggtgcgcttcggggacgagccacccaaccccattttgtggagaatctggagctgctgctggaagaacgcttctcaaccagcaaaaggagaggagccggtggagccccatgtcctggattcttgtcctggccatgccagcagcaaggtgccacccctcttaaggggtagtttgcctctctgtgaagtctggtggcagaaccaatggctcacagagtttctttccaactcgctggtctggcttggagcaggcccagacactggggccgtgcactttgggtccagtattttggacttaaaggcttataagatcttcattggagagccacaaacaggaggtggctttagtgaagcgcccctgaagcagcccaggaaccactgtgactggcgtttccccccagcatccctggctctgcccactgctgccctccacagtcagatggagttcagtatctccgccctatccatccaggagccgagcaacggcaccgccgccagcgagcccagaccactgtccaaagcttcccagggctcccaggccctcaagtcctcccaaggcagcaggtcctccagcctggacgccctgggccccaccaggaaggaggaggaagcgtcattctggaagatcaatgctgagcggtcccgaggggaggggcctgaggcgaaggttccagtcgctgacccctagccagatcaagtccatggagaaggggggaaaagggtcttgcctccctgctaccgggcaggaacctgccccgaaggaccaggggaggccaaggtggaaaggcccagcaccctccgtcaggagcagcgtcctcttcccaacgtgagcaccgaacgtgagagaccccagcctgtccaggccttcagcagtgtactgcacgaggctgccccctcccagctcgaggggaagctgccatctcctgatgtcaggcaggacgatggggaagacaccctgttctcggaacccaagtttgcacaggtcagctcaagtaatgtcgtcttgaagacgggatttgattttctggacaattggtaaaatgtattagaaaaatacaatgaagaaccctaaaatgttttccaaagtggtgtggtggaggaggataaaaagggccaccttttcctatgtattttactggtttcttgacactcttttcttaatcatttggaaactggtcaatactgccagatttttttcttttttggtagaaccagatatatatgctattttcagtgatttgataacagaagttttccatttggaatttttaaggtctgttaaataattcaggagatcttgtaaataaaacttctgttcccaagctccacccaactttccccctcctcaaagggatgtgtttcaaccatgtcacaaaaatccatataagggatttccatctccttcttccattattccccttcccccctccgctttttaccgtaatgggttccttttggtgggtgattgagggtgatgttatcagccatgacatcagcatgctgggctgtgaccccggaaagactggcccccagcgacgttctcagccagcgctcgcagctgtccggggcttctctgggcagaagccatgtctctcacatcaatgtgcccagcctccaccctcaacgccatttccaggggaacagactgcgggtatgtaggcagtgtagtcttttaacctgctctggattacatatttcagagtatgggattgttgtttaaaaagagttgtatgtttaaaagaagttttgtactaagcttttcaattattttgtatctagattatcaacaatgggggctaccactttccttggttttatatccatttcctcttgggaagttcttgttgcttatgtgacctgttggttggttncccggactgggcacctgcaggagtcagggcagacgggcagatgttggctggaggtcagggctcttctgcttagttgtgttagagtcttccagcatgggactgatgggagcagtgggcattctttatcccaagggctagccaggttgcgtcatgacggaccttccccagccctgaccaccaccagaagtggaagagtggagtttgcggtcaactcagcagtgcccatggagacctgcgtggtgtcagagcagcagcatctcttggagctggtgcagacaccaaggctgcccagtggtacaacgtggtccacctcccctagggaagctgctgcactcagaggctgtcctgcccagtggcccctgagccgtgtgagcctgcaggaggcgtctgagcagagcctcaagcccggtatggcgccatctccatgttgccatcactgcgttctcacctgaagccttaatctttgcgacacctgccagtgagcgctcggtttcaataccaaagtgtgtcttcttcttttttttttttttttaaatgcctgtttcataggaccttctgaaatggatttccagaatattttatctgggctccaaaataaaggcacatagcaaatntacctcaancccctcatcaanctccagggaaagtttcttgccaaagctggtgggnattgccaaactttttgatttnggtccttgcccaattggttttatggnccccaaaaccncaatttggatcccttggg

SEQ ID NO: 116386 - DNA, 597 bp, Homo sapiens
atgactaatacagtgcataagacacttggtacagaaccttacaaatactcaacacatgaatatcctgttttacccactactgtaattaccagtattatggttatactttctgttatccatttcaaggatgtcatagattatggtttatcaaatgctcccatgaacaagatctcatttggtcccaacaaaccctgtgagatagacagggcttctttgctcacgctgctttaccgagctccttcaaggaggccctgcaaagccaaagtcaagtgtgtgctgatcggcagagatgaggaaactgaggccaaaggattctgttacttgcctggcttcacagctcacctggagattctgaactggcatcttcctctctctgccatcaccccagaccctaccctctttcctctacaccagtggttctcaatcaagggcgattttgccttccaggggacatttgacaatgtctggaggcgtttttggttgtcacaattctgtgttgctgtcattcatggattgaggattttcgaaaaattgggatctaaacaacaaaatggatttggctgccacaattctttgaaattgttttgttgtggatga

SEQ ID NO: 116387 - DNA, 412 bp, Homo sapiens
  misc_feature (1)...(412): n = a,t,c or g
tgttcaacttgcatcacagctgtgggaggctgcaagctggcccatcctgggtttcatgctccagggatgcatggcacgttggcctccctggatctggaggtagaggctggtctcaggagattgaagtaatacctcgactggcagaatctcagggcaacatcattgaggtacagccagttgcatttcactaggctcaagaggattgctgcctcaagcaggataaccaggcctgcctggagcagtgccgtagtccaggatcccagtgacctgagggcttgatgtgggggtccttatctcnnnnnnnnnnnnnnnnnnnnnnnnnnnnnnnnnnnnnnnnnnnnnnnnnnnnnnnnnnnnnnnnnnnnnnnnnnnnnnnnnnnnnnnnnnnnnnnnnnnnnnnnnnnnnnnnnnn

SEQ ID NO: 116388 - DNA, 1004 bp, Homo sapiens
gaaaaaaaaaaaagccagtaacttataaaaatagccataaacgacgtagtttttgttgttgttgttgttttgagacggcgtctccctctgtcccccaggcgggagtacagtggcaggcactcagctcgctgtaacctccgcctcctgggttcaagtgattctcttgccccagcctccagagtagccaccacgcccggtccaacttagttttttaatactttttaaaattttaagacagggtctctgccaccgaggctgaaatgcagtggcgcaatcatggctcactgcaaccttgacttcctggggtcctgggcaggtgaccccgtctcagcctgccgagtagctgtgagtaaaggcctgtgcctctccactgtgctaattttctactgtttgttgctttgtttttaatagagatgtagactggttttgttgcccaggctggtctccagcttctagcctcaggcagtcttcccatctgctcctaccaaagtgctcggattataggcatgaatcaccttgcatgggagataaggacccccacatcaagccctcaggttatttttgaaacacaaatacataaggcccacaagcaggcccattggctgcagacagtggggtcacctgaagaacttttctttgatctgagtaccaacttctcacctaggtcactgggatcctggactacggcactgctccaggcaggcctggttatcctgcttgaggcagcaatcctcttgagcctagtgaaatgcaactggctgtacctcaatgatgttgccctgagattctgccagtcgaggtattacttcaatctcctgagaccagcctctacctccagatccagggaggccaacgtgccatgcatccctggagcatgaaacccaggatgggccgccttccagcctcccacagctgtgatgcaagttgaacacatacagagagactgcatctgcactgggtggttttcctgagccttggggagcagaatgcatgaatcccaggta

SEQ ID NO: 116389 - DNA, 440 bp, Homo sapiens
atggcagaaatgtatgataatattagaacactaaaggctccaacaagttctggaagaggcaaacattttgatatgagtggagaggaaggtgcttatggcacaaggatggaagataaacccagagaagcaggcaatgccaaatcttgaaggcgattgtataccttgctcaggaatctgaccataaccatgaatctttgggaagcagctgaatgatttaaatcagcagaaagataaaatcagatccaaacttagtaaagaccacattggatacaatgtgaaaaggagcaaggaggacctccaggcagaaggcccagagaccagttggataggttggttccaaacctgagtgattgtgtaagtggttatgataataactgatatgggagtagaggaagaggagcaggctgaattagataaaataaggacatttcaacttaatt

SEQ ID NO: 116390 - DNA, 666 bp, Homo sapiens
cagggagctgtggcctgcctgactgccatcagcgacttctactacactgtgatgttccggatccatgccgagttccagctcagtgagccgcccgacttccccttttggttctcccctgctcagttcaccggccacatcatcctctccaaagacgccacccacgtccgcgacttccggctcttcgtgcccaaccacaggtctctgaatgtggacatggagtggctttacggggccagtgaaagcagcaacatggaggtggacatcggctacataccccagatggagctggaggccacgggcccctctgtgccctccgtgatcctggatgaggatggcagcatgatcgacagccacctgccctcaggggagcccctgcagtttgtgtttgaggagatcaagtggcagcaggagctgagctgggaggaggctgcccggcgcctggaggtggccatgtaccccttcaagaaggtctcctacttgccgttcactgaggccttcgaccgagccaaggctgagaacaagctggtgcactcaatcctgctgtggggggccctggatgaccagtcctgctgaggttcagggcggactctccgggagactgtcctggaaagttcgccatcctcaccctgctcaacgagagctttcatcagcacctggtcccctggt

SEQ ID NO: 116391 - DNA, 446 bp, Homo sapiens
cgtgcacttcccagccctccttgtggaaaccaacacagctcacctgggggcaaggcctggcactggcagatacagcagtggctgccccacctcacctgctgcccccggtcaactcccgcggccagctacgaggaggaggagttgccccctgaccctagcgaggagacgctcaccatagaagcccgattccagcctctgctcccggagaccatgaccaagagcaaagatggcttcctaggggcgatagagacctacttgctgaatgtctctcccggggggctgacctacattgccgagtggcgaggggggattctggaccacaagatggggcacctggcctgtttctccgggggcatgatcgcccttggcgccgaggatgccaaggaagaaaagagggcccactaccgagagctcgcagcccagatcaccaaggggattcttctaga

SEQ ID NO: 116392 - DNA, 2155 bp, Homo sapiens
atgggccgggcccggccgggccaacgcgggccgcccagccccggccccgccgcgcagcctcccgcgccaccgcgccgccgcgcccgttccctggcgctgctcggagccctgctggccgccgccgctgccgccgccgtccgggtctgcgcccgccacgccgaggcccaggcggccgcgcggcaggaactggcgctgaagacccttgggaacagatggcctttttctcttttcctccttggacactgacggggatatgtacatcagccctgaggagttcaaacccattgctgagaagctaacagggtcaactcccgcggccagctacgaggaggaggagttgcccccctgacccttagcgaggagacgctcaccatagaagcccgattcaaagctttctgctcccggagaccatgaccaagagcaaagatggcattccataggggtctcccgcctcgccctgtccggcctccgaaactggacagccgccgccctcaccaagtgcagtgtttggccacccgccactttccagcccttccttcccccgccaggccaggagctgggtgagccctgggtggatcatccccagtgagctgagcatgttcactggctagactgtccaacaaccgcttctatccaccgccgcccaagggcaaggaggtcatcatccaccggctcctgagcatgttccaccctcggccctttgtgaagacccgctttgcccctcaaggagctgtggcctgcctgactgccatcagcgacttctactacactgtgatgttccggatccatgccgagttccagctcagtgagccgcccgacttccccttttggttctcccctgctcagttcaccggccacatcatcctctccaaagacgccacccacgtccgcgacttccggctcttcgtgcccaaccacaggtctctgaatgtggacatggagtggctttacggcgccagtgaaagcaccaacatggaggtggacatcggctacataccccaggtgagcgcacaggaggctcccatccagatggagctggaggccacgggcccctctgtgccctccgtgatcctggatgaggatggcagcatgatcgacagccacctgccttcaggggagcccctgcagtttgtgtttgaggagatcaagtggcagcaggagctgagctgggaggaggctgcccggcgcctggaggtggccatgtaccccttcaagaagggctcctacttgccgttcactgaggccttcgaccgagccaaggctgagaacaagctggtgcactcaatcctgctgtggggggccctggatgaccagtcctgctgaggttcagggcggactctccgggagactgtcctggaaagttcgcccatcctcaccctgctcaacgagagcttcatcagcacctggtccctggtgaaggagctggaggaactgcaaaacaaacaggagaactcgtcccaccagaagctggctggcctgcacctggagaagtacagcttccccgtggagatgatgatctgcctgcccaatggcaccgtggtccatcacatcaatgccaactacttcttggatcatcacctccgtgaagcccgaggaaatcgagagcaattctcttcagcttctcatccacctctgaagacccgtccacggccacctacatgcagttcctgtatggagggactccgtccgtgggcttgccccatcctccagccctagagtgcctggacgggatcttattaaacagaccccacgcctcagagccagagtggtcctcagcccatttaagactgcagatgccgcccactcccacccggggctcactcagcctggcagaggaagaatgaaggcagacatctctgcagccactcctgggccttttatgtgccgagttaccccacttgccttgggcgtgtccactgagccttccccagccagacttgttctcaattttgttttttttttttttttttgagacggattttgctctgtcacccagggctggagtgctatggctcgatcttgggctcactgcaacctccacctcccagggttcaagcaattctcttgcctcagcctcccgagtagctggggattacaggtgcatgccaccatgggctgggctaatttttgtatttttagtaggagatggggtttc

SEQ ID NO: 116393 - DNA, 1100 bp, Homo sapiens
ctatgtttttgaaaacgcttatgaaaagtcagaattcaaaatcacatctgggctgctgtttgtcacagtggaaatgccgcgccacctgcagacggggcctgagaaacacggaaatgggcagagcctctccccagagccagtccccgtgaaactcacagcgtgcttctgtgttggtatacaggaatccgagcggctggaactcatgaacgcagagctgaagacccagattgaggagctgaagcaggagcggcagcagctcatcctgatgctgaaccgacaccgccccacctgcatcgtccggaccgacagtgtcaagacccccgagtcagaaggcaacccactgctcgagcagcttcgagaagaagtgaccatgggctgggagacgtctgaggaggaggaagaggagaaggaaaagtgacgaagagagaggaggaggggggccccagatggcccttcctttggtgcatgaaaaactgtacaatgagggttcagcacagccagcaatcagccgagcttttttgtgaaactcagatcagccacccaggaggaagagcgggctgaggaaacccagagggaccaagcgctgagaccaaagttgaccctcgggtagggttgtcctgcctggggccccacttgaaggaggcaggacagaggcaccgaggccagggagacgcccaacgaggcagccctgggcttcttctctggcctcttcaccagggcacccatccaaggaacctccgaacagccaggaaaagccatgagttgcaaccaaaacgcggcttgaggatggaactcagaatgaaactgcaacccacctgcccccagccctgcccctcgccctgatgcgaagctggagaggggcgtgctgcggggccctgatgcccccacccaccttcggtccagcgcggccctgcccaggaggcggcagccgggcgcaccctcgccagccctgctggagtttgctgtgggcactgaggcgcgggcgcccttccaaagcacatactcaccgaatgtttacagactggctgtcctggcagggctttcaactgcacatgttttttatactttcctttttttttttttttttaatattttttaca

SEQ ID NO: 116394 - DNA, 2778 bp, Homo sapiens
atgggagactttaacaccccactgtcaacagtagacagatcgatgagacagaaagttgacaaggatacccaggaattgaactcagctctgcaccaagcagacctcatagacatctacagaactctccaccccaaatcaacagaatatacatttttttcagcaccacaccacacctattccaaaattgacaacataattggaagtaaagctctcctcagcaaatgtaaaggaacagaaattataacaaactctctctcagaccacagtgcaatcaaactagaactcaggattaagaaactcactcaaaaccactcaactacagagaaactgaacaacctgctcctgaatgactactgggtacataacgaaatgaaggcagaaataaagatgttctctgaaaccaatgagaacaaagacacaacataccagaatctctgggacacattcaaagcagtgtgtagagggaaatttatagcactaaatgcccacaagagaaagcaggaaagatccaaaattgacaccctaacatcacaattaaaagaactagaaaaactaaaccaggaagaagttgaatctctgaatagaccaataacaggagctgaaattgtggcaataatcaatagcttaccaaccaaaaagagtccaggaccagatggattcacagccaaattctactggaggtacaaggaggaactggtaccattccttctgaaactattccaatcaatagaaaaagagggaatcctccctaactcatgttatgaggccagcatcatcctgataccaaagcctggcagagacacaacaaaaaaagagaattttagaccaatatccttgatgaacattgatgcaaaaatcctcaataaaatactggcaaaccgaatccagcagcacatcaaaaagcttatccaccatgatcaagtgggcttcatccctgggatgcaaggctggttcaatatatgcaaatcaataaatgtaatccagcatataaacagaaccaaagacaaaaaccacatgattatctcaatagatgcagaaaaggcctttgacaaaattcaacaacccttcatgctaaaaactctcaataaattagcccaaaatctccttaagctgataagcaacttcagcaaagtctcaggatacaaaatcaatgtacaaaaatcacaagcattcttatacaccaataacagacaaacagagagccaaatcatgagtgaactcccattcacaactgctttaaagagaataaaatacctaggaatccaacttacaagggatgtgaaggacctcttcaaggagaactacaaaccactgctcaaggaaataaaagaggatacaaacaaatggaagaacattccatgctcatgggtaggaagaatcaatatcttgaaaatggccacactgcccaaggtaatttatagattcaatgccatccccatcaagctactaatgactttcttcacagaattggaaaaaactactttaaagttcatatggaaccaaaaaagagcccgcatagccaagtcaatcctaaaccaaaagaacaaagctggaggcatcacactacctgacttcaaactatactacaaggctacagtaaccaaaacagcatggtactggcaccaaaacagagatagagaccaatggaacagaacagagccctcagaaacaatgctgcatatctacaactatctgatctttgacaaacctgacaaaaacaagcaatggggaacggattccctatttaataaatggtgctgggaaaactggctagccatatggagaaagctgaaactggatcccttccttacaccttatacaaaaattaattcaagatggattaaagacttacacattagagctaaaaccataaaaaccctagaagaaaacctaggcaataccattcagtacataggcatgggcaaggacttcatgtctgaaacaccaaaagcaatggcaacaaaagccaaaattgacgaatgggatctaattaaactaaagagcttctgcacagcgaaagaaactaccatcagagtgaacaggcaacccacaaaatgggagaaaattttcgcaacctactcatctgacaaagggctaatatccagaatctacaatgaactcaaacaaatttacaagaaaaaaacaaacaaccccatcaaaaaatgggcaaaggacatgaacagacacttctcaaaagaagacatttatgcagccaaaaaacacatgaaaaaatgctcatcatcactggccatcagagaaatgcaaatcaaaaccacaatgagataccatctcacaccagtcagaatggcgatcattaaaaagtcaggaaacaacaggtgctggagaggatgtggagaaataggaacacttttacactgttggtgggactgtaaactagttcaaccattgtggaagtcagtgtggcgattcctcagggatctagaactagaaataccatttgacccagccatcccattactgggtatatacccaaaggactataaatcatgctgctacaaagacacatgcacacgtatgtttattgcggcactattcacaatagcaaagacttggaaccaagccaaatgtccaacaatgatagaccggatcaagaaaatgtggcacatatacaccatggaatattatgcagccataaaaaatgatgagttcatgtcctttgtagggacatggatgaaattggaaatcatcattctcagtaaactatctcaagaacaaaaaaccaaacaccgcatattctcactcttaggtgggaactga

SEQ ID NO: 116395 - DNA, 1896 bp, Homo sapiens
atgggcaaggacttcatgtctaaaacaccaaaagcaatggcaacaaaagccaaaattgacaaatgggatctaattaaactaaagagcttctgcatggcaaaagaaactaccgtcagagtgaacaggcaacctacagaatgggagaaaatttgtgcaatctacccatctgacaaagggctaatatccagaatctacgaagagctcaaacaaatttacaagaaaaaagcaaacaaccccatcaaaaaggacatagatgaagctggaaaccatcattctcagaaaactatcacaaggacagaaaacaaaacaccacatgttctcactcataggtgggaattgaacaatgagatcacttggacacagggcagggaacgtcacacactggggcctgtcagagggtggggagctggaggagggataacattaggagaaatacctaatctcagagaggttaaggagcaaagctgtcaaccaaccttgaagccatgccttcggtggctgtccttgagtactgcagatgcatggattttcatcaacccctttctggttggggattacctattcctggaccaccccaccaaattggaaaaaactactttaaagttcatatggaaccaaaaaagagcccgcattgccaagtcaatcctaagccaaaagaacaaagctggaggcatcacactacctgacttcaaactatactacaaggctacagtaaccaaaacagcatggtactggtaccaaaacagagatatagatcaatggaacagatcagagccctcagaaataacgccgcatatctacgactgtctgatctttgacaaacctgagaaaaacaagcaatggggaaaggattccctatttaataaatggtgctgggaaaactggctagccatatgtagaaagctgaaactggatcccttccttacaccttatacaaaaatcaattcaagatggattaaagacttaaacgttagacctaaaaccataaaaaccctagaagaaaacctaggcattactattcaggacataggcatgggcaaggacttcatgtctaaaacaccaaaagcaatggcagcaaaagccaaaattgacaaatgggatctaattaaattaaagagcttctgcacagcaaaagaaactaccatcagagtgaacaggcaacctacaaaatgggagaaaattttcgcaacctactcatctgacaaagagctaatatccagaatctacaatgagctcaaacaaatttacaagaaaaaaacaaacaacctcatcaaaaagtgggcaaaggacatgaacagacacttctcaaaagaagacatttatgcagccaaaaaacacgtgaaaaaatgctcaccatcactggccatcagagaaatgcaaatcaaaaccacaatgagataccatctcacaccagttagaatggcgatcattaaaaagtcaggaaacaacaggtgctggagaggatgtggagaaataggaacattttacactgttgcctgccacaaagggctctgttctccctttggtgtctcctcagcacagagtcaagactgctccagggcaagggttaagaacagaagtccacagactggtactggtcagtggcctgttaggaacaaggctacacagcaggagccagatcccaaccacttggctttaacccagcagagatggagacggaaaagacacatttccttcgttcaaggaattcgcagtggacctaatagaaggggctgtaaagtggtgtcctatgagctgcctccagccttcaggaagtacatgctccaatgcccagctggatccctgcagaacttagaccttaccaaaggtgaaggggaccagctagctaaggaggcagggagtacattaaaagcacctagagagagatccaggtga

SEQ ID NO: 116396 - DNA, 1836 bp, Homo sapiens
atggataaattcctcgacacatacaccctcccaagactaaaccaggaagaagttgaatccctgaatagaccaataacaggctctgaaattgaggcaataattaatagcctaccaaccagaaaaagtccaggaccagatggattcaaagtcgaatcctatcagaggtacaaagaggagctggtaccattccttctgaaactattccaatcaatagaaaaagagggaatcctccctaactcattttatgaggccagcatcatcctgataccaaagcctggcagagacacaataaaaaaagagaattttagacgaatatccctgatgaacatcaatgtgaaaatcctcaataaaatactggcaaaccgaatccagcagcacatcaaaaagcttatccaccacgatcaagtcagcttcatccctgggaagcaaggctggttcaacatacacaaatcaataaacgtaatccatcacataaacagaaccaatgacaaagaccacatgattatctcaatagatgcaaaaaaggccttcaacaaaattcaacagcccttcatgctaaaaactctcaataaactagtgttgggagttctggccagggcaatcaggcaagagaaagaaataaagcgtattcaatcaggaaaagaggaagtcaaattgtccctgtttgcagatgacatgattgtatgtttagaaaaccccatcgtctcagcccaaaatctccttaagctgataagcaacttcagcaaagtctcagaatataaaatcaatgtgcaaaaatcacaagtattcctttatgccaataagagacaaactgagagccaaatcatgagtgaactcccattcacaattgctacaaagagaataaaatacctaggaatccaacttacaagggatgtgaaggacctcttcttcaaggagaactataaaccactgttcaacgaaataacagaggacacaaacaaatggaagaacattccatgctcatggataggaagaatcaatatcatgaaaatggccatactgcccaaggtaatttatagattcaatgccatccccatcaagctaccaatgactttcttcacagaattggaaaaaactactttaaagttcatatggaaccgaaaaagagcgcacattgccaagacaatcctaagcaaaaagaacaaatctagaggcatcacactacctgacttcaaactatactacaacgctaaccaaaacagcatgacaaaaattaattcaagatggattaaagacttaaatgttagacctaaaaccataaaaactctagaagaaaacctaggcaataccattcaggaactaggcgtgggcaaggacttcatgactaaaacaccaaaagcaatggcaacaaaagccaaaatagacaaatgggatctaattaaacgaaagagcttctgcacagcaaaagaaactaccatcagagtgaacaggcaacctacagaatgggagaaaatttttgcaatctacccatctgacaaagggctaatatccagaatctacaaagaacttaaacaaatttacaagaaaaaaacaagcaaccccatcaaaaagtgggcaaaggatatgaacagacactgctcaaaagaagacatttatgtagccaacggacacatgaaaaaatgctcatcatcactggtcgtaagagaaatgcaaatccaaaccacaatgcgataccatctcacaccagttagaatggcgatcattaaaaagtcaggaaacaacagatgctggagaggatgtggagaaataggaacgcttttacactgttggtgggaatgtaaactagtccaaccattgtggaagacagtgtggtga

SEQ ID NO: 116397 - DNA, 2463 bp, Homo sapiens
atgggagactttaacatcccactgtcaacatcagacagatcaacgagacagaaagttaacaaggatacccaggaattgaactcagctctgcaccaagcggacctaatagacatctacagaactctccaccccaaatcaacagaatatacattcttttcagcaccacaccacacctactccaaaattgaccacatagttggaagtaaagcactcctcagcaaatgtagaagaacagaaattataacaaactgtctctcagaccacagtgcaatcaaactagaaatcaggattaagaaactcactcaaaactgctcaactacatggaaactgaacaacctgctcctgaatgactactgggtaaataatgaaatgaaggcagaaataaagatgttctttgaaatcaacgaggacaaagacacaacataccagaatcgctgggacacattcaaagcagtgtgtagagggaaatttatagcactaaatgcccacaagagaaagcaggagagatctaaaattgacaccctaacgtcacaattaaaagaactagaaaagcaagagcaaacacattcaaaagctagcagaaggcaagaaataaccgagatcagagcagaactgaaggaaatagagacacaaaaaacccttcaaaaaatgaatgaatccaggagctggttttttgaaaagatcaacaacattgatagactgctagcaagactaatcaagaagaaaagagagaagaatcaaatagacgcaataaaaaatcataaaggggatatcaccaccaatcccacagaaatacaaactaccatcagagaatatgataaacacctctacgcaaataaactagaaaatctagaagaaacggataaattcctcgacacatacatcctcccaagactaaaccaggaacaagttgaatctctgaatagaccaataacaggagctgaaattgaggcaataatcaatagcttacgaaccaaaaaaagtccaggaaccaggtggattcacagccgaattctaccagaggtacaaagaggagctgtgttggaagttctggccagggcaattaggcaggagaaggaaataaagggtattcaattaggaaaagaggaagtcaaattgtccctctttgcagatgacatgactgtatatctagaaaaccccactgtctcagcacaaaatctccttaagctgataagcaacttcagcaaagtctcaggatacaaaatcaatgtacaaaatccacaagcattcttatacaccaataacagacaaacagagagccaaatcatgagtgaactcccattcacaattgcttcaaagagaataaaatacctgggaatccaacttacaagggatatgaaggagctcttcaaggagaactacaaaccactgctcagtgaaataaaagaggatataaacaaatggaagaacattccatgctcatgggtaggaagaatcaatattgtgaaaatggccatactgcccaaggtaatttatagattcaatgccatccccatcaagctaccaatgactttcttcacagaactggaaaaaactactttcaagttcatatggaaccaaaaaagagcccgcatcgccaagtcaatcctaagccaaaagaacaaagctggaggcatcacactagctgacttcaaactatactacaaggctacagtaaccaaaacagcatggtactggtaccaagacagacatatagatcaatggaacagaacagagtcctcagaaataatgccgcatatctacaactatctgatctttgacaaacctgacaaaaacaagaaatggggaaaggattccctatttaataaatggtgctgggaaaactggttagccatatgtagaaagctgaaactggatcccttccttacaccttatacaaaaattaattcaagatggattaaagacttaaatgttagacctaaaaccataaaaaccctagaagaaaacttaggcattaccattcaggacacaggcatgggcaaggacttcatgtctgaaacaccaaaagcaatggcaacaaaagacaaaattgacaaatgggatctaattaaactaaagagcttctgcacagcaaaagaaactaccatcagagtgaacaggcaacctacagaacgggagaaaagttttgcaagctactcatctgacaaagggctaatatccagaatctacaatgaactccaacaaatttacaagaaaaaaacaaacaaccccatcaacaagtgggcaaaggatatgaacagacacttctcaaaagaagacatttatgcagccaaaagacacacgaaaaaatgctcatcatcactggccatcagaggaatacaaatcaaaaccacaaggagataccatctcaaaccagttagaatggcgatcattaaaaagtcaggaaacaacaggtgctggagaggatgtggagaaataggaacacttttacactgttggtag

SEQ ID NO: 116398 - DNA, 2227 bp, Homo sapiens
actaaaccaggaagaagttgaatctctgaatagaccaataacaggagctgaaattgtggcaataatcaatagcttaccaaccaaaaagagtccaggaccagatggattcacagccaaattctactggaggtacaaggaggaactggtaccattccttctgaaactattccaatcaatagaaaaagagggaatcctccctaactcatgttatgaggccagcatcatcctgataccaaagcctggcagagacacaacaaaaaaagagaattttagaccaatatccttgatgaacattgatgcaaaaatcctcaataaaatactggcaaaccgaatccagcagcacatcaaaaagcttatccaccatgatcaagtgggcttcatccctgggatgcaaggctggttcaatatatgcaaatcaataaatgtaatccagcatataaacagaaccaaagacaaaaaccacatgattatctcaatagatgcagaaaaggcctttgacaaaattcaacaacccttcatgctaaaaactctcaataaattagcccaaaatctccttaagctgataagcaacttcagcaaagtctcaggatacaaaatcaatgtacaaaaatcacaagcattcttatacaccaataacagacaaacagagagccaaatcatgagtgaactcccattcacaactgctttaaagagaataaaatacctaggaatccaacttacaagggatgtgaaggacctcttcaaggagaactacaaaccactgctcaaggaaataaaagaggatacaaacaaatggaagaacattccatgctcatgggtaggaagaatcaatatcttgaaaatggccacactgcccaaggtaatttatagattcaatgccatccccatcaagctactaatgactttcttcacagaattggaaaaaactactttaaagttcatatggaaccaaaaaagagcccgcatagccaagtcaatcctaaaccaaaagaacaaagctggaggcatcacactacctgacttcaaactatactacaaggctacagtaaccaaaacagcatggtactggcaccaaaacagagatagagaccaatggaacagaacagagccctcagaaacaatgctgcatatctacaactatctgatctttgacaaacctgacaaaaacaagcaatggggaacggattccctatttaataaatggtgctgggaaaactggctagccatatggagaaagctgaaactggatcccttccttacaccttatacaaaaattaattcaagatggattaaagacttacacattagagctaaaaccataaaaaccctagaagaaaacctaggcaataccattcagtacataggcatgggcaaggacttcatgtctgaaacaccaaaagcaatggcaacaaaagccaaaattgacgaatgggatctaattaaactaaagagcttctgcacagcgaaagaaactaccatcagagtgaacaggcaacccacaaaatgggagaaaattttcgcaacctactcatctgacaaagggctaatatccagaatctacaatgaactcaaacaaatttacaagaaaaaaacaaacaaccccatcaaaaaatgggcaaaggacatgaacagacacttctcaaaagaagacatttatgcagccaaaaaacacatgaaaaaatgctcatcatcactggccatcagagaaatgcaaatcaaaaccacaatgagataccatctcacaccagtcagaatggcgatcattaaaaagtcaggaaacaacaggtgctggagaggatgtggagaaataggaacacttttacactgttggtgggactgtaaactagttcaaccattgtggaagtcagtgtggcgattcctcagggatctagaactagaaataccatttgacccagccatcccattactgggtatatacccaaaggactataaatcatgctgctacaaagacacatgcacacgtatgtttattgcggcactattcacaatagcaaagacttggaaccaagccaaatgtccaacaatgatagaccggatcaagaaaatgtggcacatatacaccatggaatattatgcagccataaaaaatgatgagttcatgtcctttgtagggacatggatgaaattggaaatcatcattctcagtaaactatctcaagaacaaaaaaccaaacaccgcatattctcactcttaggtgggaactga

SEQ ID NO: 116399 - DNA, 2871 bp, Homo sapiens
atgaaggcagaaataaaggtgttctttgaaaccaacgagaacaaagacacaacataccagaatctctgggacacattcaaagcagtgtgtagagggaaatttatagcactaaatgcccacaagagaaagcaggaaagatccaaaattgacaccctaacatcacaattaaaagaactagaaaagcaagagcaaacacattcaaaagctagcagaaggcaagaaataactaaaatcagagcagaactgaaggaaatacagacacaaaaaacccttcaaaaaatcaatgaatccaggagctggttttttgaaaggatcaacaaaattgatagatcgctagcaagactaataaagaaaaaaagagagaagaatcaaatagacacaataaaaaatgataaaggggatatcaccaccgatcccacagaaatacaaactaccatcagagaatactacaaacacctctatgcaaataaactagaaaatctagaagaaatggataaattcctcgacacatacactctcccaagactaaaccaggaagaagttgaatctctgaatagaccaataacaggagctgaaattgtggcaataatcaatagtttaccaaccaaaaagagtccaggaccagatggattcacagccgaattctaccagagctgggcagagacacaaccaaaaaaagagaattttagaccaatatccttgatgaacattgatgcaaaaatcctcaataaaatactggcaaaacgaatccagcagcacatcaaaaagcttatccaccatgatcaagtgggcttcatccctgggatgcaaggctggttcaatatacgcaaatcaataaatgtaacacagcatataaacagagccaaagacaaaaaccacatgattatctcaatagatgcagaaaaagcctttgacaaaattcaacaacccttcatgctaaaaactctcaataaattaggtattgatgggacgtatttcaaaataataagagctatctatgacaaccccacagccaatatcatactgaatgggcaaaaactggaagcattccctttgaaaactggcacaagacagggatgccctctctcaccactcctattcaacatagtgttggaagttctggccagggcaattaggcaggagaaggaaataaagggtattcaattaggaaaagaggaagtcaaattgtccctgtttgcagacaacatgattgtatatctagaaaaccccattgtctcagcccaaaatctccttaagctgataagcaacttcagcaaagtctcaggatacaaaatcaatgtacaaaaatcacaagcattcttatacaccaacaacagacaaacagagagccaaatcatgagtcaactcccattcacaattgcttcaaagagaataaaatacctaggaatccaacttacaagggatgtgaaggacctcttcaaggagaactacaaaccactgctcaaggaaataaaagaggatacaaacaaatggaaaaacattccatgctcagggggaaggaagaatcaatatcgtgaaaatggccatactgcccaagaattggaaaaaactactttaaagttcatatggaaccaaaaaagagctcacattgccaagtcaattctaaaccaaaagaacaaagctggaggcatcacactacctgacttcaaactatactacaaggctacagtaaccaaaacagcatggtactggtaccaaaacagagatatagatcaatggaacagaacagagccctcagaaataacgcagcatatctacagctatctgatctttgacaaacctgagaaaaacaagcaatggggaaaggattccctatttaataaatggtgctgggaaaactggctagccatatgtagaaagctgaaactggatcccttccttacaccttatacaaaaattaattcaagatggattaaagatttaaacgttagacctaaaaccataaaaaccctagaagaaaacctaggcattaccattcaggacataggcatgggcaaggacttcatgtccaaaacaccaaaagcaatggcaacaaaagacaaaattgacaaatgggacctagttaaactaaagagcttctgcacagcaaaagaaactaccatcagagtgaacaggcaacctacaaaatgggagaaaattttcgcaacctactcatctgacaaagggctaatatccagaatctacaatgaactcaaacaaatttacaagaaaaaaacaaacaaccccatcaaaaagtgggcaaaggacatgaacagacacttctcaaaagaagacatttatgcagccaaaaaacacatgaaaaaatgctcatcatcactggccatcagagaaatgcaaatcaaaaccactatgagataccatctcacaccagttagaatggcaatcattaaaaagtcaggaaacaacaggtgctggagaggatgtggagaaacaggaacgcttttacactgttggtgggactgtaaactagctcaaccattgtggaagtcagtgtggcgattcctcagggatctagaactagaaataccatttgacccagccatcccattactgggtatatacccaaatgactataaatcatgctgctataaagacacatgcacacgtatgtttattgcggcattattcacaatagcaaagacttggaaccaacccaaatgtccaacaattatagactggattaagaaaatgtggcacatatacaccatggaatactatgcagccataaaaaatgatgagttcgtgtcctttgtagggacatggatgaaattggaaatcatcattctcagtaaactatcacaagaacaaaaaaccacacaccgcatattctcactcataggtgggaattga

SEQ ID NO: 116400 - DNA, 1281 bp, Homo sapiens
atgggcaaggacttcatgtctaaaacaccaaaagcaatggcaacaaaagccaaaattgacaaatgggatctaattaaactaaagagcttcttctgcacagcaaaagaaactaccatcagagtgaacaggcaacctacagaatgggagaaaattttcgcaacctactcatctgacaaagggctaatatccagaatctacaaagaactcaaacaaatttacaagaaaaaaacaaacaaccccatcaaaaagtgggtgaaggatatgaacagacacttctcaaaagaagacatttatgtagccaaaatgctcatcatcatgaaaaaatgctcatcatcactggccatcagagaaatgcaaatcaaaaccataatgagataccatctcacaccagttagaatggcgatcattaaaaagtcaggaaacaacaggtgctggagaggatgtggagaaataggaacacttttacactgttggtgggactataaactagttcaaccattgtggaagacagtgtggcgattcctcagggatctagaaccagaaataccacttgacccagccatcccatcactgggtgtatacccaaaggattataaatcatgctgctataaagacacatgcacatgtagatgggaccatgtgatgggtccttgccagtggagtgtaagcagaagtgatacgcatcacttccaggcagaagtggttaaggagcaagtgagtcttctcgctctcttcttctcttgctattgcctccatgcagacgaacttactgaccttgggaactctgtgttggaaatggtgaagccagaagatggaactagcctggtgcttcagacgctgcttggagaacagcctctgcccttcaggaacacctattttggtgttcatatgagcaagaagataccgtattttccatgtggaaaagtcatcatggtagaccaaaccacccagccacgcacacacctccagcgctccacatccaaagcagccatcgccagggctgaagacagatgccggtggatgtctcaagacagtctactgctgactccacacttagcaaccactcacttcaactcccgagaagactggcccttcagaagagacaggaaaatatctgtgaggggaatccctcaactccagataacaattgtgggtgttcagataacaactgtgggtgttcaacaagcagacacaggtttatacatgttgatgcgggaggcactcagtagctcaaatatgaaaatgggtcagcgtggagcggagtctccggagattttctag

SEQ ID NO: 116401 - DNA, 1176 bp, Homo sapiens
atgggactggtaccgaacagagatacagaccaatggaacagaacagagccctcagaaataataccacacatctacaaccatctgatctttgacaaacctgacaaaaacaagaaatggggaaaggattccctatttaataaatggtgctgggaaaactggctagccatatgtagaaagctgaaactggatcccttccttacaccttgtacaaaaattaattcaagatggattaaagacttacatgttacacctaaaaccatcaaaaccctagaagaaaacctaggcaataccattcaggacataggcatggacaaggacttcatgactaaaacaccaaaagcattggcaaccaaagccaaaatagacaaatgggatctaattaaactaaagagcttctgcacagcaaaagaaactaccatcagagtgaacaggcaacctacagaatgggagaaaatttttacaatctactcatccgacaaagggctaatatccagaatctacaaagaacttaaacaaatttacaagaaaaaagcaaacaaccccatcaaaaagtgggcaaaggatatgatcagacacttctcaaaagaagacatttatgcagacaacggacacatgaaaaaatgctcatcatcactggtcatcagaggaatgcaaatcaaaaccacaatgagataccatctcacaccagttagaatggcgatcattaaaaagtcaggaaacaacaggtgctggagaggatgtggagaaataggaacacttttacactgttggtgggagtgtaaactagttcaaccattgtggaagacagtgtggcaattcctcaaggatatagaactagaaataccatttcacccagccatcccattacaggaatgcttgcctgtagaagttggcgttttgtatctactgcttctgcatcatgaattcatccaactgtggatcaaaaatattcagaagaaaaatttcacaaagccaaacaaaaacttgctgtgcactgagtacgtccagatggcacaagtgacctttagatcagaagattatccaggtgagcatgatctaatcacatgggtccttcaaagcagagagccttctctcgctgatggaaaaagaggtagtcatggaaatgtgaagaacaagggagattcaatgcacaattgctggcttgaagacggatga

SEQ ID NO: 116402 - DNA, 1431 bp, Homo sapiens
atgggcaaggacttcatgactaaaacaccaaaagcaatggcaacaaaagccaaaatagacaaatgggatctaattaaactaaagagcttctgcacagcaaaagaaacgaccatcagagtgaacagccaacctaaagaatgggagaaaatttttgtaacctatccatctgacaaagggctaatatccagaatccacaaagaatgtaaacaaatttacaagaaaaaaacaaacaaccccatcaaaaagtgggcaaaagatataaacaaacacttctcaaaagaagacatttatgcagccaacaggcacatgaaaaaatgctcatcatcactggtcatcagagaaatgcaaatcaaaaccataatgagataccatctcacaccagttagaatggcgatcattaaaaagtcaggaaacaacagatgctggagaggatgtggagaaacaggaatgcttttacactgtgggtgggagtgtaaactagttcaaccattgtggaagacagtatggcaattcctcaaggatctagaactagaaataccatttgactcagccatcccattactgggtatatacccaaaggattataaatcatgctgctataaagacacatgcacacgtatgcttattgtggcagtattcacaatagcaaagacttggaaccaacccaaaggtccatcaatgatagactggattaagaaaatgtggcatgtatacaccatggaatactatgcagccataaaaaaggatgagttcatgtcctttgtggggacatggatgaagctggaaaccatcatgctgagcaaactatcacaaggacagaaaaccaaacaccgcatgttctcactcacagctgcacagaagaaattttacctgagagttcatcaggcgaatggtagtttttgtgcccacatcttgttggaagttggctgtgggtgccccattaaacctcaggactgcgtcatgatcatctataaaccacaaagaaacagaaaagaggtgatgagcactggcaatatgcagaaaaagagaaagacgagaggcgggggagggggcaagggaataatgcttccccatctttaccccatcatgatccacagggcgaaatggcagtatttgtgtggtgctcaggtaaagctcctaggcagagatgaccacctgtctgccagccactccattgtcagaaacaatgtactaaatccagtcaaaatcaaacaggccatcttgaaaaacctaaaagcttcctgggctagctccttgtctttgcaactgtttaagcagtgtttggaagacttggaaaagtttctctaccccacgttgacctatctgatgaaggagggaactgaagactttaaggagccatccaaatcctgtgatcctatgagaacttctttcaatcttactcggtcaagcaagtttggggctcaccactga

SEQ ID NO: 116403 - DNA, 2361 bp, Homo sapiens
atggataaattcctggacacatacactctcccaagactaaaccaggaagaagttgaatctctgaatagaccaataacaggagctgaaattgtggcaataatcaatagtttaccaaccaaaaagagtccaggaccagatggattcacagctgaattctaccagaggtacaaggaggaactggtaccattccttctgaaactattccaatcaatagaaaaagagggaatcctccctaactcattttatgaggccagcatcatcctgataccaaagccaggcagagacacaacaaaaaaagagaattttagaccaatatccttgatgaacattgatgcaaaaatcctcaataaaatactggcaaaacgaatccagcagcacatcaaaaagcttatccaccatgatcaagtgggcttcatccctgggatgcaaggctggttcaatatacgcaaatcaataaatgtaatccagcatataaacagagccaaagacaaaaaccacatgattatctcaatagatgcagaaaaagcctttgacaaaattcagcaacccttcatgctaaaaactctcaataaattagctgataagcaacttcagcaaagtttcaggatacaaaatcaatgtacaaaaatcacaagcattcttatacaccaacaacagacaaacagccaaatcgtgagtgaactcccattcacaattgcttcaaagagaataaaatacttaggaatccaacttacaagggatgtgaaggacctcttcgaggagaactacaaaccactgctcaaggaaataaaagaggatacaaacaaatggaagaacattccatgctcatgggtaggaagaatcaagatcgtgaaaatggccatactgcccaaggtaatttacagattcaatgccatccccatcaagctaccaatgactttcttcacagaattggaaaaaactactttaaagttcatatggaaccaaaaaagagcccgcatcgccaagtcaatcctacgccaaaagaacgaagctggaggcatcacactacctgacttcaaactatactacaaggctacagtaaccaaaacagcatggtactggtaccaaaacagagatatagatcaatggaacagaacagagccctcagaaataacgccgcatatctacaactatctgatctttgacaaacctgagaaaaacaagcaatggggaaaggattccctatttaataaatggtgctgggaaaactggctagccatatgtagaaagctgaaactggatcccttccttacaccttatacaaaaatcaattcaagatggattaaaggcttaaacgttagacctaaaaccataaaaaccctagaagaaaacctaggcattaccattcaggacataggcatgggcaaggacttcatgtctaaaacaccaaaagaaatggcaacaaaagacaaaattgacaaaagggatctaattaaactaaagagcttctgcacagcaaaagaaactaccatcagagtgaacaggcaacctacaaaatgggagaaaattttcgcaacttactcatctgacaaagggctaatatccagaatctacaatgaactcaaagaaattgacaagaaaaaaacaaacaaccccatcaaaaagtgggcgaaggacatgaacagacacttctcaaaagaagacatttatgcagccaaaaaacacatgaaaaaatgctcatcatcactggccatcagagaaatgcaaatcaaaaccacaatgagataccatctcacaccagttagaatggcgatcattaaaaagtcaggaaacaacaggtgctggagaggatgtggagaaagaggaacacttttacactgttggtgggactgtaaactagttcaaccattgtggaagtcagtgtggcgattcctcagggatctagaactggaaataccatttgacccagccatcccattactgggtatatacacaaaggactataaatcatgctgctataaagacacatgcacaccaatatctgactacatgaaggcgcttgaacaatggaagcaagtccatgcgctcctccgtccgtcctgctctgctgcacctgcgtatccgccggctctctccacagttccacgggcaggtgcacagttactcaaccgtcagcgcggcctggaatccagagcctttaggtcagcctcttacctacagttccagtctccaacctgtcaacctgtcaaacacattcattctccaacaaaacctaagtgcttccaattttctttatgccccactgtttctaaactcgatgcttttgtgcatgctgtttctgacatttggaatcacccaccccctggctgtgcccctgcagaattcatccttaaaaactga

SEQ ID NO: 116404 - DNA, 1815 bp, Homo sapiens
ctcagagaggttaaggagcaaagctgtcaaccaaccttgaagccatgccttcggtggctgtccttgagtactgcagatgcatggattttcatcaacccctttctggttggggattacctattcctggaccaccccaccaaattggaaaaaactactttaaagttcatatggaaccaaaaaagagcccgcattgccaagtcaatcctaagccaaaagaacaaagctggaggcatcacactacctgacttcaaactatactacaaggctacagtaaccaaaacagcatggtactggtaccaaaacagagatatagatcaatggaacagatcagagccctcagaaataacgccgcatatctacgactgtctgatctttgacaaacctgagaaaaacaagcaatggggaaaggattccctatttaataaatggtgctgggaaaactggctagccatatgtagaaagctgaaactggatcccttccttacaccttatacaaaaatcaattcaagatggattaaagacttaaacgttagacctaaaaccataaaaaccctagaagaaaacctaggcattactattcaggacataggcatgggcaaggacttcatgtctaaaacaccaaaagcaatggcagcaaaagccaaaattgacaaatgggatctaattaaattaaagagcttctgcacagcaaaagaaactaccatcagagtgaacaggcaacctacaaaatgggagaaaattttcgcaacctactcatctgacaaagagctaatatccagaatctacaatgagctcaaacaaatttacaagaaaaaaacaaacaacctcatcaaaaagtgggcaaaggacatgaacagacacttctcaaaagaagacatttatgcagccaaaaaacacgtgaaaaaatgctcaccatcactggccatcagagaaatgcaaatcaaaaccacaatgagataccatctcacaccagttagaatggcgatcattaaaaagtcaggaaacaacaggtgctggagaggatgtggagaaataggaacacttttacactgttggtgggactgtaaactagttcaaccattgtggaagtcagtgtggcgattcctcagggatctagaactagaaataccatctgacccagcaatcccattactggttatatacccaaaggattataaaccatgctgctataaagacacatgcacacgatcttttgaagaagctattcctgcgaggaagctgaagaatttttacccgggggtagcggagcacaaggatatttctaagttggtcctgctcctttcttcctctgtaaattccctaagaaaggcagctcatgaggccctgcaggactttcagaagtacaagactctctggacagaggaccgcgatgtgaaagtgaaggaatttttggctaacaacccctctctgactgaaatcagatcagaaattctacactatgctacttttgaacaggagattgatgagttgaagcctattattgttgtaggagcacttgaattacatacagagccgatgaaattggccttatccatcgaggccaaggcatggaagatgttactctgtcgatatctgaatgaagaatacaaaaagaaaatgtcatacatgatagcatttattaatgaatacttgaaaaagttatctagacctattcgtgatttagatgatgtcagatttgcaatggaagccttgtcttgcatacgtgataatgaaattcaaatggacatgactttgggaccaattgaaatgctctcctatgacctttctgagactgctggaaagctcatggcttaa

SEQ ID NO: 116405 - DNA, 2811 bp, Homo sapiens
atgaagaagcagcacgccctcactcttcacacgaaacaggaacaccaaggtgtgtttgtgtgcacgcacatgcatgtgtctgaacacatgagtgtctactggaggctggagccagctgtaccaggttcacaggagccagttatgcacatctttttccagctccatgttcagcaacttcatgttggcagcttgaaactgactgtgatgagagtatttatgggactgacctttttttttaggaagtatttagagggcaaagctgaaagcaagatgttggagtgcagggagaagagatcagagcagcctactcactggcaggctaggctccaggaggaaagtcctcaggacctgggagaggtggaccctcatctccaggcccaggaacaggacaggtgctatccatgcttgatgggtttctcagatggtattttgaaaaatggtttgcttctgtgttcaaatgttttgcaaaagaagaagaaaaacaagcaatcctgctggtattttcgactagatgaggaagggaaatgggccctttatgcaggcctgccagaggtatttaaagataacaggaagggggaaaacagttggatgctgatttctcgttggtactatgcatataatagatgttcagtagatgcagttggaggaaggtgtaacaataaaagcaggacatcaagtctagccttcccgcggatcgtaatgaatggaactgcgggagctgtctccgctaaaattaactggaaacaacaacttgatgtggggatctcagggacagtcacacttcacgatgcctcactggcgacctcagggacagtcacacttcacgatgcctcactggcgacctcagggacagtcacacttcacgatgcctcactggcgatctcagggacaatcacgcttcatgataccgcacatcctgtgatggttgagttattacaaagcatcaagaaggcaacaaatttttcagcctctattgagtttgcaggtaacgtaaatgaaagttgggaagtcaaattgtcactgtttgcagatgacatgattgtatatctagaaaaccccattgtctcagcccaaaatctccttaagctgataagcaacttcagcaaagtctcaggatacaaaatcaatgtacaaaaatcacaagcattcttatacaccaatagcagacaaacagagagccaaatcatgagtgaactcccattcacaattgcttcaaagagaataaaatacctaggaatccaccttacaagggatgtgaaggacctcttcaaggagaactacaaaccactgctcaatgaaattaaagaggatacaaacaaatggaagaacattccatgctcgtgggtaggaagaatcaatatcgtgaaaatggccatactgcccaaggtaatttatagattcaatgccatccccatcaagctaccaatgactttcttcacagaattggaaaaaactactttaaagttcatatggaaccaaaaaagaacccgcatcgccaagtcaatcctaagccaaaagaacaaagctggaggcatcacgctgcctgacttcaaactatactacaaggctacagtaaccaaaacagcatggtactggtaccaaaacagagatatagatcaatggaacagaacagagccctcagaaataatgccacatatctacaactatctgatctttgacaaacctgagaaaaacaagcaatggggaaaggattccctatttaataaatggtgctgggaaaacagtctagccatatgtagaaagctgaaactggatcccttccttacaccttatacaaaaatcaattcaagatggattaaagacttaaacgttagacctaaaaccataaaaaccctagaagaaaacctaagcattaccattcaggacataggcacgggcaaggacttcatgtctaaaacaccaatagcaatggcaacaaaagccaaaattgacaaatgggatctcattaaactaaacagcttctgcacagcaaaagaaactaccatcagagtgaacaggcagcccacaaaatgggagaatatttttgcaacctactcatctgacaaagggctaatatccagaatctacaatgaactcaaacaaatttacaagaaaaaaacaaacaaccccatcaaagagtgggcaaaggacatgaacagacacttctcaaaagaagacatttatgcagccaaaaaacacatgaaaaaatgctcaccatcactggccatcagagaaatgcaaatcaaaaccacaatgagatatcatctcacaccagttagaatggcgatcattaaaaagtcaggaaacaacagatgcttgagaggatgtggagaaataggaacacttttacactgttggtgggactgtaaactagttcgaccattgtggaagtcagtgtggcgattcctcagggatctagaactagaaataccatttgacccagccatcccattactggatatacacccaaaggactataaatcatgctgctataaagacacatgcacaccttctaaactgaggcagagagccaccggaaatgttgcagcggcagctctcaagtccaaggggacctccacaagccttggaccctggaacagaggcaccagtgccatctccccagtagagactgcagtcacagtgcccaggagcagcaggattgttcccctccctccagccgccagccgcccctccaccctacacatgcacagggttcagcgccagcttccaggccagcagccccacgtatgcctgaacttagctggtgggcgcaaccacttgttccaggaaacatccctcagagagcagaca

SEQ ID NO: 116406 - DNA, 581 bp, Homo sapiens
  misc_feature (1)...(581): n = a,t,c or g
aggtctgcttgggttaaattcttgtctattctgtaacgccaactagagctcaaaccatgccaccttcttgctaacttcaaaagccaattttatctgtgcactgggaagcaaggtgctagaagtgctagatattttaggagagaggagactgtatgagtagtcatctagaggtatgggagagtaaatgggccggggaaacagaaaatgattcttgcgtagcataaaggactcaatgaggtaagggatcattaatttaaagtgaggctggtaaatatggttacnnnnnnnnnncctctaggtatgttcagatgtatgggtgtgggcaaggagttcagtgtacacaaggctatatcactaccatgattatgaaatttaagctggataaggaaagcccgtatgtgcgtctcgtgagcccgttttggaccaccgttcccgaatgtcggaagggcggatacctacacaatgagggtaaaacactggggccccccccacgggactggaagccgcagagtcatgtgctatgccgcgtggcctcgggagctcatgatgtcacagcagaccgccatagcaactttgaatag

SEQ ID NO: 116407 - DNA, 5619 bp, Homo sapiens
tgttgggagttctggccagggcaatcaggcaagagaaagaaataaagcgtattcaatcaggaaaagaggaagtcaaattgtccctgtttgcagatgacatgattgtatgtttagaaaaccccatcgtctcagcccaaaatctccttaagctgataagcaacttcagcaaagtctcagaatataaaatcaatgtgcaaaaatcacaagtattcctttatgccaataagagacaaactgagagccaaatcatgagtgaactcccattcacaattgctacaaagagaataaaatacctaggaatccaacttacaagggatgtgaaggacctcttcttcaaggagaactataaaccactgttcaacgaaataacagaggacacaaacaaatggaagaacattccatgctcatggataggaagaatcaatatcatgaaaatggccatactgcccaaggtaatttatagattcaatgccatccccatcaagctaccaatgactttcttcacagaattggaaaaaactactttaaagttcatatggaaccgaaaaagagcgcacattgccaagacaatcctaagcaaaaagaacaaatctagaggcatcacactacctgacttcaaactatactacaacgctaaccaaaacagcatgacaaaaattaattcaagatggattaaagacttaaatgttagacctaaaaccataaaaactctagaagaaaacctaggcaataccattcaggaactaggcgtgggcaaggacttcatgactaaaacaccaaaagcaatggcaacaaaagccaaaatagacaaatgggatctaattaaacgaaagagcttctgcacagcaaaagaaactaccatcagagtgaacaggcaacctacagaatgggagaaaatttttgcaatctacccatctgacaaagggctaatatccagaatctacaaagaacttaaacaaatttacaagaaaaaaacaagcaaccccatcaaaaagtgggcaaaggatatgaacagacactgctcaaaagaagacatttatgtagccaacggacacatgaaaaaatgctcatcatcactggtcgtaagagaaatgcaaatccaaaccacaatgcgataccatctcacaccagttagaatggcgatcattaaaaagtcaggaaacaacagatgctggagaggatgtggagaaataggaacgcttttacactgttggtgggaatgtaaactagtccaaccattgtggaagtcggtgtggcgattcctcagggatctagaactagaaataccatttgatccagccatcccattactggacagatcaacaagacagaaaattaacaaggatattcaagacttaaactcagccctggatcaagtggacctaatagacatctacagaactctccattccaaatcaacagaatatacattcttctcggtgccagatggcacttattctaaaatcaaccacataattggaagtataacactcttcagcaaatacaaaataactgaaatcataacaaacagtctcacagaccacacagcaaccaaattagaaatcaccattaagaaactcactcaaaaccatacaattacatggaaattgaagaacctgctcctgcatgattcctgggaaaataatgaaattaaggcagaaatcaagaagttctttgacaccaatgagaacaaagagacaacataccagaatctctggtatgtcaaagataccagaatctctggtatgctctggtatgtgaaagcagtgtgtagagggaaatttatagcactaaatgcccacaagagaaagcaggaaagatctaaaattgacaccctaacatcacaattaaaagaactagagaagcaagagcaaacacattcaaaaactagcagaaggcaagaaataactaagatcagagcagaactgaaggaaatagagacacaaaaaacccttcaaaaaatcaatgaatgcaggagctggttttttgaaaagatcaacaaaattgatagaccgctagcaagactaattaagaagaaaagagagaagaatcaaatagatgcaataaaaaatgacaaaggggatatcatcaccgatcccacagaaatacaaactaccatcagagaatactataaacacctctacggaaataaactagaaaatctagaagaaatggataaattcctggacacatacaccctcccaagactaaaccaggaagaagttgaatctctgaatagaccaataacaggctctgaaattgaggcaataattaatagcttaccaaccaaaaaaagtccaggaccagatggattcacagccgaattctaccagaggtacaaggaggagctgagaataaaatacctaggaattcaacttacaagggacgtgaaggaccttttcaaggagaactacaaaccactgctcaatgaaataaaagaggatacaaacaaatggaagaacattccatgctcatgggtaggaagaatcaatatcatgaaaatggccatactgcccaaggtaatttatagattcaatgccatccccatcaagctaccaatgactttcttcacagaattggaaaaaactactttaaagttcatatggaaccaaaaaagagcccgcatcgccaagtcaatcctaagccaaaagaacaaagctggaggcatcacgctacctgacttcaaactatactacaaggctacagtaaccaaaacagcatggtactggtaccaaaacagagatacagatcaatggaacagaacagagccctcagaaataatgctgcatatctacaaccatctgatctttgacaaacctgacaaaaacaagcaatggggaaaggattccctatttaataaatggtgctgggaaaactggctagccatatgtagaaagctgaaactggatcccttccttataccttatacaaaaattaattcaagatggattaaagacttaaacgttagacctaaaaccataaaatccctagaagaagacctaggcaataccattcaggacataggcatgggcaaggacttcatgtctaaaacaccaaaagcaatggcaacaaaagccaaaattgacaaatgggatctaattaaactaaagagcttctgcacagcaaaagaaactaccatcagagtgaacaggcaacctacagaatgggagaagattttttgcaatctattcatctgacaaagggctaatatccagaatctataaagaacttaaacaaatttacaagaaaaaaacaaacaaccccatcaacaagtgggcgaaggacagtttttgatgaacagacacttctcaaaagaagacatttatgtagccaacagacacatatgcagccaacagacacatgaaaaaaagctcatcccatcacccactgggcattaaagaaatgcaaatcaaaaccacaatgagataccatctcacaccagttagaatggtgatcattaaaaagtcaggaaacaacagatactggagaggatgtggagaaaacaggaacaacttttacactgttggtgggactgtaaactagttcaaccattgcggaagtcagtgtggcaattcctcaggaatctagaactagaaataccatttgacccagccatcccattactgggtagatacccaaaggattataaatcatgctgctataaagacacatgcacacgtatgtttattgcagcactattcacaatagcaaagacttggaaccaacccaaatgtccaacaacgatagattggattaagaaaatgtggcacatatacaccatggaatactatgcagccataaaaaatgatgagttcatgtcctttgtagggacatggatgaagctggaaactatcattctcagcaaactatcacaaggacaaaaaaccaaacactgtatgttctcactcatagtattggaagttctggccagggcaatcaggcaagagaaagaaataaagggtattcaattaggaaaagaggaagtcaaattgtccctgtttgcagatgacatgattgtatatttagaaaaccccatcatgtcagccccaaatctccttaagctgataagcaacttcagcaaagtctcaggatacaaaatcaacgtgcaaaaatcacaagcattcctatataccaatatcagacaaatagagagccaaatcatgagtgaactcccattcacaattgctacaaagagaataaaatacctaggaatccaactttcaaggaatgtgaaagagctcttcaaggagaactacaaaccactgctcaaggaaataaaagaggacacaaacgattggaagaacattccatgctcatggataggaagagtcaacattgtgaaaatggccatgctgcccaaagtaatttatagattcagtgctatccccatcaagttaccaatgactttcttcacagaattggaaaaaactactttaaagttcatatggaaccaaaaaagagcctgcattgccaagacaatcctaagcaaaaagaacaaagctggaggcatcacgctacctgacttcaaactatactgcaaggctacagtaaccaaaacagcatggtactgggtaccaaaacagatatatagaccaatggaacagaacagagacctcagaaataataccacacatctacaaccatctgatctttcacaaacccgacaaaaacaagcaacgaggaaaggattccctatttaataaatggtgctgggaaaactggctagccatatgtggaaagctgaaactggatccgttccttacaccttatacaaaaattaattcaagatggattaaagacttaaatgttagacctaaaaccataaaaaccctagaagaaaacctaggcaataccattcaggacataggcatgggcaaggacttcatgtctaaaataccaaaagcaatggcaacaaaagccaaaattgacaaatggaatctaattgaactaaagagcttctgcacagcaaaagaaactaccatcagtgtgaacaggcaacctacagaatgggagaaaatttttgcaatctgcttatctgacaaagggctaatatccagaatctacaaagaactcaaacaaagacacaagaaaaaaacaaacaaccccatcaaaaagtgggcgaaggatatgaacagacacttctcaaaagaagacatttatgcagccaacagacacatgaaaaaatgctcatcatcactggccatcagagaaatgccaatcaaaaccacaatgagataccatctcacaccagttagaatggcgatcattaaaaagtcaggaaacaacagatgctggagaggatgtggagaaataggaacgctttcacactgttggtgggactgtaacctagttcaaccattgtggaaggcagtgtggcgattccttaaggatctagaactagaaataccatttgacccagccatctcattactgggttatacccaaaggattataaatcatgctgctataaagacacatgcacacaaagcactttcacatgcagacaacatcttccgctataattgcttcattgaccatctcttagaacttgccaatcaatcttccaaactgccacctctgtccctcaacagacaatgtgagaatatagatattttctga

SEQ ID NO: 116408 - DNA, 3213 bp, Homo sapiens
atggtaaagggatcaattcaacaagaagagctaactatcttaaatatatatgcacctaatacaggagcactcagattcataaagcaagtccttagagacctacaaagagacttagactcccacacaataataatgggagattttcacaccccactgtcaacattagacagatcaacaagacagaaggttaacaaggatatccaggaattgaactcagctctgcaccaagaggacctaatagacatctacagaactctccaccccaaatcaacagaatatacatttttttcagcaccacaccacacctattccaaaattgaccacatagttggaagtaaagctctcctcagcaaatgtaaaagaacagaaattataacaaactgtctctcagaccacagtgcaatcaaactagaactcaggattaagaatctcactcaaaaccgctcaactacatggaaactgaacaacctgctcctgaatgactactgggtacataacgaaatgaaggcagaaataaagatgttctttgaaaccaacgagaacaaagacactacataccagaatctctgggacacattcaaagcagtgtgtagagggaaatttatagcactaaatgcccacaagagaaagcaggaaagatctaaaattgacaccctaacatcacaattaaaagaactagagaagcaagagcaaacacattcaaaagctagcagaaggcaagaaataactaaaatcagagcagaactgaaggaaatagagacacaaaaaacccttcaaaacattaatgaatccaggagctggttttttgaaaggatcaacaaaattgatagaccactagcaagactaataaagaaaaaaagagagaagaatcaaatagatgcaataaaaaatgataaaggggatatcaccaccgatcccacagaaatacaaactaccatcagagaatactacaaacacctctatgcaaataaactagaaaatctagaagaaatggataaattcctcaacacatacactctcccaacactaaaccaggaagaagttgaatctctgaatagaccaataacaggagctgaaattgtggcaataatcaatagcttaccaaccaaaaagagtccaggaccagatggattcacagccgaattctaccagaggtacaaggaggaactggtaccattccttctgaaaccattccaatcaatagaaaaagagggaatcctccctaactcattttatgaggccagcatcattctgataccaaagccgggcagagacacaacaaaaaaagagaattttagaccaatatccttgatgaacattgatgcaaaaatcctcaataaaatactggcaaaacgaatccagcagcacatcaaaaatcttatccaccatgatcaagtgggcttcatccctgggatgcaaggctggttcaatatacgcaaatcaataaatgtaatccagcatataaacagagccaaagacaaaaaccacatgattatctcaatagatgcagaaaaagcctttgacaaaattcaacagcccttcatgctaaaaactctcaataaattagacgacatgattgtatatctagaaaaccccatcgtctcagcccaaaatctccttaagctgataagcaacttcagcaaagtctcaggatacaaaatcaatatacaaaaatcacaagcattcttatacaccaacaacagacaaacagagagccaaatcatgagtgaactcccattcacaattgcttcaaagagaataaaatacctaggaatccaacttacaagggatgtgaaggacctcttcaagggagaaccacaaaccactgctcaacgaaataaaagaggatacaaacaaatggaagaacattccatgctcatgggtaggaagaatcaatatcgtgaaaatggccatactgcccaaggtaatttacagatcaatgccatccccatcaagctaccaatgactttcttcacagaattggaaaaaactactttaaagttcatatggaaccaaaaaagagcccgcatcgccaagtcaatcctaagccaaaagaacaaagctggaggcatcacactacctgacttcaaactatactacaaggctacagtaaccaaaacagcatggtactggtaccaaaacagagatatagatcaatggaacagaacagagccctcagaaagaacgccgcatatctacaactatctgatctttgacaaacgtgagaaaaacaagcaatggggaaaggattccctgtttaataaatggtgctgggaaaactggctagccatatgtagaaagctgaaactggatcccttccttacaccttatacaaaaatcaattcaagatggattaaagacttaaacgttagacctaaaaccataaaaaccctagaagaaaacctaggctttaccattcaggacataggcatgggcaaggacttcatatctaaaacaccaaaagcaatggcaacaaaagccaaaattgacaaatgggatctaattaaactaaagagcttctgcacagcaaaagaaactaccatcagagtgaacaggcaacctacaaaatgggagaaaattttcgcaacctactcatctgacaaagggctaatatccagaatctacaatgaactcaaacaaatttacaagaaaaaaacaaacaaccccatcaaaaagtgggcgaaggacatgaacagacacttctcaaaagaagacatttatgcagccaaaaaacacatgaaaaaatgctcaccatcactggccatcagagaaatgcaaatcaaaaccacaatgagataccatctcacaccagttagaatggcaatcattaaaaagtcaggaaacaaccggtgctggagaggctgtggagaaataggaacacttttacactgttggtgggactgtaaactagttcaaccattgtggaaggcagtgtggcgattcctcagggatctagaactggaaataccatttgacccagccatcccattactgggtatatacccaaaggactataaatcatgctgctataaagacacatgcacacgcaggaaacagcttgactgtgcagagcccgtggagcccagaaaagtcggggatggggagtggtccctgaccaaatggacacgccctggctccagagctctgccctggcccccagagcaagccaagccttacccaccgaccctgccaactctagcccaggacttttag

SEQ ID NO: 116409 - DNA, 3235 bp, Homo sapiens
atggagctgaaaaccaaggctcgagaactacgtgaagaatgcagaagcctcaggagccgacgcaatcaactggaagaaagggtatcagcaatggaagatgaaatgaatgaaatgaagcgagaagggaagtttagagaaaaaagaataaaaagaaatgagcaaagcctccaagaaatatgggactatgtgaaaagaccaaatctacgtctgattggtgtacctgaaagtgatgcggagaatggaaccaagttggaaaacactctgcaggatattatccaggaggacttccccaatctagcaaggcaggccaacgttcagattcaggaaatacagagaacgccacaaagatactcctcgagaagagcaactccaagacacataattgtcagattcaccaaagttgaaatgaagcaaaaaatgttaagggcagccagagagaaagactttaaaccaacaaagatcaaaagagacaaagaaggccattacataatggtaaagggatcaattcaacaagaggagctaactatcctaaatatatatgcacccaatacaggagcacccagattcataaagcaagtcctgagtgacctacaaagagacttagactcccacacattaataatgggagactttaacaccccactgtcaacattagacagatcaacaagacagaaagtcaacaaggatacccaggaattgaactcagctctgcaccaagcagacctaatagacatctacagaactctccaccccaaatcaacagaatatacatttttttcagcaccacaccacacctattccaaaattgaccacatagttggaagtaaagctctcctcagcaaatgtaaaagaacacaaattataacaaactatctctcagaccacagtgcaatcaaactagaactcaggattaagaatctcactcaaagccgctcaactacatggaaactgaacaacctgctcctgaatgtctactgggtacataacgaaatgaaggcagaaataaagatgttctttgaaaccaatgagaacaaagacacaacataccagaatctctgggacacattcaaagcagtgtgtagagggaaatttatagcactaaatgcccacaagagaaagcaggaaagatccaaaattgacaccctaacatcacaattaaaagaactagagaagcaagagcaaacacattcaaaagctagcagaaggcaagaaataactaaaatcagagcagaactgaaggaaatagagacacaaaaaacccttcaaaaactcaatgaatccaggagctggttttttgaaaggatcaacaaaattgatagaccgctagcaagactaataaagaaaaaaagagagaagaatcaaatagacacaataaaaaatgataaaggggatatcaccaccgatcccacagaaatacaaactaccatcagagaatactacaaacacctctacgcatataaactagaaaatctagaagaaatggatacattcctcgacacatacactctcccaagactaaaccaggaagaagttgaatctctgaatagaccaataacaggatctgaaattgtggcaataatcaatagcttaccaaccaaaaagagtccaggaccagatggattcacagccaaattctaccagaggtacaaggaggagctggtaccattccttctgaaactattccaatcaatagaaaaagagggaatcctccctaactcattttatgatgccagcatcattctgataccaaagccgggcagagacacaaccaaaaaagagaattttagaccaatatccttgatgaatattgatgcaaaaatcctcaataaaatactggcaaaccgaatccagcagcacatcaaaaagcttatccaccatgatcaagtgggcttcatccctgggatgcaaggctggttcaatatacgcaaatcaataaatgtaatccagcatataaacagagccaaagacaaaaaccacatgattatctcaatagatgcagaaaaagcctttgacaaaattcaacaacccttcatgctaaaaactctcaataaattaggtattgatgggacgtatttcaaaataataagagctatctatgacaaacccacagccaatatcatactgaatgggcaaagactggaagcattccctttgaaaactggcacaagacagggatgccctctctcaccactcctattcaacatagtgttggaagttctggccagggcaatcaggcaggagaaggaaataaagggtattcaattaggaaaagaggaagtcaaattgtccctgtttgcagacgacatgattgtttatctagaaaaccccatcgtctcagcccaaaatctccttaagctgataagcaacttcagcaaagtctcaggatacaaaatcaatgtacaaaaatcacaagcattcctatacaccaacaacagacaaacagagagccaaatcatgagtgaactcccattcacaattgcttcaaagagaataaaatacctaggaatccaacttacaagggatgtgaagaacctcttcaaggagaactacaaaccactgctcaaggaaataaaagaggatacaaacaaatggaagaacattccatgctcatgggtaggaagaatcaatatcgtgaaaatggccatactgcccaaggtaatttacagattcaatgccatccccatcaagctaccaatgactttcttcacagaattggaaaaaactactttaaagttcatatggaaccaaaaaagagcccgcattgccaagtcaatcctaagccaaaagaacaaagctggaggcatcacactacctgacttcaaactatactacaaggctacagtaaccaaaacagcaagaccccatgactggtatagaactgaaagtaaatcaagctggacttatgaaggattcctctctccattcgtggatgaatttgagtggcactggaacaagctctggaggaaggtggcctctgtgttctcagagaacatcatcaatattgtgacactccaacatgtgtcagccactgggtttcccagggctccttctctggggatccttctgaagttggaaaattatcctccaatcctgggtgatctgagcgatggcctgcccagagtggctctcattggcccagttctgggctctacggcatgcaatcccttggcatttgtaaatcttagaagagtctgtatgctttcttctgaaagcatacctagcagagaagctgttg

SEQ ID NO: 116410 - DNA, 3291 bp, Homo sapiens
atggtaaagggatcaattcaacaagaggagctaactatcctaaatatttatgcacccaatacaggagcacccagattcataaagcaagtcctgagtgacctacaaagagacttagactcccacacattaataatggaagactttaacaccccactgtcaacattagacagatcaacgagacagaaagtcaacaagaatacccaggaattgaactcagctctgcaccaagcagacctaatagacatctacagaactctccaccccaaatcaacagaatatacatttttttcagcaccacaccacacctattccaaaattgaccacatagttggaagtaaagctctcctcagcaaatgtaaaagaacagaaattataacaaactatctctcagaccacagtgcaatcaaactagaactcaggattaagaatctcactcaaagccgctcaactacatggaaactgaacaacctgctcctgaatgactactgggtacataacgaaatgaaggcagaaataaagatgttctttgaaaccaacgagaacaaagacaccacataccagaatctctgggacgcattcaaagcagtgtgtagagggaaatttatagcactaaatgcctacaagagaaagcaggaaagatccaaaattgacaccctaacatcacaattaaaagaactagaaaagcaagagcaaacacattcaaaagctagcagaaggcaagaaataactaaaatcagagcagaactgaaggaaatagagacacaaaaaacccttcaaaaaatcaatgaatccaggagctggttttttgaaaggatcaacaaaattgatagaccgctagcaagactaataaagaaaaaaagagagaagaatcaaatagacacaataaaaaatgataaaggggatatcaccaccgatcccacagaaatacaaactaccatcagagaatcctacaaacacctctacgcaaataaactagaaaatctagaagaaatggatacattcctggacacatacactctcccaagactaaaccaggaagaagttgaatctctgaatagaccaataacaggctctgaaattgtggcaataatcaatagtttaccaaccaaaaagagtccaggaccagatggattcacagccgaattctaccagagagctatctatgacaaacccacagacaatatcatactgaatgggcaaaaactgcaagcattccctttgaaaactggcacaagacagggatgccctctctcaccactcctattcaacatagtgttggaagttctggccagggcaatcagccaggagaaggaaataaagggtattcaattaggaaaagaggaagtcaaattgtccctgtttgcagacgacatgattgtttatctagaaaaccccatcgtctcagcccaaaatctccttaagctgataagcaacttcagcaaagtctcaggatacaaaatcaatgtacaaaaatcacaagcattcttatacaccaacaacagacaaacagagagccaaatcatgagtgaactcccattcacaattgcttcaaagagaataaaatacctaggaatccaacttacaagggatgtgaaggacctcttcaaggagaactacaaaccactgctcaaggaaataaaagaggacacaaacaaatggaagaacattccatgctcatgggtaggaagaatcaatatcgtgaaaatggccatactgcccaaggtaatttacagattcaatgccatccccatcaagctaccaatgactttcttcacagaattggaaaaaactactttaaagttcatatggaaccaaaaaagagcccgcatcgccaagtcaatcctaagccaaaagaacaaagctggaggcatcacactacctgacttcaaactatactacaaggctacagtaaccaaaacagcatggtactggtaccaaaacagagatatagatcaatggaacagaacagagccctcagaaataatgccgcatatctacaactatctgatctttgacaaacctgagaaaaacaagcaatggggaaaggattccctatttaataaatggtgctgggaaaactggctagccatatgtagaaagctgaaactggatcccttccttacaccttatacaaaaatcaattcaagatggattaaagatttaaacgttagacctaaaaccataaaaaccctagaagaaaacctaggcattaccattgaggacataggcgtgggcaaggacttcatgtccaaaacaccaaaagcaatggcaacaaaagccaaaattgacaaatgggatctaattaaactaaagagcttctgcacagcaaaagaaactaccatcagagtgaacaggcaacctacaacatgggagaaaattttcgcaacctactcatctgacaaagggctaatatccagaatctacaatgaactcaaacaaatttacaagaaaaaaacaaacaaccccatcaaaaagtgggcgaaggacatgaacagacacttctcaaaagaagacatttatgcagccaaaaaacacatgaagaaatgctcatcatcactggccatcagagaaatgcaaatcaaaaccactatgagatatcatctcacaccagttagaatggcaatcattaaaaagtcaggaaacaacaggagagacagaacagctgaggaaacagcagaacggtggaaaatttttgaaagtgttttgagcccacccaacctgaggagagcattcaaagaaaaacaggaagaagaagtcggcttcagaaggtgggttataacaaactcctccaagctaaaacagcatgttttaacccaatgcaaggaagctaagaaccttgaaaaaaggttagaggaatttctaactagaataaccagtttagagaagaacataaatgacctaatggacctgaaaaacacagcacgagaacttcttgacgcctacacaagtatcaatagccaaattaatcaagcggaagaaaggttatcagagactgaagatcaacttaatcaaataaagcatgaggacaagattagagggaaaaaaatgaaaaggaacaaacaaagcctccaagaaatatgggactatgtgaaaaggccaaatctacgtctgattggtgtagctgaaagtgacagggagaatggagccaagttagaaaacactcttcagtatattatccaggagaacttccccaacctagcaagacaggccaacactcaaattcaggaaacacagagaccaccacaaagatactccttgagaaaagcaaccccaagacacataatcatctga

SEQ ID NO: 116411 - DNA, 4374 bp, Homo sapiens
atggtaaagggatcaattcaacaagaggagctaactatcctaaatatttatgcacccaatacaggagcacccagattcataaagcaagtcctcagtgacctacaaagagacttagactcccacacattaataatgggagactttaacaccccactgtcaacattagacagatcaacgagacagaaagtcaacaaggatacccaggaattgaactcagctctgcaccaagcagacctaatagacatctacagaactctccaccccaaatcaacagaatatacatttttttcagcaccacaccacacctattccaaaattgaccacatacttggaagtaaagctctcctcagcaaatgtaaaagaacagaaattataacaaactatctctcagaccacagtgcaatcaaactagaactcaggattaagaatctcactcaaagccgctcaactacatggaaactgaacaacctgctcctgaatgactactgggtacataacgaaatgaaggcagaaataaagatgttctttgaaaccaacgagaacaaagacaccacataccagaatctctgggacgcattcaaagcagtgtgtagagggaaatttatagcactaaatgcctacaagagaaagcaggaaagatccaaaattgacaccctaacatcacaattaaaagaactagaaaagcaagagcaaacacattcaaaagctagcagaaggcaagaaataactaaaatcagagcagaactgaaggaaatagagacacaaaaaacccttcaaaaaatcaatgaatccaggagctggttttttgaaaggatcaacaaaattgatagaccgctagcaagactaataaagaaaaaaagagagaagaatcaaatagacacaataaaaaatgataaaggggatatcaccaccgatcccacagaaatacaaactaccatcagagaatactacaaacacctctacgcaaataaactagaaaatctagaagaaatggatacattcctcgacacatacactctcccaagactaaaccaggaagaagttgaatctctgaatagaccaataacaggctctgaaattgtggcaataatcaatagtttaccaaccaaaaagagtccaggaccagatggattcacagccgaattctaccagaggtacatggaggaactggtaccattccttctgaaactattccaatcaatagaaaaagagggaatcctccctaactcattttatgaggccagcatcattctgatgccaaagccgggcagagacacaaccaaaaaagagaattttagaccaatatccttgatgaacattgatgcaaaaatcctcaataaaatactggcaaaccgaatccagcagcacatcaaaaagcttatccaccatgatcaagtgggcttcatccctgggatgcaaggctggttcaatatacgcaaatcaataaatgtaatccagcatataaacagagccaaagacaaaaaccacatgattatctcaatagatgcagaaaaagcctttgacaaaattcaacaacccttcatgctaaaaactctcaataaattaggtattgatgggacgtatttcaaaataataagagctatctatgacaaacccacagccaatatcatactgaatgggcaaaaactggaagcattccctttgaaaaccggcacaagacagggatgccctctctcaccgctcctattcaacatagtgttggaagttctggacagggcaatcaggcaggagaaggaaataaagggtattcaattaggaaaagaggaagtcaaattgtccctgtttgcagacgacatgattgtttatctagaaaaccccatcgtctcagcccaaaatctccttaagctgataagcaacttcagcaaagtctcaggatacaaaatcaatgtacaaaaatcacaagcattcttatacaccaacaacagacaaacagagagccaaatcatgggtgaactcccattcacaattgcttcaaagagaataaaatacctaggaatccaacttacaagggatgtgaaggacctcttcaaggagaactacaaaccgctgctcaaggaaataaaagaggagacaaacaaatggaagaacattccatgctcatgggtaggaagaatcaatatcgtgaaaatggccatactgcccaaggtaatttacagattcaatgccatccccatcaagctaccaatgactttcttcacagaattggaaaaaactactttaaagttcatatggaaccaaaaaagaacccgcattgccaagtcaatcctaagccaaaagaacaaagctggaggcatcacactacctgacttcaaactatactacaaggctacagtaaccaaaacagcatggtactggtaccaaaacagagatatagatcaatggaacagaacagagccctcagaaataatgccgcatatctacaactatctgatctttgacaaacctgagaaaaacaagcaatggggaaaggattccctatttaataaatggtgctgggaaaactggctagccatatgtagaaagctgaaactggatcccttccttacaccttatacaaaaatcaattcaagatggattaaagatttaaacgttaaacctaaaaccataaaaaccctagaagaaaacctaggcattaccattcaggacataggcatgggcaaggacttcatgtccaaaacaccaaaagcaatggcaacaaaagccaaaattgacaaatgggatctaattaaactaaagagcttctgcacagcaaaagaaactaccatcagagtgaacaggcaacctacaacatgggagaaaattttcgcaacctactcatctgacaaagggctaatatccagaatctacaatgaactcaaacaaatttacaagaaaaaaacaaacaaccccatcaaaaagtgggcgaaggacatgaacagacacttctcaaaagaagacatttatgcagccaaaaaacacatgaagaaatgctcatcatcactggccatcagagaaatgcaaatcaaaaccactatgagatatcatctcacaccagttagaatggcaatcattaaaaagtcaggaaacaacaggtgctggagaggatgcggagaaataggaacacttttacactgttggtgggactgtaaactagttcaaccattgtggaagtcagtgtggcgattcctcagggatctagaactagaaataccatttgacccagccatcccattactggatatatacccaaatgagtataaatcatgctgctataaagacacatgcacacagaataaaatacctaggaatccaacttacaagggatgtgaaggacctcttcaaggagaactacaaactactgctcaacaaaataaaagaggacacaaacaaatggaagaacattccatgctcatgggtaggaagaatcaacatcgtgaaaatggccatactgcccaagccatatggaaaaagctgaaactggatcccttccttacaccttatacaaaaattcattcaagatggatcaaagacttcaatgttagacctaaaaccataaaaaccctagaagaaaacctaggcaataccattcaggacgtaggcctgggcaaggacttcatatctaaaacaccaaaagcaatggcaacaaaagccaaaactgacaaatgggatctcattaaactaaagagcttctgcacagcaaaagaaactaccatcagagtgaacaggcaacctacaaaatgggagaaaatttttgcaatctactcgtctgacaaagggctaatatccagaatctacaaagaactcaaacaaacttacaaggaaaaaacaaacaacctcatcaaaaagtgggtgaaggatatgaacagacacttctcaaaagaagacttttatgcagccaaaagggacatgaaaaaatgctcatcatcactggccatcagagaaatgcaaatcaaaactacaacgagataccatctcacagcagttagaatggccatcattaaaaagtcaggaaacaacaggtactggagaggatgtggagaaataggaacacttttacactgttggtgggactgtaaactagtacaatcattgtggaagacagtgtggcgattcctcagggatctagaactagaaataccatttgacccagcaatcccattactgggtatatacccaaaggattgtaaatcatgctgctataaagacacatgcacacgtatatttattgtggcactattcacaatagcaaagacttggaaccaagccaaatgtccaacaatgatagactggattaaggaaatgtggcacatacacaccatggaatactatgcagccataaaaaaggatgagttcatgtcctttgtagggacatag

SEQ ID NO: 116412 - DNA, 4110 bp, Homo sapiens
atggtaaagggatcaattcaacaagaagagctaactatcctaaatatatatgcacccaatacaggagcacccagattcataaagcaagtcctgagtgacctacaaagagacttagactcccacacatttataatgggagactttaacaccccactgtcaacattagacagatcaaggagacaggaagtcaacaaggatacccaggaattgaactcagctctgcaccaagcagacctaatagacatctacagaactctccaccccaaatcaacagaatatacatttttttcagcaacacaccacacctattccaaaattgaccacatagttggaagtaaagctgtcctcagcaaatgtaaaagaacagaaattataacaaactatctctcagaccacagtgcaatcaaactagaactcaggattaagaaactcactcaaaaccgctcaactacatggaaactgaacaacctgctcctgaatgactactgtgtacataacgaaatgaaggcagaaataaacatgttctttgaaaccaacgagaacaaagacacaacataccagaatctctgggacacattcaaagcaaaatacaagctaccatcagagaatactacaaacaacctctacacaaataaactagaaaatctagaagaaatggataaattccttgacacatacactctcccaagactaaaccaggaaaaagttgaatctctgaatagaccaataacaggatctgaaattgtggcaataatcaatagcttaccaaccaaaaagagtccaggaccagatggattcacagctgaattctaccagaggtacaaggaggagctggtaccattccttctgaaactattccaatcaatagaaaaagagggaatcctccctaactcattttatgaggccagcatcatcctgataccaaagccgggcagagacacaaccaaaaaagagaactttagaccaatatccttgatgaacattgatgcaaaaatcctcaataaaatactggcaaaccgaatccagcagcacatcaaaaagcttatccaccatgatcaggtgggcttcatccctgggatgcaaggctggttcaatatatgcaaatcaataaatgtcatccagcatataaacagaaccaaagacaaaaaccacatgattatctcaatagatgcagaaaaagcctttgacaaaattcaacaacccttcaggctaaaaactctcaataaattaggtgttgatgggacgtatctcaaaataataagagctatctatgacaaacccacagccaatatcatactgaatgggcaaaaactggaagcattccctttgaaaactggcacaagacagggatgccctctctcaccactcctattcaacatagtgttggaagttctggccagggcaattaggcaggagaaggaaataaagggatgtgaaggacctcttcaaggagaactacaaaccactgctcaaggaaataaaagaggatacaaacaaatggaagaacattccatgctcatgggtaggaagaatcaatatcatgaaaatggtcatactgcccaaggattcaacgtgggcagaagtgctggtgggagatcgacggtcagggagattaaccgagatgcttgtcattttcctggttttccagtccttcagtcattccttcctaaacacactaatgtccctgccctctattttctcctcatggccttgtttctgcagcagccagttagtgagctgcctgagaacctgcaggtcagtgtgcctgtcatcagctgccggagtaagcagggttgccagccttggcaatcagaagaagagggatcttggctccgagaatatcctgtgaccctgatgcagttcttcagatatttgtatcacaacgtgccagaccttgcctccatgtggatgagccctgacttcctgtgtgcattagcagccaccgtcttccccttcaatattcgcccttactcagagatggtgactgaccttgatgatgaagttggatctccagcagaagagtttaaagcgtttgcagcagacacagggatgaacaggagccaatcagagtactgcaatgtgggcaccaagacatatctgaccaatcacccggctaaaaagttcgtttttgacttcatgcgggtcttaatcatagacaacctctgtctcactcctgccagcaagcaaactccactaattgatcttttgttggagcgtcagcagaatgccctgaagtacgtgacagaagagtggtgtcagatcgagtgcgagctgttgagggagcgggggctgtggggccctcccatcggctcccacctcgacaagtggatgctggagatgacagaagggccctgcaggatgaggaaaaagatggtgcgaaatgatatgttttataaccattacccttacgtgccagaaactgagcaagagacaaatgtggcgtctgagatcccaagtaaacagcctgagacacccgatgatattcctcaaaagaaacctgctcgatatagaagagccgtaagttatgacagtaaagagtactacatgcgactggcctctggcaatcccgccattgtccaagacgccattgtggagagttcagaaggtgaagctgctcagcaagaaccagagcatggggaagacactattgctaaagtcaaaggtttggtcaagcctcctctaaaacgctcccgatctgcacctgatggaggagatgaggagaaccaggagcagctacaagaccagattgctgagggcagctccatagaagaggaggagaaaacagataatgctaccttactgcgcctgttagaggaaggagaaaagatccaacacatgtaccgctgtgctcgagtccagggcctagataccagtgaggggctccttctttttggtaaagagcatttttatgtgattgatggatttaccatgacagcaaccagggaaataagagatattgaaaccttacctccaaatatgcatgagcctattattcctagaggagccaggcaaggccctagtcaactcaagagaacatgcagcatttttgcatatgaagatatcaaggaagttcataaaaggagatatctcctgcagtacagtaatattacccgtgagcacctgggaaatgagggtggttcttcaaataaagggcctgtggatgttgattggtttttggctgtagtgccatctctaacggacagttcagaatctgtatctgggcaacgaccaaacacgagtgtggagcagggatctgggttacttagcactttggttggagagaagtctgtgactcagagatgggagagaggtgaaatcagcaacttccaatatttgatgcatttgaacactttggctggcagatcatataatgatctcatgcagtatcctgtcttcccctggatccttgcagattatgactcagaggaggtggatcttactaatcccaagacgtttagaaacctggctaagccaatgggagcacaaacagatgaacgattagctcagtataagaagcggtataaagactgggaggatcctaatggagaaactcctgcataccactatgggacccactattcatctgcaatgattgtggcctcataccttgtaaggatggagcctttcacacagatattcttaaggctacagggtggccactttgacctggctgaccggatgtttcacagtgtgcgcgaggcctggtattcagcgtcaaagcacaatatggcagatgtaaaagaacttatcccagagttcttttatttaccagaattcctgttcaattccaacaactttgatctaggctgtaaacaaaatggcaccaagcttggagatgttatccttccaccctgggcaaaaggggacccacgagaattcatcagagtccatcgtgaggctttggagtgtgattacgtgagtgcccatctacatgagtggattgacttaatcttcggttataaacagcaaggccctgctgcagtagaagctgtaaatgtcttccatcatcttttttatgagggtcaagtggatatctacaacatcaatgacccactaaaggagacagccacaattgggttcattaataacttcggtcagatccctaaacag

SEQ ID NO: 116413 - DNA, 3534 bp, Homo sapiens
atggtaaagggatcaattcaacaagaagagctaactatcctaaatacatatgcagcccatacaggagcaccaagactcataaagcaagtcctgagtgacctacaaagagacttagactcccacacaataataatgggagactttaacaccccactgtcaacattagacagatcaacgagacagaaagttaacaaggatacccaggaattgaagtcagctctgcaccaagcggacctaacagacatctacagaactctccaccacaaatcaacagaatatacatttttttcagcaccacaccacatctattccaaaattgaccacatactgggaagtaaagctctcctcagcaaatgtaaaagaacagaaattataacaaactatctctcagaccacagtgcaatcaaactagaactctggattaagaatctcactcaaaaccactcaactacatgggaactgaacaacctgctcctgaatgactactgggtacataacgaaatgaaggcagaaataaagatgttctttgaaaccaatgagaacaaagacacaacataccataatctctgggacacattcaaagcagtgtgtagagggaaatttataccactaaatgcccacaagagaaagcaggaaagatccaaaattgacaccctaacatcacaattaaaagaactagaaaagcaagagcaaacacattcaaaagctagcagaaggcaagaaataactaaaatcagagcagaactgaaggaaatagagacacaaaaaacccttcaaaaaattaatgaatccaggagctggttttttgaaaggatcaacaaaattgatagactgctagcaagactaataaagaaaaaaagagagaagaatcaaatagatgcaataaaaaatgataaaggagatatcaccaccgatcccacagaaatacaaactaccatcagagaatactgcaaacacctctatgcaaataaactagaaaatctagaagaaatggataaattcctggacacatacactctcccaagactaaaccaggaagaagttgaatctctgaatagaccaataacaggagctgaaattgtggcaataatcaatagcttaccaaccaaaaagagtccaggaccagatggattcacagccaaattctaccagaggtacaaggaggaactggtaccattccttctgaaactattccaatcaatagaaaaagagggaatcctccctaactcattttatgaggccagcatcattctgataccaaagccaggaagagacacaacaaaaaaagagaattttagaccaatatccttgatgaacattgatgcaaaaatcctcaataaaaaactggcaaaacgaatccagcaacacatcaaaaagcttatccaccatgatcaagtgggcttcatccctggaatgcaaggctggttcaatatacgcaaatcaataaatgtaatccagcatataaacagagccaaagacaaaaaccatatgattatctcaatagatgcagaaaaagcctttgacaaaattcaacaacccttcatgctaaaaactctcaataaattagagaataaaatacctaggaatccaccttacaagggatgtgaaggacctcttcaaggagaactacaaaccactgctcaaggaaataaaagaggatacaaacaaatggaagaacattccatgctcatgggtaggaagaatcaatatcgtgaaaatggccatactgcccaagaacattttgatcacccttcagcttcttttagttctcccagaactctccacattgatcccactctggctaccagcactagctggacagtaatgactctcagaggtgaacacaatatgcctcaacatgcctttctggaagttcacataggaactgcacagcacctgaattccagttctgcaaagctcttctctgaatactggagtatatccctttggagtgccccggggaaagccagggctgcaggcagttccagcaccaactcagaccgcatctgcccactgcctagcggggcacttctctaccaatccgaagggctgctcgcccggcctcacgggaaaggtagtttccaggtagggcgccaacagcatcaagctgtgcgcgtgggctctgcgcatgcctcgtccgccggctacgtctgcgtttccgcctttccttttgtttttctcaggttttgcgtgggaggcggtcccgggatttcaagggtctacgcgcttttctatggcgaatgcaacccgacgagggagtgggctgtatcttcagagttgtctccgtctttccaagaacagaacaaaatgaacaaggtagaacagaagtcccaggagtcagtatcatttaaagatgtgactgtgggcttcacccaggaggagtggcagcacctggaccctagtcagagggctctgtatagagatgtgatgctggagaactacagcaaccttgtctcagtggggtattgtgttcacaaaccagaggtgatcttcaggctgcaacaaggagaagagccatggaaacaggaggaagaattcccaagccaaagctttccagactatatgttcatgtctccccagaattcatatgttggagccctcaccccaagtgtggtggtgtttggagatatgcagcccttggcagtacatcagagaattcacacaggggagaaaccctatgaatgtaatcaatgtggaaaaaccttcataagcaactctgttctcacaatacatcgtaaaacatatacaggtgagaaaccctatgaatgtaatgaatgtgggaaatctttctctaggagttcatatcttacaatacatcagagaactcacccaggcgagaaaccctatgaatgtaaggtatgtagcaaaaccttttgccacaagtctgatgccactaaacatcagaagactcacctagggggaaaaccctatgaatgtactcaatgtgggaaaacttttagtcgtaactcaggcctaaaagtacatcagagaacacatgcaaaggagaaaccctatgaatatactgagtgtgggaaatccttctctgagaaatcagtcctcacagtacatcagagaatacacacaggggaaaaaccttataaatgtaatgcacgtggaaaaaccttctacaataaatcagacctaaccaaacatcagagaacacacacaggtgagaagccctgtgaatgtaaggaatgtgggaaattcttctctaggaattcataccttacaatacaccagagaatgcatacaggagacaaaccctatgtgtgtaaaaaatgtgggaaaaccttctaccataaggcagactatacagtacataagagaacacacagaggggagaaatcttattactgtaataaatgtgggaaaacctttatttgcaactcagtcctcaaatcacatcagagaacacacacaggggagaagccctatggatgtaatgagtgtgggaagtccttctctgagaaatcagtccttactgtacatcagagaatacacacaggggaaaaaccttataaatgtaatgaatga

SEQ ID NO: 116414 - DNA, 3405 bp, Homo sapiens
atggagctgaaagccaaggctcgagaactacatgaagaatgcagaagcctaaggagccaatgcaatcaactggaagaaagggtatcagtgatggaagatgaaatgaatgaaatgaagcgagaagggaagtttagagaaaaaagaataaaaagaaacaaacaaagcctccaagaaatatgggactatgtgaaaagaccaaatctacgtctgattggtgtacctgaaagtgacggggagaatggaaccaagttggaaaacactctgcaggatattatccaggagaacctccccagtctagcaaggcaggccaacattcagattcaggaaatacagagaatgccacaaagatactcctcgagtagagcaactccaagacacataattgtcagattcaccaaagttgaaatgaaggaaaaaaatgtaaagtgcagccggagagaaagagacacacataggctcaaaataaaaggatggaggaagatctaccaagcaaatggaaaacaaaaaaaggcaggggttgcaatcctagtctcggataaaacagactttaaaccaacaaagatcaaaagagacaaagaaggcctttacataatggtaaagggatcaattcaacaagaagagctaactatcctaaatatatatgcacccaatacaggagcacccagattcataaagcaagtccttagagacctagaaagagacttagactcccacacaataataatgggagactttaacaccccactgtcaacattggacagatcaacaagacggaaagttaacaaggatatccaggaattgaactcagctctgcaccaagaggacctaatagacacctacagaactctcctccccaaatcaacagaatatacattcttctcagcaccacaccacacctattccaaaattgaccacatagttggaagtaaagctctcctcaggaaatgtaaaagaacagaaattttaacaaactgtctctcagaccacagtgtaatcaaactagaactcaggattaagaaactcactcaaaaccgctcaactacatggaaaatgaacaacctgctcctgaatgactactgggtacataacgaaatgaaggcagaaataaagatgttctttgaaaccaatgagaacaaagacacaacataccagaatctctgggacacattcaaagcagtgtgtagagggaaatttatagcactaaatgcccacaagagaaagcaggaaagatccaaaattgacaccctaacatcacaattaaaagaactagaaaagcaagagcaaacacattcaaaagctagcagaaggcaagaaataactaagatcagagcagaactgaaggaaatagagacacagaaaacccttcaaaaaattaatgaatccaggagctggatcaacaaaattgatagaccgctggcaagactaataaagaaaaaaagagagaagaatcaaatggacgcaataaaaaatgataaaggggatatcaacaccgatcccacagaaatacaaactaccatcagagaatactacaaacaactctatgcaaataaactagaaaatctagaagaaatggataaattcctggacacatacactctcccaagactaaaccaggaagaagttgaatctctgaatagaccaataacaggctctgaaattgtgccaataattaatagtttaccaaccaaaaagagtccaggaccagatggattcacagccgaattctaccagaggtacaaggaggaactggtaccattccttctgaaactattccaatcaatagaaaaagagggaatcctccctaactcattttatgaggccagcatcatcctgataccaaagcctggcagagacacaaccaaaaaagagaattttagacaaatatccttggtgaacattgatgcaaaaatcctcaataaaatactggcaaaccgaatccagcagtacatcaaaaagcttatccaccatgatcaagtgggcttcatccctgggatgcaaggctggttcaatatacacaaatcaataaatgtaatccagcgtataaacagaaccaaagacaaaaaccacatgatgatctcaatagatgcagaaaaggcctttgataaaattcaacaacgcttcatgctaaaaaccctcaataaattagtgttggaagttctggccagggcaattaggcaggagaaggaaataaagggtattcaattaggaaaagaggaagtcaaattgtccctgtttgtggatgacatgattgtatatttagaaaaccccattgtctcagctcaaaatctccttaagctgataagcaacttcagcaaagtctcaggacacaaaatcagtgtacaaaaatcacaagcattcttatacgccgataacagacaaacagagagcgaaatcatgagtgaagtcccattcacaattgcttcaaagagaataaaatacctaggaatccaacttacaaaggacgtgaaggacctcttcaaggagaactacaaaccactgctcaatgaaataaaagaggatacaaacaaatggaagaacattccacgctcatgggtaggaaggatcaatatcgtgaaaatggccatactgcccaaggtaatttatagattcaatgccatccccatcaagcaaccaatgactttcttcacagaattggaaaaaactactttaaagttcatatggaaccaaaaaagagccagcatcaccaagtcaatcctaagcctaaagaacaaagctggaggcatcatgctacctgacttcaaactatactacaaggctacagtaaccaaaacagcatggtactggtaccaaaacagagatatagatcaatggaacagaatagagccctcagaaataatgccgcatatctacaagtatctgatctttgacaaacctgagaaaaacaagcaatggggaaaggattccctacttaataaatggtgctgggaaaactggctagccgtatgtagaaagctgaaactggatctcttccttacaccttatacaaaaattaattcaagatggattaaagacttaaacgttacacctaaaaccataaaaaccctagaagaaaacctaggcattaccattcaggacataggcaaggacttcatgtctgaaacaccaaaagcaatggcaacaaaagccaaaattgacaaatgggatctaattaaactaaagagcttctgcacagctaaagaaactaccatcagagtgaccaggcaacctacaaaatgggagaaaatttttgcaacctactcatctgacaaagggctaatatccagaatctacaatgaactccaacaaatttacaagaaaaaaacaaacaaccccatcaaaaagtgggcgaaggacatgaacagacacttctcaaaagaagacatttatgcagccaaatacacatga

SEQ ID NO: 116415 - DNA, 3555 bp, Homo sapiens
atggagctgaaaaccaaggctcgagaactacatgaagaatgcagaagcctcaggagccgatgcgatcaactggaagaaagggtatcagcaatggaagatgaaatgaatgaaatgaaagacacacataggctcaaaataaaaggatggaggaagatctaccaagccaatggaaaacaaaaaaaggcaggggttgcaatcctagtctctgataaaacagactttaaaccaacaaagatcaaaagagacaaagaaggccattacttaatggtaaagggatcaattcaacaagaagagctaactatcctaaatatatatgcacccaatacaggagcaccaagattcataaagcaagtcctgaccgacctacaaagagacttagactcccacacattaataatgggagactttaacaccccactgtcaacattagacagatcaacgagacagaaagtcaacaaggatacccaggaattgaactcagctctgcaccaagcggacctaatagacatctacagaactctccaccccaaatcaacagaatatacatttttttcagcaccacaccacacctattccaaaattgaccacatactgggaagtaaagctctcctcagcaaatgtcaaagaacagaaattataacaaactatctctcagaccacagtgcaatcaaactagaactcaggattaagaatctcactcaaaaccactcaactacatggaaactgaacaacctgctcctgaatgactactgggtacataacgaaatgaaggcagaaataaagatgttctttgaaaccaatgagaacaaagacacaacataccagaatctctgggacgcattcaaagcagtgtgtagagggaaatttgtagcactaaatgcccacaagagaaagcaggaaagatccaaaattgacaccctaacatcacaattaaaagaactagaaaagcaagagcaaacacattcaaaagctagcagaaggcaacaaataactaaaatcggagcagaactgaaggaaatagagacacaaaaaacccttcaaaaaattaatgaatccaggagctggttttttgaaaggatcaacaaaattgatagaccactagcaagactaataaagaaaaaaagagagaagaatcaaatagatgcaataaaaaatgataaaggggatatcaccaccgatcccacagaaatacaaactaccatcagagaatactacaaacacctctatgcaaataaactagaaaatctagaagaaatggataaattcctcaacacatacactctcccaagactaaaccaggaagaagttgaatctctgaatagaccaataacaggatctgaaattgtggcaataatcaatagcttacgaaccaaaaagagtccaggaccagatggattcacagccgaattctaccagaggtacaaggaggaactggtaccattccttctgaaacaattccaatcaatagaaaaagagggaatcctccctaactcattttatgaggccagcatcatcctgataccaaagcctggcagagacacaaccaaaaaagagaattttagaccaatgtccttgatgaacattgatgcaaaaatcctcaataaaatactggcaaacggaatccagcagcacatcaaaaagcttatccaccatgatcaagtgggcttcatccctgggatgcaaggctggttcaatatacgcaaatcaataaatgtaatccagcatataaacagagccaaagacaaaaaccacatgattatctcaatagatgcagaaaaagcctttgacaaaattcaacaacccttcatgctaaaaactctcaataaattagcccaaaatctccttaagctgataagcaacttcagcaaagtctcaggatacaaaatcaatgtgcaaaaatcacaggtattcttatacaccaataacagacaaacagagagccaaatcatgagtgatctcccattcacaattgcttcaaagagagtaaaatacctaggaatccaacttacaatggatgtgaaggacctctccaaggagaactacaaaccactgctcaaggaaataaaagaggatacaaacaaatggaagaacattccatgctcatgggtaggaagaatcagtatcgtgaaaatggccatactgcccaaggtaatttacagattcaatgccatccccatcaagctaccaatgactttcttcacagaattggaaaaaactactttaaagttcatatggaaccaaaaaagagcctgcatcgccaagtcaatcctaagccaaaagaacaaagctggaggcatcacactacctgacttcaaactatactacaaggctacagtaaccaaaacagcatggtactggtaccaaaacagagatatagatcaatggaacagaacagagccctcagaaataatgccacatatctgcaactatctgatctttgacaaacctgagaaaaacaagcaatggggaaaggattccctatttaataaatggtgctgggaaaactggctagccatatgtagaaagctgaaactggatcccttccttacaccttatacaaaaatcagttcaagatggattaaagacttaaacgttagacctaaaaccataaaaaccctagaagaaaacctaggcattaccattcaggacataggcatgggcaaggacttcatgtctaaaacaccaaaagcaatggcaacaaaagccaaaattgacaaatgggatctaattaaactaaagagcttctgcacaacaaaagaaactaccatcagagtgaacaggcaacctacaaaatgggagaaaattttcgcaacctactcatctgacaaagggctaatatccagaatctacaatgaactcaaacaaatttacaagaaaaaaacaaacaatcccatcaaaaagtgggcaaaggacatgaagagacacttctcaaaagaagacatttatgcagccaaaaaacacatgaaaaaatgctcatcatcactggccatcagagaaatgcaaatcaaaaccacaatgagataccatctcacaccagttagaatggcaatcattaaaaagtcaggaaacaacaggtgctggagaggatgtggagaaataggaacccttttacactgttggtgggactgtaaactagttcaaccattgtggaagtcagtgtggcgattcctccgggatctagaactggaaataccatttgacccagccatcccattactgggtatatacccaaaggactataaatcatgctgctataaagacacatgcacacgcagaccagattttttggaccatgaaaagggcctagaccctgtgttccagaaacaaagattattaagagataaaggaaaacactgtagaagaatggtcaccaaagatggccacaccctagtctctggaacttgtggatatgttgtcttacatggcaaaaggaactttagaggtggtgttaaaattattgacattaatatatggagattattgagtgggctcaatgtgaatgtgtgggcctttaaaagtggaagagaagggcagagcagcaagtcagaaagataa

SEQ ID NO: 116416 - DNA, 3786 bp, Homo sapiens
atggtaaagggatcaattcaacaagaagagctaactatcctaaatatctatgcacccaatacaggagcacccagattcataaagcaagtcctgagtgacctacaaagagacttagactcccacacattaataatgggagactttaacaacccactgtcaacattagacagatcaatgagacagaaagtcaacaaggatacccaggaattgaactcagctctgcaccaagtggacctaatagacatctacagaactctccaccacaaatcaacagaatatagatttttttcagcaccacaccacacctattccaaaattgaccacatacttggaagtaaagctctcctcagcaaatgtaaaaggacagagattataacaaactatctctcaggccacagtgcaatcaaactagaactcaagattaagaatctcactcaaaaccgctcaactacatggaaactgaacaacctgctcctgaatgactactggatacataacgaaatgaaggcagaaataaagatgttctttgaaaccaatgagaacaaagacacaacataccagaatctctgggatgcattcaaagcagtgtgtagagggaaatttatagcactaaatgcccacaagagaaagcaggaaagatccaaaattgacaccctaacatcacaattaaaagaactagaaaagcaagagcaaacacattcaaaagctggcagaaagaaagaaataactaaaatcagagcacaactgaaggaaatagagacacaaaaaacccttaaaaaattaatgaatccaggagctgaaatacaaactaccatcagagaatactacaaacacctctatgcaaagaaactagaaaatctagaagaaatggataaattcctcgacacatacactctcccaagactaaaccaggaagaagttgaatctctgaatagaccaataacaggagctgaaattgtggcaataatcaatagtttaccaaccaaaaagtccaggaccagatggattcacagccgaattctaccagaggaggccagcatcattctgataccaaagccgggcagagacacaaccaaaaaagagaattttagaccaatatccttgatgaacattgatgcaaaaatcctcaataaaatactggcaaaacgaatccagcagcacatcaaaaagcttatccaccatgatcaagtgggcttcatccctgggatgcaaggctggttcaatatacacaaatcaataaatgtaatccagcatataaacagagccaaagacaaaaaccacataattatctcaatagatgcagaaaaagcctttgacaaaattcaacaacccttcatgctaaaaactctcaataaattaggtattgatgggacatatttcaaaataataagagctatctatgacaaacccacagccaatatcatactgaatgggcaaaaactggaagcattccctttgaaaactggcacaagacagggatgccctctctcaccactcctattcaacatagtgttggaagttctggccagggcaattaggcaggagaaggaaataaagggtattcaattaggaaaagaggaagtccaattgtccctgtttgcagatgagatgattgtatatctagaaaaccccattgtctcagcccaaaatctccttaagctgataagcaacttcagcaaagtctcaggatacaaaatcaatgtacaaaaatcacaagcattcttatacaccaacaacagacaaacagagagccaaatcatgagtgaactcccattcacaattgcttcaaagagaataaaatacctaggaatccaacttacaagggatgtgaaggacctcttcaaggagaactgcaaaccactgctcaatgagataaaagaggatacaaacaaatggaagaacattccatgctcatgggtaggaagaatcaatatcatgaaaatggccatactgcccaaggtaatttatagatttaatgccatccccaccaagccaccaatgactttcttcacagaattggaaaaaactactttaaagttcatatggaaccaaaaaagagcccgcatcgccaagtcaattctaagccaaaagaacaaagctggaggcatcacactacctgacttcaaactatactacaaggctacagtaaccaaaacagcatggtactggtaccaaaacagagatctagatcaatggaacagaacagagccctcagaaataacgccgcatatctacagctatctgatctttgacaaacctgagaaaaacaagcaatggggaaaggattccctatttaataaatggtgctgggaaaactggctacccatatgtagaaagctgaaactggatcccttccttacaccttatacaaaaatcaattcaagatggattaaagacttaaatgttagacctaaaaccataaaaaccctaaaagaaaacctaggcattaccattcaggacataggcatgggcaaggacttcatgtctaaaacaccaaaagcaatggcaacaaaagacaaaattgacaaatgggatctaattaaactaaagagcttctgcacagcaaaagaaactaccatcagagtgaacaggcaacctacaaaatgggagaaaattttcgcaacctactcatctgacaaagggctaatatcaagaatctacaatgaactcaaacaaatttacaagaaaaaaacaaacaaccccatcaacaagtgggtgaaggacatgaacagacacttctcaaaagaagacatttatgcagccaaaaaacacatgaaaaaatgctcatcatcactggccatcagagaaatgcaaatcaaaaccacaatgagataccatctcacaccacttagaatggcgatcattaaaaagtcaggaaacaacagtgccagccccactgccaggaacaagacagccaggaatcagaggaccaagatgatagcagtgacggccccccgaaacagggctccactggagctggagctgattctgtaccggcaaaacagacagagtaaaactcatattttggaaacaaacaatacatcagctgagcttctggttccatttgaagaagactacttaattgaaataagaacagtcagtgatggtggagatggaagcagcagtgaggaaattaggattccaaaaatgtcaatgattgatcacattctgcccaagtcaattccagaagaactgcagaatggggagggatttggatatatcatcatgttccggccagtgggctcgacaacctggtccaaggagaaagtgtcatctgtggaatcatcaaggtttgtctacagaaatgaaagcatcatcccactgtctccctttgaagtcaaagtgggtgtgtataataatgaaggagaaggatccctgagtactgtgaccattgtctactctggggaagatgatggttatgtctttctctggatggtagaacctcaactggccccaaggggaacttctctccagagtttttctgcttctgaaatggaggtttcatggaatgctattgcctggaatagaaacactggaagagtgctgggctatgaggtcttatactggacagatgactccaaagaatccatgataggtaaaattagagtcagtggaaatgtcacaaccaaaaacatcacggggctgaaagctaataccatctactttgcttccgtaagagcttacaacactgctgggacagggccctcaagccccccagtcaatgttaccaccaaaaagtctcgataccttattactacagcttacttggaagtccctgaaatctaa

SEQ ID NO: 116417 - DNA, 3414 bp, Homo sapiens
atggtaaagggatcaattcaacaagaagagctaactatcctaaatatctatgcacccaatacaggagcacccagattcataaagcaagtcctgagtgacctacaaagagacttagactcccacacattaataatgggagactttaacaacccactgtcaacattagacagatcaatgagacagaaagtcaacaaggatacccaggaattgaactcagctctgcaccaagtggacctaatagacatctacagaactctccaccacaaatcaacagaatatagatttttttcagcaccacaccacacctattccaaaattgaccacatacttggaagtaaagctctcctcagcaaatgtaaaaggacagagattataacaaactatctctcaggccacagtgcaatcaaactagaactcaagattaagaatctcactcaaaaccgctcaactacatggaaactgaacaacctgctcctgaatgactactggatacataacgaaatgaaggcagaaataaagatgttctttgaaaccaatgagaacaaagacacaacataccagaatctctgggatgcattcaaagcagtgtgtagagggaaatttatagcactaaatgcccacaagagaaagcaggaaagatccaaaattgacaccctaacatcacaattaaaagaactagaaaagcaagagcaaacacattcaaaagctggcagaaagaaagaaataactaaaatcagagcacaactgaaggaaatagagacacaaaaaacccttaaaaaattaatgaatccaggagctgaaatacaaactaccatcagagaatactacaaacacctctatgcaaagaaactagaaaatctagaagaaatggataaattcctcgacacatacactctcccaagactaaaccaggaagaagttgaatctctgaatagaccaataacaggagctgaaattgtggcaataatcaatagtttaccaaccaaaaagtccaggaccagatggattcacagccgaattctaccagaggtacaaggaggaactgaaaaagagggaatcctccctaactcattttatgaggccagcatcattctgataccaaagccgggcagagacacaaccaaaaaagagaattttagaccaatatccttgatgaacattgatgcaaaaatcctcaataaaatactggcaaaacgaatccagcagcacatcaaaaagcttatccaccatgatcaagtgggcttcatccctgggatgcaaggctggttcaatatacacaaatcaataaatgtaatccagcatataaacagagccaaagacaaaaaccacataattatctcaatagatgcagaaaaagcctttgacaaaattcaacaacccttcatgctaaaaactctcaataaattaggtattgatgggacatatttcaaaataataagagctatctatgacaaacccacagccaatatcatactgaatgggcaaaaactggaagcattccctttgaaaactggcacaagacagggatgccctctctcaccactcctattcaacatagtgttggaagttctggccagggcaattaggcaggagaaggaaataaagggtattcaattaggaaaacaggaagtccaattgtccctgtttgcagatgagatgattgtatatctagaaaaccccattgtctcagcccaaaatctccttaagctgataagcaacttcagcaaagtctcaggatacaaaatcaatgtacaaaaatcacaagcattcttatacaccaacaacagacaaacagagagccaaatcatgagtgaactcccattcacaattgcttcaaagagaataaaatacctaggaatccaacttacaagggatgtgaaggacctcttcaaggagaactgcaaaccactgctcaatgagataaaagaggatacaaacaaatggaagaacattccatgctcatgggtaggaagaatcaatatcatgaaaatggccatactgcccaaggtaatttatagatttaatgccatccccaccaagccaccaatgactttcttcacagaattggaaaaaactactttaaagttcatatggaaccaaaaaagagcccgcatcgccaagtcaattctaagccaaaagaacaaagctggaggcatcacactacctgacttcaaactatactacaaggctacagtaaccaaaacagcatggtactggtaccaaaacagagatctagatcaatggaacagaacagagccctcagaaataacgccgcatatctacagctatctgatctttgacaaacctgagaaaaacaagcaatggggaaaggattccctatttaataaatggtgctgggaaaactggctacccatatgtagaaagctgaaactggatcccttccttacaccttatacaaaaatcaattcaagatggattaaagacttaaatgttagacctaaaaccataaaaaccctaaaagaaaacctaggcattaccattcaggacataggcatgggcaaggacttcatgtctaaaacaccaaaagcaatggcaacaaaagacaaaattgacaaatgggatctaattaaactaaagagcttctgcacagcaaaagaaactaccatcagagtgaacaggcaacctacaaaatgggagaaaattttcgcaacctactcatctgacaaagggctaatatcaagaatctacaatgaactcaaacaaatttacaagaaaaaaacaaacaaccccatcaacaagtgggtgaaggacatgaacagacacttctcaaaagaagacatttatgcagccaaaaaacacatgaaaaaatgctcatcatcactggccatcagagaaatgcaaatcaaaaccacaatgagataccatctcacaccacttagaatggcgatcattaaaaagtcaggaaacaacagtgccagccccactgccaggaacaagacagccaggaatcagaggaccaagatgatagcagtgacggccccccgaaacagggctccactggagctggagctgattctgtaccggcaaaacagacagagtaaaactcatattttggaaacaaacaatacatcagctgagcttctggttccatttgaagaagactacttaattgaaataagaacagtcagtgatggtggagatggaagcagcagtgaggaaattaggattccaaaaatgtcaacagggggtgaggagggcatggctgctgtctttaaaaacaaatgcagatgttcatggtctcgggtggtcatagcctatcacagcagctcagggaaccagatgggaaccaaccctgaacaggaccctggacagcatgccatcccattggagggtacactcacacacacccgcactcactcagactgggaccatttggacacagcaatgaactga

SEQ ID NO: 116418 - DNA, 5130 bp, Homo sapiens
atgctgttttgggcctttgacaaaattcaacagcccttcatgctaaaaactctcaataaattaggtattgatgggacgtatctcaaaataataagagctgtttatgacaaacccacagccaatatcatactgaatgggcaaaaactggaagcattccctttgaaaactggcacaagacagggatgccctctctcaccactcctattcaacatagtgttggaagttctggccagggcaatcaggcaggagaaggaaataaagggcattcaattaggaaaagaggaagtcaaattgtccctgtttgcagatgacatgattgtatatctagaaaaccccatcatctcaacccaaaatctccataagctgataagcaacttcagcaaagtctcaggatacaaaaacaatgtgcaaaaattacaagctttcttatacaccaataacagacaaacagagagccaaatcatgagtgaactcccattcacaattgcttcaaagagaataaaatacctaggaatccagcttacaagggatgtgaaggacctcttcaaggagaactacaaaccactgctcaaggaaataaaagaggatacaaacaaatggaagaacattccatgctcatggataagaagaatcaatattgtgaaaatggccatactccccaagaggactccattattatcgctgcctagtacattatatgaggagctgtggagacttaggtcctacttcccattgtgccctcaactttacaacatggagcagaataccacagactgggtaatttataaagaacagtgcatttggctcacagctctggagactggggagtccaagagcactgcaccagcatttggcaagggttatcccatggcagaatacatcatatggggcagattgacacctcacatggctggctactcctctgagacaaaacttccagaggaacgatcaggcagcaacatctgctgttcaccaatatccgctgttctgcagcctctgctgctgatacccaggcaaacagggtctggagtggacctccagcaaactccaacagacctgcagctgagggtcctgactgttagaaggaaaactaacaaacagaaaggacatccacaccaaaaccccatctgtacgtcaccatcatcaaagaccaaaggatcaaattcacacataacaatattaaccttaaatgtaaatgggctaaatgctccaattaaaagacacagactggcaaattggataaagagtcaagacccatcagtgtgctgtattcaggagacccatctcacgtgcagagacacacacaggatcaaaataaagggatggagggagatctaccaagcaaatggaaaacaaaaaaaggcaggggttgcaatcctagtctctgataaaacggactttaaaccaacaaagatcaaaagagacaaagaaggccattacatgatggtaaagggatcaattcaacaagaagagctaactaccctaaatatatatgcacccaatacaggagcacccagattcataaagcaagtccttagagacctacaaagagacttagactcccacacattaataatgggagactttaacaccccactgtcaacattagacagatcaacgagacagaaagttaacaaggatatccaggatttgaactcagctctgcaccaagtggacctaatagacatctacagaactctccaccccaaatcaacagaatatacattcttctcagcactacaccacatttattccaaaattgaccacatagttggaagtaaagcactcctcagcaaatataaaacaacagaaattataacaaactgtctctcagaccacagtgcaatcaaactcgaactcaggattaagaaactcactcaaaaccgctcaactacatggaaactgaacaacctgctcctgaatgactactgggtacataacaaaatgaaggcagaaataaatacattatttgaaaccaacgagaacaaagacacaacataccagaatctctgggacacattcaaagcagtgtgtagagggaaattcatagcactaaatgcccacaagagaaagcaggaaagatctaaaattgacaccctaacatcacaattaaaagaactagagaagcaagaacaaacacattcaaaagctagcagaaggcaagaaataactaagatcagagcaaaactgaaggaaatagagacacaaaaaatccttcaaaaaatcaatgaatccaggagctggttttttgaaaagatcaacaaaattgatagaccactagcaagaccaataaagaagaaaagagagaagaatcaaatagatgcaataaaaaatgataaaggggatatcaccactgatcccacagaaatacaaactaccatcagagaatactataaacacctctatgcaaataaactagaaaatctagaagaaatggataaattcctcaacacatacaccctcccaagactaaaccaggaagaagttgaatctctgaataaaccaataacaggctctgaaattgaggcaataattaatagcttaccaatcaaaaaaagtccaggaccagatggattcatagccaaattccaccagaggtacaaggaggagctggaggccagcatcatcctgataccaaagcctggcagagacacaaccaaaaaagagaattttagaccaatacccctgatgaatattgatgcaaaaatcctcaataaaatactggcaaaccgaatccagcagcacatcaagaagcttatccaccatgatcaagtgggcttcatccctgggatgcaaggctcgttcaacatatgcaaatcaataaacgtaatccaggatataaacagaacgaatgacaaaaaccatatgattatctcaatagatgcagaaaaggcctttgacaaaattcaacaacccttcattctaaaaactctcaataaattaggtattgatgggacgtatctcaaaataataagagctatctatgacaaacccacagccaatatcatactgaatgggcaaaaactggaagcattccctttgaaaactggcacaagacaggggtgccctctctcaccactcctattcaacatagtgttggaagttctggccagggcaatcaggcaggagaaggaaataaagggcattcaattaggacaagaggaagtcaaattgtccctgtttgcagatgacatgattgtatatcgagaaaaccccatcgtctcaacccaaaatctccataagctgataagcaacttcagcaaagtctcaggatacaaaatcaatgtgcaaaaatcacaagcatttttatacaccaataacagacaaacagagagccaaatcatgagtgaactcccattcacaattgcttcaaagagaataaaatacctaggaatccaacttacaagggatgtgaaggatctcttcaaggagaactacaaaccactgctcaaggaaataaaagaggatacaaacaaatggaagaacattccatgctcatgggtaggaagaatcaatatcgtgaaaatggccatactgcccaaggtaatttatagatttaatgccatccccatcaagctaccaatgactttcttcacagaattggaaaaaactactttaaagttcatatggaaccaaaaaagagcccgcattgccaagtcaatcctaagccaaaggaacaaagctggaggcatcacactacctgacttcaaactatactacaaggctacagtaaccaaaacagcatggtactggtaccaaaacagagatatagaccaatggaacagaacggagccctcagaaataatgccacatatctacaaccatctgatctttgacaaacctgacaaaaacaagaaatggggaaatgattccctatttaataaatggtgctgggaaaactggctagccatatgtaggagaaagctgaaactggatcccttccttacaccttatacaaaaattaattcaagatggattaaagacttaaatgttagacctaaaaccataaaaaccctagaagaaaacctaggcaataccattcaggacataggcatgggcaaggacttcatgtctacaacaccaaaagcaatggcaacaaaagccaaaattgacaaatgggatctaattaaactaaagagcttctgcacagcaaaagaaactaccatcacagtgaacaggcaacctacagaatgggagaaaatttttacaatctacccatctgacaaagggctaatatccagaatctacaaagaactcaaacaaatttacaagaaaagaacaaacaaccccatcaacaagtgggtgaaggatatgaacagacacttctcaaaagaagacatttatacagccaaaaggcacatgaaaaaatgctcatcatcactggccatcagagaaatgcaaatcaaaaccacattgagataccatctcataccagttagaatggcgatcattaaaaagtcaggaaacaacagaccaagctccaatgtcttctctgtgaaactttctgagatccaatccttggctctcatagagactaggtgcttaatgaatgctgatgaacagggtgtgccactgattcaagaaatgctggaatcttgggcaagtatttgcaaagttcccaagtatccaaatgccgaagcagtgcggccagaagagcaaacaccccacctgcacccaggtgaaataaacagccatgttgctcacacaaagcttgtttggtggtctcttcacacggacacgcatgaaatttggtgccgtgactcggatcgggggacctcccttgggagatcaatcccctgtcctcctgctctttgctccgtgagaaagatccacctacgacctcaggtcctcagaccgaccagcccaagaaacatctcaccaatttcaaatccgcacacaagaacttccaaacgcctgaaccgcagcggccaggcgttcctccagaacctccttccccaggagcttgctacaagtgccagaaatctgaccaccaggccaaggaatgcctgcagcccaggattcctcctaagccgtgtcccatctgtgcgggaccccactggaaattggactgttcagctcacctggcagccactctcagagcccctggaactctggcccaaggctctctga

SEQ ID NO: 116419 - DNA, 8244 bp, Homo sapiens
atggtaaagggatcaattcaacaagaggagctaactatcctaaatatttatgcacccaatacaggagcacccagattcataaagcaagtcctgagtgacatacaaagagacttagactcccacacattaataatgggagactttaacaccccactgtcaacattagacagatcaacgagacagaaagtcaacaaggatacccaggaattgaactcagctctgcaccaagcggacctaatagacatctacagaactctccaccccaaatcaacagaatatacatttttttcagcaccacaccacacctattccaaaattgaccacatagttggaagtaaagctctcctcagcaaatgtaaaagaacagaaattataacaaactgtctctcagaccacggtgcaatcaaactagaactcaggattaagaatctcactcaaagccgctcaactacatggaaactgaacaacctgctcctgaatgactactgggtacataacgaaatgaaggcagaaataaagatgttctttgaaaccaacgagaacaaagacaccacataccagaatctctgggacgcattcaaagcagtgtgtagagggaaatttatagcactaaatgcctacaagagaaagcaggaaagatccaaaatcgacaccctaacatcacaattaaaagaactagaaaagcaagagcaaacacattcaaatgctagcagaaggcaagaaataactaaaatcagagcagaactgaaggaaatagagacacaaaaaacccttcaaaaaatcaatgaatccaggagctggttttttgaaaggatcaacaaaattgatagaccgctagcaagactaataaagaaaaaaagagagaagaatcaaatagacacaataaaaaatgataaaggggatatcaccaccgatcccacagaaatacaaactaccatcagagaatactacaaacacctctacgcaaataaactagaaaatctagaagaaatggatacattcctcgacacatacactctcccaagactagaccaggaagaagttgaatctctgaatagaccaataacaggctctgaaattgtggcaataatcaatagtttaccaaccaaaaagagtccaggaccagatggattcacagccgaattctaccagaggtacaaggaggaactggtaccattccttctgaaactattccaatcaatagaaaaagagggaatcctccctaactcattttatgaggccagcatcattctgataccaaagccgggcagagacacaaccaaaaaagagaattttagaccaatatccttgatgaacattgatgcaaaaatcctcaataaaatactggcaaaacgaatccagcagcacatcaaaaagcttatccaccatgatcaagtgggcttcatccctgggatgcaaggctggttcaatatatgcaaatcaataaatgtaatccagcatataaacagagccaaagacaaaaaccacatgattatctcaatagatgcagaaaaagcctttgacaaaattcaacaacccttcatgctaaaaactctcaataaattaggtattgatgggacgtatttcaaaataataagagctatctatgacaaacccacagccaatatcatactgaatgggcaaaaactggaagcattccctttgaaaactggcacaagacagggatgccctctctcaccgctcctattcaacatagtgttggaagttctggccagggcaatcaggcaggagaaggaaataaagggtattcaattaggaaaagaggaagtcaaattgtccctgtttgcagacgacatgattgtttatctagaaaaccccatcgtctcagcccaaaatctccttaagctgataagcaacttcagcaaagtctcaggatacaaaatcaatgtacaaaaatcacaagcattcttatacaccaacaacagacaaacagagagccaaatcatgagtgaactcccattcacaattgcttcaaagagaataaaatacctaggaatccaacttacaagggatgtgaaggacctcttcaaggagaactacaaaccactgctcaaggaaataaaagaggacacaaacaaatggaagaacattccatgctcatgggtaggaagaatcaatattgtgaaaatggccatactgcccaaggtaatttacagattcaatgccatccccatcaagctaccaatgactttcttcacagaattggaaaaaactactttaaagttcatatggaaccaaaaaagagcccgcatcgccaagtcaatcctaagccaaaagaacaaagctggaggcatcacactacctgacttcaaactatattacaaggctacagtaaccaaaacagcatggtactggtaccaaaacagagatatagatgaatggaacagaacagagccctcagaaataatgccgcatatctacaactatctgatctttgacaaacctgagaaaaacaagcaatggggaaaggattccctatttaataaatggtgctgggaaaactggctagccatatgtagaaagctgaaactggatccctttcttacaccttatacaaaaatcaattcaagatggattaaagatttaaacgttagacctaaaaccataaaaaccctagaagaaaacctagacattaccattcaggacataggcgtgggcaaggacttcatgtccaaaacaccaaaagcaatggcaacaaaagacaaaattgacaaatgggatctaattaaactaaagagcttctgcacagcaaaagaaactaccatcagagtgaacaggcaacctacaacatgggagaaaattttcgcaacctactcatctgacaaagggctaatatccagaatctacaatgaactcaaacaaatttacaagaaaaaaacaaacaaccccatcaaaaagtgggtgaaggacatgaacagacacttctcaagagaagacatttatgcagccaaaaaacacatgaaaaaatgctcatcatcactggccatcagagaaatgcaaatcaaaaccactatgaggttttactgggatttaataatgcttataatgatggttggaaatctagtcatcataccagttggaatcacattctttacagagcaaacaacaacaccatggattattttcaatgtggcatcagatacagttttcctattggacctgatcatgaattttaggactgggactgtcaatgaagacagttctgaaatcatcctggaccccaaagtgatcaagatgaattatttaaaaagctggtttgtggttgacttcatctcatccatcccagtggattatatctttcttattgtagaaaaaggaatggattctgaagtttacaagacagccagggcacttcgcattgtgaggtttacaaaaattctcagtctcttgcgtttattacgactttcaaggttaattagatacatacatcaatgggaagaggaacgcagctcctcaccagcaacagaacaaagctggacggagaatgattttgacgagctgagagaagaaggcttcagacgctcaaattactctgagctacgggaggacattcaaaccaaaggcaaagaagttgaaaactttgaaaaaaatttagaagaatgtataactagaataaccaatacagagaagtgcttaaaggagctgatggagctgaaaaccaaggctcgagaactacgtgaagaatgcagaagcctcaggagccaatgcgatcaactggaagaaagggtatcagcaatggaagatgaaatgaatgaaatgaagcaagaagggaagtttagagaaaaaagaataaaaagaaacgagcaaagcctccaagaaatatgggactatgtgaaaagaccaaatctacgtctgattggtgtacctgaaagtgatgcggagaatggaaccaagttggaaaacactctgcaggatattatccaggagactttccccaatctagcaaggcaggccaacgttcagattcaggaaatacagagaacgccacaaagatactcctcgagaagagcaactccaagacacataattgtcagattcaccaaagttgaaatgaaggaaaaaatgttaagggcagccagagagaaaggtcgagttaccctcaaagggaagcccatcagactaacagcggatctctcggcagaaaccctacaagccagaagagagtgggggccaatattgaacattcttaaagaaaagaattttcaacccagaatttcatatccagccaaactaagcttcataagtgaaggagaaataaaatactttacagacaagcaaatgctgaccgattttgtcaccagcaggcctgccctaaaagagctcctgaaggaagcgctaaacatggaaaggaacaaccgagacacacataggctcaaaataaaaggatggaggaagatctaccaagcaaatggaaaacaaaaaaaggcaggggttgcaatcctagtctctgataaaacagactttaaaccaacaaagatcaaaagagacaaagaaggccattacatgatggtaaagggatcaattcaacaagaggagctaactatcctaaatatgtatgcacccaatacaggagcacccagattcataaagcaagtcctgagtgacctacaaagagacttagactcccacacattaataatgggagactttaacaccccactgtcaacattagacagatcaacgagacagaaagtcaacaaggatacccaggaattgaactcagctctgcaccaagcagacctaatagacatctacagaactctccaccccaaatcaacagaatatacatttttttcagcaccacaccacagctattccaaaattgaccacatacttggaagtgaagctctcctcagcaaatgtaaaagaacagaaattataacaaactatctctcagaccacagtgcaatcaaactagaactcaggattaagaatctcactcaaagccgctcaactacatggaaactgaacaacctgctcctgaatgactactgggtacataacgaaatgaaggcagaaataaagatgttctttgaaaccaacgagaacaaagacacaacataccagaatctctgggacgcattcaaagcagtgtgtagagggaaatttatagcactaaatgcccacaagagaaagcaggaaagatccaaaattgacaccctaacatcacaattaaaagaactagaaaagcaagagcaaacacattcaaaagctagcagaaggcaagaaataactaaaatcagagcagaactgaaggaaatagagacacaaaaaacccttcaaaaaatcaatgaatccaggagctggttttttgaaaggatcaacaaaattgatagaccgctagcaagactaataaagaaaaaaagagagaagaatcaaatagacacaataaaaaatgataaaggggatatcaccaccgatcccacagaaatacaaactaccatcagagaatactacaaacacctctacgcaaataaactagaaaatctagaagaaatggatacattccttgacacatacactctcccaagactaaaccaggaagaagttgaatctctgaatagaccaataacaggagctgaaattgtggcaataatcaatagtttatcaaccaaaaagagtccaggaccagatggattcacagccgaattctaccagaggtacaaggaggaactggtaccattctttctgaaactattccaatcaatagaaaaagagggaatcctccctaactcattttatgaggccagcatcattctgataccaaagccgggcagagacacaaccaaaaaagagaattttagaccaatatccttgatgaacattgatgcaaaaatcctcaataaaatactggcaaaccgaatccagcagcacatcaaaaagcttatccaccatgatcaagtgggcttcatccctgggatgcaaggctggttcaatatacgcaaatcaataaatgtaatccagcatataaacagagccaaagacaaaaaccacatgattgtctcaatagatgcagaaaaagcctttgacaaaattcagcaacccttcatgctaaaaactctcaataaattagtgttggaagttctggccagggcaattaggcaggagaaggaaataaagggtattcaattaggaaaagaggaagtcaaattgtccctgtttgcagacgacatgattgtatatctagaaaaccccattgtctcagcccaaaatctccttaagctgataagcaacttcagcaaagtctcaggatacaaaatcaatgtacaaaaatcacaagcattcttatacaccaacaacagacaaacagagagccaaatcatgagtgaactcccattcacaattgcttcaaagagaataaaatacctaggaatccaacttacaagggatgtgaaggacctcttcaaggagaactacaaaccactgctcaaggaaataaaagaggatacaaacaaatggaagaacattccatgctcatgggtaggaagaatcaatatcgtgaaaatggccatactgcccaaggtaatttatagattcaatgccatccccatcaagctaccaatgactttcttcacagaattgggaaaaactgctttaaagttcatatggaaccaaaaaagagcccgcatcaccaagtcaatcctgagccaaaagaacaaagctggaggcatcacactacctgacttccaactatactgcaaggctacagtaaccaagacagcatggtactggtaccaaaacagagatatagatcaatggaacagaacagagccctcagaaataacgccgcttacctacaactatctgatctttgacaaacttgagaaaaacaagcaatggggaaaggattccctatttaataaatggtgctgggaaaactggctagccatatgtagaaagctgaaagtggatcccttccttacaccttatacaaaaatcaattcaagatggattaaagacttaaacgttagacctaaaaccataaaaaccctagaagaaaacctaggcattaccattcaggacataggcgtgggcaaggacttcatgtccaaaacaccaaaagcaatggcaacaaaagccaaaattgacaaatgggatctaattaaactaaagagcttctgcacagcaaaagaaactaccatcagagtgaacaggcaacctacaacatgggagacaattttcgcaacctactcatctgacaaagggctaatatccagaatctacaatgaactcaaacaaatttacaagaaaaaaacaaacaaccccatcaaaaagtgggtgaaggacatgaacagacacttctcaaaagaagacatttatgcagccaaaaaccacatgaaaaaatgctcatcatcactggccatcagagaaatgcaaatcaaaaccactatgagatatcatctcacaccagttagaatggcaatcattaaaaagtcaggaaacaacaggtgctggagaggatgtggagaaataggaacacttttacactgttggtgggactgtaaactagttcaaccattgtggaagtcagtgtggcgattcctcagggatctagaactagaaataccatttgacccagccatcccattactgggtatatacccaaatgactataaatcatgctgctataaagacacatgcacacatcatgatggtgatggtgatgttgaagatggtgatggtgatgacagcaatgtcaatgatggtgatagtgatggtgatgttgaagacggtgatagtgatggtgattatggtgatgttgatgatggtggtgatggtgatgataatgttgaagatgatgatgatggtagtggtaatggtcatggtgatgttaaagatggtgatggtgatgacgatggtgatgttgaagatggtgatgttgatgttggtgatgttgatgatgatgatggtgatggtgatgttgaagatggtgatgttgatgttggagatgctgatggtgatgttgaagaggatgatggtgatgatgatggtgatgttgaagatggtgatggtgatgttgaagatggtgatgttgatgttggtgatgttgatgatgatgatggtgatggtgatgttaatatgctcatggtgatgttgaagaggatgatggtgatgttaatggtggtgatgttgaagatggtgatgttgatgttggaatgtatagcgcagccctattcacaatcacagagacatggaatccacctgaacgcctatcaatggtag

SEQ ID NO: 116420 - DNA, 7995 bp, Homo sapiens
atggtaaagggatcaattcaacaagaggagctaactatcctaaatatttatgcacccaatacaggagcacccagattcataaagcaagtcctcagtgacctacaaagagacttagactcccacacattaataatgggagactttaacaccccactgtcaacattagacagatcaacgagacagaaagtcaacaaggatacccaggaattgaactcagctctgcaccaagcagacctaatagacatctacagaactctccaccccaaatcaacagaatatacatttttttcagcaccacaccacacctattccaaaattgaccacatagttggaagtaaagctctcctcagcaaatgtaaaagaacagaaattataacaaactatctctcagaccacagtgcaatcaaactagaactcaggattaagaatctcactcaaagccgctcaactacatggaaactgaacaacctgctcctgaatgactactgggtacataacgaaatgaaggcagaaataaagatgttctttgaaaccaacgagaacaaagacaccacataccagaatctctgggacgcattcaaagcagtgtgtagagggaaatttatagcactaaatgcctacaagagaaagcaggaaagatccaaaattgacaccctaacatcacaattaaaagaactagaaaagcaagagcaaacacattcaaaagctagcagaaggcaagaaataactaaaatcagagcagaactgaaggaaatagagacacaaaaaacccttcaaaaaatcaatgaatccaggagctggttttttgaaaggatcaacaaaattgatagaccgctagcaagactaataaagaaaaaaagagagatgaatcaaatagacacaataaaaaatgataaaggggatatcaccaccgatcccacagaaatacaaactaccatcagagaatactacaaacacctctacgcaaataaactagaaaatctagaagaaatggatacattcctcgacacatacactctcccaagactaaaccaggaagaagttgaatctctgaatagaccaataacaggctctgaaattgtggcaataatcaatagtttaccaaccaaaaagagtccaggaccagatggattcacagccgaattctaccagaggtacaaggaggaactggtaccattccttctgaaactattccaatcaatagaaaaagagggaatcctccctaactcattttatgaggccagcatcattctgataccaaagccgggcagagacacaaccaaaaaagagaattttagaccaatatccttgatgaacattgatgcaaaaatcctcaataaaatactggcaaaccgaatccagcagcacatcaaaaagcttatccaccatgatcaagtgggcttcatccctgggatgcaaggctggttcaatatacgcaaatcaataaatgtaatccagcatataaacagagccaaagacaaaaaccacatgattatctcaatagatgcagaaaaagcctttgacaaaattcaacaacgcttcatgctaaaaactctcaataaattaggtattgatgggacgtatttcaaaataataagagctatctatgacaaacccacagccaatatcatactgaatgggcaaaaactggaagcattccctttgaaaactggcacaagacagggatgccctctctcaccgctcctattcaacatagtgttggaagttctggccagggcaatcaggcaggagaaggaaataaagggtattcaattaggaaaagaggaagtcaaattgtccctgtttgcagacgacatgattgtttatctagaaaaccccatcgtctcagcccaaaatctccttaagctgataagcaacttcagcaaagtctcaggatacaaaatcaatgtacaaaaatcacaagcattcttatacaccaacaacagacaaacagagagccaaatcatgagtgaactcccattcacaattgcttcaaagagaataaaatacctaggaatccaacttacaagggatgtgaaggacctcttcaaggagaactacaaaccactgctcaaggaaataaaagaggacacaaacaaatggaagaacattccatgctcatgggtaggaagaatcaatatcgtgaaaatggccatactgcccaaggtaatttacagattcaatgccatccccatcaagctaccaatgactttcttcacagaattggaaaaaactactttaaagttcatatggaaccaaaaaagagcccgcatcgccaagtcaatcctaagccaaaagaacaaagctggaggcatcacactacctgacttcaaactatactacaaggctacagtaaccaaaacagcatggtactggtaccaaaacagagatatagatcaatggaacagaacagagccctcagaaataatgccacatatctacaactatctgatctttgacaaacctgagaaaaacaagcaatggggaaaggattccctatttaataaatggtgctgggaaaactggctagccatatgtagaaagctgaaactggatcccttccttacaccttatacaaaaatcaattcaagatggattaaagatttaaacgttagacctaaaacaataaaaaccctagaagaaaacctaggcattaccattcaggacataggcgtgggcaaggacttcatgtccaaaacaccaaaagcaatggcaacaaaagccaaaattgacaaatgggatctaattaaactaaagagcttctgcacagcaaaagaaactaccatcagagtgaacaggcaacctacaacatgggagaaaattttcgcaacctactcatctgacaaagggctaatatccagaatctacaatgaactcaaacaaatttacaagaaaaaaacaaacaaccccatcaaaaagtgggcgaaggacatgaacagacacttctcaaaagaagacatttatgcagccaaaagacccatgaaaaaattctcatcatcactggccatcagagaaatgcaaatcaaaaccactatgagatatcatctcacaccagttagaatggcaatcattaaaaagtcaggaaacaacagacatggtaggccaactgtgagcaaaaccttgagcaaagtgctgtggcccggtgcttcccaaacatcacattggccacctaaaatcccccagaagccttccaaacacagctctctgggtcccattcccagaagttttgacaagagaatctgtatgtttaacaagccacccagtaagaggcagttatctgggggatttctaccagatgtacagggttacgtgagactatttgtaccttatcaaccaaaacaagacagaatcaagaagttccacatccacgttgtgtgtcaggggagagttgggggtgggaggagaaccaagaaccttaacgcacccacaaggagaataaataaggaaaaagcagcacctaaacaaatcacagccaaactgctgaaaagcagcgctttgaagagagtagtggctctcccagaacggagtgtgagatctgagaacggacagactgcttccttaagtgggcccctgccccctgagtatcctaactgggagacacctcccagacaccatcatcaaagaccaaaggtagataaaaccacaaaggtggggagaatccagagcagaaaagctgaaaattctaaaaatcagagcgcctcttctcctccaaaggatcacagctcctcaccagcaatggaacaaacctggacggagaatgactttgacgagttgacagaagtaggcttcagaagatcggtaataacgaacttctccgagctaaagaaggatgttcgaacccattgcaaagaagctaaaaaccttgaaaaaagattacacgaatggctgactagaataaagagcgtagagaagaccttaaaggacctgatggagctgaaaaccatggcacaaaaactatgtgacgcatgcacaagcttcaggagccaatccgatcaagtggaagaaagggtatcagtgattaaagatcaaatgaatgaaatgaaagacacacataggctcaaagtaaaaggatggaggaagatctaccaaggaaatggaaaacaaaaaaaggcaggggttgcaatcctagtctctgataaaacagactttaagccaacaaagatcaaaagagacaaagaaggccattacatgatggtaaagggatcaattcaacaagaagagctaactatcctaaatatatatgcacccaatacaggagcacccagattcataaagcaagtcctgagtgacctacaaagagacttagactcccacacattaataatgggagactttaacaccccactgtcaacattagacagatcgacgagacagaaagtcaacaacaatacccaggaattgaactcagctctgcaccaagcagacctaatagacatctacagaactctctaccccaaatcaacagaatatacatttttttcagcaccacaccacacctattccaaaattgaccacatacttggaagtaaagctctcctcagcaaatgtaaaagaacagaaattataacaaactatctctcagaccacagtgcaatgaaactagaactcaggattaagaatctcactcaaaactgctcaactacatggaaactaaacaacctgctcctgaatgactacggggtacaaaacaaaatgaaggcagaaataaagatgttctttgaaaccaacgagaacaaagacacaacataccagaatctctgggacgcattcaaagcagtgtgtagagggaaatttatagcactaaatgcccacaagagaaagcaggaaagatccaaaattgacaccctaacatcacaattaaaagaactagaaaagcaagagcaaacacattcaaaagctagcagaagtcaagaaataactaaaatcagagcagaactgaaggaaatacagacacaaaaaacctttcaaaaaattaatgaatccaggagctggttttttgaaaggatcaacaaaattgatagaccactagctagactaataaagaaaaaaagagagaagaatcaaatagacgcaataaaaaatgataaaggggatatcaccaccgatcccacagaaatacaaactaccatcagagaatactacaaacacctctacgcaaataaactagaaaatctagaagaaatggatacattcctcgacacatgcactctcccaagactaaaccaggaagaagttgaatctccgaatagaccaataacaggatctgaaattgtggcaataatcaatagcttaccaaccaaaaagagtccaggaccaaatggattcacagccgaattctaccagaggtacaaggaggaactggtaccattccttctgaaactattccaatcaatagaaaaagagggaatcctccctaactcattttatgaggccagcatcaccctgataccaaaggcgggcagagacacaaccaaaaaagagaattttagaccaatatccttgatgaacattgatgcaaaaatcctcaataaaatactggcacaccgagtccagcagcacatcaaaaagcttatccaccatgatcaagtgggcttcatccctgggatgcaatgctggttcaatatatgcaaatcaataaatgtaatccagcatataaacagaaccaaagacaaaaaccacatgattatctcaatagatgcagaaaaggcctttgacaaaattcaacaacccttcattctaaaaactctcaataaattaggtattcatgggacatatctcaaaataataagagctacctatgacaaacccacagacaatatcaaactgaatgggcaaaaactggaagcattccctttgaaaactgacacaagacagggatgccctctctcaccactcctattcaacatagtgttggaagttctggccagggcaattaggcaggagaaggaaataaagggtattcaattaggaaaagaggaagtcaaattgtccctgtttgcagatgacatgattgtatatctagaaaaccccattgtctcagcccaaaatctcctaaagctgataagcaacttcagcaaagtctcaggatacaaaatcaatgtacaaaaatcacaagcattcttatacaccaacaaaagacaaacacagagccaaatcatgagtgaactcccattcacaattgcttcaaagagaagaaaatacctaggaatccaacttacaagggatgtgaaggacctcttcaaggagaactacaaaccactgctcaaggaaataaaagaggatacaaacaaatggaagaacattccatgctcatcggtaggaagaatcagttttgtgaaaatggccatactgcccaaggtaatttacagattcaatgccatccccatcaagctaccaatgcctttcttcccagaattggaaaaaactactttaaagttcatatggaaccaaaaaagagcccgcatagccaagtcaatcctaagccaaaagaacaaagctggaggcatcacactacctgacttcaaactatactacaaggctacagtaaccaaaacagcatggtactggtaccaaaacagagatatagatcaatggaacagaacagagccttcagaaataacgccgcatatctacaactatctgatctttgacaaacctgagaaaaacaagcaatggggaaaggattccctatttaataaatggtgctgggaaaactggctagccatatgtagaaagctgaaactggatcccttccttacaccttatacaaaaatcaattcaagatggattaaagacttaaacgttagacctaaaaccataaaaaccctagaagaaaacctaggcattaccattcaggacataggcatgggcaaggacttcatgtctaaaacacaaaaagcaatggcaacaaaagccacaattgacaaatgggatctaattaaactaaggagcttctgcacagcaaaagaaactaccatcagagtgaacaggcaacctacaaaatgggagaaaatttttgtaatctactcatctgacaaaggactaatattcagaatctacaatgaactcaaacaaatttacaagaaaaaaacaaacaactccatcaaaaagagggcgaaggacatgaacagacacttctcaaaagaagacatttatgcagccaaaaatcacatgaaaaaatgctcatcatcactggccatcagagaaatgcaaatcaaaaccacaatgagatatcatctcacaccagttagaatggcaatcattaaaaagtcaggaaacaacaggatcaacaaaattgatagaccactagtaagactaataaagaaaaaaagagagaagaatcaaatagatgcaataaaaaatgataaaggggatatcaccaccgattccacagaaatacaaactaccatcagagaatactacaaacacctctatgcaaataaactagaaaatctagaagaaatggataaattcctcaacacatacactctcccaagactaaaccaggaagaagttgaatctctgaatagaccaataacaggctctgaaattgtggcaataatcaatagcttaccaaccaaaaagagtccaggaccagatggattcacagcagaattctaccagaggtacaaggagaagctggtaccattccttctgaaactattccaatcaatagaaaaagagggaatcctccctaactcattttatgaggccagcatcatcgtgataccaaagcctggcagagacacaaccaaaaaagagaattttagaccaatatccttgatgaacattgatgcaaaaatcctcaataaaatactggcaaaccgaatccagcagcacatcaaaaagcttatccaccatgatcaagtgggcttcatccttgggatgcaaggctggttcaatatatgcaaatcaataaatgtaatccagcatataaacagaaccaaagacaaaaaaccacatgattatctcaatagatgcagaaaaggcctttga

SEQ ID NO: 116421 - DNA, 1980 bp, Homo sapiens
atgagacaacgtagagcagagctgctctccaaagacaaaagggtgagaacagacggcaacaacaaatgttcgccatcagcgataggaaagagaaaagagagaggcacaaacgactggatcgaaggggacaacaaccaggagagccaagggctcaactgcagcgacaccctcaaccgggatttgggtcccaacacgcgaggctttctttatgctggcctgagtggtctggacccggaccccagcctcccaacgcctgacatgtccagcgaggtgctggaggacaacttagacaccttgtccctgtactccgggaaggacagtgattctgtgaagctgctggaggagtacgcagattcggagtctcaggcatccttacaaggaagaagtcgctgttggcaacatccccacccagccccactctcctatcccccagctgctagtggctcccagctgtccctccaaggcaagtttccttcagcaaaaccacctctcctgggaggctacacctgcactgcgcagcgcacacagtgggcgctcaccaagcgctcgctaagggcaacgcgtgaatccgtgtcccgccagcagggcgtttacggcctggtggggcggaaacggacccgacaccaccgcggcgtcctggggcttctgggaatcccatcagcgcggccagagcggccggggacaggctccgaggcaggcccgacccgcctccccggcgccgccgtggctcgacggagaccagctaggcccgtgcggggccgtctcggagaccccgcgccgacggctgctcaaacatcaggccccgcgtctcttccaccaccgccgccgccccgatcctatggggacccccaccaaaacggatacccggacccagacccggcgcccagtgcctccccggacctcccgccggctgccggggatacaagaggaagcggcgggcgaagaaagaaacgcagaacaggaaccgcccgcctcaacacaccaggccgtaaagcacacaaaacagaaggcagcggcagggagaaaggggcgcgcgcaccagcccgcgccacgaacccccgaaccacagagaagacgccccatacgaccacccaaccagacagacagactgcgccacccacacaggcgcgcggggcgcggcccgccgcccggcggagccggcggcacagccaacccgagcacgggggcgaacggaggagcggcgaccgccaggcgcacggccggggcgcggacacggggcgcgcggggggcgagcgaaagggcgggccggcacggcagccgcccggcatcttggctcactgcaactccgcctcccggcacctgatgactcctgtgtgcctcctcttcctcatgtccttcttggaaacagtgaccgagctctgcaatgtggcatgctccagcgtgatgccaggagggggcaccaacctggagctcgctctgcactgcctgcacgaggctcagggcaacgttcaggtcgccctggagactcttctgctccgagggccccacaagccacggacacacctgctcgctgactatcgctacacagccatggctgtggtcccaggacaaatggccttccccctgttggctgtgttctttgataggttcagacgtctggacccctatgagaagaggctttttaagaaggcgttctatgcccacaagaaggacttctacttgatacacaagatgccctggggctcggccacagtcaaacttgatcatttttttccagatgtaataatactcaacgcactgagctaccgtctttgtctggatctagtgaaagaaaacaagcaggctgtggctgtgccacgcgggccctgggagtgtgaccttgccattgggccggccgcctcctttggaaagccctccggaagcacctcttcctttggcttggcgttaccactcaccacaaaggcacaggaccacaaaatccttcctggggacgagggcgttcaaactggagccacatag

SEQ ID NO: 116422 - DNA, 4269 bp, Homo sapiens
atggaccagtacagccttggagacgagggtgccctcccatcagaaatgcacctcccttcattttcagagagccaagggctcaactgcagcgacaccctcaaccgggatttgggtcccaacacgcgaggctttctttatgctggcctgagtggtctggacccggaccccagcctcccaacgcctgacatgtccagcgaggtgctggaggacaacttagacaccttgtccctgtactccgggaaggacagtgattctgtgaagctgctggaggagtacgcagattcggagtctcaggcatccttacaaggcaaccaaacagacaagacacagaagaggacagacaccaaagaacagcagcgaaccaacgaacgaagaacaaagaagaagagaaacgagacccagcacaacagagaaaagaagaacagcagagacgacacagaaagaacggacgacgagacccgccaccgctatgcatgcactcagctgcacatcctgcagacactgatcggaccccccaggggaatcgctatcttcctgcctcatcgctctccccagtccctgaaggcacaacaccggctattcgcgctggagggctttcgggaatgtgcccacgctggggccaacaaaattcgtccgggtcttccaacggtgcccaaagcattccccgcgttgtcccccagggggatctccaaagaacgccagttgtcgtcccctggcctctccaagcccttcttcgcaaaaagtaaatatttgggagggcagttggacggcctatctctacgacccacaggccagtgcccaaactgcgaaatccttgtgatgatggcatttgccaacgtactgccacccccgatgcccacgagtgccgctgacactgcgcagcgcacacagtgggcgctcaccaagcgctcgctaagggcaacgcgtgaatccgtgtcccgccagcagggcgtttacggcctggtggggcggaaacggacccgacaccaccgcggcgtcctggggcttctgggaatcccatcagcgcggccagagcggccggggacaggctccgaggcaggcccgacccgcctccccggcgccgccgtggctcgacggagaccagctagggggacgcgcccaggacgcacggtgccccctccccagccggacggggtctgggagcgcggatccttcagctccccggcccagcatccggatcagggctcgaggcagtcgacaaactacaaccgagctcgagcaggcgcgcccctgaaaccccgggactggggcttgggggcgggggcggcgccggcgcggagggcccagtccccggacgtccgcaagactcccattggctccgggtcccggcgctccgcctggcggggccgtggcttgttccgccggacgcgagcgggggatcctgaagccctcctcggggcaggcggcaggcacaccgccgaggacgacgacctgtgcgggaaggtgttcagcagcgccagttctctgagcaagcactacctgacacacagccaggaaaggaagcacgtctgcaaaatctgcagcaaggcctttaagcgccaggaccacctgtatgtgggagtctggaccgggcacatgctcacccaccagaagacaaagcccttcgtgtgcatcgagcagggctgcagcaagagctactgcgactaccgctctctgcgccggcactacgaggtccatcacggcctgtgcatcctgaaggaagcccccccggaggaagaggcctgcggggactccccccacgcccacgagtcggccggccagccgccccccagcagcctgcggtccctggtgcccccagaggccaggtcccccggctccctcctgccccaccgggacctcctgcgccgcatcgtgagtagcatcgtccaccagaagaccccttctcctggcccagccccggcgggggcttcagacagcgaagggaggaacactgcctgtccctgccccgcctcatcggggtcctcgtcctgcaccccagccggcccccacgcggccccagcagcgctggacaccgagcttcccgaggagccttgcctcccacagaaagagccggccactgacgtgttcacagcccctaattccagtgccgccgagaacggcgcccccgacccgccagagccggagccagataccgcgctgctccaggcccggtccaccgcggagtgctggcccgaaggcggctccgtgcctgcctgcctgcctctcttccgaggccagacggtccctgccagttcccagccatcgagccacagcttccagtggctccggaacctgccgggctgtcccaaaagcaaaggcaacaacgtgtttgttgtccacaagccctcggccgtgccctcgcgggagggctccgagtctggcccgggacccagcagcggaagcccctcggaggagtccccgcccggccccggcggtggcctggaggatgctctgcccttccctgccgcgctcctcagggtccccgcggaggccccgagcgaccccaggtcggccagcggggaagatgacccctgcgcccccaagaaggtcaaggtcgactgcgactccttcctgtgccagaaccccggggagcccggcctccaggaggcccagaaggcaggcgggctccctgcggatgcctcgccgctcttccgccagctcttcctcaagtcgcaggaacctcttgtgagccacgagcagatgcaggtgttccagatgatcaccaagtcccagcggatcttctcccatgcccaggtggcagcagtctcctcccagctccctgcgcccgagggcaaaccagccgccctgaggccgctgcaggggccgtggccgcagcagcccccaccactggctcctgctgtggactctctccacgccggccctggaaaccccgaggcagagggctccccagcccgcaggagaaaaaccacacccggggttcccagagaggcctcccccggcagcacgagacgagacgcaaaggggggactgaaagtggccgcggttccaacgccccttgcagcaccgtctctggacccttccaggaatccagacatctcttctctggccaagcagctgcgatcctctaaagggaccttggacctggaggacatcttcccctccacaggccaacggcagacccagttaggtggggaggagccaccaggagcctcgctgccagggaagcaggccccagccgagaatggcgcggcttcaaggatcacaaaaggtgaaaagggcccagcctgctcccggggtggaggctaccggctcttgggcaaccccagggccccgcgattctccggcttccggaaagagaaggcgaagatggatatgtgctgtgcggcttctccgagccaggtagccatggcctccttctcatcggccgggcccccggcagatccctccaagtccaagctgacaatattcagcagaatccagggtggaaacatctacaggctcccccatccggtgaaggaagagaatgtggcaggcagaggtaaccagcaaaacggcagtcccacagactggacgaagcccaggagcacttttgtctgcaagaactgcagccagatgttttatacggagaaagggctgagcagccacatgtgttttcacagcgaccagtggccgtcacctcgagggaagcaggaaccgcaggtgtttggcacagagttttgcaagccgctaagacaggtgctgaggccagaaggggacaggcatagtcccccaggaaccaagaagcccttggaccccacagctgcagcccctttggtggtcccccaatcgatccccgtggttccagtgacccgacacatagggagcatggccatgcctgtactggaggaccccctactgaagaagctcctgctggactcggggacacagtccgtggacctgaagggacaagagaaagacggggaggagcgagacagcaaggagagcagccagcagagaaagcggaagaagcggcccccaccctccacggctggggagcctggccctgcaggatgccaccagagccgcctgcggtcacccatgttcctggtggactgcctcctgaagggcttattccagtgctccccctacacaccacccccaatgctcagccccatccgggagggctctggggtgtacttcaacaccctctgttccacgtccactcaggccagccctgaccagctcatcagctccatgctcgcctgggcacccactcatctgccttctctctttggatttgcctattcaggacatgccatgctagattga

SEQ ID NO: 116423 - DNA, 193 bp, Homo sapiens
atgggggccacaccgtggtccaatgagaagctgcaggaggagggaagtggagactcacagaggaaaactgacttgctcaaggtcatgcagcctgcagaagtggctttctgcatggccctggaggacggtgatttggacagaagcgtagggccagagacaggacgtgacggtggggctgctgcattggctccag

SEQ ID NO: 116424 - DNA, 573 bp, Homo sapiens
atgggggccacactgtggtccaatgagaagctgcaggaggagggaagtggagactcacagaggaaaactgacttgctcaaggtcatgcaggtgattagacaaagaggcaggggccagactgaactggaggtcttgcattttatctgccaaccctacaactgctgcctctggggcgggaaatctagcaaaccggcttggccggccctgcatcagctcgggaccccccagaagaaggtggttcctctttctcattttcacaaaggcaccatctggctggcggggggcctgtggcctgcaccccatcactacccaccccccacatcaagagctgaccccaagccgggggagctgctcatctccgccctcagagctggaatttcatcttctgtttctggtgactcatactgtgagccccgcgatgaaattacacctgcctgccgctgccctccgggcctctggccccatgcgatcctcccgccgccatccaggagctgcttctgccggcctggctgtggcgttcagaggcatctggagggcagtggcgatggcagtgggggcagcttgtctctctga

SEQ ID NO: 116425 - DNA, 1101 bp, Homo sapiens
ggtcgacccacgcgtccgactgcttcttcgaagattcttacctttttaattcactaagctgcctttacatgagaaaaaaacccatacagctaaaactggtaaaattgagtcactacatgtagcattcactgaagatgaaaccacttccattgaaaatggaatagaactcgttttcctgatgttttaagaaatcaatcactaacacctatcaatatccaaaatatctttcttgatcactgtgtacaagaaagagtgactgcaatttcatcaccccaggaatctactaagcatgtccgtgaggagatgccagatactgctactggttccatattttttccacattgtaattcagcttctactcgaatttttgggaaacaaacaaacaaaatggaaagttcaagaaagtttaaaactatgaaagatgtttatactggagaaaggctagaaaacattttaattctttcttccaagttttccaaacctaaaagtactcctggctcagttatcgctcaaaaacttgaggaaatgcaccctaagcatcaacctttaccagagagtccaggctatacttatcagcacatctcgagagacttaagtgcaacagtgccaagccctccacctatgactgtatctatgaaaccagaaggacagtggcctgaacattttaaatcaactgctacattgacactaagagttactgaatttccaggttttgtttccttgccaacaccagttttaccaagaaaacctcacaggcagtctgtgatagaaactcttgtaacagaaaatggaaatatagaaagtgtcccaaagcaaatcccaccaagaccacctgaaggtctcaccaaaactgaaaaaatagaatcagagatacacgttgtacgtggtgaaggttttaagactgttgcagcaacacgatatgaaacaataacagccatgaccaacctggccatagtaaactgtcaagtatatgggagaaatgcacttaatctgaaggattttgcttacataatccatcgggtatcttcctctagttcctgctcctatggacagtacagttctcccgtgactttccagatggttttcaagtttagtccctga

SEQ ID NO: 116426 - DNA, 354 bp, Homo sapiens
atggtggtggaagacagagagacacacagagggaatgaaggcagagattccaattatgcagctgtaagccacggaatgcccaagactcttggtgaacaccagaagctaagaagagtccccccaccagcagagcctgcccccttccgcaatctgtcaactgtgaacggtagtgacagaagatgcctcctgacttgtcaacagaataggctcctggggacctgggaatggatcagaacagcagtaaaggccctgggtccacgtcctgcagggggtcaggctgtcagagagcaggggtcaactccagcttttgagtgtgagaaactgctttactgtgccctcctgtttctgcaatga

SEQ ID NO: 116427 - DNA, 1057 bp, Homo sapiens
tgtgggcctgtctgcatctcatgccaagaagcgtcgttgtacattcaccaaggacggggcagccgcagccgtagctggtgcctctgatagaggaacgaacaggatctgggcagcccatgctggcctgcagaggatgacactgaggttctgggacgacctgtgtctcacccaaggctgcctgggtaaaggggagcagaaacaggtagagggagctggtctcctgaatccgatccagccccgttttcctgccaagccctgggatgaggacctgagacgccttctcccacccactgctctgcgcattgcacagaagagcggctgctggtggcacccacacccctccatggcttgtggtacagaccatcctgctgtgctggtgacttcccgcctctgtacctgtgtcctgggctatactgcccctgccctcatcctccaggctggttcctgggaggtatccagaatgggaatcacgctgagaattcctaccttccacatctatagtgtccacccctgcaccttcctgcctccctggagcatccaaatggtcctcctgaatacgaacagacctggaagtcagaacaatacacccgcagacctgtcccagcaaagctacattgacaccaagcttctcctaatgggaaaattaaggcccttctcagactccaaactaggaaaggatctccccagctgtaaaaacgtggccaacctggcacttcagctgagacatcattccagtgataaagctgtgcacggcagccatggctatccagctggcccagcccaacagagatctgtggttcctcacttgcctgcaccttctctgccttctcctcttaccatcacctccaatatcagcagtgttaccagtattgtaagaagaagccatacccattcttacttctgccaaggtttccctaatgccaagattcgcctctttgacctgggttggaagaaggcaaaagtggatgagtttctactctgtggccacatggtgtcagatgaatatgagcagctctcctctggagccctggaggctgccctatttgtgccatgttag

SEQ ID NO: 116428 - DNA, 1637 bp, Homo sapiens
atggtcctcctgaatacgaacagacctggaagtcagaacaatacacccgcagacctgtcccaggtcatttagtactcagtcactttgtagacagttgctcagcacacaccatctgcaagagaagcctgcagacacctggacagcaaagctacattgacaccaagcttctcctaatgggaaaattaaggcccttctcagactccaaactaggaaaggatctccccagctgtaaaaacgtggccaacctggcacttcagctgagacatcattccagtgataaagctgtgcacggcagccatggctatccagctggcccagcccaacagagatctgtggttcctcacttgcctgcaccttctctgccttctcctcttaccatcacctccaatatcagcagctgccagagcctggccccaccatcatcctctcccagctggacaggtgttcctgccttccaagtagggtcccagcctccacccttggaggtagacctacagccattggtcagtgccattcccacatcaggctgcaggttgacgggaggcttcttagggaaccaagaggaagaactacaggaattaaattacaaccctccactgagaataaaccagctagtaacaatgagagcagggcaggtgccccaggccctgcagtttcgggtacagcacccaggcacacccaggaatctggctcggcagctcccagaccctccagtggggcattggcagattgaggacgagtgtgagaatgagagactcctcagggccactgtcttaggaattgcacgctttcatgagcatcacgtccacggagccccccgggttcttggggtgcagatccaaggtttccctaatgccaagattcgcctctttgacctgggttggaagaaggcaaaagtggatgagtttctactctgtggccacatggtgtcagatgaatatgagcagctctcctctggagccctggaggctgccctatttgtgccatcttgccccactcaaaacctcagtgtaataatggaagcatcagatacatcccaacggagtaggattctgcaggatgcgtggcttacaactgctgaggccaacaaaaaggagaaaagtctgagacccggtcacagaccagaggagcctcaggagccacggcagccagatgtcatgtggtgtcctgggcgagatcctccatgggatcctctggctgctaaggacaggcagcttggaacagagtctcctgtgctttggcatgcatggaaggtggggagtcagaaaagacaaccagaaaggtgtgccaaggagcaaggttgggaatctacccatgaacggaagtgggcaggagagacacaccggctgctcagggcccttggtgacccccctgtacacaagaggagggcagcactcacctgccagctcctactaagaatgagaggtgatggggtttgtgccaccaaccaggctagagcaggaagtgagtcccagggagtggaggaaacccaggggccagttgttaactccacacaagaccgtgcccttgctactgaagcatatcagtgtggaaatcacctgacggcaccgttgctaataagccttcactttgctagaactggagaaatgattttctccttacagaccttttcttaa

SEQ ID NO: 116429 - DNA, 787 bp, Homo sapiens
tctgagttcgggcacgcgtccggggcagttgttgtatattgcggtgccgttgctggttctcattccttttaggcctgttctcgtcttccgttccgactctttctttttcgttgcagccactgaagatcctggtgtcgccatgggccgccgccccgcccagtgttaccggtattgtaagaacaagccgcacccaaagtctcgcttctgccgaggtgtccctggtaagcagtggaagagcccctgcactggttggctctgcggactccgcgtccgtctgtgacaccccctgcacacttacccaatccttttagatgccaagattcgcatttttgacctggggcggtaaaaaggcaaaagtggatgagtttccgctttgtggccacatggtgtcagatgaatatgagcagctgtcctctgaagccctggaggctgcccgaatttgtgccaataagtacatggtaaaaagttgtggcaaagatggcttccatatccgggtgcggctccaccccttccacgtcatccgcatcaacaagatgttgtcctgtgctggggctgacaggctccaaacaggcatgcgaggtgcctttggaaagccccagggcactgtggccagggttcacattggccaagttatcatgtccatccgcaccaagctgcagaacaaggagcatgtgattgaggccctgcgcagggccaagttcaagtttcctggccgccagaagatccacatctcaaagaagtggggctttcaccaagttcaatgctgatgaatttgaagacatggtgg

SEQ ID NO: 116430 - DNA, 486 bp, Homo sapiens
atgaagagatccacatctccaaggcctagtgggaatggggagacagttcatgctgatatagaaactaccctatacccagaaagcggtactctagaaatgaatgtcaaggatcttagaccacgagctagaaccattttgaaatggaatgaactaaatgttggtgatgtggtaaatgaattggtggatgccagagatgtcggccttggtgcttggtttgaagcacacatacatagtgttactagagcttctgatggacagtcacgtggcaaaactccactgaagaatggcagttcttgtaaaaggactaatggaaatataaagcataaatccaaagagaacacaaataaattggacagtgtaccctctacgtctaattcagactgtgttgctgctgatgaagacgttatttaccatatccagtatgatgagtgttaccttcatcttgtcgtctgtttcccagagtatccaacggacaaaatggcttaa

SEQ ID NO: 116431 - DNA, 726 bp, Homo sapiens
atgcctgatgaaaggaatccagtagcaagaattcctgttcctgtttatgtaagagggtcactagagggaggaaggctgaatcctctccgagaaatctttcggggccagcattatattagagctaaagtatatttcccaccaatttacccaactccctccctgctccagtaccaaatagctctacttctccaaagggcacttggagaagcctgcaaggacagaggtaaagatcaaaaaaaggtgatttctggtcacaaggcccttgagcagctggaggacttaggcagagtgcggagagcagccattcacatgagaagactccaccctggaggcagcgctaagcagccatccttccttaactgggcctctggggcaggcacctgtgaaatgccagcagggtcgttgcatgtagagggatcccactcagtgcacccctgggaatggctcagccgcactgtgggtcttcctaggtcttccacgtgttcaacggaaattcacaaattctctagtagcagaccctatcttctcactgtaacttcacatgtcagaagggacaaacaagctcccttaggcccctcttatgagggcactcatcccatgcgtgtggcctctaccctcaagaccaagtcaccttccgaaggctccgcctcctggtatcatcaccttggtgttgaggattttaatctgtcaattttggatggagacaaatgttcagaccaaggatag

SEQ ID NO: 116432 - DNA, 447 bp, Homo sapiens
tatgtagtacgcattctaccttttcctacaatgaatccaccagcagaaattcctgtacacatcttatcaacaaagaatttgaacctcaaagagactagcaagtacacaggaccactgtacagtaacagatcagttacactgagacaacagagtttacagcagagaaagagtttaatgctcaccggataccaagaaaggaatggggttaccccgtggggccttgatgctgacccttttgccctggggaagcttggcctcccaactgaaccagctgaggtttctgggctggttacttctgctccatacaacctgctctatttaccctcggaaggaaaaataaagcattggtttgagcaaagggaatcacatgagcttgcactgtgggtgcttttgtgccttgctttgcgagagctgtacacacggcaaggaacctgggtgaagatttga

SEQ ID NO: 116433 - DNA, 582 bp, Homo sapiens
atgtaccaggtgctgttctatgcactgagggatgtagcaatgaacaatgctaacaaagtctctgctgtcatggagctttcattcaagatcctcacggaaatagtagatccttatgctgtctccaatgtgcaccaagatggctccctcctaggccaccagtctccttggagaagcatgcagttatttcagacacctaccttgcccaccagcaataccactaccctaactttccaatttacatcatcacctggaaagaaaaaaaatgatgagtggagacagatggagaagaaagggaaaaaagagaacagaagaatgggaagcaaaaggacaagaggaagaggagatactgagaataaaaagataaaaagagacagagtcattgccattggagagctaatccttgtaagggacaatacaaagaaagactctctaggcagaggacattgcatgtgtgcagagctactgaccttctttcttcctcaacccctctcttttgcttatcccaacaattccacactcacctattactcagattccactcccgaaacaacacaggcccttgagtttctccctgatccctag

SEQ ID NO: 116434 - DNA, 1194 bp, Homo sapiens
tttactgtgaattacttttattgaaaaaaaatgttcactaaaaaggctgaatacatccctctacatgaatacacagctcagaagaggggaaatggaggtggggaggcatccaagtcataaagggtagaaaatgaatgcaagcttcttagaactcttcccaggaacacaggcaatgcttgcagtttcctgggtacccaatgggcagggaagatcaggaagagatccatgggacataaggaagttaggttactgcgcatagctcccaggagattgtcccctccatttctcccactcattcttttggctgtgggagtgttccctctaagctgatccactaccagcagctggaacactcccctaaaaagctagcttggcttcctgggcagccagttcttcaggagcaaggctgttaagttcttgaagctgtcactgctgcaggcccccccttagcgcacagaggacaatcctcaccaacacgccaccaaccactccaatggcaattcctattcccaaggctgacgccaccttctttttccactttgggtggtgaggcttggagtagctgtccagattaacttccaatccctcatctattaacttctgatcctcagtaagtgactgatggaaattcagattcaccaagttaggaggaaggaccctcaacccaaaatagagcctcttgacaagtctcaagttttttaccagctgcacatcacagcgatatgtcccagagtcatactcctgagcatatttaaacttcacaaagtgggagttggcttgaaagggtttgaagacctcatcgtcagtggagatgacacctcgagcaagtctccaggtgaaccggaaagcttcctgtccaaactccaagatgtctgaactcagacagctaagctcaaattccttgccaatgagaatggtgaaatggagcatcccacagatccagttggtcagacattctaagcgccgagtctgacatttccttctcactccatcagggcccacctcacagacggtctcctccttatagccaaggccacaggtgacagtacaggttgtggcattgatgataactttccccacagcttcttgcagcttctcagggatggccagtgttttaggtgtagtcaccaccaaaggcaggtagaaggccaaccccaggctcccaaggacaaaactagtggctaaaaccttcat

SEQ ID NO: 116435 - DNA, 560 bp, Homo sapiens
atgctcgcaagactgcagggccctattgctcctgctgccccgacccctgaccagcggggacaggagctggtgggcaccttcaggaagtccagccatccctgctttctggacattttgaaggccatgattgaaagctgcagccactacccaaagagaaatgtttcacttaacgatgtcccagcgaaaagtggtgggaaatctaggtcctcactacccaaggcgtggtcctcagacatcacccaggagctggttataaatggagagtctcaggccccgccctggaggccctggttcagaacctgcgtttcagcaagagctcgagtgattcaggcaggcacccccttctgcaggtctcagctccggtgaagaagaaggccagctgcccagcagacagggacaaggagtgtgcccacatctctggggcagagcaccccctccttgtcaaagccggcgactctgcaggcttctggtgcagacaatgtggtcaccagatgcacggcacccagcttgcggggatgccgggcaaatgttattacagcgataacagtgattctgcttag

SEQ ID NO: 116436 - DNA, 1139 bp, Homo sapiens
atgccctattcccagtacaaatttactgtattaatctgttttcatgatgctgataaagacatatctgagactgggaagaaaaagaagtttaattggacttacaatttcacatggctgatgaggcatcagaatcatggtgcgaggcaaaacgcacttcttacatggcagcagcaagagaaaaatgaggaagaagcaaaagcagaaacccctgataaacccatcagatcttttatttccatgacaaacatgaagatccaagggactctcttctacaccaggatctattttgtttattatactgcggtcattcagtgtaattcctggtacatgatttcttctttgtttttggatccattgctggtgagctggtgtgatctttcgggggtgttaaagagccttgtttgtcatattaccagaattgcttttctggctccttctcatttagaaagtccacaggaagaaattcatagagggctgattcaccagatcagcattgtcatcctgaacccagggtcttcccttcatgccactctgcatcctcactatgagtctcatgctcagactgtcagaacaacagcagtgacactccagctgtcacattcagacgcatatctgaaagctcaaaatctcatgaagctgttaagcaacttcagcaaagtctcaggatacaaaatcaatgggcaaaaatcacaagcatgcccgtacaccaataacagacaaacagagagccaaatcatgagtgaactcccattcacaattgctacaaagagaataaaatacctaggaatccaacttacgagggatgtgaaggacctcttcaaggagaactacaaaccactgctcaacaaaataaaagaggacaaaaagaaatggaaaaacattcaatgctcatggataggaagaatcattatcatgaaaatggccatactgcccatggtaatttgtagattcaatgccatccccatcaagctaccaatgactttcttcacagaattggaaaaaactacgttaactttcatatggaaccaaaaaagagcctgcattgccaagaaaatcctaagcaaagagaacaaagctggaggcatcatgctacctgacttcaaactatactacaaggctacagtaaccaaaacagcatg

SEQ ID NO: 116437 - DNA, 1035 bp, Homo sapiens
atgccctattcccagtacaaatttactgtattaatctgttttcatgatgctgataaagacatatctgagactgggaagaaaaagaagtttaattggacttacaatttcacatggctgatgaggcatcagaatcatggtgcgaggcaaaacgcacttcttacatggcagcagcaagagaaaaatgaggaagaagcaaaagcagaaacccctgataaacccatcagatcttttatttccatgacaaacatgaagatccaagggactctcttctacaccaggatctattttgtttattatactgcggtcattcagtgtaattcctggtacatgatttcttctttgtttttggatccattgctggtgagctggtgtgatctttcgggggtgttaaagagccttgtttgtcatattaccagaattgcttttctggctccttctcatttaggtctctcagccatggataccagcacctcatccagtagaggtaaaagaagagtgaagagtacctgctccagtggagaaagtccacaggaagaaattcatagagggctgattcaccagatcagcattgtcatcctgaacccagggtcttcccttcatgccactctgcatcctcactatgagtctcatgctcagactgtcagaacaacagcagtgacactccagctgtcacattcagacgcatatctgaaagcctattcaacccattcatattttcgtgaaagaagaaagtcaagacccctgcttcaggcagccatctgtgaagatccagctctcaaggatctacacagttctcctctgcctcctactacacttaggttccatccaagttcacacgtggttattgtgaggacagtcaggatagaaatgcctccactggtgataccgaggcaaacagagtctggagtggaactccagcaaactccaatagacctgcagctgagggacctgattgttagaaggaaaatgaacaaacagaaaggaatagcatcaacatcaacacaaaggacatctacaccaaaaccccatctctag

SEQ ID NO: 116438 - DNA, 309 bp, Homo sapiens
atggtgcgaggcaaaaggcacttcttacatggcggcggcaagagagaaatgaggaagaagcaaaagcggaaacccctgataaacacttcagatcttttgaacactactcagcgagaaaaaggaatgaacttgatgcgtgcaataactgagatggggctaaaggctattacgttgagtgcaaaaagccagtctcaaaagatcatatctttgaaaaacgtgtcaaggtcctatgtccggggtttggagcagcagtgccagcgtggaacactcctgttgcgaaaaagccatgcctccaagcctgtgatgtga

SEQ ID NO: 116439 - DNA, 673 bp, Homo sapiens
cacgcgtccgatcttcttaggccaccaaagcaaattatttttttaattatagtctcagtttaccttgtttccctctcagtgggtcaaccaaaaccgcatggcgtactactctctgaagcctctactaccctgctcctccgtgttgacatgtggccaggcaagccaggacttactcacatcagctacattagttactgggcaaatattgagtgtctaccatgctccaaacactatcctgaggacaagagagacaaagagaaccgtaggccctgccttcaaggagcacatggctagtggaaacagacatagtaggaagctagaaatcaataagagaaaggatcatggaaaattagcaaatatgtggaaattaattccccatgtgactgtgtttggaaatagggactttaaagaagtaactaagaatattcattgtgattatcctgtgaacaatccattcaaaaagggggacaatgagaggcacacagcagtcattgattggtccatagcaattctgaaaattgccaggtcttcctattctggaagaagagcaaccactgcacaacatccagagttggcattaaatccaaaagctttggagatgaatgacttcgttaagattcctctctgggaatgtgaagagatgggatctaaactcaaagactctgatccataa

SEQ ID NO: 116440 - DNA, 659 bp, Homo sapiens
tgcatcttctcctatcaacaaaaggaagtaggaagaaagaaacaccaagaagaggcctgcaaaaaggtcttctaaaagttttatctatggcagccctgcactcttccttctttccggtgaatagaaaagagctcaaaaatccataccttcacatctcaggtgaattgttcatacatcaaattcttgtaacatccaaaggcgagggaagaacaagctcatcagaaccgggtgtctgcgattatcttcagcttggccacagagtgggtgatcagtaccggccacgacaagtgtgtgagctggatgtgcacgcggagcgggaacatgctcgggaggcacttcttcacgtcctgggcttcgtgtctgcaatcaccctgctgaagcttgaacagaacacgtgttcagtcatcacaaccctcaaaggacatgaaggtagtgtcgcctgcctctggtgggaccctattcagcggttactcttctcaggagcatctgacaacagcatcatcatgtgggacatcggaggaaggaaaggccggacgctgttacttcagggccatcagtgcgtgaccacttgtgggggtggggaaagaatccgagttagtggggagctagtgaaaggcattaatagtctgataccactttctgcaaaccccacgttctaa

SEQ ID NO: 116441 - DNA, 860 bp, Homo sapiens
atgaaatactggggtggtgatggagaagaggctgtggcctcaagaactgtccgggaagcagggctgggggttgggagttccctgaacatagacgtcagtggaaactacaacggtggctgccgtgaactagagagagcaggtacattgagaaaagcagagggccaaggtcacattcctagggaaatgtcaatatttaaagaaaagccagaggactgggagcctaaaggagagacaggaagaatgggcaaagtgggaggagagccagccaggacagtgcagccacggaagctggagggcagtgagtttcagggaggagcttctggtggccatgcctgtggggagcagagggcaccgccttggagagagcctgtgctaagtgctgtttctggagatgacatctgttcacctttctgttcctgcagctcatcagaaccgggtgtctgcgattatcttcagcttggccacagagtgggtgatcagtaccggccacgacaagtgtgtgagctggatgtgcacgcggagcgggaacatgctcgggaggcacttcttcacgtcctgggcttcgtgtctgcagtatccttcagagccacggacctctccttcccctggcctctgcttctcagtgtttggttctgaatctcatcccaaatggctgagatctaaagactgaatgaaacctatttaagtttgtgcaaaagtaatgcattttttttttaccatggaaagtaattgcaaaaattgcaattacttttgcaccaacctaatacatatttcactgaaaatccgagaacttccgtaagtttgctgtaaattgggtttattaaaaataatgaaatgaattgttctgtgcaaaaaaaaaa

SEQ ID NO: 116442 - DNA, 440 bp, Homo sapiens
tttcgtgttcttccgggtctgcagtctgtggtgtgtttgctgttcccaggtacggtttcggtgtcccaagggttgacaggtgtcgcgcctgtggtaggcgcgccgggtagagaggggggcctcggcgggtttgtggccagggaaggggcgtggagcgagagtcagaggtcaggcgccggcgcccagctcgtttgaagtcattgtttgttgcagggagactcggtcacatggtggggacgccagagggtcccgggagtaggggtaagctcctgatcctgagcccgaagcctcttgcagcggcaactcttccctctggccatcgcgttcccccgggatacggactccagtcagtaggcgaagcttgatcctagagtagactctacgctgcccaacagctgctgttaccgcatggtgccggacagttccaggctcttggtgtc

SEQ ID NO: 116443 - DNA, 580 bp, Homo sapiens
atgaagccacggaccctcacggtgagtgttacagttcttaaagcagcacgtctggagttgttcgttcctcccggtgggctcgtggtttcgctggcttcaggagtgaagctgcagatcttcgtggtgagtgttacagctcataaaagcagtgtggacacaaaaacagttggagctccaactgtacatgctgctacacagttgagggagagtgaaatggatattgtggagacaacacccactatgaccatccactatggtcctaagggcaaagagaaaacagtaatcggccagaagggtcaggacttaatctttaaccggcagcttccctatttcttgcccctgcttccagctctgggccaatcagagaaagccaaatgtgctcctcacaccaatcgcgcgctaactaaggccacatatgccaagcaccagcccagcacctggcatgtgaataaaacccagtcactccaacttgcaggcaaagctagaaaaactgcgctgcatttgcaaacaaaaagctcttggtggcgatgacgatacttgttttggtgtgaaactggcaattgctaactacgatctgtga

SEQ ID NO: 116444 - DNA, 670 bp, Homo sapiens
ctgggctctctctcgctcacacctcttcttctgcctctctctgtcacctttttcctccttcaggtctctcagcccagcatcaccttctcagagcagcctgcatccatcccctagactagaaatatccccctttcaaataacctcatggcacccacacctcaagacaggttgcaattgaatgtctgtttatccctgcctgtctccattctatccccagggcctcccactctgcctggcaaagaacggatgtgctcacatcaggaatattttaatgaaggtgctgttactggaaagggatcccaatccagaccccaagagagggttcttggatctcatgcaagaaagaattcaggttattacctgtcttttaaatacgcttcggatagttacaaggttgggttatgcaagaatctcccatgctgaactgagtgattcagaaattcagatggcaaaatttaggatccctgatgaccccactaattatagagacaaccagaaagttgtcatagacacagagaagtttctgagaaaattcattttaacccaggcaccaaccaaagaggtctctgctgccatctggcctttcaggtttggatatgacaatgaagggtggtctagtctagaaagatcagctcacctgctcaatgaaacaggaagtgccagagtttga

SEQ ID NO: 116445 - DNA, 635 bp, Homo sapiens
  misc_feature (1)...(635): n = a,t,c or g
gtttcaaaactactgnaaagtagctctaatcaagtgatatttctgggatatatcacttcagcacctggctccagagattatctacagctcactgaacatggcaatgtgaaggatatcgacagcactgatcatgacagatggtgtgaatacattatgtatcgagggctgatcaggttgggttatgcaagaatctccccatgctgaactgagtgattcagaaattcagatggcaaaatttaggatccctgatgaccccactaattatagagacaaccagaaagtggtcatagaccacagagaagtttctgagaaaattcattttaatcccagatttggatcctacaaagaaggacccaattatgaaaacaaccataattttcatatgaatactccccaaatactttttatgaaacatttaaaacaagaagttattggctgggaaaatctaagaaaaaaagtatgtaagataaaaagaagagattaatgaaagtgggaaaatacacatgaagaacctcaacttaaaaaacacatggtatctatgcagtgggaaattacctccatttgtaaactatgttgcttaataaaaacatttctctaaacaaaaaaaaaaaaaaaaaaaaaaaaaaagtcgacgc

SEQ ID NO: 116446 - DNA, 738 bp, Homo sapiens
atgagcaaggagggcagcagggatattcaggccattgcctcagagacttgtgaatttgtagggagagctctgtgcggactcatctttctcgatgatatggaggaaggccttaaaagattaatgtgctttcttatcccctcaacacccatctgcccatcccttgttggtcttgcagctgtcatgaccccagaaaatctccatctgtttggagaagtactgcgtccttccggattatcttctacactatgccttattgttatctggctggttccaccaccggtcagaagaatgaaaattgcagatacctattctgtgtgtttctctccagaatggtggatgttagagaccctactaaggatttgtggactcactaacgtagtctctaaaagcgagcttccattcgcagtcttcaagaataactgccctacatctcccattattgtttcaactcatccttctgaaatggctcaccaagtagagagatgccgtaaaggtatggtcagcaatgaattattagtaagcagtataagcatggtgataaaccttttaaaacttgcatctatacggcaggcacttcagaaggaccccccagagacctcttccttcttttattctggtgctattgaatccctgctccatatagcagccacgatcattctttttggcttgcaagttggatcacatcagctcactcaaatcatggccctgacttccccttgcctggagcactcaacctga

SEQ ID NO: 116447 - DNA, 316 bp, Homo sapiens
cgcacgcctgcacggacccggacttaatgggtcgacccacgcgtccggtgaaggagaaatatgatgaccaaaacaaaaatgtattcttggagaaaaagaattggaaacacacaatagttactgagcagtggctactgtgtgatcctaattctgttcttccttccaactggatctatagcaatgagccatgccatgaagtagccacagcaaagaccctcctacctggcaggtcggtcgatggcttggtggtcccatcctgcagcctcagcttctgctccttgctttttgtccttggaggtcatatctggggtgggct

SEQ ID NO: 116448 - DNA, 668 bp, Homo sapiens
  misc_feature (1)...(668): n = a,t,c or g
cggaaatgtgcaataattgtttcacatttttttccaacatcagcaacagagaatgtttaaaacaaatgtgtttctctatttgttcatacagcatctctctctagcctattatctcctgttagacacagcccagaaaatgaatagagacaagtcctggctgggtctgggttcagaaacataatagaaggattcatctaatggaagggaattctttccacagttgctagttcctcacacctctgcctctatgggattcntcctggccccacatgctctgctgtgtcttctagctgtcggccactgtggaggaagtgaaccttctagatcctgctgactcatacaatgagttttgtgtggaccatcagacaaaagggctggctggtgaagataagggagaggcaaagcacttagaatggcaatcagacatggctatctgggaccaggaattaggaactgctgacacaaagaagcagggacagaagagaactcactcttgtggtgagcagaggcagctgtgcaaacaacctgctgttccggatgtgactgtggtggccgtggggtgcagagtccagggctcatggcgttggtcatgcaaattgtggttcctgggccttagcagaaacaaggaacctattcagtggcattgctttgggggctgctctggcttc

SEQ ID NO: 116449 - DNA, 759 bp, Homo sapiens
ttttttaatggaatgcacaaaaagtgctattttaatagagagacacaaaatattacataattcatgggacttagggacaaaacgatgccttggaaattttctggaaaatcacataagcctccaaagaagttgatacaaaggcagctaaagatcttggtttgatagtggcaattctaccaatacaaatacaaaggaatcaacaaatggacaactctttaggattacagttatgacacaagcaatccacaggcattccagtgaaaactgcacagagctctctcttgttgttacttgcaaaaggctagcatgggaaatatcttgtggttcatgtgaagagttggcccatatttctttggcgtgttatcacaagcaggctaagggggcctccagtccttatgacatatattagaggagagctggggaggaattttccagacaacagccaccttcaccagccagcccttttgtctgatggtccacacaaaactcattgtatgagtcagcaggatctagaaggttcacttcctccacagtggccgacagtttagatgaatccttctattatgtttctgaacccagacccagccaggacttgtctctattcattttctgggctgtgtctaacaggagataataggctagagagagatgctgggaaggctttattcgacctgttccacagggcagtgaggcaccttcagctctgaatcaccgaaagagaatctgatttttttttaattgcttttccacctgcttccc

SEQ ID NO: 116450 - DNA, 1361 bp, Homo sapiens
tgggaacagtggtggttaagggactaatcaaacaggcatgagctctacaccctcatgaagttgtcacagtccggtggagataggctttctaaaaacacacaaatacagatttggatgagcactttgcaggaagagtacagagtacttttgagaggaagagagggagagtagcatggtgtaacttagatggggggcatacgaaggtctttcagatgtgaaagataaccatggctgaaaagaagagcatcccagcaaagggaacagaccttgcaaaggccctggggcagactgttccatctgcagatgttggaagccttactggtgcaaggtggctgggcttaatctctgcccaaatccactggctgaccactaaactaagcagccactcactcattagggaaatgcaaattaaagccataacaacaaccaccagaatggctaaaattaaaaagactgacaatccaagtgttgacaaggatatgcggaaaccagaatcctctcaaattgctgtctgggccctggacatccccaaaaatgcttctatgaagggaaatgtattgtcctcagtcattcttagtcacaaacaaatagggcttcacgttcagccagactctaagtctcaccgtccctctgggaggcagcagagagttccagctaactcgagaaaagacaacacagccagagaggatggctgcctgcaggctgacaacgctgtttcagagcaccctaacactttcgacacaagtagattacaccgggggaagagtttagggatgaacacgggaaaactagtcacagcgtggtcctcagaagggcagcatcagcgtcacctgggagcagagagtctcggtcctcactccagggctattgaatcagaatctgtagctcaacaaggttcccagagctgcaagcaaagaatggaaatttccaattgcagcatcgagggctgctgttctgctgactgtcttgctcagccggggtcatctgcttctctaagacatcaaggaatgccaagccctcttctcttactggctaacgcctacacgctgatcaaaactaagctcaatgatactgcctcttggaagacttccctgagtgcacttctacctcctcaccctcaaccttcagcccgcacactcaatctcagcatttattctactaaactcataattaagatagctaatgcttatatggtaccagacacttactatgggccaggcacagttacatcctgtcatttcattgaagttattggtatgcttgcctgtttccacaagacaatcatacgttcagaaacatttattgagtactttgcaactggcgtgctaggcaaagtaaataaaacagtgacagtaaagtaa

SEQ ID NO: 116451 - DNA, 548 bp, Homo sapiens
taatatcttcaaatactttagaacagtggtccccaacctttttggcatcagggacctgttttgtggaagacagtttttccacggggttaggagtccttggctccgttaaacctctacacgtgcttttcatctgctcagcaaggagtggaagaccagctaaacagataacagggactaaggagtgctcaagctggtattactatgtaactatgccaatgccagcctccaccttcacaattgcagtgggatgctggacagaaatgaagatggagacatggtcatcaaatgatttggcaacagagagacccttctcaccttctgaggccaacttcaggtttgtgtttggggacttgctgggaaggaaaaaaaaaaaacacttgagggagcggtatgatgcatttcttccaagcactgggaatgttttcccaaccagccctgccccactggagttcctgctgcctccacatcccacagaagatcaggctcttcccataattactagccaccagggctcccctctgcccaagaatgagatccaaactccttag

SEQ ID NO: 116452 - DNA, 1202 bp, Homo sapiens
agaagcaagccttgagctgctcagctgccctctgctccataccccctggtttctaacagtcacgtcctgcacccagacacttatccatgtgtgttcacgttccccatgccttgcctgtcctgctgggctccagtaactgctatactggagcaagaacagcaatgctggacactcaccatttagtgaagcctcacagtatcctgaaaaggaattggctcatgattcatccagttccaagtctagagaccccacatagaggctctggccccttggagcaatcaactctggttcacccagggggtatggacatggccaactgggcactggcccagccatcccgaggcctccttgactggcagcatttggcttatacgtcattagactttgtccaaagagctcaggttgcaggctcacctcctcaggatgcccgctcatgcactcaggagttgctgtccctcatcattgaagaacacttgcacctgggaggatttggcgatgctaaagagggatatggggcagctgctgaggaactgcagggctggctgccccgagccgccaccgggcacagaagtgccaagcagcagtcctacagcatgaccatggacattaactcactgactgctctgtgtgggagtcggtcagctccagagcgggggtgcttctattgtgcggttggaattagaagcgcagctggaattgagaggcacgggtccagtcattctgtgttgctcatcagaggactgaagcaggcccacctggaggtagctgacacttccttcatcatcgccgtttttggagagtggtcatacccgactttaccccagtttctccctgcccattcactccccaagccctgctgtatggcttccccgctgcccacgtctctgggaactgcctttcctcattctctccaagttctgtggaactttgaacttgagagagatgatttagggtatctggagggagaattttctaagctgcaaagcattcaagaggaagcagagcataaaagtttggaaaatttgcagcccgatgatgtgatagaaaagaaaaacacattttctggggagaaattcaagcctgctgcagaaatttgcctaataacaagaagccaaatgttaatcaccaaaacgatggggaaaatgtctccagggcatgtcagagactttggcagtgcccccatcaatgtcctggaggcctag

SEQ ID NO: 116453 - DNA, 406 bp, Homo sapiens
cgagtggccacggatccccggcaagatgagcaggaagcttgctgctagagccaaaaacactagaataacgatgagcagtggaacgctgaagcctgcggcatgccggggctgggggtaaaaaggcagtacgccgttccacagggtcatgctgcacgccggccgagtgctgcacgcaggcgggcaggcaagccagcaagctggggctgcctggacgcgggagagcgcgtccttgacgtctctttgcgtacaaggctgggaccgagtgggctggtgaagtctgagtcctgcacctctccgttaaggaagcgtggaggtgggctgctctcaacgctctggggttggtcccgacagagtttttctagccggcgagcgaaactatttctcactgtctgtagccgttactttc

SEQ ID NO: 116454 - DNA, 2889 bp, Homo sapiens
agttctaattatgtttaatattcggtttgctgcttggattgaataatctacatttgcttttaaaaaaaggaaattcacttaactgcatgtcagtcacccaagttttaagtgtacaaatgaaatggaaaacatttattacacaaatttaattacaattctaagaaataaacatgcaaattagatagagttcaatttgcagattgctaatcctcatccttgatcttgttccttcctcccttgattttcaagtctgtgcgtcttccttgattcctagggagccaggcagccagaggtctggtttttcacagtcggaggatcacctgggggcatcctgcagaacctctcctcggaaatccacggggaaatggcaaacaggattgacggggtttcacacgctcctcgctagacagagccgctcattaccataaaccgtctgcagcgacggcggcgcagcgccccagtcgcggcggcgggacctgccgggacccttgcccgccgcgcacccgcagtcaccgccgagcgggcggccgggccgggacccgcgagtgtgcaccggcggccgggctggcgccgagcccagagcggaccagcagcagctcaagcgctgcggccgccgcctccccgctgaccccgcgcaactttccgagtgcccagctgtggtcgcagaagcagggaataggcgtcctcgccgccaggtcccacgggcgcagggcgctcccgcaaccgcgggcttccagcgggtttggccggcaagggagggagggaaggccgggccgacatctgctgcgggctggagcgcgggggcccgggccagccccgccagagccctgccagccgctaaagacaacttgcctttgttcccggacacttggggtgttgtttactttctcctgcggccagcggccgaccgggcgctgctggctacccggggaggggctgagggctgcggcaccgacaccccgggggtgtgtctgtgcgggagccaggatgtggttggtggctgccgcccgccttcaagagatctgaggctgtcagagatgactctggttctgtccatgaatagattctgcgagcccattgtctcggaaggagctgctgaaattgctgggtaccaaacactatgggaggctgacagctacggaggcccaagccccccagggccagcacaagctcctttgcagggagaccggggagctggtcccccactgggcaggatcacattacaggggaatttcaaatcctattaacaacatccaagatcacatactttaaggagggaagtatgtgggaagaagagggatttttcaccccaccacttcaggcagctgtaggccataaaaccatctcaatttttgaggaacgagcccacatcctttatatgtccttagaaaagctaaagtttatcgatgatcctgaagtgtacctccgaagatctgtccttataaacaatttgactgaaaaggatccatggagaaattatcatgcagaataactggtgcttccctgcctgctctttcaatggcacctctgcccaagagtggtttatggctcaagactgcccttaccgaaaacgaccacggatggccaaagaggaatgtgaaaagtttcatgcctgctgcttttaccaagaatgtggtggccactacctaaatttacccctttctgtcaatgctaatgttggaagtgcctccactgctgcctcctctccctccgcctcttcttcctcctcatcttcctcttcctctccccctttgcctttaccgagttgttcccgccaggtggattttgatgtaggtagtgcatctatttacaagagtgatggccagatacctgccaatgaaatctttgtcactaatgtcagatcacttggtgttcaggaaaaggccaaattaaatgatgagaaagcaaatgatgacaccaacagagatggtggccccctcagccacgaacctgtgggaaatgaccttgcttttgagtgcaaagggccaattttatgattattttgagaccggatataatgaaagaaacaatggtaaatgaatcttggaaaaagtccttacggaaaaaggaaggcttcaccaccaagtaacaaactgtgctgcagccaaagggaagtaaaatatgagccatcttctcaccgaactttgaagcatgcacagcatgatcagttagctctcggtaaaattttatttttgaatggattttgtagttttgtacaacagataaaaattatgccatgaacatgccatgtcgttttaatgcctggagagcagattgcgtaaaacatctgtatagcaggcatcagcgagcttctttataaatgtggtgatttttaccaaggaaacgattgacttaatgcttaaaagtatatcatagttttcttacggaaaagatcagtagatgagattgggggacaatgtgcccttgcaatatttccattgccccccaaggagcctgtcactagctaagaaatttctacatgtttgccagttaattagggagttatttggtaagcaaatcaatataaccagcaaagatacctgcttcttctatatgatacaatattttttttaaataaaagactaaagacagggagctagatgaaatggcttaatggtgctgttaagtatttgtacctaacagtcttgtgtgacagatgaaaataggatgtaacataatgaaacacacctgtctaggggcggcaatcaacagtcttacacagagagggtattccctgcaagtttctggcttgcctgtgatgggtgatgaggcttttagagaggtgttatacagggcgatttttggtgccttacttttatcttaatttttgccaatgtgaaaattaaggataaatccagagttacagcagggatttaacaaacaggacaa

SEQ ID NO: 116455 - DNA, 359 bp, Homo sapiens
atcagtggcagcattagattctcaaagaagcgcgaatcctgttgtgaactgtgcatgtgagggatctaggttgtgcgctccttataagaatctaatgcctgatgatctgtcactgtctcccatcgcacccatacgggaccatctatttccaggaaaacaagctcagggctcccactgtttctacattatggtcgcacatcccggtcatgctgacgcaagagggtacagcctctctccctgctgctttcatggctggtgttgagcatctgtggcttttccaggtgaacggtgcaaactgtcagtggatctacccttctggggtctggaggacggtggccctcttctcacagctccactag

SEQ ID NO: 116456 - DNA, 414 bp, Homo sapiens
atgagccctattgtgaactgggcatgtgaaggatccaggttgcatgctctttatgagaatctaatgcctgatgatctgtcactgtctcccatcaccccagatgggacagtccagttgcaagaaaacaagctcagagctctcactgattctacattatgtcaattccacaagggcaccaaagaaaataaaagcaaaaactcatccaaacgacagcagtttcaaagattaaaggaacatcagcccacaaaggatagttccccaggaatgattcttaacaagggtgacatggctggaaggacagagatagaattcagaatccagatacgaacaaagatcatcgagattcaggagaagggcaaaacccaatccaagaaatctatggaatccagtaaaatgacacagacccgaaagtga

SEQ ID NO: 116457 - DNA, 1125 bp, Homo sapiens
tttttttttttttttttttgctgacctaaaagatttttaaaatgaagtagaataatgtacatcatataaagaggtatttagtctttaagtggaaagagttgttagtcacatgtaagaaaacgaagtattatgggccttcctaagacaaatggaataagttccatcacttttggcttttttataaaccagacttctaacaaatacccatattaattttccagtaatcaaacatatcctaaaagaggaaaaagagaatgtctacttttaaatcacatccaatgtgaatttgcgtgaatgcaaggcataaaatacagttattatgactctacaggcacctgaaagttttaactacctttcatgcttactttatattccataaagaataatggaaatacaggcaatgcttcaaatatgtattttttacaaatctgttttatgtagttcttattcttgtaagataatattccactgtggcagccttgtttttttgttttgttcataatattaagtagcccattaacctttccctttaaacaggccttttgatgttagttcttataccaaaaaaaaaaaaaaaaaaaaaacccaaaaccaaaaaacaaaccaacaatacatgaagatgtaagggaagagattaatgagatacaattcattaagtataaaaatatgttgtttcaaattcagaataactttaatggctcttcgttatttcataggtatcgggaaatgggacagatacgtgtcctgatcctgtcacaagaggtagaattccagcgtttggtatgacgttccaagacagggtcaaagtgacattcctgtttcccttgagaccatttccatcgtcaaagaaaaaatattctggttttcatatctttcagcagcagcttcggattatcacctctcaaaacaatcttgtcccataggacaacttggttcagagcattattttttgttgaatattctgctgataaataaagaaacaactgcttaacattccaatcaaatatattctcctagatcagcagttatatcaaatgtgataaatcccagatcacttctttctctagggtccagtggaaatccttcctacattttttaggcatgatccgccgagacgtgcagccg

SEQ ID NO: 116458 - DNA, 777 bp, Homo sapiens
atggactccttgaacactaactgcgtgcagatccccaccagagcttacagaaaaacctggagaaaattaattggccaagcaccagagcctggagaatgtctgggcccaagtcaagaaggacacataggagactggccactggggggagctgcagcccctgtggattttgcctccaggaaagttggaaagggacaggaggacagcaaggtaatagggacttcccagctgtcacacagcctgggctctgctggtacagcaggcattcccatgctaatgcaaacatcctcaatgcagaaatctgaaactacgggactttatcggaatccaagcaggcacaggatgtacaattgtgccttctccccttcctccactctgcccagccactatctggaccttcactcaggacagcatcagtcttcaggccatgctgaccctataactcgaagaggcacatatctagctctctgggggtggtctgttgaagcttctgcagggcttgaagatgggacaggcacccctcactcctcctccctggcatcaagacgaagacaggcagccattgttggggagggagtcgacatcaagctggtatctcatctagctcgtgacttttctatactgagcaccttccaggtgtccagtgctgagcgaggtttaaacaaacaagcactcacacctgcagccaaggaagggcaagaagcagcagccaggtgtgggaacatgaacgccagacactcgggatccagacagtctcccaggagagcccatttccagtga

SEQ ID NO: 116459 - DNA, 249 bp, Homo sapiens
atgtttgaagtcaatgactttcgaaaaatgagtgaaatccacgcaggaaaatccagcgctcttgttctaagggaagcaagctgctccatggaaagacccacagggcaagagctgatgtatctggccaaaggacagcaaagacttgaggcctgtcagcagctaagtgaaaaagtcacccgatcaaaccttgagatgactacagccccaggtggcaccttgattgcagctttggaagagaccctgagctag

SEQ ID NO: 116460 - DNA, 570 bp, Homo sapiens
atggccacgaccagcaaagtgggcctgatttccttaggaggggaagaagtgacggctgcagagcccttgaccatctcggtgtctgggctcgagtgtcccgccacccccagcgtctgcagatccccgggatctgtctgcctgttgacaagggagaagcctggtctcggttacctcctcctcagcgtcctgagcctggctggatcgccagcacactcagaccagcggccccaggctcttgtgacagcagccgtcagacccgtgggagttcagctctatcaagtgtacagcgtggtgtgtggggaaagatctgcatcccatgatgtttttgactatggagtgaccctggctctggtggcccagcttgcattgagtacttttagtcctattgccataaaagacctacatcaatacctgcctgaccccaagacccagattccagtcaatccaggctaccctcatccttccgagtttttgatccacgagtccagcaatatcactttggctttctctctttgtattttatctgtcactgctatgcgtttggaacagaggagatacacccgaacatga

SEQ ID NO: 116461 - DNA, 525 bp, Homo sapiens
cgggccgccccccccttttttttttttttttttttttttttttttttttttttttctcctttaatatttgttttgatatttatttgaaggatgttttcttctgtgaaggcacgagttatggaggggacaagtggtttgagaaaacttctgaaggttttcaacttgagagtagtctgtgacccctagcttgattatcaggtcccaaaaatcctatcaccgcttaatgggaaccgctgtcacatccatattggcgaactctcccgcttcgtgttcgcgagccagacgctgtttccgcacggggccgccattttgagatcccaggcgtctcagtacaagcggaggactcgccaggcgctgagccggaatgtggactgtaccacagtgactgcgaagggaggggaagacgacggcaaggaggcctactacacgagcatatatagcaaatccagctttcagcagtatatcaagttttcttatagtgtctttggctttggtaacagagtaatgctatacctcatagaatga

SEQ ID NO: 116462 - DNA, 499 bp, Homo sapiens
tctcatattctaagaaaacatgaaggtccgctacggcagctctgaggctcctcctggggagaacctgcagaacaactcctgtcctgccattccatttatgggtaccaatttgaaaccgccaaaaaacccccaattattcttatgttggagtcttcctatggttacaatgacaggcacctccaagataatgacagagggtgacgctctcggctcggtcacggaaggaccgatggtggtgtcattcacagaaagtcagccaggactgcggagagatcatcgccagtggatgctttctctgacctttccttcctgcatgctgttgggaagactggccccaaatccaacgggaaggatatcagagaccaccgagtttggggcacagagaaactcacaaaaatgtgggagaagcagaaatagctacaccatacccgttttggaagaggctacatctacattcaagggaagtttatgccccattccccttgaactgtccatgtaa

SEQ ID NO: 116463 - DNA, 291 bp, Homo sapiens
atggaaaaagtcattttagtcgatgtaaattcagctcgactcagtgacatgaagctgctcttgggtccagatctctggcaacttgcttcgaatgactttgagaacaaaaaaatcaaggttttggacagtggtttggggttgactgagactcatatcctcacgttagaagatcccgttaatgtcacagactctcccacttggaaagagcgtgtgagtgtagacattcctgcatggagccaatgcttccacacttcaagatctgcagccagagagacactgtccttattgtag

SEQ ID NO: 116464 - DNA, 405 bp, Homo sapiens
ttaaactaagaagttgggagcccagcaggccctaggaaatatgaaaattgctgctttgttgggctgcatgatgatggcagctcggtgtggaactctctctgccatgagagatctgagtttttcagatgaaaatcgccggctggctgtaggcacggctgctgctgctgtgagcacacacaaaggcgtgtggctctggagcctgtttgtctgtccctcaaggtctcttctttgtttttgtaactgttccaccgaactgagagccacagttgttctcatacgatgctctgtacttaaagggccttgttcaaaagtcccagttatacgggcagtaagcttgcatggcagcaacaatgaatgcctgcaggtcgactctagaggatcccaatgtgtcagtggagatttcat

SEQ ID NO: 116465 - DNA, 400 bp, Homo sapiens
ggactgagagcaaatcgggacattcatcatgactttggctgccaagctggaagactttgagctgacactggagcacctgctcatggatgtgtttatgacggagggccgccgatgtcaagtacatcttcttgatgacaggaagctggaactcctagtacagcccaagctgttggccaaggagcttcttgaccttgtggcttctcacttcaatctgaaggaaaaggagtactttggaatagcattcacagatgaaacgggacacttaaactggcttcagctagatcgaagagtattggaacatgacttccctaaaaagtcaggacccgtggttttatacttttgtgtcaggttctatatagaaagcatttcatacctgaaggataatgctaccattgagctt

SEQ ID NO: 116466 - DNA, 564 bp, Homo sapiens
atgactttggctgccaagctggaagactttgagctgacactggagcacctgctcatggatgtgtttgtggtaaggcagctgaaaggtcttctcgatccaagaacaacactgcgctgcccccgggaaggcggctgtgagctgttacctttccaggacccgccagtctgcgtctcgcagctggagaaggctatggaaggcagggccattgtacttctcatgttggcttctcaagagcgggtctatgagcaccccattccctttcttatttggaaagaaaacaacactcaccacggcattcacaatgctggggacctgatgaatgggaatggagaggctgcactaatggcccagtcccacagtgtcactgagtccagagtcgggactccaacaagccctccgcattccagcatgactgtgggcagggggtcaagctcccagtggggatccagtgacctgcaggtagaagcaggatggaagcaaagcctgcccgggaaaccttccattgcaggaacatctcggcctgaagctgtcatcagggagcaggatctgcttcctggactctga

SEQ ID NO: 116467 - DNA, 397 bp, Homo sapiens
gcctgagcacctacctaccccagcctctattcttcctgcctccaaggatgcttggcgaacatgtctgggaacctttcaatgcagagcaaccagacctgtagcagttcggcctggggcaaccagacctggaacatccagtcctagaacagccattcctgaacactcagacctggtgcacccaatcctggaacaatcaggcctggaacaatcccttctatagctgtggagaggaatctctgcaagtcctgcatgcggttccagcaaattcttctctcagtgacttggaggctgccttggaaactgctgaagaaagctacaatggaatacagcagaccactaggtattttagtactccacaaaccatagatttattcctaaactattccaagaacatgca

SEQ ID NO: 116468 - DNA, 562 bp, Homo sapiens
tcactgggccgaatgagcgtgcgctcctgatccgctttgcgcatcccagtgattcttgggttccgcgtgtagtttcggaaggagacatcgaagcagggcgaggcgcagagggcgttgcggactcatgccccagtcggcagtgcgggtaagggtgggagaagcaatgaggcgaatgcgagcagccgaagaaggcgacagtgtggctccaggcaatttctcagtccctgtgtacatcagaacctgccaccggccctcctgcaccaccgagggcaccaccagcccctggacagccatcgacctccagggctcctgctgtgaggggtacctctgcaacaggaaatccatgacccagcccttcaccagtgcttcagccaccacccctccccgagcactacaggtcctggccctgctcctcccagtcctcctgctggtggggctctcagcatagaccgcccctccaggatgctggggacagggctcacacacctcattcttgcttgcttcagcccctatcacataggttcactgggaaaatgattgttaaagtaagaatctgcacccc

SEQ ID NO: 116469 - DNA, 340 bp, Homo sapiens
tgctgcgcgtccgacagcccaactccggcctccaccgcgagtaaggcaacagggtatggcaccgaaaatggcaaggctgtggccccagcccctgggccccacgggtggacggcagcccctggcagtttggtggctttggaatgagtagggtgcatgtggcgctaagccccccccaccgccccggctttcctgcaggcttagcccgcgctttaggaccccatgagcaggcagatggcctggcacggcttgcttctggctctgcccttcctcagtctcccctcagaggcagggtttgtgggcaaggctgtgccaaaagtacggctcctgccactgcccccag

SEQ ID NO: 116470 - DNA, 486 bp, Homo sapiens
cttacatcgatgacatgcggaaatgatagtattttggaaatactgggttaaatatactattcaaagtcatttcactttcttctcttaataactggctactaggaattttaaattatatatgtggcttgagttctggtttcactggactgcttcctctaagactcagccaccgcctgtaaaatggataacgatgtgccttcctcatggggctatctgtgccatcttggcaaggtctagagaaggcctctgctcttgcacttcttcagggcgccgccttttaacaccgaccttcttgtcgttaaggacacacggctgggagcggctgcgggaaaggccgctggagcgtctcgccagctctggtgttgaggcaggtgtgctgttggctgagggaggacagtattccacaaaggaaaactgctcatgtgagcaagagagggaccgctgcaggtccagccggcctcctcccacggagtgcaggtcaggggc

SEQ ID NO: 116471 - DNA, 2031 bp, Homo sapiens
atggcggaaggggaagcaaacacatccttcttcacatggcggcaggtgagagaagtgctgaacaaagccccttataaaaccatcagctctcagtgtgccctccatggaagacaatatctggaacagagttgtgagctgctggggtggagcccagaggccgtgctcagcagtcctgtcttcagcaccccgatgtggccccaggcagctgaatgcgaacgagtgcccaccagcccctctgagagccttggacataccttctgcatcgctagtcctgctcagaagccacccccaaaactgccatctgccatctggggcctggtgcagaaacgtcgccaccgtgtggcctgtggggtgccctcggagaggggcccctgggttggccaccattcagaggacacgcgtggctctgggcctccaagggttcacagtccagttccacactcacagttgtcagcactgctgggaaagaaagaaaagggcctggagtctgagggcactgatgggagagggagtggggcaggactgagcggggcagggacgcttccggaaacagggacgttaaggctgagcactgctcccgtccatcgtccttgctgctgtccccccgagaatgggcgagttgctctctcttctgagcatgcagaatgtgccctccaaccaccccatgccatcaaagctgggggctgctctgccacttcatctgcagggcacacgcaggccagcaccgcctcctggggaacactgaccaagggagacggcttctctgaaggctgcttatcagatggtctgcaccggtacatcacacacactaggcctgtgcccatggggttccctgctgtccacgtgctggcccagcacggccaccctcaggacagcagcttgctggggcccagtgagtgggtggtgcccagggcccagagcctgccccggctgacctgtcctctggctagtggcagtgacactgatggggacttgctatcctgggtggtgacaccaatattcagcccagtaggcaaagaaactgaagctgaaggccagcctcgtgatgaaacatcacccacggatgccgtaggatggagtctggctgcacagaacaacacggatgaaatgaacgcaacttgtacccggttccccgaaacgccgactgaggccacctcatcaatcatagctgcaacgtcatcacctcataaactgtcaaagcggcccaagaagcaggctcaggaaggcgacatggcttccctcggtggcagaggaggcaggcaggtggcagcgctggggctggtgcccaccgtgtctcctctggcaagggctcagctgagccttgttggtgccactgtgggacagaacacctgtgaatgtggcctgcctggagaggggcagtggcagtggggctgtccgtcaaagctggtggccagtggaggtgggcaatgccagggtgaggctgtgtttatcacggccttcagccccagctccaccgggtctaggccagtcaagagggtggctgagaagcaggaggagcctcagagaccctcccctcgaaagcactggggcttccacctcacaagcggcaggttcgctttgggagctgctggtccatcgcccaggcctggccaggggcaggcgaggatcctggttgccgatccatcgtccaggcctggccaggagccgaactgtcagaccttcagcagcctcagctgcctgagcgcagggacagaggactgcggtccccagagccccttcgcccgccacgtcagcaacaccagggcctggaccgccctgctctcagcctccggcccagggggcaggacccccgctgggaccccggtccctgagcctcttcccccttccttcgacgaccacctcgcctgccaggaggacctgtcctgtgaggagtcagacagctgcgccctggacgaggattgtggcaggagagcggagccggctgcagcctggcgggaccgcggggcccctgggaacagcctctgctccctggacggcgagttggacattgagcagatagagaagaactga

SEQ ID NO: 116472 - DNA, 1527 bp, Homo sapiens
atgccccagcccttcatccagacctctgctgtgattgtgtcaggacctgtccctgcagtggactggaagctccagcttcttaatttgggtccctctggtttagctcagtgcagccagaattcacccagtgcctatgtgagtcgggcactgggctggcccaggggcctttggaatgaaggggacagtcggctggccatcacgggccttgcacagaagagagcaatgacctgccttcaggtttcaaaaggtccctctggccgctgtttgagagaaggtcacagtgggatgagggcagagcagggggactgctcaggaggcttttgcagtaaccgacggagtggtggcggtcactggcaccgagaagtgtacatgctgcaaagaaaatactctgttcaggagaccagaccacatgtgtcatctgcgtgcacatgtgtgaaacccgaaagacaagcagatgagacccgcctgccaaaatatttgctgccgcgcagaacaggcatttgcaagggagtagaacgaagaccaagtccgtgcaggggctgctggctctgtgctcagcacacgccccgtgaccacctcaggggcggctctgcgagtccccacttgacagaaaatgacagatggcgagacctggacaggaaatgccctcttcagattgaccaaccgagcaccagcatctgggaatgcctgcctgaaaaggacagctcactatggcaccgggaggcagtgaccgcctgcgctgtgaccagtctgatcaaagacctcagcatcagcgaccacaacgggaacccctcagcaccccctagcaagcgccagtgccgctcactgtccttctccgatgagatgtccagttgccggacatcatggaggcccttgggctccaaagtctggactcccgtggaaaagagacgctgctacagcgggggcagcgtccagcgctattccaacggcttcagcaccatgcagaggagttccagcttcagcctcccttcccgggccaacgtgctctcctcaccctgcgaccaggcaggactccaccaccgatttggagggcagccctgccaaggggtgccaggctcagccccgtgtggacaggcaggtgacacctggagccctgacctgcaccccgtgggaggaggccggctggacctgcagcggtccctctcttgctcacatgagcagttttcctttgtggaatactgtcctccctcagccaacagcacacctgcctcaacaccagagctggcgagacgctccagcggcctttcccgcagccgctcccagccgtgtgtccttaacgacaagaaggtcggtgttaaaaggcggcgccctgaagaagtgcaagagcagaggccttctctagaccttgccaagatggcacagaagaagtatctggccacacgcccctgtcacttggactttatcctctttgtcttggagctctgccttgtgctaacactgatcttggatattgatttgaatgagatgaacttggagttaatactctgtcatcaggagcgtctctga

SEQ ID NO: 116473 - DNA, 2892 bp, Homo sapiens
atgccagtaccagtggggatcgcttggctggccgtcccaagcacggccactctgctgctcctgaatgagcacacaccaaacaccctcacccgcacccgcttcattaacaccctcacccgctccaccagcaccctcacccgcaccctcacccgctccatcagcaccctcaccctcaccctcgcccgctccatcagcaccctcaccctcaccctcacccgctccatcagcaccctcaccctcaccctcacccgctccgtcaacaccctcaccctcaccctcaccctcacccgctccatcagcaccctcacccgcaccctcacccgctccatcagcaccctcacccgcaccctcacccgcttcatcagcaccctcaccctcaccctcacccgctccatcagcaccctcacctgcacccgcacccgcacccgctccaccagcaccctcacccgcaccctcacccgctccaccagcaccctcaccctcaccctcacccgctccaccagcaccctcacccgcaccctcacccgctccaccagcaccctcacccgcaccctcacccgctccatcagcaccctcacccgcacccacacccgcacccgctccattagcaaccccagcaagaacaacccgttatgtacacagcagaaatgcatcctcacgttcaccaaaggcacgttcaccaaaggcacactgctccacacagctttagttgcaatagcaaaagtcaaacactggacaaatgcccgccagggggaggatgggaaaacagaccacggcagaattgcacactggaatactccacaacggctcaatctgggtggtggaagcctaatggcagccgtcatgtttctgtgtgtgagccccaattcagctctacggcagccagccgtcggcacaaggcctgagagactcagctcaggtgtcaccacctccaggaagacctccacactccacactgagtcagaaaatgacagatggcgagacctggacaggaaatgccctcttcagattgaccaaccgagcaccagcatctgggaatgcctgcctgaaaaggacagctcactatggcaccgggaggcagtgaccgcctgcgctgtgaccagtctgatcaaagacctcagcatcagcgaccacaacgggaacccctcagcaccccctagcaagcgccagtgccgctcactgtccttctccgatgagatgtccagttgccggacatcatggaggcccttgggctccaaagtctggactcccgtggaaaagagacgctgctacagcgggggcagcgtccagcgctattccaacggcttcagcaccatgcagaggagttccagcttcagcctcccttcccgggccaacgtgctctcctcaccctgcgaccaggcaggactccaccaccgatttggagggcagccctgccaaggggtgccaggctcagccccgtgtggacaggcaggtgacacctggagccctgacctgcaccccgtgggaggaggccggctggacctgcagcggtccctctcttgctcacatgagcagttttcctttgtggaatactgtcctccctcagccaacagcacacctgcctcaacaccagagctggcgagacgctccagcggcctttcccgcagccgctcccagccgtgtgtccttaacgacaagaaggtcggtgttaaaaggcggcgccctgaagaagtgcaagagcagaggccttctctagaccttgccaagatggcacaggtgtgtgagagcctcgggttaaagctgcagagggccttttcagttagacctttggagcagctggccattctgaaaagctgcagctcccctagaggtcccgactggggcctagagcagatcttgaggagcatccccagtccaccttctttgctgaaatggaatttcctctacaaagcttctctgggaaagagccatttatatgactggttcttgtgctctcgacacaggaaacatgggtcaggtggcagctccgtggtgcggcccaccccctggtcagccggctggccatcggaatcccttgttccttgtgccttgtgtgaggaacttggtgtcctgtgttgctgtccccgaatccaagacacagctgccattttacagtccatcccagccacccagatgaagacgaggagcacctccaatacccaagcctccctccacccagtcaacactcttctccagagggagctagcccgtgccttcacccccgtcttctgcctgacggtaaacttgaggcctggctccccgggtcctgttgaccaccaggctgcagatcccaaggaatgcaggcatctgggtggccccacgtggagcaccagccatggggaggccgtgggctaccaggccctgcgtgcactcgcagcatgcaccactccttctccagcagtgctgacaactgtgagtgtggaactggactgtgaaccctggagggcagatggtggaggtgggagggggcagggccagcgccagggtgagctgcagggtccccaggtgtcacccatggaggctgcaggagcacctggcgtggtccaggggacacgaagccctggtgctggctcctcccaacgcccctgctcttggaccctcattgagaaccaggcaagaaattcccaagggcttcaggccccagcagttcacagcctccagtgctctgcacagttccacagccccctttctccactgaagggtaccaaaggcgtgggcatagccttctcttactgccccaaacttgtctatcacctgactggcattgggcccttccagaggaaaagggtctatggcagcaccaagtgggaaccaaggctgacccccaacccccccacactcttatacccgtaccccaaagccccactcagcaaagctacatgcagtcactga

SEQ ID NO: 116474 - DNA, 5700 bp, Homo sapiens
  misc_feature (1)...(5700): n = a,t,c or g
gtcccccggcgtctccacagctctgtgatgtctgctagccccattttatcgattcagaccccgaggcttggaggggacagaagggtccagtctaggtctctctgcgccccagagctaatgctcctgtgagcaggggggacctgccagttcaccacacccaacagaaaccacacagctggcacccaggcacttgggtattgaacccnggaagctttatttacacagtacaagtaacaagcaaattcctcgagagactagagcggctggagtgcaagcctacagcctgtgcgcgggaggccaggctgcaggggcgggcagaccctgggccccgggtctacgctttctggttcgccacacttcctggaaggcacggcaacacccacaacatccagctcagggaagcccctgcagccccagaaacagcctatgtgctatctgtcgccccagccccccaggacaggcttccccacacactgaaaacacaaatcatttgccaaaaagactatggctagaaaggtcagacttatccctattctaggcttacaaagatcttccacttcggtctgccattaaaaaaaaaaaaaaaatctttctcttcttttctctttaaagaggctgacgagggggggtttgaccaacagcsgtgggacatggccaaggktgtggccatcattgccaagtgtggggcagaagagggtgcccgagcccccgggtgcgcggccagcctgctgcatccctgcgggcttgacgttgggaagtgaaaccgtcatttccaagggaaccaccccccatagccacagacggcacgtcagtggaaacgggggtgcagcaggcatgacaccaaggcagagcccgcagcagggggcccggggttccacagctagggaagcttgctcagacaggcagcacaacccagggcacggccactcacgcccccgcaccaggagacccatttggaagttagttagggtttgttttgttttctgtttaatgtggacttcccctttatttaaattttctttcagtgtacaaattcacaaaactggctacaaaaatttggttgaaaagtaaggctttctgagaatgaaaatctgtacgtctggtcagaacaagctccccacgggcccagtgtgcacgtctgcccgtgcaaatccggcctccaccgcgagtaaggcaagagggtatggcaacgaaaatgggcaaggctgtggccccagcccctgggccccacgggtggacggcagcccctggcagtttggtggctttggaatgagtggggtgcatgtggccactagcccccccccccccgccccggctttcctgcaggcttagcccgcgctttaggaccccatgagcaggcagatggcctggcacggcttgcttctggctctgcccttcctcagtctcccctcagaggcagggtttgtggcaaaggctgtgacaaaagtaaggctcctgccactgcccccagctggggccatcatgctggtgggggtgagctgtctgcctgctgcccatggggacaccaatgtggggggcacctcctaggcgaacctccctcccagaggactgagatcagaagtcctggggccagcagggtggagtgcaggaacaggctgctccgggcagtgtggcagcttggatgatggggtggcaccttatagatagggtctactccctccagtcaaaacacaaacatgaaaccagctaaaggccatttctttctctaagcagaagggatagccaccattttctcccctgactgctgcgtggtgggcacaggacaggcaggcggggtctgaggaggctgggtcatttctccctaagcgccctggggctgggcttgctggtcgatgggaccagcttgcggggaggtggggaggtggctgtgactcagccagctccacagcttgtcccttcctgccaccaggcctgaatggggaggtggcaggcaaggtttgagggcaggtcacccacaccccagtcccacgacatatacctgtcaccatgtgcctcccaccccagccctaagcaaaggtagctgggggctgctgcatgcctcagcctcagctggcaccgtccacctccctcactgcctctgccttccacaggaaggcctgctatagaggctgtgtgccctcggccacaccgggcatgtggtgccaggaccccccacgcccagtggtactccgggggcaagacatggccatgtgctctccacattcacccaacaactgccctggccgcctccacatttgctctaagaagacatggtctccatgacccccaggccagggacaggccaagatgtctctgtctgctcagagccaccagctcttgggttcggctgtccgggatcacaagtagacatgcctccggcaggaggtacagcaaccagaggtgagctggttccccggctctgggacctgcccagtgcccggcataccccatgtgtcagccacctgagctagcaacaccatctctcagggctgtggggctgggggctttctgccagctccttaaagctgatttttaagaagtgccacccacatattgggaacttgaaccaccatccttttgatgtagtaaaaaaataagatttaaacaacgtttcccaaaaagcatctttcttgaggagaaagaaggtgagaagcatctggactcaacctgcagaagcgaggcgttcactcgtccatgaagacgagcaaaagcaaagtgactacaaaagtgctttgaacgcgcgtgtcagccaacacaagggagcgcaccagttatttttagccttatgggaaaatgagccacttgctcctaagccagcccaattgctattgtttgcagaagacgccacattcgctaaaagccagattcccatagagcagagcccatgtggtggtgtctgcaaggcagccggagaggagctacaaaccttgagaggagagcaaaccctcagggggctaggctcctcggatgccccagggtgaggagccagggtggggtaggggcagggagcatgaatccagctttgtgccggtggctgggcctacaacagagatgcagccctcaggactgggctccccctaagctgacaagggcgtgggcttgtcttgaggtgggtgatgtgccctggttacagccagcagtcctcaaggacaaacgggaggtgcctggaatcctgcaggggcccctgcagagtggccagcggacgcccttcacccctgagtgcgcatagggccctcatctgcccacctgctcgcagctcccgtctcccgaggccgttttcaagaggctgccctggtatcgtgccatccctacactcaccggaaccaaccatgcttatcactcagtgacctgtcagccacagagaagggctgccatctgctaaccctgccccaacggtggcagagccatggggtcagcctctccatgctgtaggagaggcaagcaagtccatcttttcagccaacagatccaccaaatttctacccaacacgggaggccctaacaagcaccctccaaatcgttccttgggcccgagactccggacatggcttaccctctggagggccagtccagcaccccagggattctgtctctcacattggaattaaggccaaatggttctggtgttacagaaggaagcatctcccgaaccttcccaaagcctgaagcagggagacctgggagagaaggcacggagtaaaactgagtgaaagaagctgcggggccgactccccagaagtgaacctgagtgaggccaagaagggccctgacatagcagatggcccctggcccccaccccaggccctccctgacagcccccaccaccagggggatacagagcggtgcccagctctgccggggacaacagagactgcccaacatcccacagggaaagaggcagaaaagacgcaaacttcaaagctgtcctctgggctgcagtagttctgtggacctggtggctgccacgctcggggagccggtgagaggctgacacacccgctgtatgacgcggccaggccaggctctcccccaggcagcaggtgggctccctctctgggacccgacaccactcaggaagctttcatcaggcccacgagttgggctccccttcaagggcccacctagtgcccagagtgggggctgtcgatgccagcacaccccagccctgcctgggcccacaccccctcagttcttctctatctgctcaatgtccaactcgccgtccagggagcagaggctgttcccaggggccccgcggtcccgccaggctgcagccggctccgctctcctgccacaatcctcgtccagggcgcagctgtctgactcctcacaggacaggtcctcctggcagacgaggtggtcgtcgaaggaagggggaagaggctcagggaccggggtcccagcgggggtcctgccccctgggccggaggctgagagcagggcggtccaggccctggtgttgctgacgtggcgggcgaaggggctctggggaccgcagtcctctgtccctgcgctcaggcagctgaggctgctgaaggtctgacagttctgtgccatcttggcaaggtctagagaaggcctctgctcttgcacttcttcagggcgccgccttttaacaccgaccttcttgtcgttaaggacacacggctgggagcggctgcgggaaaggccgctggagcgtctcgccagctctggtgttgaggcaggtgtgctgttggctgagggaggacagtattccacaaaggaaaactgctcatgtgagcaagagagggaccgctgcaggtccagccggcctcctcccacggggtgcaggtcagggctccaggtgtcacctgcctgtccacacggggctgagcctggcaccccttggcagggctgccctccaaatcggtggtggagtcctgcctggtcgcagggtgaggagagcacgttggcccgggaagggaggctgaagctggaactcctctgcatggtgctgaagccgttggaatagcgctggacgctgcccccgctgtagcagcgtctcttttccacgggagtccagactttggagcccaagggcctccatgatgtccggcaactggacatctcatcggagaaggacagtgagcggcactggcgcttgctagggggtgctgaggggttcccgttgtggtcgctgatgctgaggtctttgatcagactggtcacagcgcaggcggtcactgcctcccggtgccatagtgagctgtccttttcaggcaggcattcccagatgctggtgctcggttggtcaatctgaagagggcatttcctgtccaggtctcgccatctgtcattttccataattccacaagagaaaagtgtaggtccttgactcatcttctttggcgtgtgcagttcacggctgaaggtcccacatgcaatggagtcagatttcccccgcgccgctgaggcttttacttatgaccattaccatgataagggcctcaagccgctgggctccatcccagggtgggtatcaaccatcttcacttgggcagacttggggtgagtacctcctggggaattgatgtcagcagaaacagctccccattggccactcacccttggggtggggcccttctgggaaatggccaaatgtggtcaactcctgtgcgcggcggggcgctccgggcgcggaccccgcgctgtcaccgccagcgctcgcacgaaatagtt

SEQ ID NO: 116475 - DNA, 746 bp, Homo sapiens
gaaatacacagaaatcccttaaaattccaggagttcccactctcttctcgaatatttaaggcctcctccgcacaacattggagtacacgtgtctagaaacaagacaaatctccaaggtctctggggtgcttgctggggtggagataagggaaagacctctccctgagtcttaaagcatcagtctgcacttctactcaacaagtcggcagccaaaagtgacgacgagagagcgactcctcgtagcggcgccaggcgcgagcccaagacaaccagaggcggtcacaaggtatacgcccttctcctctttccacgcttctcgagaggctcccgcggccagacccggaaaacaaggagtaacagtcgcgtttcaaatctcgcagacctgctggccgatttcgagtcttctgaaagaggaaggcgagcaaagccaaaattctcccagagcgcgaacccaaacacagatcgccgctggggtccaagcgcccttcaactccgcccgctagtgcccaagattaccgggaaggaattcaacgaatcagtggtgaggtgccgccgccatgcctactacgggcggaaatttgagagaaagcttcgcaccggtaggaaaactgaggagcaaccgagcacgattggaaaggttgacgatagtggttaagtggctcggccttgccctcagttaaaatggcaattttagttgcttcactgcggacgcgtgggcggacgcgtgggtcgcccggagagtccgg

SEQ ID NO: 116476 - DNA, 346 bp, Homo sapiens
atgagaacaagtccacaaaagcatattaatatttatgagaccacagagaggacagctgagacaccccagctggcagctggcccacctccagaagtatggctatctggctttccacaactgaccaaagctcctggaagcccagagcgccggtggatcgcgagccaaggcggcgggtggagcctgagccgtgaggccgtggccaatcgcgccgctccgggggaggagccccaaagggggaaaagaaagtgcggcggaaaaccgctgctggaagcgccgaggacagaaggaagcggtgtgtcccagcacgcccactcggtatcacgtcgctctcagcgcagagctgtga

SEQ ID NO: 116477 - DNA, 524 bp, Homo sapiens
ctgtcaaaggcgcttttttcgaagacgcccgggagctcttgcttttgcttgagggtctttggtgttgactgagagcgaattaaaaggttctcagctttcgctaaggaacgcattctggagttcggagcacaggttacaacttccagaaacccttgggacgcgccgtcccaaacttgggtttctggcgtctcctgcgtttccggcccgggactacaattcccacaggtcactgggccgaatgagcgtgcgctcctgatccgctttgcgcatcccagtgattcttgggttccgcgtgtagtttcggaaggagacatcgaagcagggcgaggcgcagagggcgttgcggactcatgccccagtcggcagtgcgggtaagggtgggagaagcaatgaggcgaatgcgagcagccgaagaaggcgacagtgtggctgggtatgaagacttgagggagggggtggggcaaaacgaggtcaggcgtctccctggccgcgtgtgatggaccgtccgtggtggtgacagacat

SEQ ID NO: 116478 - DNA, 525 bp, Homo sapiens
tttcgtccggcgttccccgcgcaaagcagccgctgctcctaatgagctcatgggttcaccgcgctgagctagccagagcggacccggcttcgccaagggcctgctggctgtcctgacacctggcctacctcgggggtgcctggggacgctcttcctttgcctgcgggatagaagcacaatgaaaatggggtggacgtggctgggagacagccctgctctccggcaggctctggggagtgtgtggtacgtggcatccgcactgggggactggagggtactcaccgactagggcttcacagccgcatcaccgccggcgttaatcaagtcaccaacggaccaaaatctgaagtgaattccatcttcctagtagcaagacaccaggtgggatacttagaactaccaccacgatattgcaaaaccagggggcctgagttgctgctggagggcatggtgttgcagaaatcactgctgtcctgcgagctgcaggcccaccgcaacctcatcaatccttacctgaagtcttag

SEQ ID NO: 116479 - DNA, 3270 bp, Homo sapiens
atggagggtgtgggctgggtgtctgcaggctgtggtgcaccgagagccttcccgaaactgggctgcctggccacagctgctgcatccgagaactacaaatcttatattcagcatgtagccaattgtgcagttttgacattcatagctctccagtgctttggactgaatgtttattgcaagaacttgcagctgactttctatcaggtcattctgatgttgtccagggatgccgtcagagacaatcctagaggaaaacagaaactcccaaggagctgggtagccaagagaggagcccagaccttccatcttccatctggtgacctgatggttctggcatttgacctctctgaagatctgggttggaatttgcccctgacaaataataaaatgatgagtgatgcaagtgacatgttggctgcagcgttggagcagatggatggtatcatagcaggttctaaggctctggaatattccaatgggatttttgattgccaatctcccacctctccattcatgggaagtttgcgagctctgcaccttgtggaagacctgcgtggattgttagagatgatggaaacagatgagaaagaaggcttgagatgccagatcccagattcaacagcagaaacgcttgttgaatggcttcagagtcaaatgaaactaccagtggcatcacatcttactcagagtaaaaaccacagtgcttactgtgggctgcaaggcctcgtaggatttgccccccatgactttctgacttcatctcttgtcacacatctccttattcgctccacgccaagcacagtggctttttcactgattcttaaacatgccagatactgtcgctggcatatagcaaacagtgaattcaaggaagacctcacagaccaagccctgatagaggtggaccttaaggaatggggaaagaagaagaaagggtgggaaaagacggtaagtgtgttaacagaccaggtggaggctcagggagagaagattcgagatttggagttttgtcttgaagagcacagagagaaggtgaatgccacagaagaaatgctgcagcaggagcttctaagtaggacatccttagaaactcagaagttggatctgatggctgaaatatctaacttgaagttgaaactgacagctgtagagaaggacagattggattatgaagataagttcagagacacagaggggctgattcaggagatcaatgatttgaggttaaaagttagtgaaatggacagtgagagacttcagtatgaaaaaaagcttaaatcaaccaaagatgaactggcatctttaaaagaacaactagaagaaaaggaatctgaagtaaaaaggctacaagaaaaattggtttgcaagatgaaaggagaaggggttgaaattgttgatagagacatcgaagtacaaaaaatgaaaaaagctgtggagtccttgatggcagcaaatgaagaaaaggatcggaaaatagaagatcttcgacagtgcctgaacaggtacaagaaaatgcaagacacggtggtactggcccaaggcaaagatggagaatatgaagagctgctcaattccagttccatctcctctttgctggatgcacagggtttcagtgatctggagaaaagtccatcacccactccagtaatgggatctcccagttgtgacccatttaacacaagtgttcccgaagaggacagagctccggcagaaagcaggccatttgggacccttcctcccaggcccccagggcaggacacctccatggatgacaaccccttcggcactcgaaaagtcagatcttcctttggccggggcttttttaaaatcaaaagtaacaagagaacagcaagtgcaccaaacttagctgaaacagaaaaagagacagcagagcacctagatctggctggtgcttcttctcggccaaaagattcacagaggaacagtcccttccagataccgcctccatctccagattccaaaaagaaatccagaggtatcatgaaactctttggaaaacttaggagaagtcaatcaactacattcaacccagatgacatgtctgagcctgaattcaaaagaggagggacaagggcaaccgcggggccccgattaggttggtctcgagacttgggacagtctaacagtgacttggatatgccatttgccaagtggaccaaggagcaggtttgcaattggctgatggaacagggcttgggctcgtacctgaattctggcaagcactggattgcatctggccaaacgcttttgcaggcttctcaacaagatctagagaaggaacttggaatcaagcattcacttcatcgaaagaaactccagctagcactccaagccctgggatctgaagaagaaaccaatcatgggaagctggatttcaactgggtcactagatggttggatgacattggcctccctcaatataagacccagtttgatgaaggacgggttgatggtcgaatgctacattacatgactgttgatgacttactgtctctgaaggttgtaagtgtgctacaccatctcagtatcaaaagggccatccaggtcctgaggatcaataactttgaaccaaactgtctacggaggcggccatctgatgagaataccatcgccccatcagaagttcagaagtggactaaccatcgagtgatggagtggctgcgctccgtggacttggcagaatatgcgcccaatctcagaggcagtggtgtccatggtgggctcatggttctagagcctcgttttaacgtagaaacaatggctcagttattgaacatcccacccaataagactttgctgcgaagacatttggccactcatttcaaccttctgattggggctgaggcacagcaccagaagcgagatgccatggagctgccggattatgtacttctaacagctactgccaaagtgaagccaaagaaacttgcctttagcaattttgggaatttgagaaagaagaaacaggaagatggtgaagaatatgtttgtccaatggaattgggacaggcatcaggaagtgcatctaagaaaggatttaaacctggtttggatatgcgcctgtatgaggaagatgatttggaccggttagagcagatggaagattcagaagggacagtgagacagataggtgcattctctgaaggcatcaacaatctgacgcacatgttaaaagaagatgacatgtttaaagattttgctgcccgttcccccagtgccagcattacagatgaagactcaaacgtttga

SEQ ID NO: 116480 - DNA, 501 bp, Homo sapiens
ctgccgaacatcaatcattgctctgttcaccatctccatgctgtcgacctgcccgttagtcacttagtagccctctcagttatccgatcaactgtcagggtgttgcagtgcttgtgttcggtcacctttactttacttgagaatgccccaaagtacaggagtgatctgggttggaatttgcccctgaccaataagaaaatgatgagtgatgcaagtgacatattggctgcgacgttggagcagatggatggtatcatagcagagaagcccacatggcaaggaactgagagagatccagtcaacagccaccaaggaattcaggcccccagtccaacaacctgtgatgaactgaatactgccaataatcatagcagaaaccacccatgcgcggcaacacgaataccgcctagtccccgatcgtcggctcgatcagttaaatgcagctgctacgacatggtatcgccgactggcaagctggcaggtgcgcgccacgcagattga

SEQ ID NO: 116481 - DNA, 4064 bp, Homo sapiens
ggcacgaggtagtgcaggcagggtggggaaaggacggggaaggactcgtgtgctgcgagctggcggccgggccggagtgctggggctttgaactccgagaggaggtggaccagaacttttggaactagtgccggcggctctccaccccccagtataaaagaacgtgtggatcactttgctgagtacatccaagatttgaagaactgaaataaatcagctttaaacctgctttttaaaaatatctgggttggaatttgcccctgacaaataataaaatgatgagtgatgcaagtgaccatgttggctgcaacgttggagcagatggatggtatcatagcaggatctaaggctctggaatattccaatgggaattttgatggccaatctcccacctctccattcataggaagttagcgagctctgcaccttgtggaagacctgcgtggattgttagagatgatggaaacagatgagaaagaaggcttgagatgccagatcccagattcaacagcagaaacgcttgttgaatggcttcagagtcaaatgacaaatggacacctaccagggaacggagatgtgtatcaagaaaggctggcacgtttagaaaatgataaagaatccctcgttcttcaggtaagtgtgttaacagaccaggtggaggctcagggagagaagattcgagatttggagttttgtcttgaagagcacagagagaagttgaatgccacagaagaaatgctgcagcaggagcttctaagtaggacatccttagaaactcagaagttggatctgatggctgaaatatctaacttgaagttgaaactgacagctgtagagaaggacagattggattatgaagataagttcagagacacagaggggctgattcaggagatcaatgatttgaggttaaaagttagtgaaatggacagtgagagacttcagtatgaaaaaaagcttaaatcaaccaaagatgaactggcatctttaaaagaacaactagaagaaaaggaatctgaagtaaaaaggctacaagaaaaattggtttgcaagatgaaaggagaaggggttgaaattgttgatagagatgaaaattttaaaaagaagctcaaagaaaaaaacatcgaagtacaaaaaatgaaaaaagctgtggagtccttgatggcagcaaatgaagaaaaggatcggaaaatagaagatcttcgacagtgcctgaacaggtacaagaaaatgcaagacacggtggtactggcccaaggtaaaaaaggcaaagatggagaatatgaagagctgctcaattccagttccatctcctctttgctggatgcacagggtttcagtgatctggagaaaagtccatcacccactccagtaatgggatctcccagttgtgacccatttaacacaagtgttcccgaagagttccatactaccatcttgcaagtttccatcccttcattattgccagcaactgtaagcatggaaacttctgaaaaatcaaagttgactcctaagccagagacttcatttgaagaaaatgatggaaacataatccttggtgccactgttgatacccaactgcgtgataaacttttaacttcaagtctgcagaagtccagcagcctgggcaatctgaagaaagagacatctgatggggaaaaggaaactattcagaagacttcagaggacagagctccggcagaaagcaggccatttgggacccttcctcccaggcccccagggcaggacacctccatggatgacaaccccttcggcactcgaaaagtcagatcttcctttggccggggcttttttaaaatcaaaagtaacaagagaacagcaagtgcaccaaacttagatcgtaaacgaagtgccagtgcacccaccctagctgaaacagaaaaagagacagcagcgcacctagatctggctggtgcttcttctcggccaaaagattcacagaggaacagtcccttccagataccgcctccatctccagattccaaaaagaaatccagaggtatcatgaaactctttggaaaacttaggagaagtcaatcaactacattcaacccagatgacatgtctgagcctgaattcaaaagaggagggacaagggcaaccgcggggccccgattaggttggtctcgagacttgggacagtctaacagtgacttggatatgccatttgccaagtggaccaaggagcaggtttgcaattggctgatggaacagggcttgggctcgtacctgaattctggcaagcactggattgcatctggccaaacgcttttgcaggcttctcaacaagatctagagaaggaacttggaatcaagcattcacttcatcgaaagaaactccagctagcactccaagccctgggatctgaagaagaaaccaatcatgggaagctggatttcaactgggtcactagatggttggatgacattggcctccctcaatataagacccagtttgatgaaggacgggttgatggtcgaatgctacattacatgactgttgatgacttactgtctctgaaggttgtaagtgtgctacaccatctcagtatcaaaagggccatccaggtcctgaggatcaataactttgaaccaaactgtctacggaggcggccatctgatgagaataccatcgccccatcagaagttcagaagtggactaaccatcgagtgatggagtggctgcgctccgtggacttggcagaatatgcgcccaatctcagaggcagtggtgtccatggtgggctcatggttctagagcctcgttttaacgtagaaacaatggctcagttattgaacatcccacccaataagactttgctgcgaagacatttggccactcatttcaaccttctgattggggctgaggcacagcaccagaagcgagatgccatggagctgccggattatgtacttctaacagctactgccaaagtgaagccaaagaaacttgcctttagcaattttgggaatttgagaaagaagaaacaggaagatggtgaagaatatgtttgtccaatggaattgggacaggcatcaggaagtgcatctaagaaaggatttaaacctggtttggatatgcgcctgtatgaggaagatgatttggaccggttagagcagatggaagattcagaagggacagtgagacagataggtgcattctctgaaggcatcaacaatctgacgcacatgttaaaagaagatgacatgtttaaagattttgctgcccgttcccccagtgccagcattacagatgaagactcaaacgtttgaccgtagcacctggatgaacattaggagtgcttagtcttttttctacttgcttttccaaacactcacagtatatacaacaggcagcggattgtctattgtttgttgttctaacttctgctgtcgagaagtttaaacagaaagcaggagtaatgtgccgattctgaagttgccacaaaaaataagacactggtgaatgagagtataattgtttttcttctatttaatgtaaaaatctgtgatatattatatttaaagtgttgcatttaagatgagtattttaccagagtgtttccattcatatccgcggtatggaggatttgaggaacagtaaccaggatgtgaatgattttgttacatcagtgttcactgtagccacctaagtaggacattatatgatttcagaatcaatatgtggaacttctttaagcattcagtgtgcccactaaatgccagccacacctccacttgcctcttattgtcttatttttatatatttttctaaatatatgtatatatacagtacatagaaaatagaacttttattttgtgacctaaggacgatggtgaaaagatcacgttttcaaaacaatctggtgatcagaatgttcatataccagctggtttctgaagaggtcagaatgatctttctccatactgacttttaacaatgttgatcattgaggctaaattaatatatatgaaatattcctttttgatgacaccacaaaattgttgaacagtttaagaatttcaaccttaatcttggatcc

SEQ ID NO: 116482 - DNA, 460 bp, Homo sapiens
caccggtccgtaattcccgagtcgacgatttcgcggagacagcagggtgacagaattggaaaatatttatttcttatctaatgaattccccacttgaactctgccgaattcctgtgccacctcctcctttagaaaactgatcttaatacagagataaaagaggagtcgaaggtaaaagaaaatgctgggaactgaccgatgtgttggggaagaatggttatcaaaattcaaggcattacctgacactcagatcaccagttatgcagcaactttacaccggaaaaaaacacttgtaccagccctctataaagttattcaagattcaaataatgagctcctggagcctgtctgccatcagctgtttgagctctatcgtagctcagaggttcgacttaagaggttcacactgcagttcttgccagaattgatgtgggtttatttaccggttacaggtagccgg

SEQ ID NO: 116483 - DNA, 2953 bp, Homo sapiens
ggtttgtgtgagtggctttccacggcaacatgaaaaacactggaaagaactctgtggtcgaatagtattggatcctgaatttatggtgcaacttctcacaggggtttattatgccatgtataatggacagtgggaccttggccaggaagttcttgatgatatcatttatagagcccagctagagcttttttctcaaccactattggttgccaatgccatgaaaaactcattaccatttgatgctcctgattctacacaagaaggccagaaagtccttaaagttgaagtcactccaacagtgccgaggatttctcggactgcaattacaacagcttcaatccgtcgtcatagatggagaagagaagatggctttgacttctcaaacgaggctgactcgagtattcctggctccccgatccaacacggctccactgacctagggatcaaacgtgtgcaagagggggaggtgctggtgcgcaggacccctgagcatggctcgccggagcccaactcagcaacagccacaacagagggtgctgagggtgtaaatggaggagaggagtctgtaaacctgaatgatgcagatgaaggattttcatcaggggcttccctcagcagtcagccaattgggaccaaaccatcctcctcttctcagaggggaagcttaaggaaagtagcaactgggcgttcagccaaggataaagaaacagcctctgccatcaaatccagtgagagccctcgagattcagtagttcgcaagcagtatgtacagcaaccaactgatcttagtgtagattcagttgagctgacaccaatgaagaaacacctgagcctgcctgctggccaggtggtgccaaaaatcaatagcttaagtctaatccggacagccagtgcttcctcaagtaaatcatttgactatgtaaatggcagtcaagcaagtaccagcattggggttggcactgagggaggtactaatttagcagccaacaatgctaatcgatactcaactgtcagtctgcaggaagaccggctaggtcaagctggcgaagaacactttttaaagattgctacaagacaaacagctaccactcagccagctactgtgcaaacttcctcagatccaaacaacacttccttttcccttccccggaaacggaaagaagaaaggaaagggcgggagattcggtgtgccgcacgcaggcttcccatcccccagctggcctccggtgctccttacctccccggtggtcgggcgcgaattactggaaattggcttttcccgttggggccgaaggtaccttccctgcggcggcgactcagcggggtgtcgttcggccggcgtgacgcagccggatcggcgccagacggaaacctagcggtgactgtatctgaattttgcagctgcagaatgtgtagtaccttaaaaggagctaaattgaagaaggagcgagcgcagcttttggtcaaccccaaaaaaataataaagaagccagaatatgatttggaggaagatgaccaggaggtcttaaaagatcagaactatgtggaaattatgggaagagatgttcaagaatcattgaaaaatggctctgctacaggtggtggaaataaagtttattcttttcagaatagaaaacactctgaaaagatggctaaattagcttcagaactagcaaaaacaccacaaaaaagtgtttcattcagtttgaagaatgatcctgagattacgataaacgttcctcaaagtagcaagggccattctgcttcagacaaggttcaaccgaagaacaatgacaaaagtgaatttctgtcaacagcacctcgtagtctaagaaaaagattaatagttccaaggtctcattctgacagtgaaagcgaatattctgcttccaactcagaggatgatgaaggggttgcacaggaacatgaagaggacactaatgcagtcatattcagccaaaagattcaagctcagaatagagtagtttcagctcctgttggcaaagaaacaccttctaagagaatgaaaagagataaaacaagtgacttagtagaagaatattttgaagctcacagcagttcaaaagttttaacctctgatagaacactgcagaagctaaagagagctaaactggatcagcaaactttgcgtaacttattgagcaaggtttccccttccttttctgccgaacttaaacaactaaatcaacagtatgaaaaattatttcataaatggatgctgcaattacaccttgggttcaacattgtgctttatggtttgggttctaagagagatttactagaaaggtttcgaaccactatgctgcaagattccattcacgttgtcatcaatggcttctttcctggaatcagtgtgaaatcagtcctgaattctataacagaagaagtcctcgatcatatgggtactttccgcagtatactggatcagctagactggatagtaaacaaatttaaagaagattcttctttagaactcttccttctcatccacaatttggatagccagatgttgagaggagagaagagccagcaaatcattggtcagttgtcatctttgcataacatttaccttatagcatccattgaccacctcaatgctcctctcatgtgggatcatgcaaagcagagtctttttaactggctctggtatgaaactactacatacagtccttatactgaagaaacctcctatgagaactctcttctggtaaagcagtctggatccctgccacttagctcccttactcatgtcttacgaagccttacccctaatgcaagcatacaagatttaaatttgggaagggggggatgtcctcaattagaactttttgatcagcctggctggtaccgtctagtactatgcagcggtcctcaagttggagaaaatgtgcctttcattcattacctctctggagacttcttgctggaatga

SEQ ID NO: 116484 - DNA, 397 bp, Homo sapiens
tttcaccaaggttttgggttaatttaaatggggagaaatttatttttaggctttttaaaattttatacagatataggtgccttaaaaaaaaaaaaaacaacagttacaaccaaaagaattgaaatgaccagtgcactttattttccttttagctcctggagcctgtctgccatcagctgtttgagctctatcgtagctcagaggttcgacttaagaggttcacactgcagttcttgccagaattgatgtgggtttatttacggcttacagttagccgagacagacagagtaatggttgcattgaagcacttctgttaggaatttacaatttggtaagttgaagatgacagtttgggaaattttaagtattttttaaggtcctctgaaataatactta

SEQ ID NO: 116485 - DNA, 3106 bp, Homo sapiens
ggcgggagattcggtgtgccgcacgcaggcttcccatcccccagctggcctccggtgctccttacctccccggtggtcgggcgcgaattactggaaattggcttttcccgttggggccgatagttctcttccctgcggcggcgactcagcggggtgtcgttcggccggcgtgacgcagccggatcggcgccagacggaaacctagcggtgactgtatctgaattttgcagctgcagaatgtgtagtaccttaaaaggttggcaacaatgagtaaaccagaattaaaggaagacaagatgctggaggttcactttgtgggagatgatgatgttcttaatcacattctagatagagaaggaggagctaaattgaagaaggagcgagcgcagcttttggtcaaccccaaaaaaataataaagaagccagaatatgatttggaggaagatgaccaggaggtcttaaaagatcagaactatgtggaaattatgggaagagatgttcaagaatcattgaaaaatggctctgctacaggtggtggaaataaagtttattcttttcagaatagaaaacactctgaaaagatggctaaattagcttcagaactagcaaaaacaccacaaaaaagtgtttcattcagtttgaagaatgatcctgaggttacgataaacgttcctcaaagtagcaagggccattctgcttcagacaaggttcaaccgaagaacaatgacaaaagtgaatttctgtcaacagcacctcgtagtctaagaaaaagattaatagttccaaggtctcattctgacagtgaaagcgaatattctgcttccaactcagaggatgatgaaggggttgcacaggaacatgaagaggacactaatgcagtcatattcagccaaaagattcaagctcagaatagagtagtttcagctcctgttggcaaagaaacaccttctaagagaatgaaaagagataaactaagtgacttagtagaagaatattttgaagctcacagcagttcaaaagttttaacctctgatagaacactgcagaagctaaagagagctaaactggatcagcaaactttgcgtaacttattgagcaaggtttccccttccttttctgccgaacttaaacaactaaatcaacagtatgaaaaattatttcataaatggatgctgcaattacaccttgggttcaacattgtgctttatggtttgggttctaagagagatttactagaaaggtttcgaaccactatgctgcaagattccattcacgttgtcatcaatggcttctttcctggaatcagtgtgaaatcagtcctgaattctataacagaagaagtcctcgatcatatgggtactttccgcagtatactggatcagctagactggatagtaaacaaatttaaagaagattcttctttagaactcttccttctcatgcacaatttggatagccagatgttgagaggagagaagagccagcaaatcattggtcagttgtcatctttgcataacatttaccttatagcatccattgaccacctcaatgctcctctcatgtgggatcatgcaaagcagagtctttttaactggctctggtatgaaactactacatacagtccttatactgaagaaacctcctatgagaactctcttctggtaaagcagtctggatccctgccacttagctcccttactcatgtcttacgaagccttacccctaatgcaaggggaattttcaggctactaataaaataccagctggacaaccaggataacccttcttacattggcctttcttttcaagatttttaccagcagtgtcgggaggcattcctcgtcaatagtgatctgacactccgggcccagttaactgaatttagggaccacaagcttataagaacaaagaagggaactgatggagtagagtatttattaattcctgttgataatggaacattgactgatttcttggaaaaggaagaagaggaggcttgaagctttcctttattcttgaatctcccatggaagggttgtaccccagctgccactcctctagttgaaagtgttgtgtttacatctgacattaaattatttttccagcatacaagatttaaatttgggaagggggggatgtcctcaattagaactttttgatcagcctggctggtaccgtctagtactatgcagcggtcctcaagttggagaaaatgtgcctttcattcattacctctctggagacttcttgctggaatgaacagtgtgctcagggactatttggaactggatgtttttgaattattttatacttagagatattctgaattttttgagggccttttaacactccccgagctgattgtttgcaagtgtgtttgttccagagtgtggaagtataaagacatgggcatcacgtaaattggttttgtttgctattctgtgtgtcagaaccaacgagtgtaatggagagggcaggtcatctcttattgtttctaaaacaacttaaaaggtgtagattgggaagaggtgagtgatccagctttctcctttggattgaggctatgtacttggtggggcaggggagggaatatattataatactattcagttgggataatgggaaaaacagagtatatagggtatctacccagcctagaaagcacaggaacaatacgtcatatatttggaacagttattgtctgtgccatgaccttcatgataccagtgagaagcctggctagagaaataaaatcctgaattacattttagtaattgttttcaagacaacaaaaaataaaacatttcattattgtatattgacatatttttcttttcttgaaccacatgcaggtgagtagcatataatggctggctgtaaataattttgattcctctgtcaagtagaccctaaaactcaccgtaagatatttcagttttttccttaaagtgatgatttcaaacctcctgaatatttgcgcgagacttttttcttaggaaagaaaaaaggctcaccttggctactgttgtcagcttacagtcatcacataccccctgaaatatttgacacttggaaatgaagttcttcctgaaaatatcactgcaat

SEQ ID NO: 116486 - DNA, 856 bp, Homo sapiens
atgctgggaactgaccgttgtgttgtggaagaatggttatcagaattcaaggcattacctgacactcagatcaccagttatgcagcaactttacaccggaaaaaaacacttgtaccagccctctataaagttattcaagattcaaataatgagctcctggagcctgtctgccatcagctgtttgagctctatcgtagctcagaggttcgacttaagaggttcacactgcagttcttgccagaattgatgtgggtttatttacggcttacagttagccgagacagacagagtaatggttgcattgaagcacttctgttaggaatttacaatttgccttcaacaattggatccatggctttgacagaaggggcattgtgtcagcatgatctcatcagagttgtttatagtgatcttcatcctcagagggaaacattcactccccggtggtcgggcgcgaattactggaaattggcttttcccgttggggccgaaggtaccttccctgcggcggcgactcagcggggtgtcgttcggccggcgtgacgcagccggatcggcgccagacggaaacctaccggtgagtagtggggtgtcggggcagcctgcctcccttttctgcttagctcgcggcgtgtgaggtgcgtccaggtgcacccagccccgcgtcggagcttggcccctagcgtcccaagtcgcgcatctcaggactttccctcggcacttggggcatggtctttgcgcctcgctgccccccgcaggctgcccgggggctcgagaacccttactggtggagcgcagccaactggccagaggctggaggcgcaggccaaagtcctttaagacttgaggtgagagg

SEQ ID NO: 116487 - DNA, 428 bp, Homo sapiens
atttcgtggacgaagcagttgctgtgggaggtgtggtaactgctggaaggaagatgctcaattcttctgagcaacgaaggccacacggagtcctggattctgtgtggcctggcatccatggcgcactgtgtgctggcaggtggctcaggacggggcagttatcatgggacacccgccatatgctggcaaggaagatggtcagttcttctgagccacaaaggcccccaacatcctggagttggtgttgcctagcatccacggtgcgccccctgctggtggatggctcaggatggggcagttgccgtgggaggcccgctgcctgctggaaggaagatggtcagttcttctgaaccacaaaggccctgcagagtcctggagtctgtgtggcctggcttccagggttcacctcatgctggtggattgctcaa

SEQ ID NO: 116488 - DNA, 531 bp, Homo sapiens
atggacctgggcctgtttctcaagtgtgtatttgatttctttacaattccccggagaagttgtcatgggaggccagccgcctgctggcaaggaagatggttgattcttctgatcaatggaggccctgcagagtcctgtagtcactgtggcctggcatccatggtgcacccaatgctggtggatggcttaggacgcttgtatgagcaaatactgctctggatcctctttcctgcttggaaagcagcttcagtcctgaaggtccagagtgaatgtgccctgaccctggctctggcccaagtctgtgccgtagaggcagttgctgtgggaggtgtggtaactgctggaaggaagatgctcaattcttctgagcaacgaaggccacacggagtcctggattctgtgtggcctggcatccatggcgcactgtgtgctggcaggtggctcaggacggtaagcatttctctgcccagtatgctgaatgagggtgtctttcggatttccaagacccgcaaggagcagtttctcagctaa

SEQ ID NO: 116489 - DNA, 495 bp, Homo sapiens
ctacatctgcactggagaaatcccaaaagcaaacggccagtgcaaacaagagcagtccgcagcagccgtcccgagcacagctcccaggtcgcggggctgcagcccaggccgcgtccgcagcggtttggtttgtgaacagacgccgagactcccgcagcatgacccgccacgccgatcgggtacggtatgcgcctctctctacccgtcctccattgcttgggctcccaggtcacagctgccattctgtcaagcagaaaaaccttgcaaagggcctccaggtttgccggaaagcagtccctgttgggctgtgttcccgtgcactcagctggagcaatttgcaggcgcgcaaatgcggagctcaactcatttcaagttttcattgccagagaatgagtttgtaaatatcgagtttgtctctggtttctggaaagcgagcccgtccaacttgcaggactctcggttcaccacggctcgactgcaagcgggcgaccctca

SEQ ID NO: 116490 - DNA, 405 bp, Homo sapiens
tttcgtccggcgagggaggaagaagcgcgaagatccgttagtcatgccggtgtggtggcggcggcggagactgcgggcccgtagctgggctctgcgaggtgagagtgatcgcggtcttaggtccaactcctctacgtgccgggttcctccgccatatgggtgcccagcgcggcccctgtcccttccccgggcgcagcggagcgggcggctgctgcgtaggccaaaaggctacgctcccggtgcccccaaggcccacgagctttccccacaagccatttgcgcagtcgcgttttgtgagtaaccacctggaaggcttagctgacctttctccgtcaacaccggttcgctgtcctctgctcagaaactgggcaagggccttctgacttaaggaggtgcctgcaaggg

SEQ ID NO: 116491 - DNA, 438 bp, Homo sapiens
gtgactatgagaatggagctatttagagttgatttaaaagaaaacactttattgttcagcaattaaaagttagccaaatatgtatttttctccataatttattgtgatgttatcaacatccaagtaaaatgctcattttcatcatttgcttctgttcatgttttcttgaacacgtcttcaattttccttccaaaatgctgcatgccacacctcaatacatgccgcgtgatcctagtagttttttcacaaccttctacaagtttttggaaaacatctgttatgatgcactttcatacaccttcacctcaaaggctttcttgcacctcgcagagcccagcttacgggcccgcagtctccgccgccgccaccacaccggcatgactaacggcttcttcgcgcttcttcctccctcgccggtcgcgcgcgatctagaaccag

SEQ ID NO: 116492 - DNA, 469 bp, Homo sapiens
agagttgatttaaaagaaaacactttattgttcagcaattaaaagttagccaaatatgtatttttctccataatttattgtgatgttatccacatcaagttaaatggctgatttccatcatttgcttctgttcatgttttcttgaacacgtcttcaattttccttccaaaatgctgcatggcaacacttgaggtaacgaagcagaagtatttttaaacaatacaagctaaaaacattcatctacagcaacctatatgctcaatacatgccgcgtgatcctagtagttttttcacaaccttctacaagtttttggaaaacatctgttatgatgactttcatacaccttcacctcaaaggctttcttgcacctcgcagagcccagctacggcgcccgcagtctccgccgccgccaccacaccggcatgaactaacggctcttcgcgcttcttcctccctcgccggacgaaa

SEQ ID NO: 116493 - DNA, 651 bp, Homo sapiens
ttccttagtgaccctaggcctcttgcaggagagtccctggtcccagccagcgggagcggctatatccagtttgtggctctcggagagttcgcctcgtccctccctctcagataaccacctatttctgacctctggaggccgggctgagcccggaattttatgaccagcgcccgctggccgtcgtcaccctctaatttctcgcaaaactcccggggacccttcttaatgtcagtagccacagtcgccgccgctcctgcgcctagaagccttccacgaccctcaaccccacagagccccgagcaggctcgggttcccgcaggatacactgcccgcccagtggcctggagggcgcgtcccgggctcccctacgccttttggaatcagcgacagacgcagagcaaggcacccctagaagcttcaggctcctccacaggcgagtgcctacccacctatcaggtaagacgtgcaactgacactcagcgcgcggaggagcccgctgagaaagggtttacctgtccgaagagaactgcgcttgcatggctctggctgtgggccggctggctcttgtccgcagactacatttcccagggttgtctgcggctggagagatttagggtttggggcgtggctagcacaggcctgaggtcctaa

SEQ ID NO: 116494 - DNA, 241 bp, Homo sapiens
gtactgatcgccgcaccggagcccgaggacgctcaccgtgccgcctccccgcgggagccccgggagcggcccatcacctctgcagcctcgccaggagaagaaaagttcccacgtctctaccaggagaagcccgaagctcctgcgggagaagcctgaagctgctgctggagaagcggcagctgaggcaggactcccgatgtttgcccgcagccgcgcgcgcagtcggtgcgccccgacgaaa

SEQ ID NO: 116495 - DNA, 902 bp, Homo sapiens
atggaaggatgggttcagggttttctacgccgctttttcggcgactttttgctcttccgctttttgccaccgcccccaaccttctatatccttgcagcccctaccttttcttgtgttgctcctcccctggcagccgtgaggggggttagatctcagccggagccggagctgggcctagctgtcccacgggccaccactacctcctttggttcgggagaaagctacgaccaagtacgcccagctcgggccttagaacttctgaacgggcagtgcggcttgtctagagctgtgtcattacagcagctgacatatggaaatgtcagtccaatacagacctcagcttccccattatttcgaggaaggaagagattaagcgatgaaaaaaaccttcctcttgacggtaaacggcaacgtttccattcaccccaccaagagccaactgtagttaaccagatagtgcctttatcaggtgaacgaagatactcaatgccaccattgtttcatacacattatgtaccagatatagtcagatgtgttccaccttttcgagaaattgcatttttagaacctagagaaatcacactgcctgaggccaaagataaggtaataataatgtagattttagttttgccttttgggaatttagtataaataatgtattaatcaaaaatatttaatatcctggattaagtagaacgtgcctttttttgttgcaatgtttaaagtactattcagcctaattttctgcccaaacagtactttgatttttgttagctattcttttatagaaatgcagccatcaggaaatcagattttccctgatatatgaaaattttattagaacccagacactttctgagtttagagaactgtcttgttacttgtttttactgaaaaaaaaa

SEQ ID NO: 116496 - DNA, 424 bp, Homo sapiens
gggcggagcaagcatcacaccatggcgtatgagtgttcctctgtgtagactcaacctgcgcctcgccgtcccccattcgcacacccgatgcccgggggtcgctacggacttaaaatctccgcaccgcaccctccacctcagaaacgttcctggatccgaacactgccccctgacgacctaaagagatcccggctcccagcccactgagtggcttcagcctcgctggcacctcccaactcctggcctctctgcacgaggcgcctgccccgggccccgcctacaggggacccagctcttcttgcagccactggaagctgatcacctggagtgaagacctcacacgaagaagtctggaagaagaggaagaggaaagaaaaggagtcagggatggcccttactcaggtacggttgacatttatggatg

SEQ ID NO: 116497 - DNA, 476 bp, Homo sapiens
  misc_feature (1)...(476): n = a,t,c or g
gtcttcactccaggtgatcagcttccagtggcgcaagaagagctgggtcccctgtaggcggggcccgggcagggcgcctcgtgcagagagcccaggagttgggaggtgcctgagggatgaagtgggcgggggccttggggaaagggggcggtgcntgcgctcccctccctctcactcccaggagtctgtttccagagctttggaggagagacctaccagcgaggctgaagccactcagtgggctgggagccgggatctctctaggtcgtcagggggcagtgttcggatccaggaacgtttctgaggtggagggtgcggtgcggagctcttaagtccgtagcgaccccccggcatcgggtgtgcgaatgggggacggcgaggaacaggttgagtctacacagaggaacactcatacgccatggcctgatgcttgctccgcgnnttccnccgcactgagtacgatctcgatgggcggg

SEQ ID NO: 116498 - DNA, 642 bp, Homo sapiens
atgtctctggacttgaaagatccaggggtggtgattcccaccacatctccactcagctctcttatttggcctgtgcagaaggcaggtggatcttggagaatgacagtggattatcataagctcaaccaagtggtgcctccaatggcagctgctgtaccagatgtggtttcactgctcgagcacattaccacatctcctgccaagcatgcgtccttcctgttcctgggccgagcttgctcctgcctcaaggccttcacgtgggctgtgcctctgctggaactcgctggcccctcagctgcaggccttccgctggaggagcggcaagggggcgaacggcggagcgaacggccggcgcgccaggccagcccggggctaccccaggctgcggggagctcgccccgcctgcaggacgggcgtctttacctgctcacaaaaggcactttgcatttaaaccattttcaaattaagaagaaaaacagctccaccccctggaaaatgtactcctccaacatgcagacatcttactacaaaccctccagtgaatgtgtggcccaagggaatcaggagaaagagagacaaagagccactgagaggagatggaaaaaccaagaaagagaaaagaaaaatgagggagacccataa

SEQ ID NO: 116499 - DNA, 546 bp, Homo sapiens
ccaagcatgcgtccttcctgttcctggccgagcttgctcctgcctcaaggccttcacgtgggctgtgcctctgctgaactcgctggcccctcagctgcagttgccacagacccggaagtggatcgtgcggagcaagcatcacaccatggcgtatgagtgttcctctgtgtttatctcaacctgcgcctcgccgtcccccattcgcacacccgatgcccgggggtcgctacggacttaaaatctccgcaccggaccctccacctcagaaacgttcctggatccgaacactgccccctgacgacctagagagatcccggctcccagcccactgagtggcttcagcctcgctggaagaagtctggaagaagaggaagaggaaagaacaggagtcagggatggcccttactcaggtacggctggcatttaaggatgtggccatagaattctctcaggaggagtggaaatgcctggaccctgctcagaggatcttaaacagggacgcgatgtgggtaaaacactgggaaccttggttctctgggactgtgt

SEQ ID NO: 116500 - DNA, 1331 bp, Homo sapiens
gactggcaccactgtaagaaagccctttatgaaggtcatcatcccccacttgccatctctccccagatgcagatgtgcaagcttttaaaaacacttgagaagccaccatcctcgctttgcaagccctcttttaagaaatgtcattatcagaaatacaatttgatggcatcaagaggaagcaatgcctccaatatctggagaaaccctgaggaacactgcaatatgatggatttaagaccgtatattttggggaaaccaatatcccagaaagtctcgtaactggggaagatattagtgatggatatttcatacaaaccccaacttggtgtattgtgcatgctgcgggtagtcaaggatgggtgccttggaaatatcgggtgttcctaagagacgagctgtgtatcaaacaagaagacagcctcttctctgagttctgtgatgtggtgaggaaggcctatggaaatcattcactcatcaaatactggagcaccttctgtgtgcctggctgggtgcgtcagggccaggagtaccaaggaaaacaagcctggaccctcaaggtccaggtctggtgtggagactctccaccgtccatcctctggcttcactctgacacagatgagatctgcatgggggagctccctcatggtgtgatggtgcgtgtgtttccggcagtggactgtgtgaaacggctgaacctcttcttcacgcctgaggtcatcaccatgaacataacatcatcacgtgtggcatcccatgtgggacgctgtggctgccgcagtgtctggcgcatgaagagcacacgctggagtccactcaagctgacatttacatggcagaatctagaagggaataccaaagggatgagtaggaaatgtttgataagagtatacccgatgtttactgctcagcataaagacgcagtggagacgcacggcaagaggcagaagtgtggactgagaaggacgcagcacaagggcagcagaggtcaagaacattcacaggactctccggggaccaacaccgtaggcttgaaccaatcctgggccccgcccgggccacgtgccagccggaacacgctgctcaacgggttgacggcgcccgacggccaggtccagcaggggcgccccgcagcggaggctccagcgcctggccgcgcacaaaccacgacttctaccgtcctgccggggaaaactacaggtcccgaaatgcaccgctacgtgctcaggcgcagtgggccggtgccgccgacgagagtgcactactccgtgcgcaggcgcagtgggcccgggcagaagacctggggcgcgctgctcactgcgcaggcgcagtga

SEQ ID NO: 116501 - DNA, 950 bp, Homo sapiens
atgattaatgatgaagtggagatgaatgtggggagtgaagtagagggcagtgtcaagaataactccctggtctttggcctgcagaactgggtggatagagggcctcacttcagtagatatttacgaagagcctactatgaaccaggcacagagttctatgggctgaggatagagcagtggacacgacaaaacaaagctcctgctccaatagagcttcattctagtcgagagacagataataaacacacgaacaacgatatctttgaatctctttctctatctcctctgatcctgcccccaaacactcggcggagcggcggagcggagaatagaaggtccgcgcgcgaacaggaggcggggcctgccgccttcagtcgtacagggggtggtttctgcacatgcgctgtggctgtgcggcttcagctgccccctctctgcggccaatcagggcccgcggcgcgctcgggacgtatcaacgctctgtgggtcgtgtgcgtgcgaggggggcgactccgcctctgggccctgccggtgagtccccacggaaccctggggccccccattctctccccggcgggagaagacaaggaggatggcggtggccaggccgccgcccctgcccgttgttaaattcagaaaatgcaagcagtcatcttcatcacagtcctatggacttccaggctgaggtgacacgcagggcaggactgacagcaccttcagaggttcccatggcgacagtaaacaagtctccactgccttggccatgtgctgtgttcaccccactcctgatcttgttggctgctcaggggctgacagcccagatgtgcagctgtgatgagcagaaacagggaggaatggagcccccaggtgagcggcgaggcttggatttagggaagagcagcctggggatgtggatatggatggaagaggctctgagatttgggatctga

SEQ ID NO: 116502 - DNA, 498 bp, Homo sapiens
atggggaacactacctcgtgctgcgtgtcgtccagtcccaagctccggaggaatgcccactcccggctggagtcctaccggccagacacggacctgagccgcgaggacacgggctgcaacctgcagcacatcagcgaccgggagaacatagacggggcttccacgtccaccatctcatctgaacttcccagcaagcccatgaagtcacagagatggagctcaactagaaatttccccgagaaaaaggtttgctctttgatggacaaacagatcaaagctctgtttgctctgagggagcaaacagatcaaagcatgcatttcgaatgcagggagaaagctatctgttttgtccctaggaaacatttatcccacagcacagccaaaatacagctgcttgcaaacatgatggctgaggaggatccgtgccatcctaaactacaagctgaccttgatgacaggtcacactctgaggatggagaggcagaaacagcatcgtaa

SEQ ID NO: 116503 - DNA, 849 bp, Homo sapiens
atgtggctaccttataagagcgaccaccagggggcagccatgaggtgggccaaagcaaagactgtaggcttccctgcccactgtgcagataatctagcagctgttcagaaccccgggacctgttcatggctgcgactagaaaggttccctccacaccgggtcacatacatcgagccatacaacctgtgcgggactggcgagtcgattttattggcccccccgccccagagcggagggaaacggtatgacttaacctgtgtggatacaacaatgaggctactacaggccttcagtgtaaaacgtgccacccaactggagaccatgaagcgtctcaccgctcttagtgtcacgaatggcatggctaaaaggacagatagagatattaggtcccctgaagtcttgaagagacatattcatcttacttggtacgagagggccactgaaggctatactggagtggagtgcctagtgggcatgtcctgtcagacagcaataattcaagcatcccctgagaatggccctatgttccttggtgtatggggtggtggccacgaggctgcagggacatttgcccaggatgaaacagttcccagtgaaagggtcatgttgggtatatctcagagcctggagaacgtgtctggttattatgcagatgcacggctggaggtgggatccacacagctcagaacagctggatcttgctcacactctttcaagagaagcttccttggcctctgggtgatagagaagaaagaagctgtgctgttccctagtgggaaagatggcccagacaggggcagtgagaacggcatgttgcagaatggtgtctgccacatgatcccagcttga

SEQ ID NO: 116504 - DNA, 432 bp, Homo sapiens
ttttagagatgggggtctcactttcttgtctaggctgtaaattttcagtttaacaagtttcttatgtgatttgtggccacactgaagactcaccagaacagggtggggtggggaatacttaatcaatatttgtggaatttacccgatgaaatccagttattcctgctgaatttctctctcctccaggaggacatagcaaacgagctgaggaaggtgaatgctgcaaccctctctcctcagccctgcagccgatccctgacataaactccttgaagttcagtggcctctttccatgcacctaccacctacacctgctgctttcaaagaaaccacaacctggaccgggaacagaactggacgtgccaaaatgcctgaggacacttcatcgaatgtggctggcttgatgggacgctggcatgactagaaatgtca

SEQ ID NO: 116505 - DNA, 921 bp, Homo sapiens
atgcagacagttatagatttcaggggtcccagggtatctggaggcaaagcaactgggaccagtgcacgaagggagaaggtcctggaacaggttgtttgggactttaaaaaaaaatggcgtgaaagtgaaaagaatctgtccctgtccttacatgaaccggccatcgctcttatcccacctagttttcattgcattctccagagcatctttgtatatgatcttcctaatacccctgtgagagatgcagagcatctcacagatgtgcacctggataatctatattgtggcctatcctgggtgacacctatagtcccaacctctgtaatagatgcctctcctgggattttcatggaaaagaaaaatctgtttataaaatcgcgaaatcagcctgtgccctctatatctctgggaaaggtcctacctattaattcagccacattccgatgcctgacaactccttacacaaagctcttggtgttaccagtgggagaaaagctcaaatcagagaagaatgctggaagagaaaaccagtttgacaaaggagtgctggccgtcaattggctaaatataacacccacacttggaatccatggctttggcctagcagatgcttactactgtgttccacttaggccagagtttctcaatctcagcactactgacattttggtccagaacattctttatcatgaagggttgtctggaggacatagcaaacgagctgaggaaggtgaatgctgcaaccctctctcctcagccctgcagccgatccctgacataaactccttgaagttcagtggcctctttccatgcacctaccacctacacctgctgctttcaaagaaaccacaacctggaccgggaacagaactggacgtgccaaaatgcctgaggacacttcatcgaatgtggctggcttga

SEQ ID NO: 116506 - DNA, 852 bp, Homo sapiens
atgggtacagagagcactgacccagtgtggagcaggggttgggaaggcaaggagcagttgggcaggcaaagagataatggggaaggaaggagggagaaagagagaaagggaagagagagggagagagagagagagagaggtgatttcagggtttgcacgaggctcagtgtgtctgaagcagtgtgtgctggcttgggagactgggagatggggctggaaagtcactttgtaccattatccgtggaacacagaatcatctgttcccaacgctccagccccttggtcttgtgcatggctggatcccaccggaaacgggcctgcacagcagcagcaccctcctggtgtggaggttatgtagctggtgagctgctcacagccatacactgcccatgccgagcacctcccacacagctctgctttcctttgagttggctttattctcgggctccatggtgtggccccacagcaccagttattggtaaaaagagctcccatttgctgacagaactgctggatttagttctcattggtccacacgaggaaggtatccagcctcaagtcatcactgtggccaaaagatggaatacactgagtggacaggcctggcatgtgtatccacagagactgagagttggtgctgatggtatggtggtggatgagattaccagaagaagggacaaatgggtgctgggcaggaaaaagcatcagctgcccagtttaggcctctcctctttccctggcgtcttcacttttcctccctatccctgctgttccttaccctctgcccagtctctcagtactcctggtcttgggaaggtgccttctgaggatgctcctggcacgggtacctga

SEQ ID NO: 116507 - DNA, 778 bp, Homo sapiens
gaacagcctgtcaccacacaattacttttataaccctggagatgaaaatctccttgtcctcaaaatacttccagaagaacaaccagatgggaaggaccttggttgggactctttccagttcacttggggcagagggaatttaatggctcacgtagctgaaaaggatgggctagattgggcttcaggctgcatcccaggactccaaacagggatctgtctctttggctctcagctctgctttcatttgagttggctttattcttgggcttcacagtgtggccccacagcaccagttattgataaaaagagctcccctttgctgacagaactgctggatttggttctcattggtccagacgaggaaggtatccagcctcaagtcatcatttgtggcccagggaagatggaatacaccaaatgggacaggcctggcatgtacccacagagactgagagttggtgctggtggttgtgggtggcagatgatattacctgaagaagggacggaatgggtgctgggcaggacaaagcatcagctgtccagttcaggcctctcctctttccctgggtgtcttcattttcctccgtctccctgctgtcccttaccctctgcccaatctctcattactcctgggtcttggggagttgccttcttgaggatactcccactggggggtacctgagcctgggattaggagggcagggggaggatattgccttagccaaagtggggtgtttcaataaaaaaccattttggagatggtttttaatatgggaaa

SEQ ID NO: 116508 - DNA, 401 bp, Homo sapiens
cccctggaatgtctggccagggcctgtaaaattgaaataggtcccccgcctctccttactgtggtggcagagacccctaagggtaaatgcagagggccgtggttctcggatggactgtggagctgggcactcaggaagtttcacatagcccagaagctgctttctcaggctcctctggcagggagcgtcaggatgagaatccagacctgactgccacccagccctctcacttcgcagatgcaaaaatccagactcagaaagggagcctctacaaggtggcccaatggctgctcaaaggaaggacattgcctccctacctcgacctctcccccgagcccctggagcccctctgggaagctacagtttatgccgcttacagtcacttctgtattgtcctctga

SEQ ID NO: 116509 - DNA, 377 bp, Homo sapiens
agatactatcatctattccatctctattgcaatttgcttccaggcagctgtcatggaagttcagactttgagaccatcttactggaagttccttttaagactcaccaagggcaaatttgctgtcatgaaccgaaaagtccttgatgtttttggtactggtgcatctaaacactttcaggatttcatccccaggttggatccaagatacacaactgtaacaccagagttgcccacagagttttcctgaagatgactgtaacttattaatgtgactaaatgtttcatcttgaagagttaattatgttgaacacaaaggagggggcccaagctcgaacttcagtgttatttcagttagagatactcttttcatttgtttt

SEQ ID NO: 116510 - DNA, 639 bp, Homo sapiens
atgagcctgagacagctacagaaggaagatggcacatgtggccaggacaggccccaaagaggatcagctcgcctgcctgagtacatccgggcatcctctttgcagaaggctactctcaatctccctccaacacattgtgacacccattttttgcaagtcatctgttgctcagaggaaacgctagacagtggttgggccataattataaagacaggagtgaagctgcagacctttgcagtaagtgtcacagctcataaaagaagtgcggacctaaagagtgagcagcagcaagagacaatgtatttcaaaggcattgaagcagggaaggttccctattttcctcatgcagatactatcatctattccatctctacagcaatttgcttccaggcattttcatttatatttactaaaagaattctcaaatttaatactcaggctgtcatggaagttcagactttgagaccatcttactggaagttccttttaagactcaccaagggcaaatttgctgtcatgaaccgaaaagtccttgatgtttttggtactggtgcatctaaacactttcaggatttcatccccaggttggatccaagatacacaactgtaacaccagagttgcccacagagttttcctga

SEQ ID NO: 116511 - DNA, 816 bp, Homo sapiens
atgagtcaagtaaaacaggcgtcctctagaagctggaaaaggcaaggaacaaattatctccctggatctccagaaagaacagagcactgccaacaccttgattttagtcctgtaaaagtcatttcagacttccatccttcagaacgaccacagtggaataaaactggaaatcaactccaaaaggaaccttcaaaaccatgcaaatacatggaaatttacctgctcctgaatgagcattgggtcaaaaatgaaatcaagattgaaattaaaaaagtcttcaaactgaatgataatagtgacacaacctatcaaaacctctgggctacagcaaaggtggtgctgagaggaaagtccatagccctaaatgcctacatcaaaaaatctgaaagagcacaaacagacaatctaagaattaaaaacaaaaatctcatggtcatctcaatagatgcagaaaaaacatttggcaaaatccaacatccctttatgattaagactctcagcaaaatcggcatgcaggggacatcccttaatgtaataaaagccatctatggcaaacccacagccaatatactcaatggggaaaagttgaaagcattctctctggaaactggaacaagacaaggatgcccattctcactacttctcttcaacttagtactggaagtcctagccagagcaatcagcaaagagaaagaaataaagggcatccaaatcggtaaagcgaaagtcaaactgttgctgtttgctgatgatatgattgtttatgtagaaaaccctaaagactccagaaagctcctagaactgagaagagaatga

SEQ ID NO: 116512 - DNA, 534 bp, Homo sapiens
ccaactgcgactgcagaggaacaggcagatgaacctgatggcccccttcctggctcagacaatggccaagaaaagaacgtaagattatctccagccaaaatgtcaaccaagaattctaccgatctagttgaatatgttgacaagagtcatgcttttctccccatcattccccacacccatagaggcccgctagaagacagactgaacaaccaggcgcgtaccatagctttccttcttgaacaagcctttcgcatcaaggaggacatctctgcttgcctgcaggggacccatggctttcgaaaagaggaatcgctcgccaggaagttactggagagccacatgcagaccatcaccagcatcgtcaaaaaactcagccaaaatattgagattttagaagaccaaataagagctcgagatcaggcggccacaggaactaactttggcagtacacgaggttaaacatcaaacaccttacaagggagttgggagatcttcgaggaagagtagccagatgtgattcaagcattgtgaact

SEQ ID NO: 116513 - DNA, 923 bp, Homo sapiens
cagaacagcgttgtggaattcgagaaattcaagctggctgcagaaatttgcacaagtaaggaggaactgaatgttaatccccaagacaatggagaaaatgtctccagggcatgttggaggtcttcatggcatcccctcctatcacaggcctagaggcctaggagaaaatggttttgttgaccaggcccgggtccctgtgctgtgtgtagcccagggacttggtgccctgtgtcccagctgctccagctgtggctgaaaggggccaacatagagtttgggccgtggcttcagagggtgcaagcccccaagccttggcagcttctatgtgctgttaagcctgcaggtgcacagaagtcaagaattgagatttggaaacctccgcctagttttcagaagatgtatggaaatgcctcaatgcccaggcaaaagtttgctgcaggggagaggccctctcagcggcaggggagagaacctctgctagggcagtgcagaagggaaatgtggggtcagagcccccacacagagtccacactggggcactgtctagtggagctgtgagaagagggccactgtcctccagactccagaatggtggatccactgacagcttgcaccatgcacctgggaaagccgcacacactcaatgccagcccgtcaaaacagccaggagcggggctataccctgcaaagcctcaggggtggagctgcccaagaccatgggaatccacctcttgcatcagcgtgacctggatgtgagacctaaagtcaaaggagaacattttggaactttaaaatttgactgctctgctggatttcggacttgcgtgggccctatagcccctttgttctggccaatttctccccttctaaatggctgtatttatcaaatacctgtactcctattgtatctaggaagtaactag

SEQ ID NO: 116514 - DNA, 412 bp, Homo sapiens
atggctgaaaggggccaacatagagctcaggccatggcttcagagggtgcaagcctcaagccttggcagcttccacttggtggtattatgggtgatgctaagaccacacagccaaattcaatggagagtaacgaagaagagcctgttcacttgccttgtaaccactccacaatcagtggaactgattacatacattggtatcgacagcttccctcccagggtccagagtacgtgattcatggtcttacaagcaatgtgaacaacagaatggcctctctggcaatcgctgaagacagaaagtccagtaccttgatcctgcaccgtgctaccttgagagatgctgctgtgtactactgcatcctgagagaccacagtgggacagatggggctgcagctgtgcaatatctccctg

SEQ ID NO: 116515 - DNA, 394 bp, Homo sapiens
ctatgtgacatatctgctccccctttgcctttgccatgattggaaacttcctgttgcctctccagaagcagatgccactatgcttcctacacagcctgcagaactgcccacaggcctaggaggaaaaagtggttttgtgggccagccccagggtccccgtgctgtgtgcagcctagggacttggtgccctgcatcccagccactccagctgtggctgaaaggggccaatgtagagctcaggccatggcttcagagggtgcaagcctcaagccttggcagcttccacgtggtgttaagcctagcacctactttgtgccagactgttcaaggcactaaggaaagagcaatgaatgagaaagatcaagaacctacttttgtggtactttcagaatga

SEQ ID NO: 116516 - DNA, 956 bp, Homo sapiens
tcaggagcacagcggacaccctgctggatctggagggatgggagtcagcagcgggtctgcgagggcggcaaacagatacaattttgagcccctcttgcctctatgctcctttttcctccatttgccatatggacacagaagatccaacaggagactctcatgctctctacaggatagcggaaccacaagatggaaacaattctggattccagagtcaactcctgatagctgcccaccaaacacactcattgatcttttaccttctttcctcccacagcagatggaccaccaagaatgccttgctcttggggtacatccatccagtgagtggtctcttggaatggatataagcaaaatggctttaactttgctaccttctcctttgtctaggtgtgtatcagacaccctggtgcatccctttccagtgcccactgcttcctggatttgtaacttcagggaaatagagcagctgccttgagctgactcactcagagtacactcacaaaaacacagcctcccagcagcaaacttctacctgggcatccaggcatttccatacatctcctgaaacctaggaggacattcccaaacctcaattcttgacttctgtgcacccacaggctcaacaccacatggaagctgccaaggcttggggcttgcaccctctgaagccacggcccaaactctatgttggcccctttcagccacagctggagcagctgggacacagggcaccaagtccctgggctacacacagcacagggacccgggcctggtcaacaaaaccattttctcctaggcctctaggcctgtgataggaggggatgccatgaagacctccaacatgccctggagacattttctccattgtcttggggattaacattcagttcctccttacttgtgcaaatttctgcagccagcttgaatttctcgaattccacaacgctgttctg

SEQ ID NO: 116517 - DNA, 1068 bp, Homo sapiens
  misc_feature (1)...(1068): n = a,t,c or g
ttttttttatgctcaagatttaccatttcatcaagaggtcttcaacactnatccaattgtgcaattatcattctacacacaggccagtgaataaagggagtaaaaaaaccacagcccatggatcgggagaccaaggtnccctccagaggagtcccagtgggtcccagaagccctttggatgttggtccagaggctcctcttgggcagagatcacagcagcagcccaacaggtctggtgaaatccttaagagttctcatggacaaagtttgtgaaggcatcttagacaagatcttgtctttgctggttttatgatcctctgcagatgggtctattctcattatctcagccacctttcacttcctatcagttcagttcaggtctctcatgatcccaggcagcagtagttgttatcatgtgagttcattcatatatgtttatctctttggggaagggggggaacaaactttcactgtggaccttaaattcctactggagatgagtgaacccccattttaaagacaacatgaatcacaaattaattatcacatatccagcagggcagacaatagctacgacctggggctgaaagcaggtaactccatttattctgcaaaaattctgtcttgattatggtgccagttgctgtgagggatttcctttctagaacctgtttttcacaaggtttgagtctgaactgttaacattctactgatttctgggtgaagggactgactgcaccatcctagcctgtcaaagcacttgccccaatacttccactttaagagttttccaccttggccaaaactacagtccactaatcccctcattttcttttttaagaaaataaacaggccaggtgcgggggctcacggccagactttaaaaaaaaaaaaaaaaaaaactactgggggaaaaaggattttatgtttagaaaagtctacacttcttgatacaactaactaaaaaaagcctgatacactaaacaaaacccaaataatgtcttccctaaaagtgagtaacttgaaaagcaattcgagcaaaaatcaaggggttcaattataaataag

SEQ ID NO: 116518 - DNA, 537 bp, Homo sapiens
atgagagttgaaaaactacctcttgggtactatgctcagtactgggatgacagaatcatttgtaccccaaatctgagcatcaagcaatatacacagtcaggtcgctcagctgcaggtccgttggagtttgctggagttccactccagaccctgtttgcctgggtatcaccagcggaggctgcagaacagcaaatactgcagaacagcaaaatattgctgcctgatccttcctcaggaaggctgcagcttcccaggttgatcccagactactgcactagcagtgagcaaggttccatgggtgtgggacctgccgagcccggcatgggagggaatctcctggtctgccggttgctaaaactgtgggaaaacacagtatttgggcagaaatgtaccattcctccagaccatttgcagctgcaatttgaaagtgatgtattctatgaagttcctgatactgccaagagcagaggctgggtttttgtggccttgatgattgttagccaaacacttgaattactggacttcaccaaagtataa

SEQ ID NO: 116519 - DNA, 798 bp, Homo sapiens
atgcaaacctggacttataaggagtcagcagttggtagtggggacagaggtaaaaagtgcatagagcgaagccaccagttagctgaatccaataaacagacatttgaggtagagagtgaattaaagcaccttgcgccagctttcccacctccgggttccctgggcaaagaaggagctttgtgggcagaagttcaagcactcctgaagagtgtggccactcggagcttggcaggaatgaggacaaagcttccagaggaaggatcaggcagcaacatttgccgttctgaaatatttgctgttctgcagcctccgctggtgatacccaggcaaacagggtctggagtggacctccagcaaactccaacagacctgcaggaaatacagagaacgtcacaaagatactcctcaagaagagcaactccaagacacataattgtcaggttcaccaaagttgaaatgagggaaaaaatgttaagggcagccagagagaaaggtcgggttactcacaaagggaagcgcatcagactaacagcagatctctcggtagaaactctacaagccagaagagagtgggggccagtattcaacgttcttaaagaaaagaattttcaacccagaatttcatatccagccaaactaagcttcataagtgaaggagaaataaaatcctttacaaacaagcaaatgctgagagattttgtcaccaccaggcctgccttacaagagctcctgaaggaagcactaaacatggaaaggaacaactggtaccagccactgcaaaaacatgccaaattgtaa

SEQ ID NO: 116520 - DNA, 861 bp, Homo sapiens
atggataaattcttggacacacacactctcccaagactgactgagcaagatattgaatcactgaataaaccaataacaagttccaaaattgatgcagtaataaatagcctaccaaccaaaaaaagcacaagaccagatggatttgcagctgaattctaccagaggtacaaaaaggagctggtatcatttattttaaaactgttccaaacaattgaaaagtcaggtccctcagctgcaggtctgttggagtttgctggaggtccactccagatgctgtttgcctgggtttcaccagcggaggctgcagaacagcaaatattgcagaagagcaaatattgctgcctgatgcttcctctgaaagctttgtctcagaggggcactggcctgtatgaggatacaccgcacaatgaatttgctggaaatatttctgcgctggctgatgcggaaaatatttcacgtaagattattacccgctgtatcaacaccgccaaattgcctaaatcagttgttgctcttttttctcaccccggtgaactatctgcccggtcaggtgatgcacttcaaaaagcctttacagataaagaggaattacttaagcagcaggcatctaaccttcatgagcagaaaaaagctggggtgatatttgaagctgaagaagttatcactcttttaacttctgtgcttaaaacgtcatctgcatcaagaactagtttaagctcacgacatcagtttgctcctggagcgacagtattgtataagggcgataaaatggtgcttaacctggacaggtctcgtgttccaactgattgtatagagaaaatcgaggccattcttaaggaacttgaaaagccagcaccctga

SEQ ID NO: 116521 - DNA, 1191 bp, Homo sapiens
ccggtctgcaggaattcggcacgagaatatactcctgaccaaacactgacttttcctgcagtcttagcaaccgacagaccaggagataccctcccatgcctgcttcagcaggtcccgcacccacagagccttgctcactgctagcacatcaatctgagatcaacctgtgatgctgcagattggtggggggaggggcacccaccattgctaaggcttgagtagctcacactgtaaacaaacctgctgggaagctcaaactgggtggaccccacttgcagctcagcaaggcctactgcctctatagattccacctatgggggcagggcatagcttgaataaaaggcagcagacaacctctgcggacttaaacatccctgtctgattagctctgaagagagaagtggttctcccagcatggcgtttgagctctgagaatggacagactgcctcctcaagtgggtccctgatgcccgtgaaatggaactgggagacacctcccagtaggggtcgacaaacacctcatataggcagctgcccctctgggacgaagcttccagaggaaggatcaggcagcaatatttgctgttctgcaatatttgctgttctgcagcctccactggtgatacccaggcaaacagggtctggagtagaactccagcaaattccaacagacctgcagctgagggacctgactgattgcagctcctcaccagcaacggaacaaagctggatagagaatgactttgacgagttgacagaagtaggctttagaagattggtcataacaaacttctctgagctaaaggaggatgttcgaattcattgcaaggaagttaaaaccgtgaaaaacgggattataaacgcaccaatcagcaccctgtcaaaacggaccaatcagctctctgtaaaacggaccaatcagcaccctgtcaaaacagaccaatcagctctctgtaaaatggaccaatcagcaggatgaggcaagctttcttgaagaattctcagacagccaactgtatcaattccttactggaaccacagttatagagcacgtggatgtaggagtacaatggagagtgctcagtgagggccaaaactactggggaagctggggttggcttcctggagaagactgcagctttgtgccagcagacagcaggtggtttattgctgtgtacctggtacacaaag

SEQ ID NO: 116522 - DNA, 339 bp, Homo sapiens
gcgcgctgacaggcgccgcggggcacgacaccgtgcccacaccagacgcggagggatggatctgtccgcctgggtcctcccgccctgcgggccggagcgcgcggcgggagagccgggggagcgctctcggagggagcgcgctttctttggagtcggcgaaacccgggtgagttcgaagagcctgtgcgagggtctgcgggcaccgggcgccgctggggggactctccggcctttcctttttgtcctgttctctccgcttccgttaaccctgcggaccttccgtccgcccctcggagggaagcctgctagctcgggaccgcttcagcaccctgctgtgct

SEQ ID NO: 116523 - DNA, 495 bp, Homo sapiens
ccagtctctgacttaattggtataggcaaggatccaagcatggttattttaaacgctctccagaggagagcattcttatgtgcagccaatgttaagatccccagattgagaataaaagttaaaacaaaagaagctagtgctcaggtagtcaaagaagagtgcaataagtacttgctgttccttcttcctgttccttccgctggccttcttccctcaattatggaaatagctgatcccttttcatcattcgggtctgaggacaaatgttataccctcacaccgcccctcccgcgacatactgagaaatcgagtgactctcaagagaaaggccattttgaggctggggtcgaaccaaaatccagggggtccacaccaggtcagtaccccggaattggctgttttgcaagatttcgggagtaccaaattggcatgagacatttgacaacgaggccagccatgcaccgagctcaggttttatttccgttgtccttctga

SEQ ID NO: 116524 - DNA, 239 bp, Homo sapiens
atggtcaacaagcggggatactcttgcgtccggacagcctcttatgagggcaaatggtcacagggcacactggcacagcgtgcaggacccaactcctcagctgagcgggtctctccccagaaacaaactcgcattcgtaaccggcatcttggccttgcgctgggggtgacccgcccaagccgccatgaagggacgcttgcacaaagtgaagcccaggtacaaacagcccgacgggaaac

SEQ ID NO: 116525 - DNA, 751 bp, Homo sapiens
tggcccttctgggtggtaggtgggcctgcccagggccatttttctggtcctggccctcactcattctgatgcctgagctcatggtccagtggtccatgggggttcaggttcagggagatggtatggcagtgctctctgatttggtccactgtccacctcctgcaccctcatcctaagggtctcatcagtgtggctggtagaagagttctcgggccagggaggaaggcactcagctgcctgccaccaacccttttctcctgcctgccttgcagatttgaaattgatggctcttcccccagcatgtccggttgctgtggggaggattgctcctatgagatcctgagccggaggaccaagtttggggacagccatcactcccacgcgggtgggcactgtggtggctgctgccactgaactctcagagccactttcaagtcacaatgctctctcctaaggcctttcctctttcctggtctcactgttcaccgggtgtcctcagagctgtggcctccccagccctgcacgtgccaggctgcgccctgagagcacagaaccctggggagaagtggtatcagctgctcctcctctcctaggagaccagagtgctagaagggaatgaaagggagagggaagagtaggtggggccgggcagtgaagctcatcctccacagtggctgcctcctcatttggctcctggggcctgcagtggaggttctcgcacctctgcagcccctagattcctgctcgtgcc

SEQ ID NO: 116526 - DNA, 531 bp, Homo sapiens
cattgcagtccacagataagagaaccaccatccagagagaggaagggctttcccctaaggtcgcctcatttcttagagcagggactgagattttgggaagtgaacatccagcacgaggatccagaaggaggaccactgagccttgtggccctgggagaagggaatggaatcttggctcatgtgggtgggagtgacccgattttccaggtgcgtccgtcacccctttctttgactcggaaagagaactccctgaccccttgcgcttcccagggtcattgtgccaaagagtcatccattagtgacaagaatgactggaaaactgtttccaacgccttttctgtcattgattttactgaagctgacctcgaggtgatctgcccgttgacactagaactctctgtctacgctagagatgcaatggcaaaggctgtttatggacgaacgtttacttggctggtcaacaaaatcaattcctccttagttaacaaggttggtcaacgcattttggatcccttgctcttgctcacgtaa

SEQ ID NO: 116527 - DNA, 812 bp, Homo sapiens
ttcgtacagtgcggtggaatttctttctccaaaagtagaccaactgcaaggctcagtgcctgttgtttacctaggaggtgattccaggaagaacatttgaggaagtgggtaaagtcattaaaggacatgtgttatgagtgggttattaccactgtgggcagctgggctctcctgtgccagaggaccctctggaaaccacacagaacataccagaagctgacactcaactcctgtccaacccctattgttgaaggtggcctggagtcattcccatcccccaactttccaagctgcatttcctggtcctgagaaagccctcatcaagagtaaatgagaaacacagacacctgagaagatggggactatgagatcttacggcatctcaaagggcagaagtctggacaggaagaccagttgcatagtggaggattcccaaggtagaccacgtgtgtgccagcccagcaggcaaactgccccgtatgagtttgtccatcaactgtgcgtgcagatctttactcgcatgcatgacacaggaagcccacgggacacttccccagcacgccccgcttcctctgcactcctggaaggaagacctgttcttgcttcttccgtactctcaggatctggcacagaacccgacaaaggaaatatttaatgaactatggcgtaagcctgggcctgaacgacaccctggggacccagcagcagcaaggtgcaacttctgccctcagcaacctcagggtctaatggacgcggcacagtggggcagaagtgacacccaagaagcttaggatttagaaggccggttcgac

SEQ ID NO: 116528 - DNA, 1318 bp, Homo sapiens
ccggtctgaaaagcgcaatattcgggtgggaggacccgattttccaggtgcgtccgtcacccctttctttgactcggaaaggaactccctgaccccttgcgcttcccagtcatggcaaactttccagttgctccttgccaaactcaagaataaaagggcccaagctagagaggctgtcctcacaagcatagctgctgggggcttccactcattttcctctgaaacaacagagaaagagccatctctcattcgcagagcagcccaaggccttctgaggagacagactctggctctccgcacccagctcccgcaaaaggaagcatcaagaaaagaagaggcaaaggcggaggatagggtggaggaaactgccctgcatttgcctgcaagctctgggggttattttgcagaacaaaatggcaaaatggagaaggtatgtgaaactcttgaaaactgtaacacacgggaaacacaggtgctgatggtgctgctgtgccctggtgtcggtggctggcaggtgctcccagaaggcactgagccagccagcagtgactttcactatttccctgtcacatgctacttgcctgtctgtggccaagctcagccatttccaagcaaaattgagcaatcttgcaaacaaggtcacccatcagcagttgaaagtgcttttggttcattcactaaggtgcttataaaaatagctaagatacacattttttacagtggtattgtgagtgatgttcatgtgactgagcgtccagccagaggggcatcctgctggactacaacaaccagagacttatcttcatcaacgcaagagcgagcagttgctcttcatcatcaggcacagctagaaaatctgaactggatctgtaactgccttactagagccctggaggccattaccaccctgattgcagttccagcagttgctggcaagatgagtcttggtgaaactggagaagtaacttgctgctttgtggagaatgttatttcactttctcaatccttgaaaatgttatcctcagctgggctctcctgtccagaggaccctctggaaaccacacagaacataccagaagctgacactcactcctgtccaacccctattgttgaaggtggcctggagtcattcccatccccaactttccaagctgcatttcctggtcctgagaaagccctcatcaaggaagcagaaagaagggtgggcgatgggcacaaggttactccaagaaaggccactgtcctagcgcttctgaagtttacgataatgcagtcaaagaatgcagcagagtgcctggcgtatgataggaagcaatag

SEQ ID NO: 116529 - DNA, 815 bp, Homo sapiens
  misc_feature (1)...(815): n = a,t,c or g
atcaaagcatttgggtcaagagttcacagagacgctgctctcatctccaccagaggaaccagatttctcttgttgagagaaacagctcatcctgctctacacatttcctcaagtgggacagcgatcatctttggtgagaggagacggctgacggaaatcccgtcagtgctgcgcgaggagctgccttcctgtggccagcattactgggaaaccacagtcacagactgcccagcatatcgactcggcatctgctccagctcggctgtgcaggcaggtgccctaggacaaggggagacctcatggtacatgcactgctcctgagccacagagatacacatttttctacagtgggtattgtgagtgatgttcatgtgactgagcgtccagccagagtgggcatcctgctggactacaacaaccagagacttatcttcatcaacgcagagagcgagcagttgctcttcatcatcaggcacaggtttaatgagggtgtccaccctgcctttgccctggagaaacctggaaaatgtactttgcacctggggatagagcccccggattctgtaaggcacaagtgatccttggctttcagaatttgcaagaacagcgatttgaattttgggggggtctgctgttcattcctttaggtgctatacattattcaaaaagtctcccgcgcatttgcactaatgatggctgcatgcatagcaatcagcatgtgagcaaaatcgacaagaaaaccttgactttacagagcagtgtgtgagtaaacagaatgaaaacaacaacctccactctttagntnatataaggtt

SEQ ID NO: 116530 - DNA, 3193 bp, Homo sapiens
ttaagagccaataagtggttcactgagctctccactgcccaccccccaccccttgcctactgccatcaccttgcaagagatagtgatgttctggacggagcctgctctatcagcctgggtccagaggagatgatagaagagtgcaggtctgtgtctgtgctgcttacttccaacaggccctggctgatgagcctcagtgtcaagaactccaggcaattgactgagggggctcagacaggaagaacttggtatggggagagaggagaggagaggagaggagagccgaggggaggggagaagaggaggaggagaggggactgaaatgacttggggaaaatggcagcatcccacacagccagggtttggtgtgtaggtgtctgccgctgctgttcgacactcaaatgcatattttatccattttctggagctagaatccgggggctctatccccaggtgcaaagtacattttccaggtttctccagggcaaaggcagggtggacaccctcattaaacctgtgcctgatgatgaagagcaactgctcgctctctgcgttgatgaagataagtctctggttgttgtagtccagcaggatgcccactctggctggacgctcagtcacatgaacatcactcacaataccactgtagaaaaatgtgtatctctggcccacactcagcccagacccctttggactctggtggtaactcccctcaggactccttgccccagactggccacattcttcctggctgcccctcttcactgtgtcctgcaggtggtcccacccaagttctgacaccacttctcccattttgccattttgttctgcaaaataacccccagagcttgcaggcaaattgcagggcagtttcctccaccctatcctccgcctttgcctcttcttttctttgatgcttccttttgcgggagctactctggtggagatgagagcagcttcactctgttcacttgtcccaaatgcattgatggccctcacatagaaaaagtagttatcattgggttggaggttaactttcagctggagtcctttgattccagagaaagatctggaaaatcgggaaaatcgggtcactcccaccccgaatattgcgcttttcagaccggctttaaaaaacggcgcaccaccgagactatatcccacaccttggctcagaagggtcctacgccccacggaatcgccgcttgattgcttagcacagcagtcttgagattcaaacttgcaaggcaagcagcgaggctgggggaggggagcccgccattgcccaggcttgcttaggtaaacaaagcagccggggaagctcgaactgggtgcagcccaccacagctcaaggaggcctgcctgcctctgtaggctccacctctgggggcagggcacagacaaacaaaaagacagcagtaacctctgcagacttaaatgtccctgtctgacagctttgaagagagcagtggttctcccagcacgcagctggagatctgagaacgggcagactgcctcctcaagtgggtccctgacccctgacccccgagcagcctaactgggaggcaccccccagcaggggcacactgacacctcacacggcagggtattccaacagacctgcagctgagggtcctgtctgttagaaggaaaactaacaaacagaaaggacatccacaccgaaaacgcatctgtacatcaccatcatcaaagaccaaaagtagataaaaccacaaagatggggaaaaaacagaacagaaaaactggaaactctaaaacgcagagcacctctcctcctccaaaggaacgcagttcctcaccagcaacggaccaaagctggatggagaatgattttgacgagctgagagaagaaggcttcagacgctcaaattactctgagctacgggaggacattcaaaccaaaggcaaagaagttgaaaactttgaaaaaaatttagaagaatgtataactagaataaccaatacagagaagtgcttaaaggagctgatggagctgaaaaccaaggctcgagaactacgtgaagaatgcagaagcctcaggagccaatgcgatcaactggaagaaagggtatcagcaatggaagatgaaatgaatgaaatgaagcaagaagggaagtttagagaaaaaagaataaaaagaaacgagcaaagcctccaagaaatatgggactatgtgaaaagaccaaatctacgtctgattggtgtacctgaaagtgatgcggagaatggaaccaagttggaaaacactctgcaggatattatccaggagactttccccaatctagcaaggcaggccaacgttcagattcaggaaatacagagaacgccacaaagatactcctcgagaagagcaactccaagacacataattgtcagattcaccaaagttgaaatgaaggaaaaaatgttaagggcagccagagagaaagaggtctttgttccagagggaggaaccctgccacgaggaaacacaacaatgattccattaaactggaagttaagattgccacctggactctttgggctcctcctagctttaaggcaacaggctaagaatggagttacagtattggctggggtggttgacccggactatcaagatgaaatcagtctactactacacaacagagaaatcctcaatgttagtacattacagcaaagctatagttctggggaaaagcaggtatcttttttgatctcagactgctgtgctagcaatcagcgagattccgtgggcgtaggaccctccgagccaggtgtgggatatagtctcatggtgcaccgttttttaagtctgtctgaaaagcgcagtattcgggtgggagtgacccgattttccaggtgcgtccgtcacccctttcttcgactcagaaagggaactcctgaccccttgcgcttcccaaaaattcagaagctgctcaaactccagtgcagtcatggagcctccattacctgggaggcagcctccaagcagcatgcagccttgtcagaaactgcaccgccaagggtgagaatggcattagaagcaaagaggaaagattcaaacaggaacgagaatttggacaagcgaacactctgtgctgctcaagggaagagcacagtggaagtccaagggcgagtgtgtgcccagggcagggcaactgggctatgggctgattcccgggatgcatga

SEQ ID NO: 116531 - DNA, 650 bp, Homo sapiens
attttatagaagtgtgaacttgtataagcagctgttctgtgtccaaagacttgggatttgggcttgcagggttggactttgaacctaagcctgcagcagacagggcagcttgattcactcttcctgccattatttttcatttaattgcagaataacgagtgctctgttcatgaagtccaggaattgctaatataacaatggtgaatgcagtggcagtgcacgacttcaattttcatgattactattcattagcggtctgtcaaatggatagaataggctcttttcttctctaccagctagcaaagggcactgtacccgagagaagttgcatggcaggaagagtgaatcaagctgccctgtctgctgcaggcttaggttcaaagtccaaccctgcaagcccaaatcccaagtctttggacacagaacagctgcttatacaagttcacacttctataaaatcaggtgaggacaaatggacgatgatgcagcaagtacactcctggtggacttatgaattcttatttggtgagatgtctgcctcctcctgctcactcactgtgctagagctacaccagttggatctcaataactatcagcgtcacatgcaccaaaggtctactaaacaagaagctagaccaccaagctcttga

SEQ ID NO: 116532 - DNA, 234 bp, Homo sapiens
atggcccgaggcagagcacaggcaggggcggtgttccctgggctcctcctgcagctgcagcagccgccgccgccgcggtctccggctcccgcagcccgaggccgatcgctccctgccgcgctatttggtgtttcatcagcttttgaagattacaaactcacatttaatgttatgggtgcagaaaaaggccaaaaacacaaaaagagtggcaacgagggacaggaactttcatga

SEQ ID NO: 116533 - DNA, 426 bp, Homo sapiens
tcagtaatggcagacgtctctctccccatcaagcttgatcatctcaggttgacttcttactgctgtgctggcagcaagaatttcaagccagtggttctcagcttgctgggctctatgggggtgggacctattgagcaagacaacttggttctctggcttctgcccgctttccaggtgagtgaacagttctgtctccctggagttccaggtgccactggggtatgaaaaaaatactcctgcagctagctcagtgtctgcctgaacagctgcccagttttgtgcttgaaacccagggccctggtggtgtaggcacatgagggagtctcctggtctgcggattgcaaaaaccatgggaaaagtgcagtatctgtgctggttagcacagtccctcacagcttcccttggctgggaaagggaggctcccat

SEQ ID NO: 116534 - DNA, 1035 bp, Homo sapiens
atggggcctgctgtggctggcatggtgctactagaagccccaggtagatgtgatcagagtggcactggtgtatcagaagcccatgttgctgagggttacctgtcactgagagttgcttcaacagtgactaaaagggaccaaggtacaactcaggccgtaacttcagagggtgcaagccccaaggcttggcatctttcacggggtgttgagcctgcaggttcacagaagtcaagaattgaggtttgggaacgtctgcctagatttcagaggatgtatggaaacacctggctgtccaggcagaagtttgctgcaggggcagggctctcatggagaacctctgctagggcagtacagaagggaaatcgcattgttggcaccgcagaaccagaaggcggtgacccccctggacgcggctttcactatcttgttagtcgacgcagcagttgcgcgaccagcgaaccactacgatcgatagaggaggcaccagagaacaccacatatatatcctactttcagcagctgcgtgaagcaacttccgccgtcgttaccgacaccacacggcgctatctcgatatgtaccagctgtgtagatattggctctcctctataagaggaccacgtaccttcttaagtcagctgagtccagtgtcggtgccggagctaactaatcaaggtcgagatagcagagtgtcagttcaggattttgaccctcctcagccgacaataagaggcttaggagggaaaaatggtttcatgccaggcccagggtccccgtgctgtgtgcagtcaagagaatttttggtgccctgtgtcccagttgcttcaacagtgactaaaagggaccaagttacaactcaggccttaacttcagaggttgcaagccccaaggcttgccatctttcacgggttgttgaccctgcaggtccacagaagtcaagaattgagttttgggaacgtctccctagattccagaggatgtatgaaaacacctggctgtccaggcagaattttgctgcagggccaggcctctcatga

SEQ ID NO: 116535 - DNA, 564 bp, Homo sapiens
atggtgtgggttgaagccaaaagaggagtggggccttacgagccctcggaagattttcctcatactgggggcactgggatgttgttggagagtaatttagcaagtgggataaagctgtggttggatgtggccaaggaggaggaatcatcgaaaccagggcctgctttgccagtggtggttctctccagtggcaggagctggtgctcagcaggttctgaatgtccctgctttctgtgctacttcctaaaggctgtgggagatgggcaaaatatggatcttgccctggagaagctctcagaagggagacagatccatgagcagtttctgcctcctgcagcaggaaagagagcatctggcaggatcattgtgaaagcaaagaggagagaggagagcagggttttccatgactatgaccacccccgtcaccactacactgtcaccgtcatcacgcccaccgtggcctccaccactatgaccacctctgtcactgtccaccccaccacagtaattacactcaccaatacaagatttcctgcgcaggacacatgcagtttctgtctttag

SEQ ID NO: 116536 - DNA, 894 bp, Homo sapiens
atggaggaagcagccatgcctgatgtgtgcgatgaatatgccttatcctcccgaaactggctttcccaaccaaatagttcctttcaaagcactgaaagcacccatgatgctgtgcctgggtccttagatttcatcgtgcatgttgctgtgggggaaatgtcagccatcagcaaccataagctcattcctaaaaaaggacagtttgccttcagttcaggaataaaacttaggttcttctcctgcatcaggacagtacatataactttcggtgtgggagacacaggctcaagaggccgagaacttgcttgcatggagcatggacggacagacagctggatggaaggtttctcacattactgtatttcccacaccgagcacctttcatctaaggagctccacaccatctcatacgtgcctgaggtctggctgctgactgctcctacgagatacatcacaggagcagacttccccaacatgccaacaattaatgtccaggttcaggagaaaactggatttccttcaaatgctactggagaacattccagaagaaaaaaggccacctgcttgtctgctgcccagcgtcagcaccggcagcggcagagggaagagatgagcacatccttgatagaccacaccagcttgcctgcaaggcccttcagccttggggagctggtgcccatcttcacaaagctcgcagcagatgacacctctgctgtcgtgggctctccccacttcacctcactactaccctttgttgtgctgctgtcaaacagcagctccacgaggggtacccaggccaggccacaacaggatggggacctgctctaccccacaaacactcaaaactgtgttgtactcatcgctggtggcacaggtccacccacaacagggtag

SEQ ID NO: 116537 - DNA, 207 bp, Homo sapiens
atgaatatccctgataatatgcctgctttcagtggacatggatatacaagcatatttgatttaaaagcaaaaaggagaagagggaagaagaaagaaggggaagaagagattgaagaagagaaagaacagccaaaaggagaagagctggaagtagacagttcttgttctcagtttgagagaaaacgagaaagaaacagtcctgtttag

SEQ ID NO: 116538 - DNA, 2742 bp, Homo sapiens
atgtcctggccgcgccgcctcctgctcagatacctgttcccggccctcctgcttcacgtcctgccccaggtggatggctcgcatagctccacaggctttgtgaacttgtctggctgggccagacctgtccagttgccaaggtgtactcagagccccagtgatcccagaattttaacagtcgggatggaaggcttgcagagggcaaaaagagagaagcttgaaggcttcgtgctggcatttcttgtagggcagctccacaggaatctggaaaataagggtcctgtggctgcttttgcaatcctagtacactttgagaacgtcatgttccacggcttgggccctccggccctccgtagccgctcgactgtcgcgctgcaccagcttcctcctcggcgttcccacgcctatttgggcggattcttggcgccggaggaagaggcagggtcaccctctctccacgtcagagacctgactgtggagatggcggctcagaagataaacgaggggctggaacacctcgccaaagcagagaaatacctgaaaactggttttttaaaatggaagccagattatgacagtgccgcttctgaatatggaaaagcaggtatttttgactatagtccagttgctccagagatgcagaaactaccagaggccgttcagctaattgagaaggccagcatgatgtatctagaaaacggcaccccagacacagcagccatggctttggagcgagctggaaagcttatagaaaatgttgatccagagaaggctgtacagttatatcaacagacagctaatgtgtttgaaaaaacaattgctcaagtcttagttcatctacacagaaatgactatgtagctgcagaaagatgtgtccgggagagctatagcatccctgggttcaatggcagtgaagactgtgctgccctggaacagcttcttgaaggttatgaccagcaagaccaagatcaggtgtcagatgtctgcaactcaccgcttttcaagtacatggacaatgatgagggggaatcaagaagaaatcacctgcaacaccacaggccaagcctgatggtgtcactgccacggctgctgatgaagaggaagatgaatactcaggaggactatgctagtattttgcttgctgaaaagaaaagggaaacaaaggtcagctctgccccatgtctgctgctctcagggcagaacaagggaccacagatcccggtgataggagaaaggaactcaagatggtcttgtaccagcaatgtgctgctcatcccagaaatctcaacatttatcttaattctgatccaagtagtaaaccataccgtggggaacatcagatgcagggcctggctggctggggagcatccttgcagaagcggcatcggaggagcgactcaagccttcgcgaaagaaaataaccaaaaagcatacaaagaaacgtacggcgtctctcatattacacgccatgatatgctgcagatccctaaacagcagcaaaacgaaaaataccaagtgcctcaattcgatcaatcaacgattaaaaatattgagtctgcaaaaggacttgatgtgtgggacagctggccgctgcaaaacgctgacggaacagtagctgaatacaacggctatcacgttgtgtttgctcttgcgggaagcccgaaagacgctgatgacacatcaatctacatgttttatcaaaaggtcggcgacaactcaatcgacagctggaaaaacgcgggccgtgtctttaaagacagcgataagttcgacgccaacgatccgatcctgaaagatcagacgcaagaatggtccggttctgcaacctttacatctgacggaaaaatccgtttattctacactgactattccggtaaacattacggcaaacaaagcctgacaacagcgcaggtaaatgtgtcaaaatctgatgacacactcaaaatcaacggagtggaagatcacaaaacgatttttgacggagacggaaaaacatatcagaacgttcagcagtttatcgatgaaggcaattatacatccggcgacaaccatacgctgagagaccctcactacgttgaagacaaaggccataaataccttgtattcgaagccaacacgggaacagaaaacggataccaaggcgaagaatctttatttaacaaagcgtactacggcggcggcacgaacttcttccgtaaagaaagccagaagcttcagcagagcgctaaaaaacgcgatgctgagttagcgaacggcgccctcggtatcatagagttaaataatgattacacattgaaaaaagtaatgaagccgctgatcacttcaaacacggtaactgatgaaatcgagcgcgcgaatgttttcaaaatgaacggcaaatggtacttgttcactgattcacgcggttcaaaaatgacgatcgatggtattaactcaaacgatatttacatgcttggttatgtatcaaactctttaaccggcccttacaagccgctgaacaaaacagggcttgtgctgcaaatgggtcttgatccaaacgatgtgacattcacttactctcacttcgcagtgccgcaagccaaaggcaacaatgtggttatcacaagctacatgacaaacagaggcttcttcgaggataaaaaggcaacatttgcgccaagcttcttaatgaacatcaaaggcaataaaacatccgttgtcaaaaacagcatcctggagcaaggacagctgacagtcaactaa

SEQ ID NO: 116539 - DNA, 1071 bp, Homo sapiens
atggtggaaggcaaagaggagcaagtcacatcttacatggatggcagcaggcaaagagagagtgaggaagacataaaagtggaaacccctgataaaaccatcagatcttggctcccacatgcaacacccattgtggagcaccaaaatgatctcattgcaggcagtgtgagaatgcagaaccagccaaaaggaagcactctccagtgcattattctcatgccgcaaagacctcctgggcagacattagaagatatggactattattattcctgtttctcagatgagaaaaacctaggtacaaagaagctgagttccttcccatggtcacacagcaaagaagtgaaggccacattcaaaggcaggtatcctggctcccatgcccttaaccgccacaccacactacctggcactgcctggattctccttctaggtggggaacttgcattcctcacagtgaaggatggaagccctttggccttgccctcccgcccagctgatgggatgagaggcagaaccagtgtcatgaatttgattctggaagatcctgaagtggatgccatgaaaaagcaaaaacgcaaaaaagaggaattgagaaccacggcctcaaggacctctctgcgctttggggaaacagacctgatttggtcctcctgggttcctgaaaagaagtcctctttacagccccaggcatctcaccgcctgccgtcaaggcgccagcgccagcgccagagtcaaggcactctggtgcaaccagcctccctggtgctctttgcttcccgttcacaaagcataaaacacacatggaacagcccattctgtgggctcttccttctcgtacgtaacacagacaatccaggcctgctctgcaacaagaatagattcttctggaatgttttccccatggctcaccctcatggaagcacaaaggccatcccacagaggggcacaaaggaaacagctatgacgagcaaggccaacacaacacaaaacaacacccacaagtaccacagagcaacgtgtgctgagtacgcagacttagaggctctccaagaatacagggattgggagtag

SEQ ID NO: 116540 - DNA, 1228 bp, Homo sapiens
ctgcaggcctgagtggactgctcccgggaagccactttcatggcgtcccctctcaagggtgcccatctacctggagcgtcatcatcgtcactgctggagtcatgtctcctgttgccaatccaagctctggagacacaagtaccacaagaaaggtgttacccagaggcacttacccatcctccctgctgcaggggaggccacaccagctgccacagcaactccctgctccgtcctctgctttctcagaactaacctgggctctctggaatcagagaccttcaacaagtcactgctcacatttgcaaacgttcacatcaagagaggaccccctttccacgtgccactcccctctcttccggatcattgcagctctccctaccagccttatcaatgtggggctccaaccctacaggtcggtgattcacaaacaggcactgtcccaggttggagccactgccacgagcctgttctgcacagacgggaatgtttcctctgccttgtgagcgcagggctatcgggcactggaaatatgcctgatgtgatgagtggtccacagaacattggaccaactaaggcattaaagctctacattggggacaatccaggcctgctctgcaacaagaatagattcttctggaatgttttccccatggctcaccctcatggaagcgcaaaggccatcccacagaggggcacaaaggaaacagctatgacgagcaaggccaacacaacacaaaacaacacccacaagtaccacaggtattctttcatcttcaagatttgcaaacaggagcacattaatcttcacaacatccgtgttggggcctatgacaaggttctccgtgctccccagaggagccaggcactgggccgggatctcaacatttatcttaattctgatccaagtagtaaaccataccgtggggaacatcagatgcagggcctggctggctggggagcatccttgcagaagcggcatcgggccttcagagtgtgggccttgtacatttgcactggccacctgcctgtggagctaccgggactccagcacaaggtgtctgagccagacttcagcatgtggaagccaggtgtcaggggcttcagcctaggctgtgtgtccagcagcagccatgagccccctgcttacagacggaatgaaggaaacagggcagagagggcacattgcaagtctgtggagaagcagccacaaggggtgcgacatgagtag

SEQ ID NO: 116541 - DNA, 364 bp, Homo sapiens
actcaaagccagatattgatgtctgcaggatccgtccttctgcacaacccatgctgtcaaccaggagctattctgtccccaccgactcaacgaggcagcaaccagttctgtacatgaagattccaagggatcccaaatggcacgtgttagaacagacacagagaaggcttgcccattgaagattggttcttcagccactgcttttcattctcataccaaacaagtgcatttttaagaactcgcgagagtcttgctactcttcaacagagaaagtcatctccaaattaatccacagtcaggagcacctcgtgctgcttttatatatcattaaagtcctgtaaaagcaagctcacggatctctgcc

SEQ ID NO: 116542 - DNA, 1119 bp, Homo sapiens
atggccctagctccccacggcctgtctccttcaatctggcctctcccctctgtccaggctttagagaaagcagctggtgaggtttccacaacaaggaaaagagaaagccaattcccagaagtattgggttggcagcttctcgagagcccatccctgggttaccggctccctgtgctttcggatggaggtcatgttgctcgtccacataaaagcccattcgagaatcattatcacccaagcagcttccagattggcggcttatcacttctgaagggtcccaaggcggccatggagaagtgccccaaagccttgtttgcttccttgggccaaagtttcctccaagccctaccagcttctctgcttctgcaggaagtttaccaggaaacaggtgcacaaaaggaagaatttgctgaggccctggcaaactggaaactgaatccaggtggccaaggtctaatcctcccctacaccagagtagcaagactctcgcgagttcttaaaaatgcacttgtttggtatgagaatgaaaagcagtggctgaagaaccaatcttcaatgggcaagccttctctgcttccctcttcctcccccaaatgcgaagatgtctccactataattgagcaatcacaaacggccccttccaatgtctcagggctccccgttgaacacccatgtggaataaggagtgaaggtgagctcactgaaatgcactcgatgccagttccaccttccacaccggagcagcgtcccgcagaccagggctggggcctatttgagggagtggagagagaagggttgcgggcttccagccaagctttaccctcactgaaagttcaggttcagggcccagtcccccagcgtgaaaaagggacccttataaagagacacagaacttccctggcagctctgatctgggggcttcctgtaggtgcaaagacctggttcttcagactccatccatggaaggagggaacaccagtcacggggagttcttcattcagtccccagaaagccttgagcacagttagctgtcacctaattgctgacaagcctattcaacgtgaaaacaacaaggatgaaggcctttatgatgatccacttccacttaatgaagagtaa

SEQ ID NO: 116543 - DNA, 585 bp, Homo sapiens
ttaagaaaataaattgggatgcaaattgagaaagatatgtctcatttaaatttttttctaccatttacagaacttgaaggtctcttcacagactaatttcttatctcgagcatggtggttccccatcttttatttttttgagaaaaatgtacaaggctcaattccttgctgcttctcctggccgctgtcttggcctcctggctgcttcaaatcatcatgcaaaaagtattcacgggttcagaagattggtgaagacaatgagaaatcgactctgttctctgtgccagccctttcctttgccaaagcacttgctgtctctgagttggttcggtgaccagggtcatacttcccaatacttcactctttccacacagagaaatgaagcacaactccaataacagggtgagggtgcaagtcagggaccacagaagtcactactgggctcctgaaagcccaaggccacatttgggaaacgatctgcacttctggcaaaagtgcaagaggggcagtggtggccccagaagaaatattttaataaagaagatacacgaatggctaataagcacataaaaatgctctcgtgcc

SEQ ID NO: 116544 - DNA, 504 bp, Homo sapiens
  misc_feature (1)...(504): n = a,t,c or g
atgaacagacacttctcaaaagaagatatttatgcagccaacaaacatatggaaaaaagctcatcatcactggtcattagagaaatgcaaatcgaaagggggtctttagagtcgcccaaagggctttcaagtcctcgaaggtctatccagcctgcagaactcaatacgaggaactgccttaacaagctagatagcaaatatttcatgctttggaggccaagaggtaatataaaggccatgatgaagganattcaagaagtgaaaactcctgaagaactagagacctttatgcttaaacatggagaaaatattattgatactttaggagctgaagtagatagacttgagaaggaactgaaagtcatggcaacagcaggtcagcagctgccgcagtcggaagggtgggcggcttcgcggcacgccctcgtgttctctgaggtgttgctcattgtctctggcctggctctccgcagacaggacacaccactgccactgcggatctga

SEQ ID NO: 116545 - DNA, 470 bp, Homo sapiens
gtgatggcattcaagtgggccactactacagccaaggcaacacatgctagaacctgtcaggtacctggggaatatcagaactgctgtctgatctctgaaattgaaattaatttcctcagtgactcaatacctactgccactcactcaagccctgcaagttcaagccaaatcatcctgccaccgcaggaatgtgatgggtcacgctgctacctactgaaaatggggatttgggttaactagagtaaaatacagtaagaatgggtgagaggagagaaaaagaatacttcagtttaggaagcataatactacttaaaatttcctgagaaagaatttcttcccttggaaggtgcgtcttcccaggaggttgtgtcctcacagggggtgtcctcacaggggaaatagcccacagagaggatcaggttggaattggatttggagctgtcgtcctctatgtcgctgttagaggatga

SEQ ID NO: 116546 - DNA, 604 bp, Homo sapiens
gcactccagcctgggtgacagagcaagactccgtctcaaaaaaaaccccaaaaaacctgtggcttctgccttgtcttctgtccctgggattactccctctgggagaaagcaggtgtcatgtcaaggggacacccaaacagctctgtggagagttcagtgccatgagggactaagatctcctccctacagcctgtgcagccagtgtcgggaacttgagggtgaatccccaagcacagtgaaatcttcggatgacagcagccccagcagcatcttgattgccgcctcccttcctggtgtcacagatcagccaaaacaatctgttgacctcaatcctaaaggtggattgttcgctcttgcctccagtggtttggaacaaaaggcagcactggtaatagcccctgacgaggttcatcttcttaactgtaacagtgaggcaattcaggggcagacagagtgtcccccagagctatgcatggcacaggacatgctcaggccccatgcccactctgacaatgcgcggtgcttggagaagcttcctccccaccggggagataggcagttcctcactcccagagccctagctcaggccaagacttggatctaa

SEQ ID NO: 116547 - DNA, 594 bp, Homo sapiens
atggagagtcgattctgtcagaacagtttctgcctggatatgacaaatgtcgacctggagctgttggggccatctgggcagaaaggctgtccgggaatgaagtcaaagagatggaagaagagaaaaagaggccggcgtctggggtcatggtttgagcccccgaatccaactgtacctgaagccctgtctgtttcagaaacagaaggcaataaattcagcctttgccttaagcccgtcaagccagtctgggcacctgatcagaacctgtggctcatcctctgcaaagtgggcatgaggcaccaccagaggctgcggagtggccagaatgaggcaacatatggagggggtgtggcacacgccttgctgctggggctacctttcacccacatgcaggcttacttgcctgcacccccggcatggcccaagaaccagttctctgagttcagccaggacttccaagaacctagcacagccagggtggttgtgagggccgtaggcagcgacccaacactccctgccatccaggtgggctgcggggccctggttctcaaccctaatggggcctggggctggtctaacgcgcaggggagctaa

SEQ ID NO: 116548 - DNA, 477 bp, Homo sapiens
  misc_feature (1)...(477): n = a,t,c or g
gcccactgccaatttatttatttatttatttatttatttttattgatcattcttgggtgtttctcgcagagggagatttggcagtgtttgtgtccctgggtacttgagattagggagtggtgacgactcttggcatgctgccttcaagcatctgtttaacaaagcacatcttgcaccgcccttaatccatttaaccctgagtggacacagcacatgtttcagagagcacagggttgggggtaaggtcacagatcaacaggatcccaaggcagaagaatttttcttagtatagaacaaaatgaaaagtctcccacgtctacctctttctacacagacacagcaaccatccgatttctcaatcttttccccacctttcccgcctttctattccacaaaaccgccattgtcatcatggcccgttctcaatgagctgttgggtacacctcccagacagggtggtggccgggcagagggggn

SEQ ID NO: 116549 - DNA, 2328 bp, Homo sapiens
atgactcttaaggagcatgctgccttcaagcatctgtttaacaaagcacatcttgcaccgcccttaatccatttaaccctgagtggacacagcacatgtttcagagggcacagggttggggaaatacaaactaccatcagagaatactacaaacacctctatgcaaataaactagaaaatctagaagaaatggataaattcctcgacacatacactctcccaagactaaaccaggaagaagttgaatctctgaatagaccaataacaggatctcaaattgtggcagtaatcaatagcttaccaaccaaaaagagtccaggaccagacggattcaaagctgaattctaccagagatacaaggaggaactggtaccattccttctgaaactattccaatcaatagaaaaagagggaatcctccctaactcattttatgaggccagaatcatcctgataccaaagccaggcagagacacaaccaaaaaagagaattttagaccgatatccttgatgaacattgatgcaaaaatcctcaataaagtactggcaaaccgaatccagcagcacatcaaaaagcttattcaccatgatcaagtgggcttcatccctgggatgcaaggctggttcaacatacgcaaatcaataaatgtaatccagcatataaacagaaccaaagacaaaaaccacatgattatctcaatagatgcagaaaaggcctttgacaaaattcaacaacccttcatgctaaaaactctcaataaattaggtattgatgggacgtatctcaaaatattaagagctatctatgacaaacccacagccaatatcatactgaatgggcaaaaactggaagcattccctttgaaaactggcacaagacagggatgccctctctcaccactcctattcaacatagtgttggaagttctggccagggcaatcaggcaggagaaggaaataaagggtattcaattaggaaaagaggaagtcaaattgtccctgtttgcagacgacatgattgtatatctagaaaaccccactgtctcagcccaaaatctccttaagctgataagcaacttcagcaaagtcttgggatacaaaatcaatgtacaaaaaccacaagcattcttatacaccaataacagacaaacagagagccaaatcatgagtgaacttccattcacaattgcttcaaagagaataaaatacttaggaacccaacttacaagggatgtgaaggacctcttcaaggagaactacaaaccactgctcaatgaaataaaagaggatacaaacaaatggaagaacattccatgctcatgggtagaagaatcagttatcatgaaaatggccatattgcccaaggtaatttacagattcaatgccatccccatcaagctaccaatgactttcttcacagaactggaaaaaactactttaaagttcatatggaaccaaaaaagagcccgcatcaccaaggcaatcctaagccaaaagcacaaagctggaggcatcacactacctgactgcaaactatactacaaggctacagtaaccaaaacagcatggtactggtaccaaaacagagatatagatcaatggaacagaacagagccctcagaaataacgccacatatctacaactatctgatctttgacaaacctgagaaaaacaagcaatggggaaaggattccctacttaataaacggtgctgggaaaactggctagccatatgtagaaagctgaaactggatcccttccttacaccttatacaaaaattaattcaagatggattaaagacttaaacgttagacctaaaaccataaaaaccctagaagaaaacctaggcattaccattcaggacataggcatgggcaaggacttcatgtctaaaacaccaaaagcaatggcaacaaaagccaaaatggacaaatgggatctaactaaactaaagagcttctgcacagcaaaagaaactaccatcagagtgaacaggcaacctacaaaatgggagaaaattttcgcaacctactcatctgacaaagggctaatatccagaatctacaaagaactcaaacaaatttacaagaaaaaaacaaacaaccctatcaaaaagtgggcaaaggacatgaacagacacttctcaaaagaagacatttatgcagccaaaagacacatgaaaaaatgctcatcatcactggccatcagagaaatgcaaatcaaaaccataatgagataccatctcacaccaattagaatggcaatcattaaaaagtcaggaaacaacagggacatggatgaaattggaaatcatcattctcagtaa

SEQ ID NO: 116550 - DNA, 924 bp, Homo sapiens
atgactcttaatgagcatgctgccttcaagcatctgtttaacaaagcacatcttgcaccgcccttaatccatttaaccctgagtggacacagcacgtgtttcagagagcacagggttggggaagaaacagcttccccatccccagtagtggcaagatcccctccaagacccatgctgccatcagcctttccacctttgtctgaggagataaaccctgcactaactgaggcaacagtgatggcctctcctgaggcagctacgaggcaagataatgttgattctcctcaatacccaccccgaacacccttgtgtgcttctagacctataactagattgaagtcccagtgggcccatagaggtatcacactcgttcattacattgatgacattacactgattggatccagtgagcaagaagtagcaaacatactggacttattgcagagacgaacactgagccctcaatatggccctagtcctcagggtgttcagccagttatctggtggcaggttgattatactgggcctcttccattatggaaagggcagagagccaggaatcatgggtccaggaatcaaggagtggaattggaagtggcaacactcaccatcacccctagtgacccactaacaacatatttgcttcctgtttctgtgacattatgttctgctggcctagaggtcttagtttcagagggaggaatgctgccaccaggaaacatagcaatgattcaattaaactggaaattaagattgccacctggacactttgcacttctcctacctttacaccaacagcctaagaagggaggccatgtaaaatgtacctgcttccctttcaccttccccgataattgtaagtttcctgaggcatccccagaagcagaagctgctatgcttcctgtacagcctgtagaaccatga

SEQ ID NO: 116551 - DNA, 2703 bp, Homo sapiens
atgactcttaacgagcatgctgccttcaagcatctgtttaacaaagcacatcttgcaccgcccttaatccatttaaccctgagtggatacagcacatgtttcagagagcacagggttggggacacaccacagacagagaggaggaagacaagaacaaagagaaagagccacagacaaacaaccaagacacaaacacgaaagaaacaaacaaacaagaaacaaacacaaaacaaaacaacaggacaaacacagagagagccccaagaagagaggacgaaaaccacaccccacaacagcaaagaacacaggaacaggaaagcaaagggacacgaggcactaactgacagcaccaaggacggggaggcagagaagaccgaaagaggaagaacgtcgcggcacacagggactgcctgcgttacaagcaggacgggaaacgccggacaggcagacacgggggaccgcgagcgggagcgggcggacgacgagagacccaacgaacaaaaaacagccgaaccgaaggagggagcgaaagcgccgcaagcctatccaaatcaggcagtaagggcagagacagaagctgtgtgcttgggggagagagagaaggaagtttgcagacagctttgccttggaagctactaccagcacccacctcccctccccgccacccacaataaatcacagtactgggtccaactccaaacagtaaagcacaaagagaaattccttccatatgagggaagagaaaaaaccggagatagtaaagaacggaactttcgcttcgcctgcaatcgctttcgccagcagcgttttaccggtacccggaggaccgaccatcaagacgcctttcgggatcttaccgccgagtttctggaagcggctcggctcgcgcagatactcaaccagttcagcaacttcttcttttgcttcgtcgcagcccgcaacgtcagcaaaggtcgttttgatctgatcttccgtcagcatgcgcgctttgctcttaccaaacgacatggcacctttgccaccgccgccctgcatttgacgcatgaagaagatccagacaccaatcagcaacagcatcgggaaccaggagatgaagatagaagccagcaggcttggttcttcaggcggttcaccgacaaccttgacgttcttggtcaacaggttaccaacgaaatctgcggtagcagcgacattctgaacgtgactgaagatcatatggatcgctatccgtttggtttacaacagtatcgtgcagcaaaactgcgcatttacgaaaacgcgaaagtttgcgtggttaatgctgatgatgccttaacaatgccgattcgcggtgcggatgaacgctgcgtcagctttggcgtcaacatgggtgactatcacctgaatcatcagcagggcgaaacctggctgcgggttaaaggcgagaaagtgctgaatgtgaaagagatgaaactttccgggcagcataactacaccaatgcgctggcggcgctggcgctggcagatgctgcagggttaccgcgtgccagcagcctgaaagcgttaaccacattcactggtctgccgcatcgctttgaagttgtgctggagcataacggcgtacgttggattaacgattcgaaagcgaccaacgtcggcagtacggaagcggcgctgaatggcctgcacctgggtggcgatggtaaatcggcggactttagcccactggcgcgttacctgaatggcgataacgtacgtctgtattgtttcggtcgtgacggcgcgcagctggcggcgctacgcccggaagtggcagaacaaaccgaaactatggaacaggcgatgcgcttgctggctccgcgtgttcagccgggcgatatggttctgctctccccagcctgtgccagccttgatcagttcaagaactttgaacaacgaggcaatgagtttgcccgtctggcgaaggagttaggattcagtatcctggtctggatctccacggcgctaaagggctgggtgatgggctcgcgggaaaaagataccgacagcctgatcatgtacgatcgcaccttactgtggctgaccttcggcctcgcggcgattggctttatcatggtgacctcggcgtcaatgcccatagggcaacgcttaaccaacgatccgttcttcttcgcgaagcgtgatggtgtctatctgattttggcgtttattctggcgatcattacgctgcgtctgccgatggagttctggcaacgctacagtgccacgatgctgctcggatctatcatcctgctgatgatcgtcctggtagtgggtagctcggttaaaggggcatcgcgttggatcgatctcggtttgctgcgtatccagcctgcgagactacaagcggtccgctaccagatctacgttggcactgatgaacctgtctccacaaaaaatacaaaaattagccagacatgcagacaacacaaatctaggcgtttgccatttcccacgttgggggtccctttgttgttcgccgttttcggccacgtatcgccctcgactaagttacgggactttttggggaatttaggtttcgcgtggaccggcgagtaccctggcacccacgtctcagattttactcaccgcgttctgtgctttagtgatggagctgtggagtttttgtttaatgatatagcttcagttttacaagataaaaagagttacagagatggatggtag

SEQ ID NO: 116552 - DNA, 1659 bp, Homo sapiens
tgagttcccttagtatttattgatcatctgtgggtgtttctcaaagagggggatgtgtcagggtcacaagacaattgtggggagagggtcagcagacaaacacgtgaacaaaggtcttggcatcatagacaatgtaaaggattaagtgctgtgcttttggatatgcatacacataaacatctcaatgctttacaaagcagtattgctgcccgcaggtcccacctccagccctaaggcggtttttccctatctcagtagatggagcatacaatcgggttttataccgagacattccattgcccagggacaggcaggagacagatgccttcctcttgtctcaactgcaagaggcattccttcctcttttactaatcctcctcagcacagaccctttacgggtgtcgggctgggggacggtcaggtctttccccttccccaggaggccatatttcaagactgtcaacatggggagaaaccttggacaataccctggctttccctaggcagaggaacaaaagcacccaaggaggaaaaagaggcctgagatttccacgaattacaagtgaacttcctgtcctgggtaaacttccggaatcaacaacaggaagacccaatcagaatcttcctccgggagccaatgggagagcacattacaaagagccaatcccagcgccgctgtcactgttatggtcctgtcagggtgccggcgtcgtggtgcttgggtggtcgccaccaagaagactttggtggggtagtctcggggcagctcagcggcccgctgtgcccgtttctggcctcgctcgcagcttgcacgtcgagactcgtaggccgcaccgtagggcgagcgtgcgggtcgccgccgcggccgcctcggggtctgggcccagccgcagcctcttctaccgcggccggttgggagtcgccgcgagatgcagcctccgggcccgcccccggcctatgcccccactaacggggacttcacctttgtctcctcagcagacgcggaagaaagagtctccggggtacagtgaagagtatggattggaaggagacaagaatgactggggggagggcagtttgtacaccattataatcatgcagacaggagttgatggtttgcatgagcttgctactggtggtagaaatgatctcagtggttcaatagcatccccagatgtcaaattaaatcttggtggagattttatcaaagaatctacagctactacatttctgagacaaagaggttatggctggcttctggaagttgaagatgatgatcctgaagataacaagccactcttggaagaattggacattgatctaaaggatatttactacaaaatccgatgtgttttgatgccaatgccatcacttggttttaatagacaagtggtgagagacaatcctgacttttggggtcctctggctgttgttcttttcttttccatgatatcattatatggacagtttaggcatctgtttaacaaagcacatcttgcaccgcccttaacccatttaaccctgagtggacacagcacatgtttcagagagcacaggtttggggacacggcaaccatccgatttctcaatcttttccccacctttcccccctttctgttccacaaaaccgccattgtcatcgtggcccgttctcaatga

SEQ ID NO: 116553 - DNA, 1757 bp, Homo sapiens
ccttctgggttcgggcggttctcctgcctcggcctcccgagtagatgggattgtaggctcctcccaccacgcccggctaatttttgtgtttttagtggagacggggtttccaccatgttggccagcgtggtcttgaactcctgacctcaggtgattcaccagcctcggcctcccaaggtgctgggattacaggtgtgagccactgcacctggcctattattatttttaaatttttttttttaattgatcatttcttgggtgtttctcaccagagggggatttggcagggtccataggacaatagtggagggaaggtcagcagataatctgcaagtgaacaaagaaacaagtgaacaaagggtctctggttttcctaaggcagaggaccctcgcggccttcccacagtcgtttagtgtcccttgggtacttgagatcaagggagtggtgatgactcttaacggagcatgctgcctttcaagcatctgtttaacaaaagcacatcttgcacccgccccttatccatttaaccctgagtgggacacagcacatgtttcaggagagcacggggctggggggtggggggtaaaggtcacagattcaacaggatcccaagggcagaaagaaattttccttagtacagaacaaaaatgggagttctccctattgtctacttctttccacacagacacggcaaccatccggttttctcaatcttttcccccacctttcctggcctttctattccacaagtaccgccattggtcatcctggccagttcctcaatgagctgttgggtacacctcccagacttggtggtgggccgggcagaggggctcctcacttctcagactgggcagctgccgggcggaggggctcctcacttctcagacggcggtggccgggcagagacgctcctcacctcccagacggggtcgcggccgggcagaggcgctcctcacatcccagatggggcggcggggcagaggcgctccccacatctcagacgatgggcggctgggcagagacgctcctcacttcctagacgggatggcggccgggaagaggcgctcctcacttcccagactgggcagctgggcagaggggctcctcacatcccagacgatgggcggccaggcagagacgctcctcacttcccagaaggggtggcggccgggcagaggctgcaatctcggcactttgggaggccaaggcaggcggctgggaggtggaggttgtagcgagccgagatcacgccactgcactccagcctgggcaacattgagcattgagtgaacgagactccctctgcaatcccggcacctcgggaggccgaggctggcagatcactcgcggttaggagctggagaccagcccggccaacacagcgaaaccccgtctccaccaaaaaaatagaaaaaccagtcaggcgtggcggcgcgcgcctgcaatcccaggcacttggcaggctgaggcaggagaatcaggcagggaggttgcagtgagccgagatggcgggagtacagtccagcttcggcttggcatcagagggagactagggaaaggggagaggggagaggttagtattttcaaaaatcatcatatagtacgtggttacacaactctgaatatactaaaacacattgaattgtatactttaaaggagtgaactatatctcaatatataaggggtgagttatagctcaataaagctgttaacaacaaaacaaaaatgccataccaaaaaaaaaaaaaaaaa

SEQ ID NO: 116554 - DNA, 1358 bp, Homo sapiens
gctattcaatatgaacttcagtttttgttggaatccaatgcacaaatgatgatcgttgccagcccaacagaaaatggacaggtacttcgtgtaattccacctacccagacaggaatggcacaagtgattatacctcaggggcaacttgtggatgtgaatagtcctcgggatgtccctgaagagaaacccagaaacagaaacttaccaactgtaagagtggatactctatcaaacaataccagcaattacattcttcatcctcaaacatccttcccattgcccaaaaagacagtgatcggaatgctggaacaaccccttctggggcctcttcagccactttcttctaatacacctatatgggcctgccgtcttatgagctgtgagaaaattggagattcataccgtggctactgtgtaagtgagactgaattagaaagtgtcctaacatttcacaagcagcaaacacagagtgtttgggggacccgtcagtctccaagcccagccaagcctgctacacgcttgatgtggaaatcccagtatgttccatatgatggaatcccatttgttaatgcagggagtagagctgtggtaatggagtgtcagtatgggccaagaagaaaaggtttccagttaaaaaaagtcagtgagcaggaaagcaggtcttgtcagctctacaaagccacttgtccagctcggatttacattaaaaaggtacagaagtttcctgaatatagagttcctacagaccccaaaattgacaagaaaattatcagaatggagcaggagaaagcttttaacatgctaaagaagaacttggtagatgctggtggtgttcttaggtggtatgtacagttacctacacagcaagctcatcagtatcatgaattagagactccctgcctcactttgtcaccttctccttttcctgtgtcttctcttgaagaagaggaaactgcagttagagatgagaattgtgcattaccctcacgtttacatcctcaagtagcacataagattcaagaattagtatcacagggaatagaacaagtgtatgcagtaaggaaacagctaagttcatgtgagagctggctgtttaacagagttcggcccccttccctctctcacccatgcgatgcctgctcccacttcaccttcctccatgatggaagaaacttgaacccctcatcagatgcagatgctgcaccatgcttcttgtacagcctgcagaactgtgagccaaataaactgcttttctttataaattacgcagtctcaggtattcctttatagtaacacaaaatggactaacagaggtgccaaagcaattcattggtggaaaggactgacttttaacagac

SEQ ID NO: 116555 - DNA, 776 bp, Homo sapiens
ggatgaacctgacttcaaaaggagctgtgctgtaggtttctcaggagttttgtttgctttgaaaggtcttaacaaccattattgccctggaggctttgtcaacattttgggctttcctgtaccgaacagatttgcttgttgggtcgaacttgtggctattcatttattctcaccagggacttccttcgctgggcatctggctgggattcttgttggactaatgtacactcaagggcctctgaagaaaatcatggaagcatgtgcaggcggcttttcctccagtgttggttacccaggacggcaatactactttaatagttcaggcagctctggatatcaggattattatccgcatggccggccagatcactatgaagaagcacccaggaactatgacacgtacacagcaggactgagtgaagaagaacagctcgagagagcattacaagccagcctctgggaccgaggaaataccagaaatagcccaccaccctacgggtttcatctctcaccagaagaaatgaggagacagcggcttcacagattcgatagccagtgaggtggcatcttgggaagacatggcctattcgtgtaattattgcccatttggctcattccccaagcccctaattcattttaattcattttaaacaaaagcagagtacaccggtattgctccagatcgctcacatcacctgggacagtcccatggcccctatgagtcaactcacagcttgcggggagtgggccttctcctggccttgttcttgctcata

SEQ ID NO: 116556 - DNA, 554 bp, Homo sapiens
ctgccccctgggtttccccccagcccatgcccgtcaattaccctttccttgagccccctctgtgtcggggaccaatgctttggatactgggataggcaaaccatgagtaaggaagagaaatggccccacattttgtggcacccccagtctgaaactgcaaattgcatgccagaaagacacacaaagggcagagaaaggagcagctagaaactctagatatccatgttgaggagcctggtggggggttggggggcttcatggaggaggggagtatgaagcagattcgggacagtgaagcagaacagggctggagagaaaggaaggaggtgagaaggacccatgtgaagttttcgaggttggaaagaacaaaacctataccgcagtcctcttaagtgcttttagtctgacagtgtctgtatcagtggccttgtgcagctagccatgtggctcctgtgggtgtatgtgcggcttggcaggggctgtggcatgggagcaggggcctgggttcctgtttgtctactattatactaaatttgcacaagcggacgcgtggg

SEQ ID NO: 116557 - DNA, 387 bp, Homo sapiens; identical to SEQ ID NO: 114599

SEQ ID NO: 116558 - DNA, 400 bp, Homo sapiens; identical to SEQ ID NO: 115122

SEQ ID NO: 116559 - DNA, 861 bp, Homo sapiens
ggaacaatccccaagaggcatgaactggtgaaggggccgaagaaggttgagaaggtcgacaaagatgctgaattagtggcccaatggaactattgtactctaagtcaggaaatattaagacgaccaatagttgcctgtgaacttggcagactttataacaaagatgccgtcattgaatttctcttggacaaatctgcagaaaaggctcttgggaaggcagcatctcacattaaaagcattaagaatgtgacagagctgaagctttctgataatcctgcctgggaaggggataaaggaaacactaaaggtgacaagcacgatgacctccagcgggcgcgtttcatctgccccgttgtgggcctggagatgaacggccgacacaggttctgcttccttcggtgctgcggctgtgtgttttctgagcgagccttgaaagagataaaagcggaagtttgccacacgtgtggggctgccttccaggaggatgatgtcatcatgctcaatggcaccaaggaggatgtggacgtgctgaagacaaggatggaggagagaaggctgtagagcgaagctggaaaagaaaacaaagaaaacccaaggcagcagagtctgtttcaaaaccaggatgtcagtgaaagaagccccagggccatcaaaagttaagacaggggaagcctgaagaagccagcctttgattctagagagaagaaaaccaacttggctcccaaaagcacagcaatgaatgagagctcttctggaaaagctgggaagcctccgtgtggagccacaaagaggtccatcgctgacagtgaagaatcggaggcctacaagtccctctttatcactcacagctccgccaagcgc

SEQ ID NO: 116560 - DNA, 1322 bp, Homo sapiens
  misc_feature (1)...(1322): n = a,t,c or g
acatcgatacgactttttttttttttttttttttttttttttggaagaggcagaccagctttattttttgacctcaatcaccgggtgcccaactatgactttgctatcttcgagaatgatgagatgggggcacactcccctaacagtatttagctagaccaacaaggatcctggctcctcccagggctggtagcagagggacgaggcccttccgaagcttctagtgggcacaggggtttttaaaatccatcctttttaaagcccagtttcacttggccttacttgattttattgctggtagcaagatcattaggaattttagttaattaatatgtgccaactcttgcaccgggtgagggactctgggagtctcttgttactgccaaggcattaaaaagtgccaggcccacaggcnttacctggggccatggaaaaggacccaaatggcaccctggcagggtgggaaggcaaggcatggacctcggggccactgtgcaagcccctccccatgtcccccccctgggaaccgaacacgccctcacatcaaagaggtggcccacacccagcttgaaggctggcccaggaacaccttttatgaacaacaaaaactaatagaaaagaacacacaagcagcgcaactcagaggccacaaagcggacctgccctacgtggaaaacttaaacaaccttctggggcaggagccggtggcagtgcgggctttcagaagcaagtaggacgtgtggggtgaaccccagtgggccagactcctcccttggaggcgctttggcggagctgtgaagtggtaaaagagggacttgtaggcctccgattcttccactgtcaagcgatggacctctttgtggctccacacggaggctttcccagcttttcccagaagagctctcattcattgctgtgcttttgggagccaagttggttttcttctctctagaatcaaggctggcttcttcaggcttccctgtcttaacttttgatggccctggggcttcttgcactgacatctggttttgaaacagacctctgctgccttgggtttctttgttttctttttcccacgtcgctctcagccttctctcctccatccttgtcttcagcacgtccacatcctccttggtgccattgagcatgatgacatcatcctcctggaaggcagccccacacggctttctggtcaaagccttggtttggaaagttcccgcacacagcaaagtgtcagcgtagcaggttaagagtgctatcacttgcaaggctggtgcctggatggtgtctgggaacttggattttgggagggttcccgccat

SEQ ID NO: 116561 - DNA, 634 bp, Homo sapiens
tggtagtgcaatggattatcaatggcatatgacaaatgttgagataaaatttggctttgtaatcagcgaggcacactcctgaatcagaaactgtgtctgatggaaatctttgccactgcttttaccatcgccactgaaatccacatgtgaaaataggcagcgtaataaatgcctgtctgcctcaggaccgtgccgattcacaatatgctgtatttcctgctggctggctcaggtaggtttttcttggttaaattgtccaccaggtagctgatttgagacaaggccagcgagagcgagtcaagattcattgctggttggggcggaagcacggcggccgagcccggcgcaaaatcaccattattcccctttagtcacctcagaggcaggttaatgctttctttgtaattaggctatatctggtatctgtataatatcttcagttcttctttaccaggggtcttactctgttctgaaacatggcacctcaggcggctccggcagcgctgcacacaggacactcctgggtccccgactccggctctcctcgaacccctcttcggttacactccgctatgtttctctacaaaatggcgccggaggtcgcgcgctcacgtcgcggcctttccccacgaaa

SEQ ID NO: 116562 - DNA, 450 bp, Homo sapiens
gttttttttcccaaatcagcaaaacctggtgttcaggaacgccaaaatattccaagcctctcttcttagatatccaagtatgagagacattgatgaagcaaatacagaagccaattcaaaggaacattatcagtttcttggtgccttcctccgaagccgagcccccgggaatcaccagaacatcaagcggagggcgttaggaatcctcaatcaaattccagactgcgccactccttgtgcagatcgctcagacgtctacccagacctcgacccagtttccacccgcgcgcctcggcttgcagccacaggcggtaacgatgccctcagcgaggaataagaggtcaacccggtgcccagccctggagcctcacgctcagccagggtaatgttatgggaagcgcgcccccgtcctcctgcgcccaaccaacccacctgctagtccctacgaaa

SEQ ID NO: 116563 - DNA, 1233 bp, Homo sapiens
atggaatactatgcagccataaaaaaggatgaattcatgtcctttgcaggaccctcagctgcaggtctgttggagtttgctggaggtccactccagaccttgtttgcctgggtatcaccagcagaggctgcagaacagcaaatattgcagaacagcagatgttgctgcctgatccttcctctggaagctttgtctctgagggacacctggctgtttgaggtgtcagtcggcccctactgggagtttgtgaatagcacaatggaagaagctggactttgtgggttaagagagaaagcagatatgttgtgtaactctgaatcacatgatattcttcaacatcaagactcaaattgcagtgccacaagtaataaacatttattggaagatgaagaaggccgtgactttataacaaagaacaggagttgggaggaacatatgcagcagaaaaaagaggaggaagaagttcttaaagaagtaactgcacatttccaaattactttaactgaaactcaagcccagctggaacagcatgaaatacacaatgccaaactgcagcaggagaacatggaaatgggagaaaagctaaagaagctcactgaccagtatgcactgagggaagagcaaattaataaagcgttcaaacataaggaattacgacaacagcttgtagatgccagacttcaacaaacagcacagctgataaaagaagctgatgaaagacatcagagagagagagagtttttattaaaagaagcaacagaatcgaggcacaaatatgaagaaatgaaacaagaagaagcacaactgaaagagcagcttttcctttatatggataagtttgaagaattccagactaccatggcaaaaaccaatgaactttttacagccttcaagcaggaaacggaaaagaaaactattcgtgataaaaattataaggtctttcaaataaaattggagcggttagagaagctgtacaaggctcttcaaatagaaaggaatgaactcagtgagaaactgggaattctgaaagggcaggtctctgtgaaagtagcagatgtagatttagcagtgcctgtgacgcattcctgtgctgacctggattcttccaatatgctgaacacttcctctaaaagagccccaggagtccatctggaggctgaccccaaaggaatgaatgaagtaaaatgctactcaaaagccctctccacaggatctcctctaggcattgattaa

SEQ ID NO: 116564 - DNA, 2526 bp, Homo sapiens
atgggatataatctcctggtgtgccctttgctaaggccattggaaaagctcggtattagggtggtagtgtcccgaatttccaggtaccttctgtcacagcttccctttgataggaaagggaattccccaaccccttgtgcttcccggtttgtgaatagcacaatggaagaagctggactttgtgggttaagagagaaagcagatatgttgtgtaactctgaatcacatgatattcttcaacatcaagactcaaattgcagtgccacaagtaataaacatttattggaagatgaagaaggccgtgactttataacaaagaacaggagttgggaggaacatatgcagcagaaaaaagaggaggaagaagttcttaaagaagtaactgcacatttccaaattactttaactgaaactcaagcccagctggaacagcatgaaatacacaatgccaaactgcagcaggagaacatggaaatgggagaaaagctaaagaagctcactgaccagtatgcactgagggaagagcaaattaataaagcgttcaaacataaggaattacgacaacagcttgtagatgccagacttcaacaaacagcacagctgataaaagaagctgatgaaagacatcagagagagagagagtttttattaaaagaagcaacagaatcgaggcacaaatatgaagaaatgaaacaagaagaagcacaactgaaagagcagcttttcctttatatggataagtttgaagaattccagactaccatggcaaaaaccaatgaactttttacagccttcaagcaggaaacggaaaagacccctcttcgcagcaccttaagtctgcccaggttctcagccttcctctggcagttgtttccctctgctgattttgcaggcaactgccatgtcctggaccatgggccctatggaagagatgattacttctgcccattaaggcatagtcctggaaacaaacagcacaattcctttaaagccctaaaggatgaagatcttcctgtagagaagtatttaatggaaaggcagcctgtaggtgagccagctgccgaccaggtagctatggatgtgatgcacagccccatcctccaactggaaaggaaacacaaagtctcaagtgacagcaaccagacagagactactgcagagaagttgccagaggactctttcctaaaaaacaagcaaaaacaggtttatatagaccacagtgcaattaaactagaactagaactcaggattaagaaactcaataaaaactgctcaactacacggaaactgaacaacctgctcctgaatgactactgggtacataatgaaatgaaggcagaaataaagatgttctttgaaaccaatgagaacaaagatacaacataccaaaatctctgggacacatttaaatcagtgggtagagggaaatttatagcactaaatgcccacaagacaaagcaagaaagatctaaaattgacacccttatgtcacagttaaaagaactagagaagcaagagcaaacacattcaaaagctagcagaagactaaaccaggaagaagttgaatccctgaatagaccaataacaggctctgaaattgaggcaataattaatagcttaccaaccaaaaaaatccaggaccagatggattcacagccaaattctaccagaggccctccaccgaagaataaggttttatccaacaatgcaagcagccaaaagccgactcactcaagctgcataccattgttgaggctgcctgataagcagcagaaagttaatgagagcattaagacagacatgctgtgcacagacaaggaagaggagtgccctgctgcctccctgctgcagaaatacaccaataacaaactgatggatgtgacgcctgtaccaatcaacagcttcaacaaattccacatctatacatctttaggccccaaagcctttgatggcacaggtgattttgagattgtttatgtaaggatggctgtcatcgttgctttagatttctggcctctccatggtgcagttgaaaatgattgtttggaaattgtccgcctcctcctttcctatggcgctggccccactttggccacctactcaggcagaaccattatgaaaatgacccacagcaaagttatggaaatgtttctaacagattacttaaatgacctacagggttgcagtgacagtaagctgaatagctcttgggagttctacggcagctctgtctgtgaaccagataatggaggggaatccaatgttttggcagaccccccaggaccagaggaccaggatgatgacaatgaggcttgcagtgatgtgtttgaatttaaattttcagataccccctcttaccttgttaaaacattcaagtttcatctttgcagggacttggaagccttcaatctggaaagcaacaaactactagatttactagaatgtacaaatgaactccagattctccttggctcctctctggaatgcttaaatcccagggatgtggccttggagaaggaccactga

SEQ ID NO: 116565 - DNA, 3444 bp, Homo sapiens
cgactactaactactaaattgcggctgcgtcgacttttttctttttttttttccaagaagtagcacacttacacactctctctctctcccatctctttcatcagcttctattatcagctgtgctgtttgttgaagtctggcatctacaagctgttgtcgtaattccttatgtttgaacgctttattaatttgctacaggaaaacagaatttcttgcaccactaaccaaagaaataaatacagtggggagaaaacataacacaaatttctagaaccctgcttacccttcttttctgctgctaccactgtagttaagaacactgactccttctgtccccgtcactgcagaagtggctacaacatatcatcttgcaaactatcccacactagaaagagcacaaccctctaactgctgccccatgtcccaccctatcagacgtgggctgtccccatcaaaatatctgtacttcttgcttctgccctacattggaaaaaaaaaagctgatattttatcaagaaaaagatggataaggagatcaaaatatcaaattcatttattacacacataattcctggacattttttgttcacaaaatcttctgaaattccttaattgtaggtagcctgataaaatggaaaaaaatggtctggagcaaatcctagcttattgtatgatccaggacaatttcttctccttgtgaaacacagtttccttatctgcaaaggttcatgaccatacctaacttgcagagttgctgtccaaatctatgcaataattaaactgtgtaaggtgcttgatgcctggcacatattaaacatttggtaaaatcctgttattatttaaaagctatgtcattaagtgctattgttacatacaatagactcatttggaaatccttccacacatggaggttctatgtgaaggatgaaatgctagctgaacataatgtacttaaattaagttttgagtagactgcaacagataatctgtcttaatctgcaactgattttatcattattcaattattttctgataaaagaaaaagactgtaatatctaaacaagacatacaagtagtacaacttgaacacatgtcctctcccaatctgctacttctatagcaaatttggagagtttaatacagttaaaataatataaatcctaaagagtaaaataataaaaaataaaataaaattaatcatttttaataccattatttaaaacaatggaatttaaaggattcttttaaaaaaactgatgatattcataatatgctttataatataaaacaaatttaattttaaaagttcactatataggcctaaaaaatttctttaataaatacattccaaggaaaaaaaagaggggggggaagcttatatactaaaaagacttgagacatattaaaacaataaaatgtataaaccttattttgatgttgatgtaaacaacctgaaggaaaagggaagtaacagatatttaaatagtacagtgagaaggtatgtgattacatagcaattgtttaaccttttggagtaaaaatagtacagtgattatggcttaaaaagaatcttatttcatgatgcatatttgaatagtaataaataaaatgatataatatcttggatttgctcaaaaatagatggaaacaagagttgctagaaacaaaagtaaataattgctaaagccaagtgatatattctactataagtttgcagcttccataataagtttgaaatgttcttgaaacatagaggaaaatggtttaaaagatactcaaaatcttaaagaaaaatgttttcaaaagtagcatgaaaaggtgtaactcaaaataacattttgatatgcataaagtaatatttactgttttattaatttctaagttgtcactttctatttccaattttaatctactaagtaaggatttaaatatatattttactagcttaaagcataataaaggaaggggatgcatcctttgaaaattgaaatcttaccctatgtatagacctctaaaagtaaagaaaaaataaaaacaaataagcaggttatcacctatttgttcttttatttagccatcatacaacttccacatcaatttataaaataactccaatgactaggttcgacaactattgagtcctccacaaactttttacttcattgattacacaaacaatgtgacttggtgatgcgtaattagtacgttccttattctcacaaatagcacacttctcctattcatattgtccagattgtcacagacatctgagatacagagtatttagggaacaaatctgtattattcgactgcataagagaaaaatatctgtatgctatattgacaatcttgtagcatcatatgggagacaagtggtacacatctcctagaaatccctttacttatcctactccactgacacttgggccaagtgatgctccaatttagtcattctgtttacaggtttctactcttttcctaataaacatgtaatttccactgtgcatacacaaaagttctaaaatactgtcctgtgaaagagtttttactttacggtagggtgtagcttttgctactggtgagcagctgtctataaacaaaccaaacgccgtttacctcttccctcagtgcatactggtcagtgagcttctttagcttttctcccatttccatgttctcctgctgcagtttggcattgtgtatttcatgctgttccagctgggcttgagtttcagttaaagtaatttggaaatgtgcagttacttctttaagaacttcttcctcctcttttttctgctgcatatgttcctccttattatccaaaataatgtatgttaaaagtacagacctacagataaagctcccgaaaaagaagctactgctatgtgagttcatttattgctcccatgaggtgttgcttttaaactataattcctcccccttatttatgaccagaaatctctcatttaaaagcaagcagctttttctaagtagataattagagaaaagcaaatgccctactataaaataagtatcatctgctgatccagatattcactatactataattaaatataagtaagatgctgctccacagttagtttcttccacattattttcccaaaagtcatcctcactggttaggcagtataccatcctacatcagcctgaagatcttacagcctactttctgagttacactttcaattttataagagggaagggacaaactaaatcattattttacaaagtttactttcaaagtcttactaggatacaagagtcaacagacctttacctaaacagttatcagtacagtctaaatattgacagtgctatctacttttattatatttaaatccaagatttcaaaagcaagaaaaataaatacaaaccttacaagtaagaacctatttcacaagctgtcctatgttcttgagtcca

SEQ ID NO: 116566 - DNA, 921 bp, Homo sapiens
atgaacatcaatgcaacaatcctcaataaaattctggcaaaccgaatccagcagcacatcaaaaagcttattcatcacaatcaagttggcttcatccccaggatgcaagctttgaagagggtagtggttcttccggcatggagtttgagatctgagaatgaacagactgcctcctcaagtgggtccctgacccctgagaagcctaactgggaggcatctccctgtaggggcagactgacacctcacacggccaggtacccctctgagacaaaacttccacaggaacgatcaggcagcaacatttgctgttcagcaatattcactgttctgcagcctctgctgctgatacccaggcaaacagggtctggagtggacctccagcaaactccaacagacctgcagctgaggacggagaatgactttgatgagctgagagaagaagccttcagacgatcaaacttctccaagctaaaggaggaagttcaaacccattgcaaagaagttaaaaaccttgaaacaagattagacgaatggctaactagaataaccaatgcagagaagtccttaaaggacctgatggagctgaaaaccatggcaggagaactacgtgatgcgtgcacaagattcagtagccgattcaatcaactggaagaaagggtaacagagattgaagatcaaatgaatgaaatgaagcaagaagagaagtttagagaaaaaagaataaaaagaaatgaacaaagcctccaagaaatatgggactatgtgaaaagaccaaatctacattggcttggtgtacctgaaagtgacagggagaatggaaccaagttggaaaacactctgcaggatattatccaggagaacttccccaacctagcaaggcagaccaacattcaaattcaggaaatgcagagaatgccataa

SEQ ID NO: 116567 - DNA, 1650 bp, Homo sapiens
atggccgggtactcctctgagacaaaacttccagaggaacgatcaggcagcaacatttgctattcaccaatatccactgttctgcagcctccgctgctgatacccaggcaaacagggtctggagtggacgtccagcaaattccaacagacctgcagctgagggtcctgactgttagaaggaaacctgacaaacagaaaggacatccacaccaaaaccacatctgtatatcaccatcatcaaagaccaaagactttaaaccaacaaagatcgaaagagacaaagaaggccattacataatggtaaagggatcaattcaacaagaagagctaactatcctaaatatatatgcacccaatacaggagcacccagattcataaagcaagtcctgagtgacccacaaagagacttagactcccacacattaataatgggagactttaacaccccactgtcaacattagacagatcaatgagacagaaaggcaacaagggtatccaggaattgaactcagctctgcaccaagcagaccaaatagacatctacagaactctccaccccaaatcaacagaatatacaatcttttcagcaccacaccacacctattccaaaatcgaccacatagttggaagtaaagcattcctcagcaaatgtaaaagaacggaaattataacaaactgtctctcagaccacagtgcaatcaaactagaactcaggattaagaaactcattcaaaaccactcgactacatggaaactgaacaacctgctcctgaatcactactgggtacataacgaaatgaaggcggaaataaagatgttctttgaaaccaatgagaacaaagacacaacgtaccagaatctctgggacacactgaaagcagtgtgtagagggaaatttatagcactaaatgcccacaagagaaagcaggaaagatctaaaattgacaccctgacatcacaattaaaagaactagagaagcaagagcaaatacattcaaaagctagcagaaggcaagaaataactaagatgagagaagaactgaaggaaatagacacaaaaaacccttcaaaaaaatcagtgaatccaggagctgaaatacaaactaccatcagagaatactataaacacctctatgcaaataaacaagaaaatctagaagaaatggataaattccttgacacatacaccctcccaacactaaaccaggaagaagttgaatctctgaatagaccaataacaggctctgaaattgaggcaataattaatagcttaccaaccgaaaaaactccaggaccagatggattcacagccgaattctaccagaagtacaaggaggagctggtaccattccttctgaaactattccaatcaatagaaaaagagggaatcctccataactcattttatgagaacagcatcatcctgatactaaagcctggcagagacacaaccaaaaaagagaattttagaccaatatccctgaagaacattgatgcaaaaatcctcaataaaatactggcaaaccaaatccagcagcacatcaaaaagcttatccaccatgatcaagtgggcttcatccctgggatgcaaggctggttcaacatacacaaatcaaataaatgtaatccagcatataaacagaactaa

SEQ ID NO: 116568 - DNA, 1587 bp, Homo sapiens
atgtatgggaatgcctggatgcccaggcagaagtttgctgtaggggtggggtcctcatggagaacctctgctagagcaatgcagaagggaaatgtggggtgggaaatcccacacagagtccctactggggcaccacctagtggagctgtgagaagagggccaccatcctccagaccccagaatggcagatccactgacagcttgcactgtgtgcctggaaaagctgcagacactcaacaccagcccatgaaggcagcagggagggaggctgtaccctgcaaagccacagggctggagctgcccaagactatggaaacctacctcttgcatcagtgtgacctggatggcatagcagaacaaaaggcagcagaaacctctgcagactttccctgtctgacagctttgaatagcctaactgggaggcaccccccagtagggggcagactgacacctcacacggccgggtacccctctgagacaaaacttccagaggaacgatcaggcagcaacatttgctgttcagcaatattcactgtttggcagcctctgctgctgacacccaggcaaacagggtctggagtggacctccagcaaactccaacagacctgcagctgagggtcctgactgttagaaggaaaactaacaaacagaaaggacatccacaccaaaatcccatctgtacgtcaccatcatcaaagactaaagagaagtccttaaatgacctgatggagctgaaaaacatgacacaagaactacgtgatgaatgcataagcttcagtagccgattcgatcaactaggagaaagagtatcagtgattgaagatcaaatgaatgaaatgaaaccaaatctacatcggattggtgtatctgaaagtgacccggagagtggaaccaagttggaaaacactctgcaggatattatccaggagaaattccccaacctagcaaagcaggccaacattcaaattcaggaaatacagagaatgccacaaagatactccttgagaagagcaactccaagacacataattgtcagattcaccaaagctgaaatgaaagaaaaaatgttaagggcagccagagagaaagacagatcaatgagacagaaaattaacaaggatatccaggaattgaactcagctctgcaccaagcggacctaatagacatctacagaactctccactccaaatcaacagaatatacattcttctcagcaccacatcacacttattccaaaactgaccacatagttggaagtaaagcactcctcggcaaatgtaaaagaacagaaattgtaacaaactgtctctcagaccacagtgcaatcaaactagaactcaggattaaggaactcactcaaaaccactcaactacatggaaactgaacaacctgctcctgaatgactactgggtacataacgaaatgaaggcagaaataaagatgttctttgaaaccaataagaacaaagacacaacataccagaatctgtgggacacatttaaagcagtgtgtagagggaaatttatagcactaaatgcccacaagagaaagcaagaaagatctaaaattaacaccctaacataa

SEQ ID NO: 116569 - DNA, 657 bp, Homo sapiens
atgtgggaaagtttggaacctcctagtgacttgttgaatggctttgacaaaaatgctgatagtgaaattaacaataaagtccaggctgaggaacttgttgggaactggagcaaaggtgactcttgttgtgttttatcaaagagactagtggcattttgcccctgccctagagatttgtggaactttggacttgagagagataatttagggtatctggtggaagaaatttctaagcagcagagcattcgaaagatttcagaagatttatggaaacacctggatgctcaggcaaaagtttgctgcagcggtggggccctcatggagaacctctgccagggcagtatggaagggaaatgtggagtcggagcctcaacacagagttctactggggtactgcctagtggagctgtgagaagagggccaccatcgtccggaaaccagaatgatagatccactgacagtttgcactgtgtgcctggaaaagccgcagacagtaaatgccatcccaagaaagcatcaggaaggaaggctgtaccctgcaaagccacagaggtggagctgcccaagaccttgggaatccacatcttgcctcagtgtgacctggatgcgagacctggagtcaaaagaaatcattttggatccttaaaatttgactga

SEQ ID NO: 116570 - DNA, 1260 bp, Homo sapiens
atggccgggtactcctctgagacaaaacttccagaggaacgatcacgcagcaacatttgctgttcaccagtatctgctgttctgcagactccgctgctgatacccaggcaaacagggtctggagtggacctccagcaaactccaacagacctgcagctgagggtcctgactgttagaagggaaactaacaaacagaaaggacatccacacaaaaccccatctgtacatcaccatcatcaaagaccaaaggtagataaaaccacaaagatggggaaaaaacagagcagaaaaactggaaactctaaaaagcagagcgcctctcctcctccaaaggaatgcagctcctcagcagcaatggaacaaagctggatggagaatgactttgacgagttgagagaagaaggcttcagacgatcaaactactccgagctaatggaggaagttcgaacccatggcaaagaagttaaaaaccttgaaaaaaaattagacgaatggctaactagaataaccaatgcagagaagtccttaaaggacccaatggagctgaaaaccatggcacgagaactatgtgatgaatgcacaagcctcaaaagggtatcagtgatggaagatcaaatgaatgaaatgaagcgagaagagaagcttagagaaaaaagaataaaaagaaacaaacaaagcctccaagaaataagggactatgtgaaaagaccaaatctacatctgattggtgtacctgaaagtgacggggagaagggaaccaagttggaaaacactctgcaggatattatccaggagaacttccccaatctagcaaggcaggccaacattcaaattcaggaaatacagagaatgccacaaagatactccttgagaacggcaactccaagacaaataattgtcagattcaccaaagttgaaatgaaggaaaaaatgttaatggcagccagagagaaaggtcgggttacccacaaagggaagcccatcagactaacagctgatcttttggcagaaactctacaagccagaagagagtgggggccaatattcaacattcctaaagaaaagaattttcaacccagaacttcatatccagccaaactaagcttcataagtgaaggagaaataaaatactttacagacaagcaaatgctgagagattttgtcaccaccaggcctgccctgaaagagctcctgaaggaagcagtaaacatggaaaggaacaaccggtaccagccactgcaaaaacatgccaaattgtaa

SEQ ID NO: 116571 - DNA, 762 bp, Homo sapiens; identical to SEQ ID NO: 115053

SEQ ID NO: 116572 - DNA, 729 bp, Homo sapiens
atggctgggttctcctctgagacaaaacttccagaggaacgatcaggcagcaacatttgctgttcaccaatatccgctggtctgcagcctctgctgctgatacccaggcaaacagggtctggagtggacctccagcaaactccaacagacctgcagctgagggtcctgactgttagaaggaaaactaacaaacagaaaggacatccacaccgaaaccccatctgtatgtcaccatcatcaaagaccaaaggatattatccaggagaacttccccaatctagcaagacaggccaacattcagattcaggaaatacagagaacaccacaaagatactcctcgagaagagcaactccaagacacataattgtcagattcacaaaattgaaatgaaggaaaaaatgttaagggcagccagagagaaaggtcgggttacccacaaagtgaagcccatcagactaacagctgatctcttggcagaaactctacaagccagaagagagtgggggttaatattcaacattcttaaagaaaagaattttcaacccagaatttcatatccagccaaactaagcttcataagtgaaggagaaataaaatactttacagacaagcaaatgctgagagattttgtcaccaccaggcctgccctaaaagagctcctgaaggaaacactaaacgtggaaaggaacaaccggtaccagccactgcaaaaacatgccaaattgtaa

SEQ ID NO: 116573 - DNA, 1299 bp, Homo sapiens
atggctgggtactcctctgagacaaaacttccagaggaacgatcaggcagcaacatttgctgttcaccaatatccgctgttctgcagcctccgctgctgatacccaggcaaacagggtctggagtggacctctggcaaactccaacagatctgcagctgagggtgctgactgttagaaggaaaattaacaaacagaaaggacatccacaccaaaaccccatctgtacatcaccatcatcgaagaccaaaggccagatcagagcagaactgaaggaaatagagacacaaaaagcccttcaaaaaatcaatgaatccaggaactgggtttttgaaaagatcaacaaaattgatagaccaccagcaagactaataaagaagaaaagagagaagaatcaaatagatgcaataaaaaatgatagaggggatatcaccatcgatcccacagaaatacaaactaccatcagagaatactataaacacctctatgcaaataaactagaaaatctggaagaaagggataaattcctcaacacatacactctcccaagactaaaccaggaagaagttgaatctctgaatagaccgataacaggctctgaaattgaggcaataattaatagcttaccaaccaaaaaaagtccaggaccagatggattcacagatgcattctaccagaggtacaaggaggacctggtaccattccttctgaaacttttccaatcaatagaaaaagacagaatcctctctaactcattttatgaggccagcatcttcctgataccaaagctgggcagagacacaacaaaaaaagagaattttagaccaatattcctgatgaacatcggtgcaaaaattctcaataaaatactagcaaaccgaatccagcagcacatcaaaaagcttatccaccatgatcaagtgggcttcatccctgggatgcaaggctggttcaacatatgcaaatcaataaatgtaatccagcatataaacagaaccaacgacaaaaaccacatgattatctcaatagatgcagaaaaggcctttgacaaaattcaacagcgcttcatgctaaaaactcacaataaattaggttttgatgggacatatctcaaaataataacagctatttatgacaaacccacagccaatatcatactgaatggacaaaaactggaagcattccctttgaaaactggcacaagacgggaatgtcctctctcactactcctattcaacatagtgttggaagttctggacagggcactcaggcaggagaaaaaaataaagggtattcaataa

SEQ ID NO: 116574 - DNA, 1096 bp, Homo sapiens
atggccgggtactcctctgagacaaaacttccagaggaacgatcaggcagcaacatttgctattcaccaatatccactgttctgcagcctccgctgctgatacccaggcaaacagggtctggagtggacgtccagcaaattccaacagacctgcagctgagggtcctgactgttagaaggaaacctgacaaacagaaaggacatccacaccaaaaccacatctgtatatcaccatcatcaaagaccaaagactttaaaccaacaaagatcgaaagagacaaagaaggccattacataatggtaaagggatcaattcaacaagaagagctaactatcctaaatatatatgcacccaatacaggagcacccagattcataaagcaagtcctgagtgacccacaaagagacttagactcccacacattaataatgggagactttaacaccccactgtcaacattagacagatcaatgagacagaaaggcaacaagggtatccaggaattgaactcagctctgcaccaagcagaccaaatagacatctacagaactctccaccccaaatcaacagaatatacaatcttttcagcaccacaccacacctattccaaaatcgaccacatagttggaagtaaagcattcctcagcaaatgtaaaagaacggaaattataacaaactgtctctcagaccacagtgcaatcaaactagaactcaggattaagaaactcattcaaaaccactcgactacatggaaactgaacaacctgctcctgaatcactactgggtacataacgaaatgaaggcggaaataaagatgttctttgaaaccaatgagaacaaagacacaacgtaccagaatctctgggacacactgaaagcagtgtgtagagggaaatttatagcactaaatgcccacaagagaaagcaggaaagatctaaaattgacaccctgacatcacaattaaaagaactagagaagcaagagcaaatacattcaaaagctagcagaaggcaagaaataactaagatgagagaagaactgaaggaaatagacacaaaaaacccttcaaaaaaatcagtgaatccaggagctg

SEQ ID NO: 116575 - DNA, 369 bp, Homo sapiens
atgtggccaaaaggaaactatgtggtcacacgcagtgttactttgggaagccattttattccactggagaccttgaaaaacaatagaagagaggcaatcctaagagggaaatcaataggaagccttgaaggagaaaaactggaggacggacttgtttttccagaggaactggaagaggaaactggtatcattgtgatcaggaccctcagctgcaggtctgtcggagtttgctggaggtccactccagaccctgtttgcctgggtatcagcagcagaggctgcagaacagcggatattggtgaacagcaaatgttgctgcctgatcgttcctctggaagttttgtctcagaggagtacctgggcatgtga

SEQ ID NO: 116576 - DNA, 573 bp, Homo sapiens
atggtaagagggggactgcacatgtgggaagcccacactaagggaagaatcatgggaaagagccaaatactttcttatgaagagggcgggactgaagttcctgcagaccaatctaagtatgtcaacagtaactcaggcttccaacaggtcttcagggaatataggttacaaacaaaccctaaattgaagggagaaagatccccacctctgtattcttcaagctcattggttcttattaaagctttggaagtgaggaccctcagcttcagttctgttggaatttgctggaggtccactccagaccctgtttgcctgggtatcagcagcagaggctgcagaacagcggatactggtgaacagcaaatgttgctgccaaatcattcttctggaagttttttctcagaggagtacccagccatccttgacagtgccatggaatttgccatgggtagaatcataccggaatatgtagaccacatagttgatgtcaatgaagtggtcactgatggtgacaatattcactttaccatacttaaaagcagccctaacaataaggtgcccaatatggcctaa

SEQ ID NO: 116577 - DNA, 570 bp, Homo sapiens; identical to SEQ ID NO: 115060

SEQ ID NO: 116578 - DNA, 2376 bp, Homo sapiens
atgcggcccggcggcggcggcggcgggagcggcagcggcagcgagggcggcaggggcagcggcagcagcggcggcgttggctgcggcggcggcggcggcggcagcaggagccggagcgacggcggcggcatccccgagactctccgcactatccttacccctcaccctcctgctcctcaatcccgcttccccccaaccaaccagctgcgacggcgtgaagagcccgtcagtgcccggcgagctgcggcccgagaggcgcggaactttgcagaaaacaccatgaatgaactccttggctggtatggctatgataaggttgaattaaaagatggtgaggatattgaattcaggagctaccctacagatggggagagccggcagcacatttctgttctcaaagaaaattctttgccaaaaccaaaattacccgaggacagtgttatttcaccatacaatataagcacaggctattcagggcttgccactggaaatggactcagtgactcacctgcagggtcaaaggatcatggcagtgtgcccattattgtacctttaattccaccacctttcataaagccaccagcagctgcatacagaattgtgggtgtagcttacttctgggcctggagaactgctcttctggccctgccctcccttttctctggagaaggggagctcccgtgtcttggtggttaccacagcattgaccctgctctggccacacatagacagcctctggcccttggtatggtttgtgacagcacaggcattactatggaggtggccccacgtggcctgctgcttggcaggactggctggagcagcgaggagggacttggcttgctcttctgtcatgatgggctgcttgtgctcccctccagtggagatgcttacacctgcctactacagtcaccaagaacatctggctcctatgatccttcatggtctttcattgattatctggatgtgtgcattctaggaactgttggaggagatagatgtcccagcaaatactttcggaatttcccctcagtcttggactcccatgaaagttacaaaggggtggtaaatctacagtttaattgcctggagtccattaatgccctactgattttctttgggcactggtcagaagatgatgtgtcaaatgtacaaataatgtgtgcctggtgccagaaagtgggaatcaagcgctattccctgagtatgggaagtgaggtgaaaagcttctgcagcgagaagtgctttgcggcctgccgacgagcctacttcaagagaaataagtgtttgtgttctgagagggtgaatgaatctgatgaggacactgtgatcacagctggtatcctcatggccagtgtctttccagcagtagagtgcagactgcactctgagtacatgaaagataagtgtgagcggaaggaagagagggagtttttcataaatcagaatccggtcacctggggatcaatacacagtgctattgacatatatgctggaatgttaattttcagacatagtacatctctggccatccttctggtgaaggctaatgctgttcacttaaatcaagttttttctcatcggaactgccgcaaagagactggtgtcattttgccctgccctagagatgtatggaactttgaacttgagagagatgatttagggtatctggtggaagaaatttctaagcagcaaagcattcaagaggaagcagagcataaaagtttgaaaaaattgcagcctgatgatgctgtagaaaagaaaatcccatgttctggggagaaattcaagcccatagcagaaatttggataagtaatgagaagccaaatgctaattgccaaaacaatggggaaaatggctccaggacatatcagagaccttctggagagcccctcccatcacagtcccatggcctaggagggaaaaatggtttcttgagcctggtccagggctcccctgctgtgtgcagctgctggacttggtggaaatggtgccctgcatcccagccgctccagccatggctaaaaggggccaagatacagctcaggctgtggcttcagagggtgcaggccgcaagtcttggcagcttccatgtggtgttggtcctgtgggtgtgcagaaaacaagaattgaggttggggaatctctgcctagattttggaggatgtatggaaacacctggatgtccaggaagaaatttgctgcagaagaagggaaatgtggggtcagagccaccacccaaagtccccactggggcactgcctaatggagctgtgagaagagggtcaccatcctctagacaccagaatggtagatccattgacaacttgaaccatgtgcctggaaaagctgcagacactcagcgccagccatga

SEQ ID NO: 116579 - DNA, 786 bp, Homo sapiens
atggacaataaagtccaggttgaggtgatctcagatggagatgaggaacttgttgggaactggagcaaaggtgactctcgttatgttttagcaaagaaactggtggcatctctcccctgccctagagatctgtggaactttgaacttgagagagatgatttagggtatctggtggaagaaatttctaagcagcaaagcattcaagaaaagaaaaacccattttctgaggagaaattcaagccagctgcagaaacttgcataagtaacagggaaccaaatgttaaatcaccaagacaatgggggaaaatgtctccatggcgtatcagagatcttcacggcagcctctcccatcacaggcccagaggcctaggagaaaatggtttcgtgggccagggacttggtgccctgcatcccaaccactctaatcatggcttcagagggtgcaagcccaagccttggcagcttccacgtgatgttgagtctgcgagtgcacggaagtcaagaattgaggtttggaaacctccgcctatatttcagaagatgtatggaaacgtctggatgcccctgcagacgtttgctgcaggggcggggtcctcatggagaacctctgctagagcagtgcagaagggaaatgtggggtgggagcccccacacagagtccctactagggcaccgcctagtggagctctgagaagagggcctctgtcctccagaccccagaatggtagctccactgacagcttgcaccatgtgcctggaaatgccacactcaatgccagcccatga

SEQ ID NO: 116580 - DNA, 810 bp, Homo sapiens
atggccgggtactcctctgagaaaaaacttccaaaggaacgatcaggcagcaacatttgctgttcaccaatatctgctgttctgcagcctctgctgctgatacccaggcaaacagggtctggagtggacctccagcaaacaccaacagacctgcagctgagggtcctaactgttagaaggaaaactaacaaacagaaaggacatccacaccaaaaccccatctgtacgtcaccatcatcaaagaccaaagggcccaactgttctgatttgaagcagcctatgtacttgggatttgaaaaagatgtctttaaaaccatagctgattactatggtcacttgaaagagcctctacttacatttcatctttttgatgcttttgtcagtgtactgggcaggagctggatattctgggcaaagttccgtgtggccgctgggcctgacttcgcagagggggcgctctggccagatgggtggaggttgcaggatttggggctgagtgggaccaggctccaatcaaggcaggtggcctggcttgctgctcagtttgcagcagccgcctttccccagcgtgcctgtggtggtggcatcaatgatcctagcacctgggatgatgcctggcagccgatttggggtgaggagtggcttccaggacacgggcatggagtgctccagccaagcattgccatcgccgtggccctgtgtgctctgagtggcctgggctgccccgacagatggccttttagtgcccctggtgccccaggttcaggcagagggcacagtgcccaggcatgcagtctcatagtgaattaa

SEQ ID NO: 116581 - DNA, 714 bp, Homo sapiens
atgtggaagcaactttggaactgggtaacaggcagaggttggaatagtttggagggctcagaagacaagaaaatgttgggaagtttggaacctcctggagacttgttgaatggttttgacaaaaatgctgatagtggtatgaacaataaggtccatggtgcggtggtctcagatggagatgaggaacttgttgggaactggaacaaaggtgactcttgctatgttttagcgaagagactggtggcattttactcctgccctagagatctgtggagctttgaacttgaaagagatgatttagggtatctggtggaagaaattcctaagcagcaaagcattcaaaagtggagctgcgagaagaggaccaccatccttcagaccccagaatgtcccgtcagcttgcactgtgcacctggaaaagctgcagacactcaacgccagcctgtgaaagcagccaggagggaggctgtaccctgcaaagccacaggggtggaacttcccaagaccatgggaacccatctcttgcaacagtgtgacctggataacccagttccttttccctctttccgttcatttcgagaagacaatgtcagaaaacagaatgacgttgaggatgatgaatggcagtttccaaatgtatttctgaaaaagatgaataagaaagagctgtttctgattcaaccttccaattcctgggagaaatggatgaagtag

SEQ ID NO: 116582 - DNA, 2976 bp, Homo sapiens
atgcctggcactccagcagccaaattggatgctaaagacaaagaccaaaccctaagaatggcagataagggtactggaaggaacctggaggtccttggtaaatctgtagcagaggctatttggaggacaaaacccacccatccaggactcagaggggttagtggtgagctatttagtgcctgctccctgtctcttgtgctctacctgtgcatgctgcatcccatggaccttcagatcctggcactgacagtcatttgtaaggagactgcaagtaaagagtctctagccatgttcgactacgacaagagcaaggacagtgggctgccaagtcaaggacttagttttaaatatggagatattctccacgttatcaatgcctctgatgatgagtggtggcaagccaggagagtcatgctggagggagacagtgaggagatgggggtcatccccagcaaaaggagggtggaaagaaaggaacgtgcccgattgaagacagtgaagtttaatgccaaacctggagtgattgattcgaaagggcctaactgggagtcaccccccagtaagggcagactgacacctcacatggccgagtactcctctgagacaacactgccagaggaacgatcaggcagcaacatttgctgttcaccaatatccgctgttctgcagcctctgctgctgatacccaggcaaacagggtctggagtggacctccggcaaactccaacagacctgcagctgagggtactgactgttagaaggaaaactaacaaacagaaaggacatccacaccaaaaccccatctgtacgtcaccatcatcaaagaccaaagaaacacaaactaccatcagagaatactataaacacctctacgcaaatagactagaaaatctagaagaaatggataaattcctggacacatacaccctcccaagactaaaccaggaagaagttgaatctctaaatagacgaataacagaatctgatattgaggcaataattaatagcttaccaaccaaaaaaagtccaggaccagatggattcacagccgaattctaccagaggtacaaggaggagctggtaccattccttctgaaactattccaatcaatagaaaaagagggaatcctccctaactcattttatgaggccagcatcatcctgataccaaagctgggcagagacacaacaaaaaaagagaattttagaccaatatccctgatgaacatcgatgcaaaaatcctcaataaaatactagcaaaccgaatccagcagcacatcaaaaagcatatccacggtcaagtgggcttcatccctgggatgcaaggttggttcaacatacgcaaatcaataaacgtaatccagcatataaacagaaccaatgacaaaaaccacatgattgtctcaatagatgcagaaaaggcctttgacaaaattcaacaacccttcatgctaaaaactctcaataaattaggtattgatgggccgtatctcaaaataataagagctatctatgacaaactcacagccaatatcatactgaatgggcaaaaactggaagcattccctttgaaaactggcacaagacagggatgtcttctctcaccactcctattcaacatagtgttggaagttctggccagggcaatcaggcaggagaaggaaataaagggtattcaattaggaaaagaggaagtcaaattgtgcctgtttgcagatgacatgattgtatatctagaaaaccccatcgtctcagcccaaaatctccttaagctcataagcaacttcagcaaagtctcaggatacaaaatcaatgtacaaaaatcacaagcattcttatacaccaacaacagacaaacagagagccaaatcatgagtgaactcccattcacaattgcttcaaagagaataaaatacctaggaatccaacttacaggagatgtgaaggatttcttcaaggagaactacaaaccactgctcaatgaaataaaagaggatacagacaaatggaagaacattccatgctcacgggtaggaagaatcaatatcatgaaaatggccatactgcccaaggtaatttatagattcaatgccatccccatcaagctaccaatgactttcttcacagaattggaaaaaactactttaaagttcatatggaaccaaaaaagagcccgcattgccaagtcaatcctaagccaaaagaacaaagctggaggtatcacgctacctgacttcaaactatactacaaggctacagtaaccaaaacagcgtgccatagagtgggccgtgcacagcagcattccatcagcaaatggaagtggtatatacatgattggtctcaagtaggtcctgaaggcacaaatgattctgcacgatatccagataccacccaaaagtggacagctgcagcactacagcccctttctaggacatccctgaaggacagccatgaagggaaatcttcccagtgggcagaacttagagcagtgcacctggttttgcgctttgcatggaaggagaaatggccagatgtgcaattatatactgattcatgggctgtagccagtggtttggctggatggtcagggacttggaagaagcatgattggaaaattggtgacaaagaaatttggggaagagccacccctgtcatcgcccaatgggcccatgaacaacgtggccatggtggcagggatggagattatgcatgggctcagcaacatgggcttccactcaccagggatgacctggctacagccactgctgagtgccccatttgccagcagcagagaccaacactgagccctcaatatggcaccattcctcaggccaggattcacgggtccaggaatcaacgggtggaagtggaagcggcaccactcaccatcactcctagtgatccactagcaaattttttgcttcctcctcccacaacattacattctgctggcctagatagtctgctggcctag

SEQ ID NO: 116583 - DNA, 1245 bp, Homo sapiens
atgctttgcagtatttgttggaagccaggcactgccagattcaatgcaattgcagaaattcattacacatccaaatctctaaaatgccgagtagaaaattacttacatcgagcctcagcagtaggaaaaggcagacattggaacacttcggagggctcagaagaagacaggaaaatgtgggaatgtttggaacctcctagagatttgttgaatggctttggcaaaaataccgatagtgatatgaaaaataaggtccaggctgaggtggtctcaggtggtgatgaggaacttgttgggaactggagcaaaggtgactgttgttatgttttagcaaagagactggtggcattttgcccctaccctagagatttgtgggactttgaacttgagagagatgatttagggtatcaggcagaaggaatttctaagcagaaaagcattcaaaagaccccagaatatagatccaccgacagcttgcaccatgtacctggaaaggccgcagacattcaatgccagcccatgaaggcagccaggatggagggtgtaccctgcaaagtcacaggggtggagctgcccaagaccacaggaacccacacctctggcatcagcgtgacctggagatactattctaggtttggagattcaggagtgaagaagacaaataagattttactccagaaagaacttaaccttccagagaaagagaaagtcaatcagaaagtccagaggcaggcagaggatgaaacatcttggattgtccctgacggtcagagatctgcgttaccagaaagcccttctcaggatttgtattctggccacgtgtggaacttaactgcatatcagaaacgtgctgtctacgtaagacatttgtgggaaaagcaagaagacaagacatatctttgtggtttagttgctataggagtaacccataaggcacatagaaaacatgagcaccaagtcatggagagacggctgggaacttcagctacaacagtggttctccatgaggtacttttcccaggtgacgtttggcaatatccagagatatttttgattgccacagtgtgggggtgggggagtttggcatctagcaagcagaggtcaggggaggtgctaaacctcttgcatacacaggacagccccacaacaaagaattattcaattgatgtcacgagtgccaaaaatgagaaactctggtctagaaggagagactggattgtgatgagtttacaggacagaacgtag

SEQ ID NO: 116584 - DNA, 1386 bp, Homo sapiens
atgacggatatacagtacaataataatatccctatgtttgaaataaggggtggactgacacctcacacggccaggtactcctctgagacaaaacttccagaagaacgatcaggcagcagcatctgcggttcaccaatatccgctgttctgcagccactgctgctgatacccaggcaaacagggtctggagtggacctccagcaaactccaacagacctgcagctgagggtcctgtctgaggaagttcaaaccaatggcaaagaagttaaaagctttgaaaaaaaattagatgaatggataactagaataaccaatgcagagaagtccttaaaggacctgatggagctgaaaaccaaggcacgagagctacgtgacgaatgcagaagcctcagtagccaatgtgatcaactggcagaaagggtatcagtgatggaagacgaaatgaatgaagtgaagcgagaagagaagtttagagcaaaaagaataaaaagaagtgaacaaagcctccaagaaatatgggactatgtgaaaagaccaaatctacatctgattggtgtacctgaaagtgacggggagaatggaaccaagttggaaaacactctgcaggatataggaaaacttccccaatctagcaaggcaggccaacattcaaattcaggaaatacagaggacgcgacaaagatactcctcgagagagcaactccaagacacataattgtcagattcaccaaagttgaaatgaaggaaaaaatgttaagggcagccagagagaaagtgttggaagttctggccagggcaatcaggcaggagaaggaaataaagggtattcaattaggaaaagaggaagtcaaattgtccctgtttgcagacaacatgattgtctatctagaaaaccccatcgtctcagcccaaaatctccttaagctgataagcaacttcagcaaagtctcaggatacaaaatcgatgtgcaaaaatcacaagcattcttttacaccaataacagacaaacagaaagccaaatcatgagtgaactcccattcacaattgcttcaaagagaataaaatacctaggaatccaacttacaagggatgtgaagggcctcttcaaggagaactacaaaccactgctcaatgaaataaaagaagatacaaacaaatggaagaacattccatgctcatgggtaggaagaatcaatatcgtgaaaatggccatactgcccaaggtaatttatagattcaatgccatccccatcaagcaaccaatgactttcttcacagaattggaaaaaactactttaaagtttatatggaaccagaaaaagagcctgcatcgccgagtcaatcctaagccaaaagaacaaagctggaggcatcacgctacctga

SEQ ID NO: 116585 - DNA, 1239 bp, Homo sapiens; identical to SEQ ID NO: 115459

SEQ ID NO: 116586 - DNA, 1740 bp, Homo sapiens
atgtggtgccaatcttctgagaccatctttcaggcccatggagagaaactagcagcaacttccaagccaccagaagcctctaaaacaatacattttcactttcactccattctgtctataaattttaaattcatatccaattatggtaaaaatattttatgccccagactgacacctcacacggccgggtactcctctgagacaaaacttccagaggaacgatcaggcagcagcatttgttgttcaccaatatctgttgttctgcagcctctgctgctgatacccaggcaaacaggatctggagtggacctccagcaaactccaacagacctgcagctgagggtcctgactgttagaaggaaaactaacaaacagaaaggacatccacaccaaaaccccatctatatgtcaccatcatcaaagaccaaagtattggaagttctggccagggcaatcaggcaggagaaggaaataaagggtattcaattaggaaaagaggaagtcaaattgtccctgtttgcagatgacatgattgtatatctagaaaaccccatcatcccagcccaaaatctccttaagctgataagcaacttcagcaaagtctcaggatacaaaatcaatgtgcaaaaatcacaagcattcttatacaccaataacagacaaacagacagccaaatcatgagtgaactcccattcacaattgcttcaaagagaagaaaatacctaggaatccaacttacaagggatgtgaaggacctcttcaaggagaactacaaaccactgctcaatgaaataaaagaggatacaaacaaatggaagaacattccatgctcatgggtaggaagaatcagtatcatgaaaatggccatactgcccaaggtaatttatagattcaatgccatccccatcaagctaccaatgactttcttcacagaattggaaaaaactaaagttcatatggaaccaaaaaagagcctgcattgccaagtcaatcctaagccaatagaacaaagctggagatatgtgaaacagagcaagaaaatagctgtctatgcagaaagaagcaggtgctcaccaggcactgaatttgctggcaccttgatcttggacttcccatcctccagaactgcaccctccagtaggggcagactgacgcctcacacggccaggtacccctctgagacaaagcttccagaggaacgatcaggcagcaacatttgctgttcagcaatattcgctgttctgcagcctctgctgctgatatccaggcaaacagggtctggagtggacctccagcaaactccaacagacctgcagctgagggaacgcagctcctcgccagcaacggaacaaagctggatggagaatgactttgacgagttaagagaaggcttcagacgatcaaactactccaagctaaaggaggaagttcaaacccattgcaaagaagctaaaaaccttgaaaaaagattagacgaatggataactagaataaccaatgtagagaagtccttaaatgacctgatggagctaaaaaacatggcaaaagaactacgtgatgaacgcacaagcttcagtagcgaattcaatcaactggaagaaagggtatcagtgattgaaaatcaaatgaacgaaatgaagcgagaagagaagtttagagaaaaaagagtaaaaagaaatgaacaaagcctccaagaaatatgggactatgtgaaaagaccagatgagatctacatctga

SEQ ID NO: 116587 - DNA, 915 bp, Homo sapiens
atgggaacagctccagtctacagctcccagtgtgagcgacgcagaagatgggtgatttctgcatttccaactgaggtaccaggttcatctcaccggggagtgtcggaaagtaggtgcaggggcagactgacacctcacacggccgggtactcttctgagacaaaacttccagaggaacgatcaggcagcaacacttgctgttcaccaatatccgctgttatgcagcaaccgctgctgatacccaggcaaacagggtctggagtggacctccagcaaactccaacagacctgcagctgagggtcctgactgttagaaggaaaactaacaaacagaaaggacatctacaccaaaaccccatctgtacgtcaccatcatcaaagaccaaagagaagtccttaaaggacctgatggagctgaaaaccaaggcacaagaactacgtgacgaatccacaagcctcagtagccgattcgatcaactggaagaaagggtatcagtgatggaagatcaaatgaatgaaatgaagctagaagagaagtttagagaaaaaagaataaaaagaaataaacaaagtctccaagaaatatgggactatgtgaaaagaccatatctacgtctgattggtgtacctgaaagtgacggggagaatggaaccaagttggaaaacactctgcaggatattatccaggagaacttccccaacctagcaaggcaggccaacattcaaattcaggaaatacacagaattccaccaagatactcctcgagaagagcaactccaagaaacgtaattgtcagattcaccaaagttgaaatgaaggaaaaaatgttaagggcagccagagagaaaggttgggttaccaacaaagggaagcccatcagactaacagctgagctcttggcagaaactctataa

SEQ ID NO: 116588 - DNA, 1393 bp, Homo sapiens
atgtgggaaagtttggaacttcctagagacttgttgaatggctttgacaaaaatgctgatagtgatatgaacaataaggttcaggctgaggtggtctcagatggagatgaggaacttgttgggaactggaacaaaggtgactcttgttatgttttagcaaagacactagtggcattttgcccctcacctagagatttgtggaactttgaacttgagagagatgatttagggtatgtctttatcagcagcatgaaaacagatgaatacagtaaattggtaccagtagagtggggtgctgctgaaaatatacccaaaaatatggaagcgactttggaactgggtaacaggcagaggttggaacagtttggaaggctcagaagaaggcaggaaaatgtggaaaagtttggaactccctagagacttcttgagtagctttgacaaaagtgccgatagtgatataaacaataaggtccaggctgaggtggtctcagatggagatgaagaacttgctgggaactggagcaaaggtgactctcgttatgttttagcaaagagactggcagcattttgcccctgccctagagatttgtggaactttgaacttgagagagatgatttagggtatctggtggaagaaatttctaagcagcaaagcattcaaaatgtcacttgggtgctgttaaaagcattccactttaaaagggaaacagagcataaaatttcagaaaatttgcagcctgctgatgcagcagaaaagaaaagcccatttgctgagaagaaattcaagccagctgcggaaatttgcataagtaatgaggagccaaatgttaatgggggaaatgtctccaggacatgtcagaggtcttcacagcagcctttcccatcacaggccttgaggcataggaggaaaaagtggtttcatgggcaggtcctagggtccccatgctgtgcggcgcctagggagttggtcccctgtgtcccagccactccagccatggctgaaagaggccaatgtagagcttgggccatggcttcagagggtgcagtccccaagctttggcagcttccacatggtattgagcctgcgagtgcacagaagtcaagaattgaggtttgggaacctccgcctagatttcagaggatgtatggaaatgcctgcgtgcccaggcagaagtttgctgcagaggtggggccttcatggagaacctctgccagtgctcagcccaaaggaggtgctcaggaagagctgctgaatgaaatgaccgagtgtatcacaaatgtgcaaactcctgaaagttataaacattatcgtagttccttgtttcttcctgtttcactgcatattctgtgcaaaggaattaaatgtacagtgaatagaagggaaggggattaa

SEQ ID NO: 116589 - DNA, 5231 bp, Homo sapiens
atgaaagtccagaagcttctggcagccaccttttccatcacagtacagccagccttggggggcagactgacacctcacacggccgggtactcctctgagacaaaacttccagaggaacgatcaggcagcagcatttgctgttcaccaatattcgctgttctgcagcctcaactgctgatatccaggcaaacagggtctggagtggacctctggcaaactccaacagacctgcagctgagggtcctgtctgttagaaggaaaactaacaaacagaaaggacatccaccccaaaaacccatctgtacgtcaccatcatcgaagaacaaagttgcaaagctaacagctccttatgagaactcaaaaggcactccttatgttcccagcaataaagatctaaggcccaacagatttgtgagtatccaagagatcgaattctttcttctgaggggggcaagaattgaggttgttgcagacccgtatagaagtgaatttgccactgatgcagaaaaagcagttgacaaaatccaccatctctttatgattaaaaccctcagcaaaatggacattaaagggacgtaccttaaggtaataaaaatcatctatgacaaacccacagccaacatcatactgaatggggaaaagtttaaagcattccctcagagaactggagcaaaacaaggatgccctctctcaccactcctattcaacatagtgttggaagttctggccagggcaatcaggcaggagaaggaaataaagggcattcaattaggaaaagaggaagtcaaattgtccctgtttgcagatgacatgattgtatatctagaaaaccccatcatctcaacccaaaatctccataagctgataagcaacttcagcaaagtctcaggatacaaaaacaatgtgcaaaaattacaagctttcttatacaccaataacagacaaacagagagccaaatcatgagtgaactcccattcacaattgcttcaaagagaataaaatacctaggaatccagcttacaagggatgtgaaggacctcttcaaggagaactacaaaccactgctcaaggaaataaaagaggatacaaacaaatggaagaacattccatgctcatggataagaagaatcaatattgtgaaaatggccatactccccaagaggactccattattatcgctgcctagtacattatatgaggagctgtggagacttaggtcctacttcccattgtgccctcaactttacaacatggagcagaataccacagactgggtaatttataaagaacagtgcatttggctcacagctctggagactggggagtccaagagcactgcaccagcatttggcaagggttatcccatggcagaatacatcatatggggcagattgacacctcacatggctggctactcctctgagacaaaacttccagaggaacgatcaggcagcaacatctgctgttcaccaatatccgctgttctgcagcctctgctgctgatacccaggcaaacagggtctggagtggacctccagcaaactccaacagacctgcagctgagggtcctgactgttagaaggaaaactaacaaacagaaaggacatccacaccaaaaccccatctgtacgtcaccatcatcaaagaccaaaggatcaaattcacacataacaatattaaccttaaatgtaaatgggctaaatgctccaattaaaagacacagactggcaaattggataaagagtcaagacccatcagtgtgctgtattcaggagacccatctcacgtgcagagacacacacaggatcaaaataaagggatggagggagatctaccaagcaaatggaaaacaaaaaaaggcaggggttgcaatcctagtctctgataaaacggactttaaaccaacaaagatcaaaagagacaaagaaggccattacatgatggtaaagggatcaattcaacaagaagagctaactaccctaaatatatatgcacccaatacaggagcacccagattcataaagcaagtccttagagacctacaaagagacttagactcccacacattaataatgggagactttaacaccccactgtcaacattagacagatcaacgagacagaaagttaacaaggatatccaggatttgaactcagctctgcaccaagtggacctaatagacatctacagaactctccaccccaaatcaacagaatatacattcttctcagcactacaccacatttattccaaaattgaccacatagttggaagtaaagcactcctcagcaaatataaaacaacagaaattataacaaactgtctctcagaccacagtgcaatcaaactcgaactcaggattaagaaactcactcaaaaccgctcaactacatggaaactgaacaacctgctcctgaatgactactgggtacataacaaaatgaaggcagaaataaatacattatttgaaaccaacgagaacaaagacacaacataccagaatctctgggacacattcaaagcagtgtgtagagggaaattcatagcactaaatgcccacaagagaaagcaggaaagatctaaaattgacaccctaacatcacaattaaaagaactagagaagcaagaacaaacacattcaaaagctagcagaaggcaagaaataactaagatcagagcaaaactgaaggaaatagagacacaaaaaatccttcaaaaaatcaatgaatccaggagctggttttttgaaaagatcaacaaaattgatagaccactagcaagaccaataaagaagaaaagagagaagaatcaaatagatgcaataaaaaatgataaaggggatatcaccactgatcccacagaaatacaaactaccatcagagaatactataaacacctctatgcaaataaactagaaaatctagaagaaatggataaattcctcaacacatacaccctcccaagactaaaccaggaagaagttgaatctctgaataaaccaataacaggctctgaaattgaggcaataattaatagcttaccaatcaaaaaaagtccaggaccagatggattcatagccaaattccaccagaggtacaaggaggagctggaggccagcatcatcctgataccaaagcctggcagagacacaaccaaaaaagagaattttagaccaatacccctgatgaatattgatgcaaaaatcctcaataaaatactggcaaaccgaatccagcagcacatcaagaagcttatccaccatgatcaagtgggcttcatccctgggatgcaaggctcgttcaacatatgcaaatcaataaacgtaatccaggatataaacagaacgaatgacaaaaaccatatgattatctcaatagatgcagaaaaggcctttgacaaaattcaacaacccttcattctaaaaactctcaataaattaggtattgatgggacgtatctcaaaataataagagctatctatgacaaacccacagccaatatcatactgaatgggcaaaaactggaagcattccctttgaaaactggcacaagacaggggtgccctctctcaccactcctattcaacatagtgttggaagttctggccagggcaatcaggcaggagaaggaaataaagggcattcaattaggacaagaggaagtcaaattgtccctgtttgcagatgacatgattgtatatcgagaaaaccccatcgtctcaacccaaaatctccataagctgataagcaacttcagcaaagtctcaggatacaaaatcaatgtgcaaaaatcacaagcatttttatacaccaataacagacaaacagagagccaaatcatgagtgaactcccattcacaattgcttcaaagagaataaaatacctaggaatccaacttacaagggatgtgaaggatctcttcaaggagaactacaaaccactgctcaaggaaataaaagaggatacaaacaaatggaagaacattccatgctcatgggtaggaagaatcaatatcgtgaaaatggccatactgcccaaggtaatttatagatttaatgccatccccatcaagctaccaatgactttcttcacagaattggaaaaaactactttaaagttcatatggaaccaaaaaagagcccgcattgccaagtcaatcctaagccaaaggaacaaagctggaggcatcacactacctgacttcaaactatactacaaggctacagtaaccaaaacagcatggtactggtaccaaaacagagatatagaccaatggaacagaacggagccctcagaaataatgccacatatctacaaccatctgatctttgacaaacctgacaaaaacaagaaatggggaaatgattccctatttaataaatggtgctgggaaaactggctagccatatgtaggagaaagctgaaactggatcccttccttacaccttatacaaaaattaattcaagatggattaaagacttaaatgttagacctaaaaccataaaaaccctagaagaaaacctaggcaataccattcaggacataggcatgggcaaggacttcatgtctacaacaccaaaagcaatggcaacaaaagccaaaattgacaaatgggatctaattaaactaaagagcttctgcacagcaaaagagaaactaccatcacagtgaacaggcaacctacagaatgggagaaaatttttacaatctacccatctgacaaagggctaatatccagaatctacaaagaactcaaacaaatttacaagaaaagaacaaacaaccccatcaacaagtgggtgaaggatatgaacagacacttctcaaaagaagacatttatacagccaaaaggcacatgaaaaaatgctcatcatcactggccatcagagaaatgcaaatcaaaaccacattgagataccatctcataccagttagaatggcgatcattaaaaagtcaggaaacaacagaccaagctccaatgtcttctctgtgaaactttctgagatccaatccttggctctcatagagactaggtgcttaatgaatgctgatgaacagggtgtgccactgattcaagaaatgctggaatcttgggcaagtatttgcaaagttcccaagtatccaaatgccgaagcagtgcggccagaagagcaaacacgtacagacagagacacgggaatgccattagctttaatatatgaacaagagattgctaaagtcatctaa

SEQ ID NO: 116590 - DNA, 2667 bp, Homo sapiens
atggctgggtactcctctgagacaaaacttccagaggaacgaccaggcagcaacatctgctgttcaccaatatctgctgttctgcagcctccgctgctgatacccaggcaaacagggtctggagtggacctccagcaaactccaacagacctgcagctgagggtcctgactgttataaagaaaactaacaaacaaaaaggacatccacaccaaaaccccatctgtacgtccccatcatcaaagaccaaagacagatcaacgagacagaaagttaacaaggatatccaggaattgaactcagctctgcaccaagcagacctaatagacatctacagaactctccaccccaaatcaacagaatatacattcttcgcagcaccacactgcacttattccaaaatcgaccacatagttggaagtaaagcactcctcagcaaatgtaaaagaacagaaattataacaaactgtctcttagaccacagtgcaatcaaactagaactcaggattaagaaattcactcaaaactgctcaactacatggaaattgaacaacctgctcctgaatgactactgggcacataacgaaatcaaggcagaaataaagatgttctttgaaaccaacgagaacaaagacacaacataccagaatttctgggacacattcaaagcagtgtgtagagggaaatttatagcactaaatgcccacaagagaaagcaggaaagatctaaaattgacaccctgacatcacaattaaaagaactagagaagcaagagcaaacacattcaaaagctagcagaaggcaagaaataactaagatcacagcagaactgaaggaaatagagacacaaaaaacccttcaaaaaatcaatgaatccaggagctggttttttgaaaagatcaacaaaattgagaccgctagcaagactaataagaaaagagagaagaatccaatagatgcaataaaaaatgataaaggggatatcaccaccaatcccacagaaatacaaactaccatcagagaatactataaacacctctacgcaaataaactagaaaatctagaagaaatggataaattcctggacacatacaccctcccaagactaaatcaggaagaagttgaatctctgaatagaccaataacaggctctgaaattgaggcaataattaatagcttaccaaccaaaagaagtccaggaccagatggattcacagccgaattctaccagaggctaaaacagtgccgaaaagcacatctagacccagtgtctctcacacaccggagcggccccggagcgcgggaggaccggctgagtgacagcggagacgcgtcccgaggttgttggaacctgtcacagcacgccgccgtcacgtcgcccgagtctgaggagcggcgcatcaggaccctcagctgcaggtctgttggagtttgccggaggtccactccagaccctgtttgcctgggtatcagcagtggaggctgcagaacagtgaatattggtgaacagcaaatgttgctgcccgatcgttcctctggaagttttgtctcagaggggtaccgtccgtgtgaggtgtctgcccctactggggggtgccctccagttaggtgtctgatgatcaacactgtgtccttaataggtgtcaagtttactgaagtgtttgattcaataaacatatctgaacatctagagcttgcatgcctgcaggatcacaactccttgctagcaagggaacaaaactggacagaggatgagtttgacgaattaacagaagtaggcttcagaaggtgggtaataacaaactcctctgagctaaaggaggaagttcgaacccattgcaaagaagctgaaaaccttgataaaaaattagacgaatggctaactagaataaccaatgtagagaaggccttaaatgacctgatggagctaaaaaccatggcacgagaactatgtgacgaatgcacaagcttcagtagccaattcgatcagctggaagaaacggtatcagtgattgaagatcaaatgaatgaaattaagcgagaagagaagtttagagaaaaaagaatgaaaacaaatgaacaacgcctccaagaaatatgggactatgtgaaaagaccaaatctacgtctgattggtgtacctgaaagtgacagggagaatggaaccaagttggaaaacactctgcaggatattatccaggagaacttccccaacctagcaaggcaggccaacattcaaatacaggaaatacagagaatgccacaaagatactcctcgagaagagcaactccaagacacataactgtcacattcactaaagttgaaatgaaggaaaacatgtcaagggcacccagagagaaaggtcaggttacccacaaagggaagcccatcagactaacagctgatctctcagcagaaactctaaaagccagaagagagtgggggccaatattcagtattcttaaagaaaagaattttcaacccagaatttcatatccagccaaactaagcttcataagtgatggagaaataaaatcctttacagacaagcaaatgctgagagattttgtcaccaccaggcctgccctacaagagctcctgaaggaagcactaaacatggaaaggaacaaccggtaccagccactgcaaaaacatgccaaattgtaa

SEQ ID NO: 116591 - DNA, 825 bp, Homo sapiens
atgagggctctcaaacttcagaggaggaaatcgttttggattgtcgtggcctgggaagcttttgtgcagctggtaaattatgaatgtaaagtaggagaatggaaaggcctagctcactgtgtttcacaaaacaataaatacagaaccacatacatcatagcaggggtccccaatccccaggaaccaggatacacagcaggaggccagttaaaaggaaatgatctgactgttctgcatctgctagtgattgaaggcaaatgggaagcagtgcgcaagttcccgttcaagaaatatatagtgaacacggctattgtgaaggaggcaaggaaatactgggtagaagagggcagttccctggcaaaggccacacgctcaaaccctggatacctgcagccctacatgagaacaggcattcctgtttttgcacccccaaagttgccttttggcccaccatgccctctatcctgcacgcatataaaccccaaaccccaagctccagaagcagaccagcagctccccatccatcttgctgaaagccatttccaccactcaataaaacctcgcatacatccttcaagtccgtgtgtgacccgatttttcctggatgctgaaagagagctcgggatacagaaagctgtcccctggtcctttacccttgtgaaaaagcagaagtcactgggacttccatcagtgcaagatttcggcagtgtctacaaaatgaacatttggtctgatgtagcgtgctgtgacccacagctgcaacaaccagctgcgtctgctcaaacttcagccatcagccagctcagtcgtgtaacggaatcttag

SEQ ID NO: 116592 - DNA, 735 bp, Homo sapiens
atgctggatgtgcctcgcattgccttgaccacagacactgaccacaaccagtgtattgttctgagctaccagcatgatgaagtctacattcagaaaaaaatgttacatccgaaactggacactcagccagaactgaagcaaagttccctggactgggaaataagctctcccttgtattcttgtttcctttcctactgtcacccaaaagacatctgcaatggctccctatcagagaaggagggagaatgggttagtgtagagttgcgtattgaaaagggggacaaagtaataggacaggtggtggaatctcagatgtcagaaagactacgacagaaatggcagacagcataccagcaggtgaggagatacgaggcaagccgactgacggcaaaacgacgtagcagagaaagagagaagaggagggacgtctggacaccgagagatgtttggctcggggcagtcagagcggagtccagcccctgggcggcccaactccaggggaagatcaccttcccacttcatccatccccacccttccagctccccatccatcctgctgaaagccatttccaccactcaataaaacctcgcattcatccttcaagtccgtgtgtgacccgatttttcctggattctggaaaagagctcggaatacagaaagctgtcccctggtcctttgcccttgtgaaaaagcagaaggtttttcctgatgaggactctctcagtaattcatag

SEQ ID NO: 116593 - DNA, 469 bp, Homo sapiens
gcaaaggcagacacgcagagctgagcaggtcaccactatacccagcgtggagacagcatgcccttcaagcccaggggcaacctgcagccctgaattagatcactcagaaatcacagacctcaggattcaagaacttcgggtctttcacaagttcacaggtgtagtggctgatgggagcttcaggttccaggtccggggcttcagaaatcaaggctccatggacagtgtctatatcatggacttcttgccttcagaaagtgatcaagtagtctggactggttactatggcttagtgtataacctggtgaaaatttcatgggaacttcaaggagacgaagaacaggatggacttagaaacatgatatggcaaacattgcagaaaacaaaggattatgaggaagatgtacgaatccaaaatgcaatcaatatagctcagttcagtgaccagaaataccaggaagaaggctga

SEQ ID NO: 116594 - DNA, 390 bp, Homo sapiens
atggaggagcctcaagaggaggaacatggcgctgcctccagaggctgggagggggtcctggctgacagccagcaaggatctgtggactcaagtcctacaaccacaagaaacccaatctgccaatcacaggcatgtgtttggaaaagggccccaagtccagaaaaactatctgcagcatctctcaaaggcttatgcccagttcaagtacgtttgcagattgagaacctgagcatgtgcaaaacgcaatgcgtgaaagtgggaagaactggaaggggagacaagaaaattatgatcagataccaacagagacccaagtctgaagagtgtggttctagcaccccaccccaaatggacgatgtcaaccaaggttctgtgggaagtcctctttag

SEQ ID NO: 116595 - DNA, 425 bp, Homo sapiens
atcatgcagagtattttcactgccctaaaagtcctctgtgttccctgcactcatctttcccaccttgtcttgcctgtttctgttaggtttagtccgaggcctagcagagggaatgggcagaagtttccagttccaggcttcaccccaggctcgcagcttcaagcagagcctgtcgcttaggctcccttgcacctggagtcgaaaccatggctcccattcacctgtctcttattttcctgtccttcccactcctcactcacctactattcatttccatttttggatgaggattctcctttattgctttttaactaaaaacctgttttagttagcatctttattctaatttctttaaatgctatgtcatactcagcaaggacatgctcatattaggggaagcacataaagtaagatatccctgagag

SEQ ID NO: 116596 - DNA, 848 bp, Homo sapiens
catctagaggctgggaatacctaactttctgggaatgcagcccagcaagcctcagcttcattttcctagccctcactcggaatggagtcgctctggttcaaacgcctctgacaatatcaccccgttttattttctatcacttaccactatctgaaattaagtagataatttgtttactctctgtccccacccactagaatgagaacgcggcccttgcatccttacgtgtgtctggcatataaggggtgctcaatgattatttgtttcatggatgaacagatttatggatggctgggtggatgacgatcttagaaggggttccagggctagctggctttctgtttctcccactcaagcacccaagccctgacccacaaagtaaaggaacaggcgaaacttctcgccaaatagcttcaaggcagaaactacgcagctggcttgggaattccgtacaacgcgaacgcgcatgcacaggcaggactgagcgtgtccatcttcgcattactcccggagatgactctcggaaacgttcatctgcatctcattaccgggtagcaggaataagtaggctgaccctcagtttggaccgggaacagctgtatctggagcagtccactgagggacctgaacaagataaacgggaagggaaaagcgccagaagttcgagcagagaacccaccgggcagccgcggacgttactgggaggaatgagggcgaggaagagaaagacgttagtcctcggaccgtttccgagagtcatctccgggagtaatgcgaagatggacacgctcagtcctgcctgtgcatgcgcgttcgcgttgtacggaattcccaagccagctgcgtag

SEQ ID NO: 116597 - DNA, 1482 bp, Homo sapiens
atgctggcatctcaactggggaaacatgaccctttcctcacaacacccttgaccttggcatttgttggctctcctctgaatcaccttcatgccttccattcagatcccggattagctgaactccccgtggtacctgctacagggtgcatcactgtctgcaggcttcatcctggcagtcctgctgcacctcagctctgcaactcccttctcctactggggactttcaaggatttccctaaaattggtaggagagttaaagaaggaatgatgatgggagtattggacagacacattaagtccaggacaagtatttcaaaccaggaatttttcctagagaaacataaatgtcttagaatgtgcccatttgtagcttcataccagcagctttgtatcagctgcactgagggtcttcagtttgcagcccaagtgccgggggacatttgggattctcagagactatcttatgcatccatggcaaagcaagaaaagtgtctttggcctggagaaccagatcccttccatctacatgtgaactggggcgacacaggggacactatctccagtcctttctatgatgagcatcttccggcagtgaggttcacctactgtgtggctgatgccatgttggggggtccgattccccagtttccccaacttgtggttatgcgggaggttcaaccaatgggtggtgctggcagaaaagtggcaggtggcgcttccagcagcagctctgcttccttcaaggcctgtcccatgctggccagcctgccttttgggggcaggcgccgagtcttgattccgtcgagtgcaaagcgtgcactgaacccggagtacattttcttcctctcagagcaacagaagcctgtgaaactcttgttggccaagcccagcagtaaatattcagaaataaaagaagagcaaacttttgcgtgtgcactttctactttgtacactaaaaggtcaaggctcaattggaataatctggagaagcttttctacaatgtctacactccagggcccacacctgccaatgaaatctgtaccttaaacctgaagaggaccaggtatcaatattctttgaaaagcagcccagatgatgcagctagtggcattaagtcctccaaatacatcgtccagccaataaatattgattctgacctggttgccacttgttctcctaacatcttctttcattccaagtcttctcgaaactataaaaagctaatttccagattcccaatctggccagaaggactcagtttttcaatcagatctcccagaggcctgagagcaatcattatgaatgagaaaaggcattttgtattctccccagcttgctcgcagacagaaggagcagggctggttacctacggaggtaatgctgaaattaaaacacttgtacctgctacgcatcttggacagatcaaagaagacgctgggcagcagcccgacacccaaacagagggtcagccgtcatcgtaa

SEQ ID NO: 116598 - DNA, 593 bp, Homo sapiens
gactgccagctcttgatggcagccagtgtggcctacaagatatggaggcctctggtgagtgtgagcagctgcctcaacccagtcctgtactttctttcaaggggggcaaaaatagagtcaggctcctccagaaactgaggcagaacaagttgggaatcgattgtgcctcatatcctcaggcgcaggagaagggagcatttattcagcagcttctgtcttcttctgggcagggccacacttcctggatgagcttcagggctgctcttcctgcaggggctttgagaagttctcttcaaaggggcgtgtgcagcgggtgcctggccatcctggagaacaaaaaagataccagaattgcagaatggataagaattcaccaaccaactatctgctgccttcaagaggcacacctaacacataaggagtcacataaacttaaggaggagcgactcaagccttcgcgaaagaaaataaccaaaaagcatacaaagaaacgtacggcgtctctcatattacacgccatgatatgctgcagatccctaaacagcagcaaaacgaaaataccaagtgcctcaattcgatcaatcaacgattaa

SEQ ID NO: 116599 - DNA, 1477 bp, Homo sapiens
ctcaaaaaaaaaaaaaaaaaaaaaaaattatttgttctgtctcaggtcttagggaccccttacctcagctaatgtctctgtcccctaaatgcacatcggtgggcagggcaaacccgtaggtgcccttatccctcccaaggctgcactgcaaagctcctgtgtttccattgcccactttcttctccctctcctttcttttctgattataccaaacaggaatgactcgtgtacttgagtcaaaatcctgatggcattgggaaaagtaaactgaaggaatttttgtacacttataccagctaagatgttctgactgcaacgacagaaaactccagctcaactggcttaaacaagaacagggctctctcacgtgagaagccaagagttagaacaactccaggcccagaatggtccggagctcaagctgcagttctcttagctcagtcttcctccgtactggtgggcttttaattggagactaagctctcctcatggtgacaagatggctgcaggagttcaggtatctcatccagaagcaagaaaagggcatgtcttgcttgcgtctctaggcgtaagggaactggtccagatgtccccgccccacatcccttcagatcccaattggccagaatatggcacgtgcccatgtttcaaccaatcatgggcaaggacatgggaccagcatgattggcctagacccctggagcctggggctgggcccagcatcccctgaatacacggccatctggaggagaaggtaactgaatttcactggggatctgtgataaaagggagcatgggtgttggggagacacctgttccagttgggtttcctatgaggtccaggacagggcttggtgggcactcggaagccagtgtctgaagtgctcagcatcctcctcttcctcggtggtgggtgtccaccgcccaggccccacccctggccttggacacttcatggaaacactgctggtttgctgtggtgttgggtggctcctatctattccccgtaagtgctggcctctgttgacaccatttctgctacctcatctgagattgttctcatcagctcacagagattcatttcagtgaatgaaccaaatctaagctccatctggatacaattagctggctccccacttcctggactgacggtaaccaccttttccaatgacccactcggctgaatgatcacattccttttctgcacccagtcgtggccccctgcaggctccacaccgcggggagtggccccaccaacctggactcttcgggcctgatggcggcctgagtcctctacaagtgaaaattcctcagaccacggttgcagctgagcatcctgggactgcctctcctccagccctggagactcctcattctggggaatggcaacttcgggctggactctgtggatgagtttctcagatgcctgggtgacaccaaggtagagcgggggacctgcagacttcgttccctgcat

SEQ ID NO: 116600 - DNA, 560 bp, Homo sapiens
gctgtatttcattacatcttaaatatctggatacccctaatgtctttcaagatgtcactgagagttcgttctggtcccgcaggtcgcggcagcgtgtgtctttgtcctgctcaggccccggacccttactccactcttggacactcatcttggaaagccgcggcaatggcaggagaaatggctgccccagcaaagtgtcacaggaatcatgcctggtcacctttacacaaacagaaccaccggtttacctggcttaaaagttttgctggacccaagaaacgggtagatttcggatacttctgcgcttccgaggggtcgggaaaggctctgcggttctaactaacccacgactgcccgggggtaccgagcattttagctgtggggtctcccccgcgccagcctctgggcgcccggtcccacaaatctcattgtgtcctcggttctgcccgcgccggctaggcgttcgtcttcgcgtttctggctgaaacccactgtctttggagattccgacccaacgaggccgaaactaagccgggagacctcccaaagtaaggagcacc

SEQ ID NO: 116601 - DNA, 576 bp, Homo sapiens
atggccgaagaaggcactgctgctgctggtgtcatggatgttaatactgctttacatgaggatggcctagcacgtggaattcacaaagctggcaactttagacaagcaccgagcccatcttttggggaacaaaaaaatgttgaaaactgccacaagagtaagcagaagctgcagcatcaacccaatggccaattaggaaccagagaacgagaagaacccagagatccccgcttactcaccaggagaaagaagagtaagcaggccagcagccctgccactcacagggctgtcccagattcacaggcaatggactccaggaaactactgaaggatgtgctctacaaaatggaggcaggaaaccaagaagaagggaaggaaaatagaaaaataggagattccacacagaagacaggtcaagggaatcccctgaatgatggtgtgggaaacccctgggaggcaaccgctccaagccaagagggctaccagatcacaacagaacacgtgagtgactctggtgtaggtactggatccacaagtatctttgaatcccctatgctgagcatggtactgaaatga

SEQ ID NO: 116602 - DNA, 1761 bp, Homo sapiens
ccgagtctgcagctccacactttaaatcatactcgaatgcaggacaagtcctaaatatttgccccttcccttgcagtaatttattttctgtatggactgtccctcccccagaggcttccccaccctccattgcctggcccaggtgagcagcttggcaggtctccaagtggaacccggtccagacagggctgcctcgacttcacctttccccctaacttcctccaagggatgctgccccttctcagccccctgcgtggtgtatattggtgggaggcatagaggatggatgttctagaaatgacgtaagacacagtggcccacccccaagttagggtggaaaaaagtttccagaggtttttaaagaaattggattaagctgggtccctaacttcaagaaattcccattatgctccttctcacctttcttttttgctaattatggaaaatagggcccatttcatcatagcctccttcccccgtgctccactacaatcgccgcattctttctagctgcagctggtttcttcaaggctcctgcttaaagtccacacgttattatggccgaaagcaacctggtgcttcggcctggataagagccccttctgcatcttattcacagcttgcaaccctcagcccctttgaatgagggcccctcaggggaaagggtcattacccttggaccctgcaaaccccagactcgttgagcagcaacgcaaatcacccatcatccccactgccccaatcctagaatatgtctgctctcctatgctctctgcagctgtaagccagaggggattcaaggtaaataggctttacagggctcccctcctccaaacacacacagaatgggctggtttctttacaagtttaaaaaaagcccccttctccatgcacaagttcaattccctccaatgctgtcgtcatcgacatatacaggtgtgtacgtaggtgtatgtgtgtactctgcacgtatatctcttctgtcttgaagaccctgttaactttgtgaaataacttccacatttcaacacacttcacagtacaggaaataaagtaatatgaaaaacaaaaaaaaaaaaaaaaaaaaaattgacgccgcgccaacaaatttccgttttcctactcgtttcgggccaggggttattttatgagcatctccgatgttgcacacgtggcgtgtgaaccgagagaaagaagatggagagatcaccctccagacgtcgtcgcctggaagaggccccaaaattgccatataagaacccaacacaccttgctcagcagcaggaaccctggagtcggctcaactcaacccccacaattacttccatgaggcgggatgcctactattttgatcccgagataccaaaggatgacctggacttccgcttagcagccttgtacaaccaccacactgggacattcaagaacaaaagtgagatactgttaaaccagaaaaccacgcaggatacctatagaaccaagatccaattccctggagaaatttttaacccctcccactccacccatcactttcctggctaacatcagacactggatcaaccctaaaaaggagtccatccacagcatccaaggatccatagtgtcccctcacactgcagccaccaatggaggctactcccgaaagaaagatggtggcttcttctccacctagtgttgacagatccctgaactaattatagtgaaacatactgcggcccacttccattaaatagatttgtgcaagaaaaaaaaaaaaaaaaa

SEQ ID NO: 116603 - DNA, 486 bp, Homo sapiens
atgggagatattacaactgatactaaagaggcttcattgtctgaggtaaatatccgaggttcattgtctcatgccaagaaaatcaaggacgtggacacacaagaacccagatccaataggtaccaggaccttcaaggtagcaatgctgaaaatgagttaaccaccaatgaactaacatcgcagctgtctagctggaggcagtggttacaacatcaatgtcttcaggttcctctgaaatccacaggaagtgacgctgccattccacctctgcccttcctgctgccttcctctgcttcttctttgctgccacttcagacagactggctcaaaggagtgtcaaagtggaagaagtccaaagctgagagaaaaggactcttccccaaaaccctcctgctcctgtcacaaggcagctccagcccgtcatggccatccaaagtagcaggaatcactcaccaggaaacagaagatgctggggagcagatctga

SEQ ID NO: 116604 - DNA, 1654 bp, Homo sapiens
aactaatgccctctccagggtcaccctagaatcggatctggtccccagcatcttctgtttcctggtgagtgattcctgctactttggattggccacgatgggctggagctgccttgtgacaggagcaggagggcttctgggtcagaggatcgtccgcctgttggtggaagagaaggaactgaaggagatcagggccttggacaaggccttcagaccagaattgagagaggaattttctaaactccaagaacaaggaccaagctgacagtgctggaaggagacattctggatgagccattcctgaaggagagccttgccagggaccgtcttcggtccatcatccacaccgcctgttttcatttgatgtctttcggtgttcactcacagagagttttttcatgaatgttcaatgttgaaaggtacccagctcctgttaagaggcctgtgtccaagctagtgtgccagtcttcatctacaccagtagcatagaggtagccgggcccaactcctacaaggaaatcatccagaatggccatgaagaagagcctctggaaaacacatggcccgctccatacccacacagcaaaaagcttgctgagaaggctgtactggcggctaacgggtggaatctgaaaaacggcggcaccctgtacacttgtgccttacgacccatgtatatctatggggaaggaagccgattcctttctgctagtataaacgaggccctgaacaacaatgggatcctgtcaagtgttggaaagttctccactgttaacccagtctatgttggcaatgtggcctgggcccacattctggccttgagggccctgcaggaccccaagaaggccccaagcatccgaggacagttctactatatctcagatgacacgcctcaccaaagctatgataaccttaattacaccctgagcaaagagttcggcctccgccttgattccagatggagctttcctttatccctgatgtattggattggcttcctgctggaaatagtgagcttcctactcaggccaatttacacctatcgaccgcccttcaaccgccacatagtcacattgtcaaatagcgtattcaccttctcttataagaaggctcagcgagatctggcgtataagccactctacagctgggaggaagccaagcagaaaacggtggagtgggttggttcccttgtggaccggcacaaggagaccctgaagtccaagactcagtgatttaaggatgacagagatgtgcatgtgggtattgttaggagatgtcatcaagctccaccctcctggcctcatacagaaagtgacaagggcacaagctcaggtcctgctgcctccctttcatacaatggccaacttattgtattcctcatgtcatcaaaacctgcgcagtcattggcccaacaagaaggtttctgtcctaatcatataccagaggaaagaccatgtggtttgctgttaccaaatctcagtagctgattctgaacaatttagggactcttttaacttgagggtcgttttgactactagagctccatttctactcttaaatgagaaaggatttcctttctttttaatcttccattccttcacatagtttgataaaaagatcaataaatgtttgaatgtttaatgtgaaaaaaaaa

SEQ ID NO: 116605 - DNA, 388 bp, Homo sapiens
gacttttttgacaattctgcccaggttaccattgcaggcattccatgtgatattagacacgtgtctcccaggaagattgagtgcaccactcgggctccaggaaaagatgtgaggctcaccacccctcagccaggcaatcgagggcttctttttgaagttggagatgctgttgagggactggaactgactgaagccaccccagggtacaggtggcagattgtccctaatgccagttctccatttgggttttggtcacaggaaggacaacctttcagagcacggctcagtgggttctttgtggctccagagacaaataattacactttctggattcaggcagacagccaagcttccttgcatttcagttggtcagaggaaccaaggacta

SEQ ID NO: 116606 - DNA, 687 bp, Homo sapiens
atgcaaaggcataagaatgatacaatggactttggggactcaggggaaagggtgggaggaaaactaatacatgtatatggctggattatcactggaagattggaaacttttgattttgatgctgagtacattgatagagcacggctcagtgggttctttgtggctccagagacaaataattacactttctggattcaggcagatagccaagcttccttgcatttcagttggtcagaggaaccaaggactaaggtgaaagtggcctccatcagcgtcggcactgctgactggtttgactcctgggagcagaatagggatgaagggacctggcagcagaagactcccaagttggagctgttgggtggagccatgtactacctggaagcagagcatcatgggatagccccaagcagggggatgaggattggtgtccagattcacaacacctggctgaatcctgatgtggtcaccacttacctacgggagaagcaccagatccgagtccgagcccagaggcttccagaagtacagattcaaacaaccattgaggagttacttgcagtaaaatgcaaactggaacccctttggtctaacatccttctccggcttggatttgaacgaggtgctgtccgtggcttcattctgattgtctttttcatcatggtcttctttctttctataaaatga

SEQ ID NO: 116607 - DNA, 807 bp, Homo sapiens
ccgtggcccactgtgctcagtgtgtcctgcagcagccacgggtattcccaaggacactgcagcatcccacctggggcactgcagttatctcaggtccatgcctcactgcagcttgaagcctgatgctgatgagtgtgcagaagagctatttgtgacaatgaagattttcctttgcaaatgcagcaacttaacggtaaaattgtggaaaggaggctgtgtgtgttcaccttggtcggtgctgcagcccaagcacagctggcgcctctagggcgcattcaagtgagggaatagttatacttggcaggcagtcctgaccagccattttgcccaggtacaagtagctcggttctgtgtgggaaatctggacagcacaccctttgcaccaccagttcacttgcttcacagcccaagtgtgccctttctgggagcaacttcactgttattctggctgctctcttcacctggggaaattctcagtgggatactaataggaccaatcgccattactgctctgatcttgaggctgccactgagtcttacgctgcccctcctctactatcctttccagagtcctctcacccttggcccacgcttctgctggcctacatgtctggtggggtgactcgagccctcatcactgaggacactgagcccctggtcaccacactgttctctggccgtagctgctacatttgtacatttacctcaaattgggcaggggagtatcaagagacaccccaatgtagcccctgaatgccaaacaggttatctcccgccctctttaaataacagcagcactgatatcct

SEQ ID NO: 116608 - DNA, 384 bp, Homo sapiens
cgatgttgatgtgggctctgtaatgcactttcctaatttcccttttaaggacgaggtactcactcccccagctgtcaaagtgttggctgctgaggactcagccaagtccctcttcaggcatttactgtggctgaagagagccacccatgatgagctgggctcttttaggtgagtctataagatgcaagtggttcattcagtatgaagtacaagcagagccagagatccccaggagctatatgagcaggtggctcagacccccacatcaccactattgtttcctctccctcagcaagtacccatgcctatggctgcagtggaggctccctgatgaacagctgagagaggagaaaaaaggtcaagatggatcacagatgggttcta

SEQ ID NO: 116609 - DNA, 693 bp, Homo sapiens
ctgtgatccatcttgaccttttttctcctctctcagctgttcatcagggagcctccactgcagccataggcatgggtacttgctgagggagaggaaacaatagtggtgatgtgggggtctgagccacctgctcataaagagggacttggctgagtcctcagcagccaacactttgacagctgggggagtgagtacctcgtccttaaaagggaaattaggaaagtgcattacagagcccacatcagcatcgaatctccaacacaagtctatgaagaagctagggatggcattaatactgccatcttgcagatcaagaatctgaagtatcacaaggttaaacaacttcttcagttcatggaaaatcaatccagcctcagaacaacagtgtctgaaccaggactgtccaataggaatacaatgtgagtcacaaatataatgctaaattttctagtaaagtgcctgttcccagggaaagggtccttcagtgctgcttcctgcccttttctcccctctgcaaagccacactgtgctccggggacacttggctgcagtgccctcactcttcacttgcagagaagcatctgtctctggcagatcttggctgtccagctccccccactgcaggctgaaatgattcattcctcaagaaggtgcccagcttgtgccttgggacctgtcaggatgaaggattcc

SEQ ID NO: 116610 - DNA, 1185 bp, Homo sapiens
atgaatcatttcagcctgcagtggggggagctggacagccaagatctgccagagacagatgcttctctgcaagtgaagagtgagggcactgcagccaagtgtccccggagcacagtgtggctttgcagaggggagaaaagggcaggaagcagcactgaaggaccctttccctgggaacaggcacttccacccatctgctccccgaggtctctgaacatccctcaggggctcagtggactgtcctggttcagacactgttgttctgaggctggattgattttccatgaactgaagaagttgtttaaccttgtgatacttcagattcttgatctgcaagatggcagtattaatgccatccctagcttcttcatagacttgtgttggagattcgatgctgatgtgggctctgtaatgcactttcctaatttcccttttaaggacgaggtactcactcccccagctgtcaaagtgttggctgctgaggactcagccaagtccctcttcaggcatttactgtggctgaagagagccacccatgatgagctgggctcttttagcaagtacccatgcctatggctgcagtggaggctccctgatgaacagctgagagaggagaaaaaaggtcaagatggatcacagatgggttggctttgtaaatgtacaaatgtagcagctacggccagagaacagtgtggtgaccaggggctcagtgtcctcagtgatgagggctcgagtcaccccaccagacatgtaggccagcagaagcgtgggccaaggaaagcagcagagctgagatttggacccagacttcagtctgccacgttgtctgggtatatccccttcaccatctctgaatctgtaacatcactgattaggggcaaggtgcaacagtggctgcctggcgaatggacgtcctcaatgcttgtgtccttgggaatacccgtggctgctgcaggacacactgaacacagtgggccacggttgggtctgagctgccagctgcaggtcagctctctgacttacgctatagagcctagtgatgcttacactatagaactctctggcactatgggcacttgcacatcccttaccttatttgatcctcctaagagccttgtaagggaaaacagcaggtatgatcgtgtccattgtattcatgaacagactgagatgcagacaggataa

SEQ ID NO: 116611 - DNA, 429 bp, Homo sapiens
ctgctcctagaggcccagcttctgtggcctcgttacctgcaggtattgggagatccacagctaagacgccaggacccactggaagcctagaaatggtgagagtgccgggtccgacatcccgagagagggggcggggctggttggaactggtgggaagtggctgtggcgggactctggcctccccgcagctggctccaaaatccgcggccccgagttctccttggcgcagctcggccctcagtccccttcagtcataggatggcggccgggctgacagctcggaccccgggcattctgtctcctccctgcgcagagactgtgccttggtctggagtcctctgtgggcagctctgcccccactgccgcagctctccccgattgtgcagggaccactggacggtcgtcaggggagaatactgactcaggatg

SEQ ID NO: 116612 - DNA, 375 bp, Homo sapiens
ggtggtccctgctcaatctgggagagacgcggtgctgcgaatgcagagctgcccagagagggctccagtccagggcacagtcactgcgcagggaagagacaggacgcccgggccggctgtcagcgcagccgccatcttatggctggaggaactggggccgagctgggcaaaaagaactggagcgcagattgtggagctgactacagggaggcctgagtcccgccacagccgcttcccaccggtttcaaccaacccctttccccctcgggatggcggacctggcactctcaccatttctaggcttccagggggtcccggcgtcttagctgtggatctcccaatacctgcaggccacagggccacagaggctgggcg

SEQ ID NO: 116613 - DNA, 579 bp, Homo sapiens
tccagtgatacatcacagttttttattgggcagagtccaagctgtagagagagtcatatcacctagttgctgtgtgtgacaatatataataatactccctgagaagtgggctcaagcaggagattcacatcacttaggtgagaggttcagagatatgtcacaatgcccccaggtgagtagcagtcaggaagaaaagttacataaactagggccagagcccagctatatgtcacaattaccgcagtggggagcactcaggtatgacaggagagtcacatcacataggagctgggccaagcaatatgtagcaatctgcgctgcagacaagtatttctttgaagctgggaccaccaacatatcacaatgccttctgagggcagtgagaaggcaaaaagtaacatcaccgtggtgttgcaaccagcaatatgtcacaatcttctttgcaggcagaaccatttttctaggcttcccaaggggtcctggcatcttaactgtggatctcccaatacctacaggtcacagggacacagaagctgggcctctaggagcagaagacacagaacagagaagaaagacctg

SEQ ID NO: 116614 - DNA, 375 bp, Homo sapiens
atgacactgcccgaacacctcggaggccccatggaccatcatggacctcgggtaactcttaaggtggaggtcccaaacccagatcacacttggtttattgatggtagttcttcaagacccaaccaattttcgccagccaaggcaggcttcccagggggtcctggcatcttagctgtggatctcccaatacctacaggtcacagggacacagaagctgggcctctaggagcagaagacacagaacagagaagaaaagacctggagctacgactgcagccagagacaaaggccgcgccaaatctcgaaagccgtcctgtccactccagctgcgtgcctgattggatggatcccagcccagagtccctgattggataa

SEQ ID NO: 116615 - DNA, 547 bp, Homo sapiens
ttttttttttttaaagggtaaaatgtaatctttaaaatgtcacacaactttacatgcatgctaaatttagaataccatctgtatttacgattttctcttattgactgtctccacgcgcacccactctgcagacgccctaaagagtgtctatcggatcaccctcaagttgggtcaaacggctcctcttctcggcttttcgggagcaacccctatctcaacattcaccatcttaagatgagcagactgcaagtttgcctctcccaccaagtatgggagcttgccgaagccggaaggaacagcgtttccgtccatcgagcgccaggtcaccagtcagctccagtcctattttgagttgaagtaaaagctcctccctagatggccagtgcacgtctttaaaaagcgactcctttcccacaaaggaaatacgactggttcgcatctatcaagggttggcgttgggataagagggtgaagtatcagctggccctggacaacgagattctctgaattcccggacccaataacgcgaccaagcaccgtgactccc

SEQ ID NO: 116616 - DNA, 518 bp, Homo sapiens
tggtccctgctcaatctgggagagacgcggtgctgcgaatgcagagctgcccagagagggctccagtccagggcacagtcactgcgcagggaagagacaggacgcccgggccggctgtcagcgcagccgccatcttatggctggaggaactggggccgagctgggcaaaaagaactggagcgcagattgtggagctgactacagggaggcctgagtcccgccacagccgcttcccaccggtttcaaccaacccctttccccctcgggatggcggacctggcactctcaccatttctaggcttccaggaggacctggcgtcttagctggggatctcccaatacctgcaggtcacagggccacagaggctgggcccctaggagaagaggacacagaccagggaagacgagacctgcagctcgggctagagcgagagacaaagtacccgccaaacccggaagccaccctgtccgctccagcttcgtgtctgattggacggtttccagcccagcgtccctga

SEQ ID NO: 116617 - DNA, 582 bp, Homo sapiens
ggtaaccgtttgcaagttccctccccatttaaaaaagtgggggtctatttcttccacccccttggaatctgagcttggcttctcgagtggcttttgaaatagactgggagtagaagtgagttgtgtcagcttgaatttaggcctcaaggggcgttgcttccattctctcttgcaaccaagttgagccaacatgtgatgaacccaggctaggctgctaaatcatgaaagacgtgaggctcagctgctccccacgtgacatggccgatggtccgccaatactcagaggcagagctgccttggtgtccacagatgcatggaggaaactggaaaagaacatcttccaatggtttctcccaagatattgggatctctgaagacaaggactgtgtcccagaaactcatcgactctctggtgtctctgggtctacgcacatgatgtctccaaggccagtgtggatgaggtggaaatttgctgtgggagaagcattggcaggtgaccctagaagagccaagcctgataccacgcatgcgatgagaggagcaccattaccaccaatggaggcagaactttctgcttcgtaa

SEQ ID NO: 116618 - DNA, 373 bp, Homo sapiens
aatgcagaaggtactagaggcaggatagggcccctgcttcagagagagactagactcccaaagtttgtcaggtaaaagatggatgatcatttttcacaaaacacagatgtgccaagggggagagagcactgtcctggagacatctgaaatcctccccaaggggactactgggagacaagaagtttccccatggagtagaataatggggaaaacagcctgttcacaaacagaatgcttcactggcttttgccataggtgctgtagatgttttgcagtttcaggaccggaaatctccaaagaacccagaaaatgcttcacgagggaggaagtcagcttaaatatttatcagtcccagcggcacaaagtcacaaag

SEQ ID NO: 116619 - DNA, 843 bp, Homo sapiens
cagaaaggacgagaacgagcaatcaaaggtccaagcctatccaaagagctaaatcaccaagtcaaatgtggattttgtaatgatgaactaaaaaaaaaaaaaaaaagtctggtgctcagatcaaaaagcaacaccaatgacaaagtgcgggatgatgaatcacacagggctcagctcaaccttcagaacaaaggcaagcattttggtagcacaaagctcccgctcgccccccttgcccagggcgcacctggccccgacatctacgcctaccctcacaggcctcccagagcccagctgccctctggcaagactcccccatgcaccccctgtggtagctccccctacagcagctccccctgtagcagctcccccctgcaccccctgcagcagctccccacatgctccccctgcagcagctccccctacagcagctccctcctgcagcagctccctcctgcagcagctccctcctgcagcagctccctgctgcaccccctgcatcccccgtggaagcaacttccacttcctacgccccaagtcacaaagaggcaggttcctcaagttttgggggataagttcaagtccagggagtctccgcaagcccataccctctacatgtccacattagagtccctgacacaatcaaagcctgtgaagctgcacccacgcttcccactcgatcggaaagtcaggcctgctcatctgcggaacttctggctcatttatgaaaactataagctccacaagagtaagaacaatcggtgtctgtttgttactgatagtatactaggggccaaacagtgcctggccatcaaaggacactgcaaagtatctgatgaatga

SEQ ID NO: 116620 - DNA, 468 bp, Homo sapiens
atatctgcccacaagatacttgctttgaagggctctttctcagccctggggatatgggcacagggataattggctgactcgagggctttcccaccagggttggcctgcagactatttctcagtcctggcatgtgagcgcagagctgttcagatagccaaggagcatgtctgtcaggggcagcacacaggtctgttatcgcaggctcctaattgtggatacaaagctgttgggcgggactggggcttgtctgtagtgggtggggcactgtgcggctgtttctcaggacctgggtgtgggcacatagctgctccttcaacccagaagcatgttggctgcttggagatatgagggcttctcccgcttggggaagggcattcaccagtttggctggctcgagggtgagttcaccctgggcaggactgttcctctggttctaagtgaggacagtaggagttgccttccttgct

SEQ ID NO: 116621 - DNA, 732 bp, Homo sapiens
atgctgcccgattgcctccgaagccccgtagaccatcacggacgccgagctttgggtaactctcacagtggaagaaaagtagaacggactaaaggtcttttaaaaacacacctcaccaagctcagccaccaacttaaaaaggactggacaatacttttaccacttttgcttctcagaattcaggcctgtcctcagaatgctacaaggttggggaagttctcctggataatatcctgcagagtgttttccaaatgcttcaaagagaatagaatacctaggaatccaacttacaagggatgtgaaggacctcttcaaggagaactacaaacaactgctcaacgaaataaaagaggacacaaacaaatggaagaactttccatgctcgtggataggaagaatcaatatcgtgaaaatggccatactgcccaagaattggaaaaaaactactttaaagttcatatggaaccaaaagagagcccgcattgccaagtcaatcctaagcaaaagaacaaaggtggaagcatcacactacccgacttcaaactatactacaaggctacagtaaccaaaacagcatgttactggtaccaaaacagagatacagaccaatggaacagaacaaagccctcagaaatcataccacacatctacaacaatctgacaaacctgacaaaaacaagaaacggggaaaggattccctatttaataaatagtggggtggaaagtggctag

SEQ ID NO: 116622 - DNA, 479 bp, Homo sapiens
tttacatgaacactgtgatgcatccaaaaatgtagcaactagaagctatttgccaactattcttgcatcagattctcttgaaggagatatctgcgtggtacacttccatggccaccacagtccatctcgaatgcctcacagaactccagagacctgtgttataatgttcccactaaggcttataaataccatactgcatacttacccaccactgacatttccaacactgtagggtgtctggaatgagactggggcctaataaaaaggagcatccatacaggaacttaaatgggctgtaccttgtagcatcccgaggacaggcccgaattcgcagaagggcaagtggtaaaagtattgtccagtcctttttaagttggtggctgagcttggtgaggtgtgtttttaaaagaccattagtccattctggcccttgaaaagaaggtaatgtggagtgggtagcctctgtattgattaagaag

SEQ ID NO: 116623 - DNA, 468 bp, Homo sapiens
agaacggactactggtcttttaaaaacacacctcaccaagctcagccaccaacttaaaaaggactggataatacttttaccacttgcccttctcagaattcgggcctgtcctcagaatgcttacaaggtacagcccatttaagctcctgtatagatgctcctttttattaggccccagtctcattccagacacttggaccaacttagactgtgcccccaaaaaaacttgtcatccctactattttctgtctagtcatattcctattctccattctcaactactcacacatgccctgctcttgttcacactgccagtttacactgtttctccaagccatcacagctgatatctcctcgtgctatccccaaactgccactcttaactcttgaagtaaataaataatctttgctgggaggacctaggacatctgattagagagtgcctaaggagattcagcatagtcctgc

SEQ ID NO: 116624 - DNA, 697 bp, Homo sapiens
atggccccaactaactgcaagggctctaggaaatgtggcagaccacatgaacagatgccccacccttatctccctttgctgactctcttttcggactcagcccgcctgcacccaggtgaaataaacagccgtgttcctcacacaaagcctgtttggtggtctcttcacacggacgcgtatgaaatttggtaccatgactcggattggggggacctcccttgggagatcaatcccctgtcctcctgctctttgctccatgagaaagatccacatacgacctcgagaaagatccacatacgacctcaggtcctcagaccaaccagcccaagaaacatctcaccaatttcaaatccagaaaagtagaacggactaaagggtcttttaaaaacacacctcaccaagctcagccaccagcttaaaaaggactggacaatacttttaccactttcccttctcagaaatcaggcctgtcctcagaatgctacaaggtacatcccatttaagctcctgtatagacgctcctttttattaggccccagtctcattccagacaccagagaacaaaccccctttgactgtaattttccattaccttccctaatcctataaaacggccccaccccatctccctttgctgactctcttttcggactcagcccgcctgcacccaggtgaaataaacagccttgttgctcac

SEQ ID NO: 116625 - DNA, 386 bp, Homo sapiens
atggtggaaggtgaagaaggagcaaagtcacgtcttatatggcagcaggcaaagagagcttgtgcaggggagctcccatttttaaaaccatcaaatctcatgagacttattcactgccacaagaacagtatgggggaaaccacccccatgattaaattatctccccctggcctcaaccttaacgtggggattattacaattcaaggtgcactaagatagggaagctaaaagcagacttggggggatatgcctgcagctacagaaagatgtatgggaacagacacacaactctccctcccagataagcacaacaaagagacacagaagcagtccaagcctctgataaactctcccacccagaatccttaaaaactctcagtctgtaa

SEQ ID NO: 116626 - DNA, 424 bp, Homo sapiens
aagcttcagaaaattgacgagcagttgctagcaatacagaacattgctgaaaacatagaacaggatttccccaagcctgaaatgctagatctacattgtgataagattggaccagtggatcacattgaattctcttctggccctgaattcaaaaaaacattagcttcaaaaaccattagcatttctgaagaagtgcgttttttgacccatatggatgaagaagatcaaagtgacaaaaaggagacttcagaacctgaattttcaataacagaaaattattctggtcagaaaacctgtgtgtttcctactgccgattcagctgtcagcctttccagttccagtgatcagaatactacttctcctgtgtttcagtacatccgctccagatgactggattgactgatattgcagacattattgatga

SEQ ID NO: 116627 - DNA, 1965 bp, Homo sapiens
ctggcagcttgcccctggcacccaagctctgccagcctcacccaacctagagccatcctccagtgcctaagccttccagaaaaattggacgagcagttgcctagccaatacagaaacattgcctgaaaacatagaaacaggatttcccccaagccctgaaatgcctagatcctacattgtgataagattgggacccagtggatcacattgaattctcttctggccctgaattcaaaaaaacattagcttcaaaaaccattagcatttctgaagaagtgcgttttttgacccatatggatgaagaagatcaaagtgacaaaaaggagacttcagaacctgaattttcaataacagaaaattattctggtcagacaacctgtcgcgtttcctactgccgattcagctgtcagcctttccagttccagtgatcagaatactacttctcctggtatgaatagcagtgatgaattgtgtgagagtgtttcagtacatccgctccagatgactggattgactgatattgcagacattattgatgaccttataattaaaagacggaggtttccagtgaagaacttggcttaacagaacaagctatgggcacctccagaattcagcattattctggcagacattcacaaagaactgacaaggaaagaagagagattcaagcctggatgaaaagaaaacgaaaagaaagaatggcaaagtacttaaatgagctggcagaaaagagagggcaagaacatgatcctttctgtcccagaagcaatccactttacatgacttcaagggaaataaggctgagacaaaagatgaagcatgaaaaagacagattgctgctctctgaacactatagtcgtcgaatctcacaagcgtacggtctgatgaatgaactgttatctgagtcagtacagctaccaactctaccacagaaaccattgcctaacaaacccagccctactcagtcttccagttgtcaacactgcccttctccaagaggagagaatcaacatggtcacagttttctaataaatcgacctggaaaagtcaaatatatgtccaaaccgagttatatccataagaggaagtcttttgggcaacctcaaggctcaccttggccacatggaactgccactttcaccatacagaaaaaagctggtggagccaaagcagcagtaagaaaggctacgcagtctccagttaccttccaaaaaggctctaatgctccgtgtcatagtctgcagcatacaaaaaaacatggaagtgctgggcttgcacctcaaaccaagcaggtgtgtgtagagtatgaaagagaggagactgtggtgagtccctggacgataccttcagaaatccataagattcttcatgagagtcacaattcccttctacaagacttgtctccaactgaagaggaagagccagagcatccttttggggtgggcggtgtggacagcgtgtctgagagcactggcagcatcctcagcaagctggactggaatgccatcgaagacatggtggccagcgtggaggaccagggcctgtctgtccactgggccctggacctgtaagacctggatatcattgggtttccatgcacaggccagcacctcagtaatgtggttctgaaagattaacaggtttaagggacagaagcaatgaaagaagcaatgggaattttccatttgctttcatattattacctggattagccattaccagaggaaaaataaacatttctcagtaactttgcctttatggggaaagggttgactattgatgtattatatgtttttgtatttgatgcatcattaggcataatttttaaaatgataagtaccttttcaagccaagtttgcataacctactttcaataaaaaccctctatcttgcctcctcctttattaccctctgagttttgagaaacaaccatatacagatgaatctaataggaaaaaaaaa

SEQ ID NO: 116628 - DNA, 524 bp, Homo sapiens
gaaaacagaggaagttaacttaggaggggtaagggaagaagaatgcaagattgacgttgcagaagccagaggccagggctaagaacagggtaagggacttttgagaaaggagtagcagagcattcacattagataagttctgaaaggtgtccactgagcctgggtttgttatctagaaggtgacctactgtaaactttgccagagcattttcagtggtgaagaagtgagacctttggctcccagtgaagggagcaagcccagttaggtttctttaacaagcttggccaggaagatggagcagttgctagagacgatggaaggtcaagggagacctttgcttcctccacaactgtggcaggctctggggcaccttcataagctgcacaaagagagcctgatgagagaggaatattctcccaactgggagttggatttagacaagtcactatgggcctcagagtcttctgtggacctgagagtctgggagtataatccttctaaccttgcaaggctagatgtctga

SEQ ID NO: 116629 - DNA, 370 bp, Homo sapiens
atggttttcccctggagttgggcgctcagtggctcaggctctcctccagccgccgtggccaaactctgcatagttctgcccgttgaaggcctgccgacctgcctgtgtctgctgcctgtgtctgttggtgtgcccttccgccggtcctttgaaggctattacttctatggctttcagtttggagaccagtccctacttcggcgttttgagagcaaaagaatcacgtgcagaaaatttgatactgttcaagcatctgagagtcttaaaagtggaattatcaccagtgatgttggagacttaactttaagcaagaggggactacgaacatcatttacatttaggaaagtgaggcaaacaccttgtaactgta

SEQ ID NO: 116630 - DNA, 1073 bp, Homo sapiens
tgagcaaccctcctccttccacctggagacaggtcccttatgcacaacaagctgcagctcttcaagggtctctgagcaagatcagctctgcccctgttaccacagagctcttccacagagaggatttccatggcataccgagacttgctgacagaggaggatctcagcttgtgaagcctgtgcttgtcttcagcccgtctccactcatcatccccttaactctgagtccaggtacctgtgatccagcatcacacctccgccagcccccaaccacaatcctcacaaagcactgcccagatatgcaactcagtggcaagtccccaactgaaaaggacccccaaaccatcaacagttcctctactgaggtcagttttgctgtccagactcccgtcattcttgtcgcttccaaccctgatgaagtcggtggcctaatgaagccaggggtccctccctatgaagataaatgcacacaactgtcccaggagctggaacagctggaggaggattccagagaaggcggaatgcttgcaggccccgctgactcacaccaacaggtgaggggaagggggaagacacgggtccctccttatgaagctaaaagcacacacatgacccaggagctggagcagctggaggaggtcccggggaaggcagaatgcttgccaacagccttcatgcccaaggcccactcttacatgacagaagagaacagtagaccaaggaacgtacaacggcaaatgctcagctctcatgagtggcatggattggtgcacaactgcagagtgaacgcttcaccggatgacctttctgatattgccggtcgacatggttattgttcagtggaggaagatctctccgagaagcctgtttatccaccaaagcgcagcgtgtttagaaaggtaggcggcaacttcatcttcagctttgtagaggaaggagagacccataaagcaggaaaatgtacccagcaggctccagcagacttgctcttgctcaaccccggcctgcatagactcatgggcccatttctgaaccagtcactggaaggagctggtgttcccaccactggctga

SEQ ID NO: 116631 - DNA, 438 bp, Homo sapiens
atggaatggatcttccatgaccacctggtcctgattctgtacaagtcaaaggccaaccctgcaaccttcctgatgcagaatctggttcacgcatggtgtgagcataatgaggtgggctgccgaaccatagttgcagtgcctcagtaccgagccccattttcggtggacagcactttgggtggggtgtgtgtgaactggagtgacaccttcctcctgaacggccaactgaaggagtacgtgttaaccgacggagggcgacgcgtgtccagcggcttggacaccaccctctacataccgagaacggcggacaaaagtgagttcatctgctccaaggctttggttccaaaagccaaactccagtggtcacctcctagtcaagtgctcagttttgaagtgtatacccctccgcccagattcctcacagacatctccctctga

SEQ ID NO: 116632 - DNA, 594 bp, Homo sapiens
atgaaaaaccactacacacctaccagaatgactaaaaataaaaacactgaaacacaaaatgttggccaggatttgcaacaacctgaactttcatgcactgttgggagaattggctcacacaattacaaagcaaagtcccatgataggctatcggcaagctggggaagagagaagctggtagtggttcagtccaagtccgaaagcctcaaactggagaggctgacggtgcagtcttcagtctgtgggcaaaggactgaaagaccctggaaaaccaatggtgcgagttccagagtccaaaagccaaagaacctggagtttgatgtccaagggcaggaggagcagaagaaggcatccagcacgggagaaagaaggcagccagaagactcagcaagccagcttatcccaccttcttctgcctgctttgttctagccacactggcagccgattggatggtgtccacccacattgagggtggatcttcctctcccagtccactgactcaaatgtcaatctcctctagcaacacgctcacagacacatccagaaacaatgcttaccagctatcttggcatccttcaatccaatcaacttga

SEQ ID NO: 116633 - DNA, 373 bp, Homo sapiens
tttcctcagggtctaatggtctatacctgctctgtgctccccatttgctgtttgcaaggagaaccaggctgcctgagagaatgtggggtgctctgctcttgagaatgaatagcttctttgctggggcacaatcttcaggtttgatctgacagttgtgattaaaaaagcgaggaagagaaggaaagaacccgtcactctcttgctttacagtctgtaaaacattaagttaggcatcgcgagtacataaaggttttgctttttgcccttaaggaaatatcaatccttttgaggagacaagacaaattcaataagaagctataagtgagcaagagtgtatataattaagtggcttaatgcagtggtaataaactgc

SEQ ID NO: 116634 - DNA, 441 bp, Homo sapiens
atgcttcctgctggaagtaggggcactactgggatctggggagcggaggccagcattgcgctgctaaacatcctactgtgcataggacaatcctcctttcttcccttccccactacaagctatctggtccaaaatgtcgatagttccaggatcaaacctgaagattgtggccccagcaaagaagctattcattctcaagagcagagcaccccacattctctcaggcagcctggttctccttgcaaacagcaaatggggagcacagagcaggggaatcggttcttccctctgtgctcagccttggtgaaactgccagtcaagctgccctgccttctcctcgtcaaggcccaactgggcctctctcccaggactttgtatctggaggctttaaatggaaccaagggtttgggagatgagggtgatcagagtttcttccagtga

SEQ ID NO: 116635 - DNA, 483 bp, Homo sapiens
atgagtggctggtcagatggatatataccagaagctaacattctgctgaattttatacgagaaaataaagaaacgaatgttctggatgatgaaattgacagttatttcaaagaatccataaatttaagtacaatagttgatgtctacacagttgaacaattaaagggaaaagctttgaagaatgaaggaaaagctgatccttcctatggcatcctttatgcctacatttccacactcaacattgatgatgaaactacaaaagtagttcgaaatagatgttccagctgtggttatattgtaaatgaagcatctaacatgtgcacaacttgcaacaaaaactccttggactttaaatctgtctttctcagtttccatgtgctgattgatctgactgatcacacaggcacccttcattcctgtagtctcacaggaagtgttgctgaggagactttgggctgcacggtacatgagtttcttgcaatg

SEQ ID NO: 116636 - DNA, 1335 bp, Homo sapiens
aaaaaagatcctaaatttgcagagactttgatagccaaagtaatcctcgataaactggatgcatttcgccacctgacgctggacggtcactgcccgggtttgggtggtaaagaacttaacgcctatattactgcgggtattgaaaactgccacgaaagttatcagctggaagaaggacgccggaaattacaactcggcatgtcgttgatgatccgcgaagggtccgctgcccgcaatctcaacgcgctggcaccgttgatcaacgaatttaacagcccgcaatgcatgctctgtaccgatgaccgtaacccgtgggagatcgcccatgaaggacacatcgatgccttaattcgccgcctgatcgaacaacacaatgtgccgctgcatgtggcatatcgcgtcgccagctggtcgacggcgcgccactttggtctgaatcacctcggcttactggcacccggcaagcaagccgatatcgttctgttgagcgatgcgcgtaaggtcacggtgcagcaagtactggtgaaagggttcttactgctcctgtgggaaatcagaaagagcagccagcagacaacaccaactgagatgaatgcagctgaaatggcacagctggttgcgggtgtggatgaagtcggacgcgggccgttagttggcgcggtcgtcaccgctgcggtgatccttgacccggcgcgcccgattgccgggctgaatgattccaaaaagctgagcgaaaaacgccgtctggcgctctatgaagagatcaaagagaaagcgttgagctggagtctgggccgcgcggaaccccacgaaatcgacgagctgaacattcttcatgcgaccatgctggcgatgcagcgtgccgtcgctgggctgcatattgcgccggaatatgtgttgattgatggtaaccgctgcccgaaattaccgatgcctgcgatggctgtggtgaaaggcgatagccgcgtaccggaaatcagtgccgcgtctatcctggcgaaagtgacgcgtgacgccgaaggagtattgttggtgtttttcttcttccagttaaaggagaaattagcattcttgaaaagggaatacagcaagacactagcccgccttcagcgtgcccaaagagctgaaaagattaagcattctattaagaaaacagtagaagaacatgattgcttgtctcagcaggatctctcaccgcagctaaaacactcaggacaccacgagctacccccagtcctgcacaccaccatgctgagggtccatcccaccctggggagtggaactgcagagacaagacctccagagaatacccaggccccagccttcttcttggag

SEQ ID NO: 116637 - DNA, 519 bp, Homo sapiens
atgcctggcctaaggtaccacctgaagcaggaagttgcaaccaaccctcttgtcaccgtccctggctattacatgggagcatctggaggcagccatcagtgggctgaacaccgtgatgctcaggttggccactggtcaggttgggtttggcagaggttggccatcgtagcggaattcacttatcaggccagggtccagggacaagtaacaggacattatgacagatgcttcgtgggagctggaaatattaaaagcaacagccctctgctgacattcgtctccagaacctggttcttactgctcctgtgggaaatcagaaagagcagccagcagacaacaccaactgagatgaatgcagctgaaatggcacagggtccaagtcagagtgcacaaggaaagcaggtggggctggcccaccagcaaaagcttcaggagagcaagggattggctgactgggctgcaagggtagtgttcaaagccagctgccttggaggccaagatagtggaggagctgcataa

SEQ ID NO: 116638 - DNA, 972 bp, Homo sapiens
  misc_feature (1)...(972): n = a,t,c or g
ttgggccttgtttgtctggcaagtcttaaatcccagactcatttgttcacttgcttgcttcctccttccctccctaccaaaacacagtatgatctgtcggttaaactcaatagactaaaaactccgggttcaaatgctagctcctccatcnnnnnnnnnnnnnnnnnnnnnnnnnnnnnnnnnnnnnnnnnnnnnnnnnnnnnnnnnnnnnnnnnnnnataaagtgcccattatagtgcccatttcctaggattctatccaggagatgatgtgcctatttcctaaggttcttataatgagattctgcaaggacagcactccaaatagtacaggcacatggttttgacagttgtttctgttattattgaaataaaaagaacctatacctgttcccaggaagctcagagtctctcacaggcccttttcagttcctggggctctcatatttcctcattctcccagactcctctgaccctactcttcctcaggttcttactgctcctgtgggaaatcagaaagagcagccagcagacaacaccaactgagatgaatgcagctgaaatggcacaggtcagtatggccaagaaacaccatgggctaatgttcagacccatggtatgaaagccagagtgggtgtgaatttcactcccatgtctcttatcttggatggttttcatctgcatgacccatttgcccaatgcccaatggatgtgaagatacagaaaagtccaggtactgttttcagggaagtaagatgtcctgtgccaactcttctcacttcagggtccaagtcagagtgcacaaggaaagcaggtggggctggcccaccagcaaaagcttcaggagagcaagggattggctgactgggctgcaagggtagtgttcaaagccagctgccttggaggccaagatagtggaggagctgcataaaacatggattttgcagccaagtaagagctggccttgattcca

SEQ ID NO: 116639 - DNA, 453 bp, Homo sapiens
aaaccttccacctggggctggcagagaacttgcatgcagctatctctggtgactgatcattaagccctgtggccttgaaagcagcagcgtgtggctaagcctgcagttggtgagagaaacaccttgagggacatctgtgtggcccatcacaagagcagtgtttgacagatggcattgcaccaaccattgctccctaacaggaagtgcatcagtaaccatgggagccaccagagaccaaaggccacacccagaaactggaaggatttccgccaaattcacttccatggagccaaatgataacaccactgatgaccagcagactgccatgtccacggggaaaagaattggcccaggaagtagggagacattcttcaccacagatgcccataatcttccaccatgattataagcttcctgaggtctctccagaagctgaggagatgccagcaccat

SEQ ID NO: 116640 - DNA, 345 bp, Homo sapiens
  misc_feature (1)...(345): n = a,t,c or g
aattttttaactgtggtaaatacatatagcatacaatttaccatcttaaccannnnnnnnnnnnnnnnnnnnnnnnnnnnnnnnnnnnnnnnnnnnnnnnnnnnnnnnnnnnnnnnnnnnnnnnnnnnnnnnnnnnnnnnnnnnnnnnnnnnnnnnnnnnnnnnnnnnnnnnnnnnnnnnnnnnnnnnnnnnnnnnngctgactggtgtctttataagaggaaaatgtcacatgaagacagaaacacacacggaaggtggccacgtggaagatggagggagagactgaattatggtgccacaagcaaaggaacacttggggctaccagaagctctaagagacgag

SEQ ID NO: 116641 - DNA, 770 bp, Homo sapiens
cagattaagtaactttattagcatcagttcagctaataaatgctgaaggcaggatttgaacctgcatctactatattccaaggattttttctccaattttttaactgtggtaaatacatatagcatacaatttaccatcttaaccattttattatactttaagttttagggtacatgtgcacaatgtgcaggttagttacatacgcatacatgtgccatgttggtgtgctgtacccagtaactccgttatttaacattaggtatatctccaaatgctatccctcccccctccgctgactggtgtctttataagaggaaaatgtcacatgaagacagaaacacacacggaaggtggccacgtggaagatggagggagagactgaattatggtgccacaagcaaaggaacacttggggctaccagaagctctaagagacgaggaatactaccgcatcggcatgtgtgataaaaatgagagaaaatggtaaaatatttgtcactttaaaagcactacagggatcatctcaatcagttttttgttttgtttttttaagtgacagacacaacttctttgctctttgcccctggtgtatggattggaatttaaactctaagtattaagattaggtctccacaactgattttttactatcatttttcctattggaggttcagggaaaagggaaacaaatgaaaagagaggcaatctctaagtggagatacacttttggaatgtgaagtagtagtttctagtttgtataaagcgctct

SEQ ID NO: 116642 - DNA, 984 bp, Homo sapiens
atgaaaattcccccaaatgagtccttctccgagggggtggaggtcacacagttggcacaattggtatcacaaccaactcgaggagacccagaggaagatgctgcgccaagagaagcaaagcgaaggagcgcgacccaggaggctagcgaaatccccgccaagcccccaggaggcggagagaagcccagtcgccaggcaccggccacggcgcacgccaacatccaggataattctcctttccaagcccgggagttccggggcaggcgaaaaaggggggatgggagacccacagtccctttaaccctcccccctgggcctgccaaccttttccgaaccccatgtcacacaacttcctcatcatggaaacttccactggctccccagggaggccaggttctcagaattatacctgtggatattgttgagcaacttgcccacattcactctcaactactaaaacatcactatgactatggtcaccttccacaaccagtgctggaacagggaagttttttaatgagagagaacaggttttgtaagagtgacaatggagagatgaatggaagtagtggttcaagagcagagtttcaaacccagacgtcttcacttaccaggtgcaataaagagcctagaaaggttgttggaaatcaggcaccgtgtatgaaatctaacaatgcgctcatcgtcatcctcggcaccgtcaccctggatgctgtaggcataggcttggttatgccggtactgccgggcctcttgcgggatatcgtccattccgacagcatcgccagtcactatggcgtgctgctagcgctatatgcgttgatgcaatttctatgcgcacccgttctcggagcactgtccgaccgctttggccgccgcccagtcctgctcgcttcgctacttggagccactatcgactacgcgatcatggcgaccacacccgtcctgtggatctacccactagtcaattcaccatcttgttga

SEQ ID NO: 116643 - DNA, 1119 bp, Homo sapiens
atgaaaattcccccaaatgagtccttctccgagggggtggaggtcacacagttggcacaattggtatcacaaccaactcgaggagacccagaggaagatgctgcgccaagagaagcaaagcgaaggagcgcgacccaggaggctagcgaaatccccgccaagcccccaggaggcggagagaagcccagtcgccaggcaccggccacggcgcacgccaacatccaggataattctcctttccaagcccgggagttccggggcaggcgaaaaaggggggatgggagacccacagtccctttaaccctcccccctggcctgccaaccttttccgaacccccatgtcacacaacttcctcatcatggaaacttccactgggttcggcgctgaggatgccaaactccatttcacaaggaacatgtcaacagctgggcttggggtttgaggaacagagccgctgcgattggaacagagcccggccaccctgttccaccactgtccactccgtagctcccagcctgccgccgcgcggtgcccgaacacgagagggcacctcctcccagatccggggcgcagaagccccgcggaggcagcctggcagggacacaagaaaaaaagagaattttggaccaatatccctgatgaacatcgatgtgaaaatcctcaataaaatactggtaaaccgaatccagcagcacatcaaaaagcttatccaccaagatcaagtcggcttcatccctggggtgcaaggctggtacaacatacacaaatcaataaatgtaatccatcagataaacagaaccaaagacgaaaaccacatgattatctcaatagctgcagaaaaggctttcgacaaaattcaacagcccatcatgctaaaaactctcagtaaactagggaagttcctgggctttgctccaaagctgccccggaatgttttggttggtttggagaaaagctgtggcgtctacaccacttgttccaagcaggcggccccctggtggctaacgggggaaattgccacagcaaccccaaccttcagcaaccatcaccctgatcagttagcagccagcaacatcaagacaagacgcttcacctgcaaaaagattatgactcactaa

SEQ ID NO: 116644 - DNA, 771 bp, Homo sapiens
atgaaaattcccccaaatgagtccttctccgagggggtggaggtcacacagttggcacaattggtatcacaaccaactcgaggagacccagaggaagatgctgcgccaagagaagcaaagcgaaggagcgcgacccaggaggctagcgaaatccccgccaagcccccaggaggcggagagaagcccagtcgccaggcaccggccacggcgcacgccaacatccaggataattctcctttccaagcccgggagttccggggcaggcgaaaaaggggggatgggagacccacagtccctttaaccctcccccctggcctgccaaccttttccgaacccccatgtcacacaacttcctcatcatggaaacttccactgggttcggcgctgaggatgccaaactccatttcacaaggaacatgtcaacagctgggcttggggtttgaggaacagagccgctgcgattggaacagagcccggccaccctgttccaccactgtccactccgtagctcccagcctgccgccgcgcggtgcccgaacacgagagggcacctcctcccagatccggggcgcagaagccccgcggaggcagcatttgggacaccaagatgatgtggctcaggctgctggctgtgcactgaggctccgttcccttctcttccttgtcatacagttaggttgtataccccaggctttctcacggggagatgcaaaagattacgtcaaagggatagtggagccacagataagaaaagccagggtcctagagtaa

SEQ ID NO: 116645 - DNA, 681 bp, Homo sapiens
ggaaaaacagatgttcctgctgtgatcagggatcttccttatcatctaaatgtactgccacagcatcaggtgtcaaaaagccactccggctgggaaatgcatattaatttgctgctccctggtagcggtatcctggctatggagaaaatctctttcagggtaaggaaatatgtgctcgggggctgcacaccaaccgagggagtgaaaagaaaaatcagatcaatcttgcatgaagcacttggtgaggagtggaggccagacgagctgggcagaaagaatgaagtacaggaagagtcaccgggacaggagccttctaggaagaagaggctgcagaaacgcagggactggctgacacttagggaaaatataaaagaaactacgttgaattatcggggacaggttcccccgatatgtggaggccatgaaggggtagggggaagtggcaactacatagcacagacacaaagacacaaacacaccatatcaccatgtagaggaatgggggagctggacaatgaagtggaatatgtgatggcaatgggcaaatgctacctgagagagaaggccggtagaccaaggctcttgcaagcctctggagagccaggtggctttcccaaggctagtgtgatcagcggtgatacagcagacaccactggatacaggccagcggggacagactga

SEQ ID NO: 116646 - DNA, 409 bp, Homo sapiens
  misc_feature (1)...(409): n = a,t,c or g
ctgggctcctatctaaaccctgagtgtgccataccattcttcccagcaacttttactttgttgactttgttggccgaggatttcctaatcacattgttgttttcctggcagttcccaaaccagatctagattcttacgtgtttctgagagtgagagaacgacaagaaaacatactggtagaaccagacacagatgagcagaggtgagtggcgtgcatctttcacagtgggcacattcctcccgatggagggccagccgagctctgcaggcaaatgtgtttccctctttttcagggactacgtgattgacctggagaagggctcaccagcacttgatcccgatacaaaaccattgcacctctgggttgcatctggagctgtccngcnaatttaaaactaggcataacagc

SEQ ID NO: 116647 - DNA, 381 bp, Homo sapiens
atgatgaggaagaaggaggaggaggagaaaaagaaggaaggacagggagctgacaaccaaggagtggctgataaatactccagctttctcccctcggtttccctgtatctcagcagtatggagcttgttaccaatgagaacctgcttactgactttaaactggtttccttaccttctcagttccatttctccatacctcaattgatgatttctggggcgaatgacaactgtgttcaagtcgtcaaaaatggctcctttcaaagccaaactggaattatggggacaaggagtgaacgttgggatttttggcatgtttcaaacattagcagagattttgaaagagacttagccagggccctttttctctcagctgctgcatga

SEQ ID NO: 116648 - DNA, 658 bp, Homo sapiens
gaacttacatacttaaacatcgaattgctttaagtgtttggcattcactgttcccgtgcatgccagcagcttcttactgcaaacacctgagacttgctatagagcagctggactatgttccgcccacacacaggacagggagctgacaaccaaggaggggggcgggatcaatactccagctttcccccctccatttccctgtatctcagcagtatggagcttgttatcaatgagaacctgctcgctgactttaaattgcttttcttaccttctcagttcagtttctccatacctcaattgatgatttctggtatgacctagcaaatacactgctttcactgaaatttcagtcttgcaatctgctttgggttccccaatctaagacagaaacatactcattttcccatcactggacttccaggttgttttcaatttttcactgttacaaacaaggtggcaacatttatctacaaacctctggatatacacgtaggaagcttttggtatttccactagtgaaactgctcagttgaagggtatgtggatcttcatctttaataaatattaccaacatgtgaaaagcccgacaatgtcaaggactggcaagagtgccacatgtgatgggtgtggcacgaggcctcgtccaagctggcgtaag

SEQ ID NO: 116649 - DNA, 433 bp, Homo sapiens
ggatgttggccaagactcagtcatccaaagcctgcctcagtccaggcaggtgcgctcacaccacgggcagttggcactggctgacgttgcagaactctcctggggccgtggactcagagcacctacagttgacttctccacatgggttgggcctctcatggcaagggtaccatgttccaagcagagtttccctaggatgagcagtcaaaagagaagatactaggatttgactccttaagatgtatcctcagaagtcacacgacagcacgtctgcggcatcatcgcagtcacagactccacacagatgcaaggtagttcagacgcacactgcatctttccacgggttaagtggcgagttacattacaaaagagtatgtcagatggcagatattctttgcaggaggctttttgaaaatacaatctcctatagaat

SEQ ID NO: 116650 - DNA, 463 bp, Homo sapiens
atggctggagctgtgcaggcccagtgggagtcaggagagcctggtagtagggaaacaaggaagaggctggcagcagcagtcccactgagtgggcacaaaaagagatgggaagacaaaaggaatggaggtttgctgagcacctatgacagacatgtcaaggctgtgctcaatggcccagcatcacccacgctatcttcttctattttcacagcaatgctggaagacagctgtggagcactgccacctgggcagatgagggaagcggcccagagagacagggacacatccacggtcatgcagctggtatgcagtggtgttacgatctgagccgaggtctcttaggctctagagtatatacgggttttgtccgttgccccatgctgcctggaaggaaacagggccagcactgactccaataatctcttccaacatctatgtaaggcctctttctttcctcgaaccg

SEQ ID NO: 116651 - DNA, 396 bp, Homo sapiens
  misc_feature (1)...(396): n = a,t,c or g
gttctcagaacggaaaacccccattgctggggggaatgccgtaggttatattgggaggctggatgaggcggtatctgatttgtatagggcccaggggattggtttgaccaggcttgtcattcacatagcccatgaaaaactggccctcctatcctagtcttttaatatgcaaacgcagctacctggctggttgccatgatgtcctgcccacatagtctctacctggctggtcgccatgatgtcctgcacacgtggcaacaaaaagtggcaggaaccgccatactgggtggacctggcttttagttgcctgcatttgcatatcaatgcttgcaggtctggtttttcagtctgctttctgttagaanagaaatgttttgggggcttgtttttcagtaa

SEQ ID NO: 116652 - DNA, 625 bp, Homo sapiens
aaagcagactgaaaaaccagacctgcaagcattgatatgcaaatgcaggcaactaaaagccaggtccacccagtatggcggttcctgccactttttgttgccacgtgtgcaggacatcatggcgaccagccaggactttgtagagtccccaccagtgagaaggccatcaccagatgtggcccctcaaccttggatttctcagcctccaacaactagtcctatcatcagagacaattctctaagcactgccacaacacagctttcatttcagccatatccaaacccaccctcagaggcacagaatgacctgggcatccaggaaaagggagcaagacggaagcctttaggtgcccttgggcacaacaggtttcaagctaacaaacatcaaatggctactgactgcggtgattttaggaaattactccatgaaaaccccaaactctttactggatccattacatttactacattacttactggatcaactggcaacctgataggatctagagaaagaatcaggactgcagcttctaatgagaagttggggctcatctcattaaaatgtcttccttatccccagcaatatggcttgggtgctgaagagaaccagccccagaggagttaa

SEQ ID NO: 116653 - DNA, 356 bp, Homo sapiens
  misc_feature (1)...(356): n = a,t,c or g
ntttcaatccaagggaagccattagggactgtgccatgcactttggcacagagattgcgcttttcccatggtcttcacaacccacagaccaggagattccttccagtgcctacaccaccagggccctgagtttccagcacaaaactgggaggccatttgggcagacaccgagctagccgcaggagnnnnnnnnnnnnnnnnnnnnnnnnnnnnnnnnnnnnnnncatacgccagtggcgcctggaacaccagcaagacaaaaatgttcgctcccctggaaagggggctgaagccaagtagtctggctcggtgggtcccacccccacagagctgagcaagttaagatccactggctt

SEQ ID NO: 116654 - DNA, 373 bp, Homo sapiens
  misc_feature (1)...(373): n = a,t,c or g
ggggttggggaactccctcttcaatccaagggaagccattagggactgtgccatgcactttggcacagagattgcgcttttcccatggtcttcacaacccacagaccaggagattccttccagtgcctacaccaccagggccctgagtttccagcacaaaactgggaggccatttgggcagacaccgagctagccgcaggagnnnnnnnnnnnnnnnnnnnnnnnnnnnnnnnnnnnnnnncatacgccagtggcgcctggaacaccagcaagacaaaaatgttcgctcccctggaaagggggctgaagccaagtagtctggctcggtgggtcccacccccacagagctgagcaagctaagatccactggctt

SEQ ID NO: 116655 - DNA, 723 bp, Homo sapiens
atgttgatggcagcagccgcctgcctggagtggtggctgcgaagacaccagctgcaggtggggaggcgctgccttggctttgagcttcatggagctggcaacaagaaagaaagaagagagaaggagagacagctgtggccctttggggatcccagacctaggagctccccaaaccagggctgtgccaccctctctgaggctctgcagattcctggcatctccaagcttctgggtgctaccgcattccctggtgccagctgtggaagctgcttcaggaaaatctaccaactgggtataagtggagacactattgttgattttagtggaaggaagatgtgtaatagcagttttaataggagagaaaacagagttcttatagaaatacatgaagataagccagtactgaaagtactcccgccaccaagcttgagcctccctcgagttcagactgctctgctggcagcgagaatttcaagccagtggatcttagcttgctgggatctgtggggtgggacccaccaagccagaccacttgggctccctggcttcagcctcctttccacaggggtgaacggttctgtgtcatgggtgttccaggtgccactggggtatgaaacaaatctcctgtggctcgcttggtgtctgcccaaacggctgcccagttttgtgctggaaactcagggccctggtggcataggcaccggagggaatctcctggtctga

SEQ ID NO: 116656 - DNA, 463 bp, Homo sapiens
aaacgccctgcccaacaaatactcagaatccagggtgttcatatttctccatggttcaatctctcacaggtcactttccattcaaaggattatggagaccaaataagacaggattctttcaggtatcaacccagagtctttaggtcttctctcagccaaggcatcgagtgaaaatacaatttatttttcggattcctctggaggattaaaaagtttctttcgcattgcaatgccatgctccctgctcttggtcctgttttatacgtactcattcttcaggcattttctcaactcccgatcaacatcattacaataaccaaaaaatttcagaatgttgtgccgactcgtggccacaccgggagaactgaagcggcagtagccgagaggagacgcccgacccgaaggccggctgctagggagcagacagctgaaccgcttgccagacgcgaattccagcactctc

SEQ ID NO: 116657 - DNA, 623 bp, Homo sapiens
atggatctctgtcagaaaaatgagactgacttagaaaatgctgaaaataatgaaattcagttcacagaagaaacagaaccaacctatacttgtccagatggaaaaagtgaaaaaaatcatgtttattgtcttctcgatgtcagtgacattacgcttgaacaagatgaaaaagccaaagagtttattattggaactggatgggaagaggcacctccccagcgcagcagcccggctgtgggcctgcggcagccgggtcttcctggtccccacctcctggggccgacgggcggcaggaaggggctcggcgggacgcgccatcagggacctgaggaggaacaacggaacgcgttcggaacggcctggactcccgagactcacccgactcgtggccacaccgggagaactgaagcggcagtagccggcggagacgcccgacccgaaggccggctgctagggagcagacagctgaaccgcttgccagacgccgaaacccagtgacgccctacaccgctgcaccgagctcccggttccccgaccccggcgcccgcgggccccaaggcgcatgcgccgcctgtcctggaggggcccatttccttccgtcgtgtggggaggcacagtgagtc

SEQ ID NO: 116658 - DNA, 464 bp, Homo sapiens
gcacggtggagcggtggagggcgtcactgggtttcggcgtctggcaagcggttcagctgtctgctccctagcagccggccttcgggtcgggcgtctccgccggctactgccgcttcagttctcccggtgtggccacgagtcgggttgcactgctgtgatccatcctcatctcctaaagatgcatcctgacttatctccacacttgcacactgaagaatgcaacgtcttgattaacttgcttaaggaatgtcacaaaaattacatagaaaacaggaccaagagcagggagcatggcattgcaatgcgaaagaaactttttaatcctccagaggaatccgaaaaataaattgtattttcactcgatgccttggctgagagaagacctaaagactctgggttgatacctgaaagaatcctgtcttatttggtctccataatcctttgaatggaaagtgacctgtgag

SEQ ID NO: 116659 - DNA, 836 bp, Homo sapiens
  misc_feature (1)...(836): n = a,t,c or g
ttttttttttttttttttatttaaattattttattgaaggagataagttactcagatattaactggttgtaggcaaagggaataaacatggtgaagtcaggtttgctggtaaaggggagacagtactaaacgccctgcccaacaaatactcagaatccagggttttcatatttctccatggttcaatctctcacaggtcactttccattcaaaggattatggagaccaaataagacaggattctttcaggtatcaacccagagtctttagggtcttctctcagccaaggcatcgagtgaaaatacaatttatttttcgggattcctctgggagggattaaaaagtttctttcggcattgcaatgccatggctccctggctcttgggtcccgttttctacggtactgttcgtcctaggctactcagggaggctgaaggtgggaaggatcacttggagtttgagggcttccgtgagttacgatcaccctactggcactccagcttaggtgacagagcaagaacctcattcttcaggcattttctcaactcccgatcaacatcattaccataaccaaaaaatttcagaatgttgtgatttttgtgacattccttaagcaagttaatcaagacgttgcattcttcagtgtgcaagtgtggagataagtcaggatgcatctttaggagatgaggatggatcacagcagtgcaacccgactcgtggccacaccgggagaactgaatgcncagtagccgcggagacgcccgacccgaaggccggctgctagggagcagacagctgaaccgcttgccagacgccgaaacccagtgacgccctcc

SEQ ID NO: 116660 - DNA, 869 bp, Homo sapiens
  misc_feature (1)...(869): n = a,t,c or g
tttttttttttttttttatttaaattattttattgaaggagataagttactcagatattaactggttgtaggcaaagggaataaacatggtgaagtcaggtttgctggtaaaggggagacagtatctaaacgccctgcccaacaaatactcagaatccacggttttcatatttctccatggttcaatctctcacaggtcacttttccattcaaaggattatggagaccaaataagacaggatttctttcaggtatcaacccagagtctttaggtcttcttctccagccaagggcatcggagtggaaaaattacaaattttatttttcgggattccctctgggaggattaaaaaagtttcttttcgcattcgcaatgcccatgctcccctggctcttgggtcctgttttctacggtacgtcattcttcagggcatttttctcaactcccggttcaacatcattacaataacccaaaaaatttcagaatggttgtgattttngggtgacattccttaaggcaagttaatcaagacgttgcattcttcagtgtgcaagtgtggagataagtcaggatgcatctttaggagatgagggatggatcacagcagtgcaacctgcatgatgggatcaacagtaccccaaacctcagtgtcatccaatgtacccatgtaagaaacctgcacattacttatatccaaaatccgactcgtggccacaccgggagaactgaagcggcagtagccggcggagacgcccgacccgaaggccggctgctagggagcagacagctgaaccgcttgccagacgccgaaacccagtgacgccctccaccgctccacacgaaatcgtcgacacgggaattcgggacc

SEQ ID NO: 116661 - DNA, 528 bp, Homo sapiens
ttattgaggctgaaccaaagagttgaagactggagctctctcgaatgcctggtttggagatgtctgggattcgcttctcctaatgatcttgcttctctcgcgaaaactgcagatttcttcatcctccggttgaacgttcttggggagccgcggccgacgcgcctcgcactgatggccaccagggggagccccgcgcgcttcctccttccccttgtgttcccgggcgcacttcaaaacgctgacgttctccttcgtccctctgggggcgcccgaggggccctcgcagaagatgaggtgcctttccagccaggcttctcgcgtgcagggcttgggaacagtgcatccccatcctaccaagcagtcccttcctcttcatttgcatcgcgtccgtagtcttatttttcagtgaactggagaacagaaaattttaaaatagatttttctaatattccagaaggtcaaacacctttccgcaaagtatctagcatactaaaggggaagtaattttacatgtctggaaggtgtatt

SEQ ID NO: 116662 - DNA, 1200 bp, Homo sapiens
cgagccaagcatctggcagccaactggaatcgcatcaggacctccaggaggactattatccatatcccatcattagggtattcccagcctgtgagagaacatattgccgatttcaacacacagcagaacatgcagctggggaggctgtgtgacatcttagatgccaatgtgaatgtcatctacatctgctcccatcatatgaatgacgagttagtgctgtattacaaaaaaatcctaagtctacatgcagccgtcaaatctgggaaccttgaggacagaagtgacctgcaggacaggttcaaaattatcacacctgaagctgtaaacatcttccctgtgtatggactagaaaaaaggacaccttttaacaagaataatatgatcttcccccagaagcatcatatgtgcctggccactcacctgatgtacagtcccaaggcaatcaaaagaataaaaaatctcatccgaggaacagaggcctacatcgtcagcgggctcctccacagagatgatttagctgtggccgatatgttagacatacccatcctgggctctgagcctgaactagctcatctttatagtaccaaatctggaggcaaacgtgtctttgacagtgccaatgtggcagttcctcctggaatatatgatatttatagtcagcaacagatgatagagcagctgagtcagctgataactgatcacctgcaaatacagcgctggctctttaaaatggactctgagttccgaggaaatgggactgcattttgtgatattccttcctacctaaagtgctacaaatgggtgctaaaggagagtagcagatatggccttgaagactggagaaagaaatgggcacaagtccttgcctttgtgactcataccgtgtgctgcccttgtggcaagctttctgctttccagagatttgtgggaaacgcaaatattcctggaacacagaggccactgctctcaaatttcttccctttcctagataacagaagagctggtctccttttcccacaaggcagcaaactgggagctgattcaaatccggagcacctttcatggtgctccccactttacactctgaagaggcagcagggccggtggggagcacttacccaggagtcagaggcagccagagagcacctgcggcctcccagtgtgactggagaagccctcgttccctcttttgtgacatga

SEQ ID NO: 116663 - DNA, 501 bp, Homo sapiens
  misc_feature (1)...(501): n = a,t,c or g
agggaccggccngnggagaattgganttaatgaccggccgtacgaattcggcacgagcagcagcagcagctgccgcagctggagccacagcccgagtgccagggtcccgtggaggctgaggccaggcagctgaagagctgcatgaagccggtgaggcgcaggcctgccgaggaggaactgaagacgaagaacatggatgataacacctttgccatggcagagcatcctgatgtccaggagtcagtgggtccactggtagcccccacccctctccgtccatggccccagatgacacttnnnnnnnnnnnnnnnnnnnnnnnnnnnnnnnnnnnnnnnnnnnnnnnnnnnnnnnnnnnnnnnnnnnnnnnnnnnnncaaagattgctgccttttccttcctctgggaagcttcgtcccagaggggcacctgccagatgccagccggagctcttgtatatgaggtgaaaagcaatcacggagttaaaagaagacaagctgaaat

SEQ ID NO: 116664 - DNA, 753 bp, Homo sapiens
atgggggaactaaatcaaggcagctggaggcaggggcaccttcctctggatgctgcgaatggaatagccatccgggtgccccgaaggaggaaagatgagagcagaaagaatccaactaggaaaccacacagttggaaaccaacgaagaattttgaggatgacgttgaggtcatgaagaggtcaatgagcataaggattgaagacacccactcaggcccctctgctgcaggtgtgctggagtttgctggaggtccactccagaccctgtttgcttgggtatcaccagcagaggctgcagaacagcaaagattactgcctgttccttcctctggaagctttgtcccagaggggcacctgccagatgccagccagaactctccttccaaacttcctagtggctttgtttacactgtgagaggaaaactgcctactcaagcctcagtagtagtggacgcccctcctgccaccaagctcgagtgtcccaggtcgacttcagactgctgtgctggcagcaagaatttcaagccagtggatcttagcttgctggcctctgtggggcctagggtaaaccttcaacaagagtcttctcattatggaaaaatctctgtgactgtggctggccattgccctacccatgccacaggtcgaattcttgggaagcaggctctgagatggagcccaatgtgcagtatgttcattggacgtgcccttgggctcgtacctgtggagggaggccttctgcagattgcatga

SEQ ID NO: 116665 - DNA, 2274 bp, Homo sapiens
atgaggggcagtgttcaaatgttcacaaatgggaagggagctgagcaccatccttcattcctgcaagcgtggccatcattggccttgcaagccctgacctggctgtctacagccttgccagcatgggtcatgcttcttacatgcatgggcaatctacacccagggatcttgtttgttgctcctttcattgatatgtcatcagcaagcacctctgcagaggccaggacacagggagaagacgccatctatgaaccaggaaacgggtcctcaccagacactgaatctgctggttctctgctcttggactctctggcctccagaactttttcgggcaaacccctacctctgccttctctggtgtctgcgacccaggatctgaccactgacgttacccctgcagcctggctgcagagactcaaagtggaccaacgatcaacgtcaccagaaattttactctacctgttgggaaagggggatctttttctgctagagtttctaagttgctatagtggatgcctccagtgtatgtcaatttgtagcaggatgagccgcagacaaaactcctcagacaccgagttaaagaaggaaggggtttattcagctgggggcattggcaagactcctgtctccaagagccaagctccccgagctgtgataaatgagagcccaattccagcatctattgctgagatgttctccagcagtctgggaaaatgtctgcagcatttcctggtgtctttccctcacaacgtctccaagccttcccctaagttagctttaggggttgggaaaaacaaagtactgtcccttggtctgggttgcttggatccccagtggaaaatactcattgtcatagtgaatggctttctgtgtggcaagcaacaggtcctagaccaaactcctggtgtttcattagcatttccaaagatagctgaaagagatagcacctgggggaaaggccagctgtggggcagcttcagcagacttaaacgttcctgcctgtcggttctgaagatagcagtggatcccccagcacagtgctcaagctctgctaagggacagactgccttctcaagtgggtccctgatccccatgcctcctgactgggggacacctcccagcagacacctcatacagaagagctcccgctggcatctggcaagtgcccctctgggacgaagcttccagaggaaggaacaggcagcaatctttgctgttctgcagcctccactggtgaggcaaacagccaggcaaacagggtctggagtggaccttcagcaaactccagcagacctgcagtcgaggggcctgactgttagaaggaaaattaacaaacagaaaggaatagtatcaacatcaacaaaaaaaaatgtccacacaaaaaccccatccgaaggatcacaactcctcaccagcaagggaacaaacagtatggagaataagtttcacgaattgacagaagtaggcttcagaaaaataaccagtttagagaagaacataaatgacctgatggagctgaaaaacacagcacgagaacttcgtgaagcatacacaagtatcaagagcagaattgatcaggcgaaagaaagcatatcagagattgaagatcagcttaatgaaataaaatgtgaagacaaggttagagaaaaaagaatgaaaagcaacaaacaaaacttccaagaaatatgggactatgtgaaaagaccaaacctacgtttgactggtgtacctgaaagtgacagggagaatggaaccaagttggaaaacactcttcaggagattatccaggagaacttccccaacctagcaagacaggccaacattcaaattcaggaaatacagagaacagcacaaagacaatcctcgagtagagcaaccccaatacacataatcgtcagattcgccaagtttgaaataaaggaaaaaatgttaagggcagccagagagaaagacatatcaatgagacagaaaattaacaaggatattcaggactttaacacagttctggaccaagtggacctaatacacgtctatagaactgtccaccccaaatcatcagaatatacattcttctcagcaccacatcatacttattgtaaaactggccacataattggaagtaaaacactcctcagcaaatgcaaaagaatggaaatcataacaaacactctctcagattacagtgcaatcaaattagaactcaggattaagaaactcactcaaaaccacacgactacatggaaagtgaacaccctgctcgtgaatgagtactga

SEQ ID NO: 116666 - DNA, 1848 bp, Homo sapiens
atgcccctaaatgggcgaatgctgaactatattgcgaagcgtaaggagtgggccgggcatgtgatgtgcgactgttacaactgccacatacgatataaggaggattggattcaccttgccttgtacgggactaccttggtgagacaaacaccgattgggggtaacgccgaagcgttaaagttgagtattggggtggtggcgataactggctgtatgtatgcagatgacgggctgctgatgggcgccggcaaactttatgaggaatggatgttatacgagttgccttttgttattgctgaaggccggagtggaatagtgacgcgaaacatgcgcgtacatgcataccaagtgttgacatgcaccttgaaaacgacacgggtggacggctttgaacggaggtgtccttggcgggaaggcgcgcgggaagggagtagggggtgtacaaacggaaagccggaaaggggggaggacaaatacagtgtacgaaactgctacgcttccgctactgtcaccggctacgctttcagctcccggagccgggctgcctctacctgcgcttttccaacgagatgtcaaccgaagttcagtaggtcaatagaccctactggcaaagctgttcaaactgcggatatccggctatctgctagagctacgctatggttaggcggttcgatagaggagagtccggttctgtgttcgactctccgactgctgctgcggcggcttccgccaccccttacctggaccagtccgaacagaccgactcaaccctgtaccgcgcaaacacagaccaaccagagcgtcggaatcgccgcacctagtgcaatacgcgttatttatccagagtcggttgtactcaacgctgttatttatttaccaggagacccagaagtatccgggttgcccagggccttcaaaaggcgttttagtgtcgaagtacggctcgattgtggaaccttcaaactcctattagtttattgtactcatccgggcgataaaaaagtgaatacgtgtaaaactggtatatcctccgaagtatatacccttaggctacgatttgttctaaaagtggctaaactgactgaagcacttagatccatattcctgtccgaactgcagtcaggcccctctgctgcaggtctgctggagtttgctggaggtccactacagaccctgtttgcctgcgtatcaccagtggaggctgcagaacagcaaagattgctgcctgttccttcctatggaagcttcatcccagaggggcacttgccagatgccagccggagagccggcaggcaggaacgtttaactctgctgaaactgtgcctacagccgccccttcccccaggtgctctgtaccagggagacgggagttttacctttaagcccctgactggtgctgtcgcctttctttcagagatgccttgctcagagaggaggaagctagagaggcagtctggctacagaggtttgccaagctatggggaaaattcaccactgagctcaagcattgtaagacatcctgttctaaggagggatgaggacaaatcctctactgttcccaacagttgcacagggcactgcatctacagttaccctgagaactacaagcaggaggtgaaagagctgagtcagccaaggtcatctggggacctatccactggcagggaactgagaggctctgagggcccctcagggagatggacccatagaggctccaccatgctagcgatgctggccctgtctgttggagttagagatgttggaactgcatcaagctgcctcaggcattcagatgaatgcctctgtgaagttacatctccatattggaagcagcagagtcagaattga

SEQ ID NO: 116667 - DNA, 1263 bp, Homo sapiens
atgccaggagttcgtgtgttagtgaagaaaaacaagtactcagcaagccggatggccgttgaacgtccaggcctggcccagcccagtgagcccctcaaagctgtgcaccccaggcttccacagagaccttacattctgttgccatcacgcatctttatggagccttttgatttgggcataaaagttctttactcctctggaactgcattcctaggagataaacagggtgcagagaagaagagaacaaaattgagtcaggcaatctgctgttccatttcttctctggcaaaacgagaattattcagcatgagcatctatggattccccaccaccaccatcagtggagctgcctggatgggctctacctgtccttcccgactagcagaagaaaatggcaggattttgcataaaccaaatcttatgagaaacagatcaaagcaaaaggcagaagaagtgggtaaccccaagtctagtatgggaaggagacagtgtagaagtgctgtgggtgctgtagcagagtgtgaagttcaagccagctctctctgtgacaccagggatgtttcttccaataactccacagggagccctctttctgatgaatactcagacaagcctttgttcacagtttccttgagagacagtttccttgagagacttctagcttccactggccccgtggtttctaaaacaacaccacacgctttagatttctggtatggcagcactccactttgggatctgctggcgtttgctggaggtccaccccagaccctgtttacctgggtatcaccagcagagcctgcagaacagcaaagattgctgcctgttccttcctctggaagcttcgtcccagaggggcacccaccagatgccagccagagctctctgagctggcagtcaggaatgtttaagcctgctgtagctgcacccacagccgccctttcccccggtgctgtgtcccagggagatgggaattctatctataaacccctaactggggctgctgcctttgtttcagagatgccctgccaagagagcaggaatctagagaggcagtctggctacagcagctttgtcagagttgagaatacatcaatagatgtaatgcaaaaaacagtcatacaacaaactcaacaactgcaatgggaatttatgtcagatgaaattaattttatagaagagtctgataaagactttacattcgacacatttaggaatgttaaaaatgaagacatgaagacatgccagcaagatgaacaatag

SEQ ID NO: 116668 - DNA, 671 bp, Homo sapiens
tgccgtgcggtggaattcctatcttttctctttcctagccaggaatgtatcctaaagaaatgatacaagtgtcgataaaactatgcccaatgctgcttgctggtttgctttgcaacctctaaatgaaagaacttagctgctcagtaggaagggaatggtatgatatgagtattaagcagccatttgaaatgtttgcaaaagtgtataatgatgtttcttactgttaaatggacaaagctagctgtgaaattatgtctgtacaatctaaatgatttcgtagaatatctggaaggaaattttccagaatggtaacagtagttgtctctggctgatgtgcgattgtttttcttgcttctttagactttcctgcattttgcgaattttctataatgaggctgtatgacttttacgatgacgggattaacaaaggcagcagaagagaaaacagcagctgtcaggtgaaggtgggctagcacagaggctcagaaggtgccagtgggtggcagaagtgacctctcagggtattattagatccatgtactctctcctctgccctgcaggcctgccgaggaggaactgaagacgaagaacatggatgataacacctttgccatggcagagcatcctgatgtccacgagtcagtgggtccactggtagcccccacccctct

SEQ ID NO: 116669 - DNA, 794 bp, Homo sapiens
ctagattgcaaaaattttctcccattctgtaggttgcctgttgattctgatgatattttcttttgctgtgcaggagctctttagtttaattagatcccgtttgtcaattttggcttttgttgccattgcttttggtgttttagtcatgaagtctttgcccatgcctatgtcctgaatggtatcacctagattttcttctagggcttttatggttttaggtcttacgtttaagtctttaatccatctttggtctttgatgttggtgaccttcagatggggtttctgtgtggatgtcctttttgttgatgttgatactactcctttctgtttgttagttttccttctaacagtcaggcccctctgctgcaggtctgctggagtttgttggagttccactccagaccctgtttgcctgggtatcaccagcagaggctgcagaacagcaaagattgctgccttttccttcctctgggaagcttcgtcccagaggggcacccgccagatgccagccagagctctcctgtatgaggtgtctgttgatccctactgggaggtgtctcccagtcaggatacatgggggtcagggacccatttgaggaggcagcttgtcccttatcagagctcgaatgcagtgctgggagatctgctgctctcttaagaatggtcaggcagggacacttaggtctgctgaagctgcgcccatagccatcccttcccccaggtgctctgtcccagggagatgggggttttatctgtaagtccctgacgggggctggtgcctttttttcagacat

SEQ ID NO: 116670 - DNA, 792 bp, Homo sapiens
cggccgcaccgaccgctttgccttccagctgccctttgctgagggcgcgggcgattggggcgcgccttcgacttcgtgttgcgcttatgagacaattgagggcaactttctgggccaaaaaaccacggccgcaaacttacaaatcctgctccggatcgcacccgctcccacacccactgatgccgaaaggggtgcccccagcagcaggcagctgccgcagctgggagccacagcccgagtgcccagggtcccgtggaggctgaggccagggcagctgaagagctgcaatgaagccggtgaaggcgcaggcctgccgagggaggaactgaagacgaaggaacatggatgataacaccttttgccatggcaggagcattcctggatgttccaggggagttcagtggggtccactgggtaggcccccacccttctccgttccatgggccccagattgacattttcaggtctgctggagtttgttggagttccactccagaccctgtttgcctgggtatcaccagcagaggctgcagaacagcaaagattgctgcctgttccttcctctggaaacttcatcccagaggggcacctgccagatgccagctggagctctcccctagacactaccatggggctggagcccaaaagcccttgtcctggttcctgcagctgcccatctgcatgctccccctcctgggcttcagttccagcaccattgctttgtggagccatacccatggctaagtaactatctagacatctctgtttcttcatccatgatgaaggtctcat

SEQ ID NO: 116671 - DNA, 579 bp, Homo sapiens
atggaacttattggtgatcttcataggagcagctttaatagagtaacaggaaaagggacctgtgaaaccactttgcaaagattatcacaggataatgtcttcagcaaagacactggaatccagagtaaatatactgtgctcacattttttgggaattcgcacatctcaaattctattgcggaaggccaggtttcttcaccaatttcatgcaaggtagtatactttaaacagtatttgaaagctgtgataactccagagtgtcttctgatattagattatcgtaatttaaacttagagcaatggctgttccgggaactcccttcacagttgtctggagagggtcaactcgttacataccctttaccttttgagtttagagctatagaagcactcctgcaatattggaatagatggctacacttcctgcttggggtaattaatgagcaccagctagcaccagccagggagatgataagtagtgggagcccagttaccaagcagggggaaagcagaagagagaaagaagatgtaaacagtggacttcttaacccggaagcagttcctctggagacgaaataa

SEQ ID NO: 116672 - DNA, 731 bp, Homo sapiens
tgatacacagagctcttctagcaactcttcatcatccaagatctccaaaattgactctttgatcattttaatatctgtttctaactctgatagacttttgccattctgtagtaaaatgtgcagtttgcttctgtctacagaagaatgtttggggtccaccaaagcatccaaggtctcaaggatcagtggctgcaaaatgctaagtttcccctgaagggtgttgatctagataacaacatgacccaatattgcaggagtgcttctatagctctaaaactcaaaagggtaaaagggtatgtaacgagttgaccctcttcccagacaactgtggaagggagttccccggaacagccattgcctcctaagtttaaattacggataatctaatatcagaagacactctggagttatcacagctttcaaatactccattctcatgataatccgtattgtttctgactgtgatactcattacatgctgaaatctcaaatctctggcttgaagacctaactcttggtataattcagttttcttcctttcaaaagaagtaacgtttccctgtttgtcaaattttggtcacagtaaatactggggctacactggctaaagtggcttgagagacgtcagaggttctaaacccggtgcacttcacctgccaacgcggagccggtcgggccctgcaaacgtgcgccgctcggctccttccaatccaggttggctcggcggccgc

SEQ ID NO: 116673 - DNA, 579 bp, Homo sapiens
aattattataataactagagatttattaaaccaacaagtcactcttcttacaaaattacagttaatatggggtgggagaggtgtgttggttggcccaaggccagccagacctgcgtcaccgtcaccgggagaagctaccccgcccccttctgctcagggatctccgcagtgaagcctcctctaaggagtcctaggactctccctttagagtgggggacaggggggtgtgtttgtgctggcctgggtccaaatactccagggtgtcagctccatccccctgctgtcctctgtccccaggggctgggaagacaccaacggctgtgaacaaactcgctgatttcttcaccaagacggtgaggcggaggcactggctgcaaaagtccaccccctctagacctctgcaaccacagaatccccagcccaaaggcctttgctggtttgagttgaattcagtgtggactgaaggaaaaacatatctattcacacctcagagtgaccatccgagctcctggtgactggaaaaaagaaatgggtcaccctttggcctgcgaggactgggcgggaggccccagcacgaaa

SEQ ID NO: 116674 - DNA, 828 bp, Homo sapiens
tatacatggcctgggagacagctgctttctgtttgcaggtatggtgatgatcttgtgcctgagctctagggtccccatggaacccagaatgccaaagctgttggtcaggggcccagactgtgctctctgcttggggctgggcagaccccacaccctcctcaggccagagagccttggggacctctatcagtgctcagagggaaggccaagacctggttcttaggatggtcagcggcgcaggtcacaaaactggcccataggcatgaaagtggcaggcacaattttcatgagtttggcaaagacgctcttcgtagaaatcagtttctgcttggcctgctaaatccgagccatcggagaggttaccatggcccctcagggcacacgcaggaccactgtggattagaaacccacacgtgtcactcgcaacattcctcccacatccacatccacgacggagccaaatctcatttgtcaccctcagtcaccaccccacaagaaaaagccgctggttacgacatgaatgacaggtgtcatgcacagggagagaatttctccccggatacccctgaggaccaaggaccacccccaggctagggtccccaggcacagcctgctgtacaagcacacgactggcctgggtgtgggcgttggcctcagccacctggaggcatcttggagtgggagaggggctgggagacaccaacggctgtgaacaaactcgctgatttcttcaccaagacggtgggcggaggcactggctgcaaaagtccaccccctctagacctctgcaacccagaatccccagcccaaaggcctttgctggtttga

SEQ ID NO: 116675 - DNA, 468 bp, Homo sapiens
atggcccatggtttccggagtggccagacagacagccccaaggatcctttatcagacagaggacagctacatagagacctcccggacctcgactttccacccagaaggggccactctaacatccccaacaatgcggacagctgggccagcaccacaacaaacgccagatactgttccctggcctggaatattcctcttccactgaattctctttgcctgatcacctgccatccccacctcaagtctcagcaaaaagccaccttcgcctggaagccttctctgtcccctcatgcctggggtggagaggccttcgctctgccccggctgggatctccttgtggacaagccccagccattgatgcggatggaagttgcgtctgtattcccgttaggaatgactgtctacagcatcgaggctgggaagaagaggagcctggtctcagctctggcttgcgggtctcggaatga

SEQ ID NO: 116676 - DNA, 552 bp, Homo sapiens
atggtcgccctggcaacggcgggaaggcgtcggggctgctggctgtggctgccgcgatttcattacccgcacggggtctgctcacccgagaaccttaataacacaaccagggacccggtcctgcagaatgcgcaaggtcacgtgggttctctgcagctccttaatgtattacccggcacacaagcccccgtggcatataaacaaatccacaagcggaaaaaagagagaactccctcctcagcgaggaagcgaatgacaacggaaagctcccccggccagctgagcctggaggacttcttggagatgacggatgaacaggtgtgcgagactgtggagaaatacggagccaaccgggaggagtgtgcccgcctcaacgcctccctctcctgcctcaggaatgtccacatgtcaggccaggacgagacagagtcaaccctggggggcaaatccgaaacgcaggaagaggcagcgtggacctgggatttggaggccggaagacaccagcaagggcagctcttggatttgaactcttgccccaggaagacccgctga

SEQ ID NO: 116677 - DNA, 876 bp, Homo sapiens
atggatgccagctggtctgaaggaccccacaaggagctaactcatgaaagaatgcagtttccacatcctggtgatttcctctcccttgccccgatcaaccaacaaccccaattttccaaccctttaccttccacgatccccttaaaagccccagcccagaactccttgcagctcccagacgcccccagctctgccccaggccccgccctcgcgggttccttgactcagggccgcttctcgcgtgcgtccccagctcccgcccggcagcccggcgctccgtcccgggccggcggcccccgccagccgccgccgccgccggccccgcctccgggcaccatgctgccctcgcaggaggcctccaagctctaccacgagcactacatgcggaactcgcgggccatcggcgtgctgtgggccatcttcaccatctgcttcgccatcatcaacgtggtggtcttcatccagccctactgggtgggcgacagcgtgagcacccccaagcctggctacttcggcctcttccactactgcgtgggcagcgggctggcgggccgcgagctcacctgccggggctccttcaccgacttcagcaccatcccgtccagcgccttcaaggcggccgccttcttcgtgctgctctccatggtgctgatcctcggctgcatcacctgcttttcgcttttcttcttctgcaacacggctacggtctacaagatctgcgcctggatgcagctcttggcagggaggaattactgcctcattggaagaattgcccaaactcctaaaaggactattttgaagaaggcagatgtggacattctaatgggcttgtttcaaattcatctcacccaactcaatttagatgtggatctttga

SEQ ID NO: 116678 - DNA, 1333 bp, Homo sapiens
aatcactgagcagaaaccgcaggccagacctagtgctggccacccagagaccaaggaagaacaaggtgcagccttgctgtggacctgccggctgcctgtccaggcgcctctgacgcccgcgctgctcttctccccacagcttgtctggggacctggggctctgctgtcagcttcgcaccctcccagccgtggcttctcatctatatctgatgggtcaaggagggtgggcggggagcacccagcttctccccaagcccaggctccttcctcagccccacaggggagcactgagccccccaccagctgggaacatgcacgttgggcaactcacatcttcaccaccgtgagaatgtttgcaaatgatcacaaaggctctgcgagtattgattttggtgttacaaatgaatttcagcaagcaggcaaatttgcaaatacagaatgtgcaaaccgcaattctttgagagaagggaccatgtcttcctgtgcgcaggtgtatccctggcatctcatgtctctcactgtgagcacctccaaggccacaagtagcagagcatcaatcacccttccaggaagaaatgtgccagggggtagagcagaaagccaggagagtgctggtgtttgcatcaatgagggccagatctgcatacccatggtgcaggcccctccttcactggggctgcagggcccagtcatctcgaacaccaggcaagggcaaacaggagctggcaggctgggcctcaagggcaggccttccacttgctattttgcaaaaggccggtttcagctgcctgggcattcagttaccttaattagaatgggccccaagctcggggcagattctatcacagcagggatgggagaagaggaaaagagcggtaatggagctgccctcccttgggcactgagatggagagcgggtgccatccgtattgaggggctgcagttcttgaatgctttactggctttgggactgtttgctggagccctgagccagcagccagcaaaactgaggagtacattagggtcatgcccatttaacaggcaaagaaaacaacgttcagagatgacacaacctgtccaaagtctcacggggaagggccaagctgtgattcggacccaggtccttctgactcttgacgtccatgctctaagttctgtgaactttggccaccctcacctgagcaactcactatccctccttacagccctccggaggacagggggaaagatggcacaggacctgcaagttacaaaagcgctgctagagagatctgaggtcagcagcaccaccattgctgatgagcaggctaggaacgcagacccaggcctgtga

SEQ ID NO: 116679 - DNA, 222 bp, Homo sapiens
atggttatccctcggtttactggagcgttgtatcccaaaggaaagcagtatccgtatcctaagcttgtctctgtctctgtggctcaagaggaccagatcctcgaggacttcctgggtaatccagagccatggagactaggaacaagcaggaaacccagttataagaaagggacacttctgctggccactggtcgtggaacaccagatctaatgtgttcatga

SEQ ID NO: 116680 - DNA, 645 bp, Homo sapiens
atggaggagggggctacaaggcaaaaatgtgggcagactctagaagctggagaaggcaaagaaatggagtctccctggcatttccagaaaacacacagctctgcccacatcttgattttggcccacctgcagatcattccccagtgctctgccgggatccaggagcacaccttccttgccagctggcacagggctgatgagcctgtcagtgggcggctctggagggacactgattctagaagcagcgaccaagacaaaagagagcaatcaaccaaccgccagatgttctgtccactggacagcatgcgcctggaggctcataaccacccagaggactccctgcatttttcactttctgtgtgtcctggctgtgccaatggcaccattgggctgggctgcttccgccttgctcatcccctaatgatgtcaaaggaggacacagaccacgcaccgagaaaaggaatcttactcacaaagcctcctccccaaagggtcctcatagagacctatgtccatgtaacatcggtggaagcagaatggaagaaactggtacgtaatactcatctgcttttgctcagcttggagcagggaaaggaggaagacgccgaggaggaggaagcggacatggacatgcaggcaaaatag

SEQ ID NO: 116681 - DNA, 368 bp, Homo sapiens
attgcaagtgtataatatggtacacaggattgattcagacacattcatatgtcataccattacacaaagctttgccgtgggctccatttcccctcgagactttatcgacttagtgtacatcaagcgctacgaaggaaatatgaacattatcagttaaacccagcatattccaaactagtgatgtttgtccagacagaaatgagaggaaaattgtccccatcaataattgaaaaaaccatgccttccaacttagtaaacttcatcctcaatgcaaaagatggaataaaggcacacagaactccatcaagacgtggatttcatcataatagtcattcatgataccaaaagaagaaatgaggccgttaaaa

SEQ ID NO: 116682 - DNA, 1944 bp, Homo sapiens
atggtagaaggcaaaggagaagcaggcaccttcttcactgggcagcaggagaacagcatgcgggaaaccacccccatgatccaattatctccacctggtcctgcccttgacatgtggggattacaattcaaggacacattcatatgtcataccattacacaaagttttgccgtgggctccatttcccctcgagactttatcgacttagtgtacatcaagcgctacgaaggaaatatgaacattatcagttataagctgtacagatctgcttctcaagctctacaggcttatattgatgattttgatttaggccaaatatatcctggtgcaagcactggaaaaattaacattgatgaggattttactaatatgtcacagttctgcaactatatttacaaaccaaacaatgcttttgaaaaccttgatcacaaaaagcactcaaacttcatatcctgtagaagacacaccgttaatgacatagactccatgagcctaacaactgatgatctattaagactcccagcagatggatcattttcttatacttatgttggaccgagtcacccaacgagcaagaaaaacaagaaatgccgtggaagactgggttcattggacattgagaagaatccacattttcaaggaccctacacttccatgggcaaggataactttgttactcctgttatacgctcaaatataaatggaaagcaatgtggtaggctgaaaaacccaaaacttatgaataggactaataattgcatttctgaatcatctttgtcttttcccaagaaatcgtctttcaaggacagttcagaacacagtcttgaaaagaattacccaagatggctcactagccagaaatctgaccttaatgtttcagggataactagtatacctgatttcaaatacccagtctggctgcacaatcaagacttgctacctgatgcaaatagtcaaagggtttatcagatatttaaagatgatcagtgttcccctagacatagtcatcaggcacaaggaacttctcggcttatcaataaattagattgttttgaatatgcttttgaaccctcaaacttttcaaattccttgagtgatgataaagaattagttaatgaatacaaatgtgattttgaacatagccagtgtcaatgtgagaatccacttctcccaggacaatccacaaagccattcagtggtgacaaaattgaattgcttatcttgaaggccaagagaaatctagagcagtgtactgaagaattaccaaagtccatgaaaaaggatgacagtccttgctcattagataaacttgaagcagacagatcatgggaaaatattcctgttactttcaaatctcctgttcccgttaactctgatgatagtcctcaacaaacttcaagggcaaagagtgctaaaggggttcttgaagactttctaaataatgataatcagacatgtataactcgaatccagatgggtattaaatatacaggggaaaggtggccctctaaagagctctctcttcatccacaagcagggagcagcagcaatgtgtacctattcatatcagggcaccaattactccagatacaaagcagagatagcatgggagtcaatgtgatctttgtggtgaagccaggcacaccagtcagcttgcccaccgtactctcagggtcccttccaaagcttccacgaagacactcagaagcagaagcaatatccctggacgactggaatagatggacttcttcacatcctgttgcttggtttcttaccctgattgtgagaaacagtaatcccacaattttctgggtatctagagaatattcaactccatatagctcacattatgaactctcaggattgcgtgaacaaccttctcaggctgagctaggtcccagggcctattttcaactagagaaggctccaggtgaatttccctag

SEQ ID NO: 116683 - DNA, 721 bp, Homo sapiens
aacagtttctcaaggttaagccaagtcctccttgcaagttgccaaataatagcttaggaaaagaattagtctgcctgcatgatgatcttcttaggcaaaaacgtcttcacagcccttgaccttggtgaatttttttccccaaaagcatccaaaagaagaattataaaccccagaatgagatggaaataaacaagtatttttttttatgatgtttggcctgaactgtgggctttaattgggggatactgatcgtttggaaagaagtgagaaaattctgaagaaatggcggccttgggctaggcggggtcccctatttcttctgtttctcactgaagtcctactgctgagccaagactcagtcactctggaaagagcatgaccgataaagaaaacagttcctttctgatggggagcgtctgagtgcagatcatgaggctctttctctaggtttaattcttttccatggtgaccggacttggtgtcttgtagcctggttacgaagtgggacgttgagcttcactgagcgatgccgtgcatggaccagctgggatctggctggggatgccctgtgtccctagcggccataggcaatccatcttcttgagtcagcaatttctggacacccgctgttttccaccaagagctgaggtggcatcaactcagtgagcaataaacaaaatgacacagaaatgcgcagtgttgttatgaaggagcgtgtatt

SEQ ID NO: 116684 - DNA, 851 bp, Homo sapiens
tcagcagcatgcgagaaatccccggcagaagatgtcaacaagctctctcacctcctgcttatgagtttttccagggttcaagttccactgcttaacagctgtttgatcttgtgccattaatttagccaagtgaaacctcagtgttctcactgaagtcctactgctgagccaagactcagtcactctggaaagagcatgaccgataaagaaaacagttcctttctgatggggagcgtctgagtgcagatcatgaggctctttctctaggtttaattcttttccatggtggccggaacttggtgtcttgtagcctggttacgaagtgggacgttgagcttctactgacgatgccctgcatgggaccagctgggatctggctggggctgccctgtgtccctaacgacccataggcaatccatcttcttgtgtcagcaatttctggacacccactgttttccaccaagagctgaggtggcaacaactcagtgagcaataaacaaaatgacacagaaatgcacagtgttgttatgaaggagcctgtttacctgtgttcaaaatctgggcacccattccctttgagcaggggccccgctcaggagggaccaggtctgcccagtttctgtgcctgcagagagacgaagccccacgagccacaccctactctacaagaggaaagggggttggatgggaagaatctattttgctgttttggaaagcacacagccgacctacaaacctcctgtgatggtgtttcttcggatgtgtaaaataaggctttatttgtcaattccgctgtaaaataagcattgtccgagtaaaaacagcagcaacaacaaaaaaaaaaaaaaaaa

SEQ ID NO: 116685 - DNA, 593 bp, Homo sapiens
tttttttttttttttgggagaagagccggcgcctggggcaagagcctaccccaaagaaaagggtgtctaaaatgttcacggttccttcttttgcctcaaaaagtgacatttattcaaagaaaaaaaatgacaagatgtccatcccttggctcccttccctcccccctcctgctgctcctcagcccccagagattgagccctggctggggctgggtggcaggacagcccctcagatgaggtcagcaacattgaggggcatttcctcaatggaggtgttgtagaaggtctcaatgtctcgaagagtcctcttgtcttcttctgtcaccatgttaatagccacacctttacggccaaaccgtccacctcgaccgattcagcaggtcagtggtaatcaaaactctgctagagccagaacgaaactccctcataatcacgtctcgttccttttggtccatatctccatgcatggcggatacagtgaaatctcgagcatgcatcttctcggtgagccagtcaccttcctccgggtgttgatgaagatgatgctgggtgatggtcagggttcatacaagtcacatagtgtgtcaagttca

SEQ ID NO: 116686 - DNA, 635 bp, Homo sapiens
ccagagacaatggccccgatgggatggagcccgaaggcgtcatcgagagtaactggaatgagattgttgacagctttgatgacatgaacctctcggagtcccttctccgtggcatctacgcctatggttttgagaagccctctgccatccagcagcgagccattctaccttgtatcaagggttatgatgtgattgctcaagcccaatctgggactgggaaaacggccacatttgccatatcgattctgcagcagatacagaaggtggtcatggcactaggagactacatgggcgcctcctgtcacgcctgtatcgggggcaccaacgtgcgtgctgaggtgcagaaactgcagatggaagctccccacatcatcgtgggtacccctggccgtgtgtttgatatgcttaaccggagatacctgtcccccaaatacatcaagatgtttgtactggatgaagctgacgaaatgttaagccgtggattcaaggaccagatctatgacatattgcagaagctcaacagcaacacccaggtagtggtgctgtcagccacaatgccttctgatgtgcttgaggtgaccaagaagttcatgatggaccacattcggattctagtcaagaaaggagaggtgacc

SEQ ID NO: 116687 - DNA, 483 bp, Homo sapiens
gcttttgttagtaggcaccagattctgtttgctcggagactacagctcagctccaccttttccatgactcaagctttaatttctttgcatcccctagagtaactggaatgagattgttgacagctttgatgacatgaacctctcggagtcccttctccggggcatctacgcctatggttttgagaagccctctgccatccagcagcgagccattctaccttgtatcaagggtgagacctctcagtcccagaagacattgtggactgtccctgacctgggtagagtggcatctggttggtgatgcccatctcatatcagccagggacaaagcaactccttgttcatcccagcttggcttttgatccgagcccatgcctagttcatgccttggacacataggtttcctttaaagaggtggtattgtagccagcttatatttgcatctacagccatgtttctagtccagcttggtgtgcaatacta

SEQ ID NO: 116688 - DNA, 654 bp, Homo sapiens
  misc_feature (1)...(654): n = a,t,c or g
tgggagaagagccggcgcctggggaagagcctaccccaaagaaaagggtgtctaaaatgttcacggttccttcttttgcctcaaaaagtgacatttattcaaagaaaaaaaatgacaagatgtccatcccttggctcccttccctcccccctcctgctgctcctcagccccccagaaaattgaacccctggctggggctgggtggcaggacagccccctnagatgaggtcagcaacattgaggggcatttcctcaaatggaggtgttgtagaaggtctcaatgtctcgaagagtcctcttgtcttcttctgtccccatgttaatagccacacctttacggccaaaccgtccacctcggccgattctggaaaacaaggaaggggatgaggaatatcaggagctttaagcccagggagggccaggtgtgaaggggtaggggagtgttccagatctacgcttacctgtggatatagttttccctgttggtgggaaggtcatagttgatgactaaagaaacctgctgcacatcaatgcctgtggcctacgtcaagaatgacaacctcttcagcatgtgcacggaggacactctatcccggagaagaagaccttaggcatccatgtgggcagccaaggaaggcagaggaaataagcatc

SEQ ID NO: 116689 - DNA, 1591 bp, Homo sapiens
  misc_feature (1)...(1591): n = a,t,c or g
ggcaccaggagcccacccggcgccgggcgggcgggtccattttgccgcacaagccgggctattggcaaactgcggatgggcaggtccaccttccttcgggggtgagcggcctgagatccagagacaatggccccgatgggattggagcccgaaggcgtcaatcgagaaggtnannacccccctggaatgagattgctgacagcgtttgatgacctgaacctctcggagtcccttctccggtggcatctacgcctatggttttgagaagccctctgccatccaagcagcgagccattctaccttgtatcaagggttatgatgtgattgcctcaaccccaatctgggacctgggaaaacggccacatttgccatatcggattctgcaagcagattgaattagatctaaaaagccacccaaggccttgggtcctaagcacccactccgaggaatttggctcaagcaagatacaggaaaggtgggtcatgggcactaaggagacttacatgggggcgccttcctgttcacggcctgttattcgggggggcaccaacggtgcgttgcttgaggttgcaggaaattgcagatgggaagcttccccacatcatcgtggggtaccccctggccgtgtgttttgatattgtttaaccggagatacctgttcccccaaatacatcaagatgtttgtactggatgaagctgaacgaaatgtttaagccgtggattcaaggaccagatctatgacatattccaaaagctcaagcagcaacaccccggtagttttgctgtcagccacaatgccttctgatgtgcttgaggtgaccaagaagttcatgagggaccccattcggattcttgtcaagaaggaagagctgaccccttgagggtatccgccagttctacatcaacgtggaacgagaggagtggaagctggacccactatgtgacttgtatgaaacccctgccatccacccaggcagtcatcttccatcaaccacccggaagaaggtggacctgcctcaccgagaagatgcatgctcgagattccactgtaccccccatgcatggagatatgaccaaaaaggaaccgagacttgattatgagggagttccttcctggctctagcagagttttgattaccactgacctgctggccagaggcattgatgtgcagcaggtttctttagtcatcaactatgaccttcccaccaacagggaaaactatatccacagaatcggtcgaggtggacggtttggccgtaaaggtgtggctattaacatggtgacagaagaagacaagaggactcttcgagacattgagaccttctacaacacctccattgaggaaatgcccctcaatgttgctgacctcatctgaggggctgtcctgccacccagccccagccagggctcaatctctgggggctgaggagcagcaggaggggggagggaagggagccaagggatggacatcttgtcattttttttctttgaataaatgtcactttttgaggcaaaagaaggaaccgtgaacattttagacacccttttctttggggtaggctcttgccccaggcgccggctcttctccc

SEQ ID NO: 116690 - DNA, 400 bp, Homo sapiens
ggctcccccgcacctgcggccatggatgaggagcgcgccctctacatcgtccgggccggcgaagcaggggctatcgagcgggtcctgagggattacagcgacaaggtaaagagtcctggccccgggcgtgcggtatcgcacccccgggccgccctccgtgcttgcacatcgcatccttccccacccccctcattccggggatgcgcattgctctcccccgaaaacgtttccggcttgggcatgcgtgtttgtgcccccagccttttccatccatgcatcctgcatcccactacccccactgtagcgcccactcctctgattcctggcccagcagcttgacctccggtcctcctctcaagcgtgcaagtcacacccccggaatccgtagatgtgcatctgt

SEQ ID NO: 116691 - DNA, 1173 bp, Homo sapiens
atgctaaaacacaatttaaagaaacagcaaggctcagaaccagacaaggcaaggatgtcagaattatcagaccaggaatttaaaacaactgtgatcaatttgctaagggttctaattgatagattagacagcctgcaagaacagatggaccatgtgagcagagagatagaaatcctaagaaagaaccaaaaagaaatgctaaagatcaaaaacactgtaacagaaattaagagtgactttgatggatttgcagtaaatgaggtccagagacaagtaacttgccaaggccacaattgttcagaagaagagccaagatttgcatacaaacaatttaaattcagaacttctactcttaattaccacactgatttggttttagagtctatgaaactctgtgaaggcatatttaaagtccttataaaggacatcccaacaacatgtcaagtgtcctgcctggaagtactccgcattctctccagagacaaaaaggttttagttcctgtgacaactaaggaaaatatgcagatactgctgcgactagccaagctaaatgagttagatgattctttggagaaagtatcagagttcccagttattgtggagtcattaaaatgtctgtgtaatatagtgttcaacagtcagatggcacagcagctcagcctggaacttaatcttgctgcaaagctctgtaacctcctgagaaagtgcaaggaccggaaatttatcaatgacattaagtgctttgacttgcgcttgctcttccttctgtcacttttgcacaccgacatcaggtcacaattgcgctatgagctccagggactaccgctgctaacgcagatcttggaaagtgcctttagcatcaagtggaccgatgagtatgaatcggccatagaccataatggacctcctctctcacctcaggagacagactgtgccattgaggccctcaaagctctcttcaatgtgacggtagacagttggaaggtgcataaagagaggtctccagttttggtcattgaggtatccagacccaatctcaggtggaacagaaaccagagtctttggtggcagctcttgggccagaccctaatgctcctgatgggtgctgtagtatgcacgggcagcagagagctgtggagtttgacttcctgcctggaatcaggtcctttctaa

SEQ ID NO: 116692 - DNA, 873 bp, Homo sapiens
tccttgcactttctcaggaggttacagagctttgcagcaagattaagttccaggctgagctgctgtgcccatctgactgttgaacactatattacaccagacattttaaatgactcccacaaataactgggaaccctgatactttctcccaaagaatcatctaactcatttagcttggctagtcgcagcagtatctgcatattttccttagttgtcacaggaactaaaacctttttgtctctggagagaatgcggagtacttcccaggcaggacacttgacatgttgttgggatgtcctttataaggactttaaatatgccttcacagagtttctttcttttatcttcatctgttgattcaaatttgaaagtagccctatgcttgtcgctgtaatccctcaggacccgctcgatagcccctgcttcgccggcccggacgatgtagagggcgcgctcctcatccatggccgcaggtgcgggggagccgcggccgctctgcgcgcccaagccgctgcctccagcaaccggcgcctcacggccgcccctgacaaggcccaggactcggtcgaggcctggctagcggaccgaggcggagtcaggcccaaggccctgcttgctctcctgcgtctccctccctcggagaactgtccagtcttttaagggggctttcacagactgaaccgttcttctttcctgaccctcctctatgaatcattctcaaaggactagagcaacccggctcttccccgcccatctatgaaccagccgctaaatggactgcaattccctgcatgcaatggggctatcccgctcttccatctaatttactggcgtgccgaatggactgctgggattggtagtcatccagccgga

SEQ ID NO: 116693 - DNA, 507 bp, Homo sapiens
atgaactgtgcagagaggactgagggggcagcagcagaaccagcctggctggtggtgatggggacagcccaggccaatgggggtgacttgcggaagagtggagagaaaccagcaagtgcgtggccatcgcactggcttgactccagtgtgaatctttcttttcttttgaatcctaaacacatgtcccctgaagtgtttcagacagttgggatcagcagcaaccctagcagtgtttgtgcagaacccccagagctgacactgctgactgggacatgtgacctggcacccccagaagcacagaggacacttactccatctctgaaaaagctgcccacaccccacctccatccagccttccaaaagccaccacgaatgacccgtaggaggggcagagtgtgccacttgctacggaccagaacctctggggagcggggatcatctctgtgtctctctgcttcaactgcatttaaaatgaacattcttaatgataaacctttccgtgtgtaa

SEQ ID NO: 116694 - DNA, 729 bp, Homo sapiens
tcaaacctcagttcttgacttctgtgtacccgcaggctcaacaacacgtggaagctgccaagacttggggcttccacccactgaagccacagtccgagctgtatgtcggcccctttccaccacgctgtagcagctggcacacagggcaccaaatccctgggctgcacacagtacgggatcccttggcacagcccacaaaaccacgttttcttcctgggcctctgggcctgtgatgggaggggctggcctgaaggtctccgacatggcctggagccattttccacacccccccaccaccccccacccccaccccccgtcttggaggttaacattaggctccttgctgcttatgcaaatttctgcagccagcttgaatttctccttaaaaaaaaggggtttttcttttctactgcatcatcaggctgcaaattttccaaacttttatgctcttgtttcccttttaaaacagaatgtttttaacaatacccaagtcacctcttgaacactttgtatttcttagaaatttcttgcaccagatcccctaagttatctctctcaagttcaaaggtccacagatctgtatggtgggggccaaataccaccagtctctttgctaatgtgtaacaagagttacctttgctccagttcccaacaagttcctcatctccatctgagaccacctcagcctggactttattgttcatatcactatcagcattttggtcaaag

SEQ ID NO: 116695 - DNA, 657 bp, Homo sapiens; identical to SEQ ID NO: 116569

SEQ ID NO: 116696 - DNA, 774 bp, Homo sapiens; identical to SEQ ID NO: 114211

SEQ ID NO: 116697 - DNA, 999 bp, Homo sapiens
atggacaataaggtccaggctgaggtggtctcagatggagatgaggaacttgttgggaactggagcaaaggtgactcttgttatgttttagcaaagagattggtagcattttgcccctgccctagagatttgtggaattttgaacttgaaagagatgatttagggtatctggtggaagaaatttctaagcagcaaagcattcaagaggtgacttgggtactgttaaaggcactcagtgttataagggaagcagagcataaaagttcagagaatttgcagcctgacaatgggatagaaaagaaaaatccattttctgaggagaaattcaagctgcctgcagaaatttgcataagtaacgaggagcccaatgttaatccccaagacaatggagaaaatgtctccagggcatgtcagaggtcttcaggcagcccttcccatcgcaggcctggatgcctaggagaaaatggttttttaggcctggcccagggtccccgtgctgtgtgcagcctagggatttggtgtactgcatctctaccactccagccatggctgaaaggggacaatgtagagcttgagccatggcttcagagggtgcaagcccccagctttggcagcttccacgtggtgggacgctcatggagaacctctgctagggcagtgcagaagggaaatgtggggtcggagcctccacacagagttcctactggggcactgcctagtggagctttgagaagagggccaccatcctccagaccccagaatggtagatccaacaatagcttgcactacgtgcctggaaaagccacagacactcaacgccagcctgtgaaagcagctgggagggtggctgtaccctgcaaagccataggggtggagctgcccaagaccatgggaacccacctcttgcatttgcatgacctggatgtgagacctggagtcaaaggagataattttggagcattaagatttactgcccctctggatttcagacttgcatag

SEQ ID NO: 116698 - DNA, 756 bp, Homo sapiens
atgtgggaaagtttggaacctcctagagacttgttgaatggctttgacaaaaatgctgataatgatatgaacaataaggtccaagctgaggtggtctcagatggtgatgaggaatttggtgggaactggatcaaagcgttacattttaaaagggaagcaggacatcaaagttcagaaactttgcagcctgatgatgcagtagaaaagaaaaacccattttttgaggaggaattcaagccagctgcagaaatttgcataagtagcaaggagcctaatattaattcccacgatcatgaggaaaatgtctctaggccatgtcagagacctccatggcagcccctcccatcacagacccggaggcccaagaggaaaaagtggtttcatgagctgggcccaaggtccccatgctgtttgcagcctagggacatggtgtcctatgtcccagccactccagctgtgactgaaagggaccaacatagagctcagactgtggcttcagagggtggaggccccaagcgttggcaacttccacatggtgttgagcctgcagaggtgcatggaagtcaagaattgaggtttgggaacctcctcctagatttcaaaatatgtatggaaacacctggattcccaggcaaaagtttgctgcaaggggggagccctcatggagaacctctgctagggcagtgccaaagggaaatgtggggtcagaccccccacacagaatccctactggggcactgcttagtggaggtttga

SEQ ID NO: 116699 - DNA, 675 bp, Homo sapiens
atgtggaagcgactttggaactgggtaacaggcagaggctgggagagtttggagggctcagaagaagacacaaaaatgtgggaaagtttggaacctcctagagatttgttgaatggctttgacaaaaattctgatagtgatatgaacaataagataaaggctgaggtggtctcagatggagatgaggaacttgttgggaaccggagcaaaggtgactcttgttatgttttagcaaagagactggagtctagggatttggtgccctgtgtcccagccactccagccatggctgaaaggggccaatatacagctctggctgtggcttcagagtgtggaagccccaacccttggcagcttccacatggtattaagcctgcgggtgcacagaagtcaagaattgaggtttgggaacctctgcctagatttcagaagatgtatggaaacacctggatgcccagacagaagtttgctgcaggagcagggccctcatggagaacctctgctagtgcaatgtggaaggaaaatgtggggttgaagcccccacacagagttcctactggggcattgcctagtggggctttgacaagagggccaccatcctccagaccccagaatggtagatccactgacagctttcaccatgtgcttggaaaagctgcagacactcaacactag

SEQ ID NO: 116700 - DNA, 810 bp, Homo sapiens
atgggtaagggagattctggacttcagaatggttcagatccaccaatagcttgcactgtgctcatggaaaagctgcagacacttaatgccagccatgaaagtagcaggagtggggctgtaccctacaaagccacagggatggagctgtccaaggccatggtagcccacctcttgcatcagcatgacctggatagtggggcgctgctgaaaagataccaaaaaatgttaaatcaattttggaactggataacaggcagaggttggaacagtttggagggctcagaagaagacaagaaaatgtgggaaagtttggaacttcctagagacttattgaatggctttgacaaaaatgctgatagtgatatgaacaataaggtccaggctgaggtggtctcagatggagatgaggaacttgttgggaactggagcaaaggtgactcttgctttgttttagcaaagagaatggcaacattttgcccctgctctaaagatctgtggaactttgaagttgagagagattatttagagtatctggtggaagaaatttctaagcagcaaagcattcaaggagtgatttgggtgcttttaaagcattcagttttgaaagggaaacagcataaaagtttggaaatttttcatgctgatgatgagatagaaaagaaaaaaacactttctgaggagaattctaggaggctgcatatatttgaggtgccgaatgtccctccccaaggcatgtcagaggtcttcacagcagcccctcctatcccaggcctggaggtttcagtggagaaaatgttttttgtgggctag

SEQ ID NO: 116701 - DNA, 349 bp, Homo sapiens
atgtgggaaagtttggagcctcctagagacttgttgaatggctttggcaaaaatgctgatagtgatatgaaaaataaggttcaggctgagttggtctcagatagagataaggaacttgttgggaactggagcaaaggtgactcttgttatgttttagcaaagggactggcggcattttgcccctgccctagatatctgtggagctttcaacttgagagagatgatttagggtatctggcagaagaaatttctaagcagcaaagcgttcaaaagggcagtttctacttactgaatcctagcattcgtcccgtgcaatgtgtttcaatgttagaaggttctatctgtgatg

SEQ ID NO: 116702 - DNA, 913 bp, Homo sapiens
atgaacaatgaaatccaggctgaggtggtctcagatggagatgaggaacttgttgggaactggagcaaaggtgattgttatgttttagcaaagagactggtggcatttttcccctaccctagagatttgtggaactttgaacttgagagagatgatttagggcatctggtggaagaaatttctaagcagcagagcattcaagatgtgacttgggtgctgttaaaggcattcagttttataaaggaagcagagcataaaagttcagaaaatttgcagtctgacaatgcaatagaaaaaaaaaattcattttctgaggagaaatccaaatcagctgcagaaatttgtgtaatgagcagccaaatgttaatccccaagaccatgcggaaaatgtctctaggccatgtcagagatcttcatggcagcccctctcatcacaggcctggaggcctagaaggaaaaagtgattttgtgggctgggcccagggtccccatgctgtgtgcagcctagggatttggtgccctgcatcccagccgctccagctgtggctgaaaggggccaatgtagagctcaggctgtggcttccgtggatgcaagccccaagccttggcagtgtggtgttgagcctgcagaactgtgggagaatgaactgcgattgcctgaaggcagcaagtttgtggtcatttgttatagcagccacaggacatgaatacagcccccatctgccacctgcatccatccttggcactctggtgcatgtgctccgagccaagtattacccacgtggctggctgcaaggagacagaaagcaaggacaggctgtgatacctgagcaggaagaaggacaacagggaaacagaagacctattgcactgatgagaaggagaagggagagacctgcctttacagcacaat

SEQ ID NO: 116703 - DNA, 433 bp, Homo sapiens
atgtggaagagactttggaactgggtaacaggcagaggttgggacaatttggagggctcagaagaagacagaaaaatgtgggaaagtttgaaacttcctagagacttgttgaatggctttgcccaaaatgctgacggtgatatggacaataaggtccaggctgaggtggtctcagatgaagatgaggaacttgtggggaactggagtaaaggtgactcttgttatgttttagcaaagagactggcggcattttgcccctgccttagagatttgtggaactttgaacttgagagagatgatttagggtatctggtggaagacatttctaagcagcaaagcattcaagagattagttgggttaattgggacatgatttccaggttccctatagaagccatggaccacctttctggtagcttagattttgtttcag

SEQ ID NO: 116704 - DNA, 927 bp, Homo sapiens
  misc_feature (1)...(927): n = a,t,c or g
atggtcagaaggggaaaggaggaagtgagaagaaagaaacagggaaatgttgtttgtagtaagagaactcccattttcatcagtggaactggacaactacactggtccaattcaggcaaatggatagagttcacagcaccaaaccagtccctagccacttctaaaggaactaggtgcacccacaactttcctggggtgactaaacctggctggacccctaactcagggcagcccagacctctaggcttgttagaagcccatgagatattccagcatgaaaagcctttccaaacaagtaaattggtacgagagtggggtgttgctgaaaagatactcaaaaatgtggaagcaactttggaactgggtaacaggcagaggttggacagtttggagagctcagaagaagacaagaaaatgtggggaagtttggaacctcctagagacttgttgaatggctttgacaaaaatgctgacagtgatatgaacaataaggtccaggctgaggtggtctcagatggagatgaggaacttgttggggaccagagcaaaggtgactcttgttatgttttagcaaagagacttgcagcattttatccctgccctggagatctgtggaacttggaacttgagagagatgatttagggtatctggcggaagaaattcctaagcagcaaagcattcaaaaggtgacttgggtgctgttaaaagcattccatttaaaaagggaaacagagcatgaaagttcagaaaatttgcagcctgacaatgcagtangaaagaaaaatccactttctggagagaaattcaagccagctgcagaaatttgcataagtagcaaggagcctaatggtaatacccaagaacatggagaaatggctccaggccatgtcagagaccttcaggcagtccttccatcacagggctaa

SEQ ID NO: 116705 - DNA, 753 bp, Homo sapiens
atgattgaaatagacacagaattttgggctctagtgatgtccctgctctctggtcaggcatttcaagatccttgtatccagggaccacagggcacgaacagagtgactgtggtgtttcctgtggtcactgcagtgccaagcatagagcctatccacaggaaacatatttgtagaaggactgaaagtactcaagaaaggaggcctcataccccagaagacctccggctttccagcactgccttagaagagtcagtgtggactcctggagcaaagagactggcagcattttgcccctgctctagagttctgtggaactttgaacttgagagagatgatttagggtatctggtagaagaaattgctaagcagcaaagcattcaagaggaagcagagcaaaaaagtttggaaaatttgcagcccgacaatgaaacagaaaagaaaaattcattttccgaggagaaattcaagcctgctgcagaaatttgcataatgagtaagcgagttttcatgagatctgatggtttcataaggggattttcaccttttgctcagcgcttctccttcctcccatctccttcctgttatcatgtgaagaagggtgcatttgcttccccttctgccatgactccccggcccccggcggcggcggccagcatgaaccagcagcagcagcagcagcagaaagtgggcaagcagcagctgagcgagcccgaggacgtggagatggaagctggagatacagatgacccatga

SEQ ID NO: 116706 - DNA, 1038 bp, Homo sapiens
atgatgccaacccaagacaggccccgcacaagctggatggggcacaacagggactgggtggtgcccatgactgagctgaagtctagaagtcatggtgtagagggtggggacagtcaaatccaggctttcatttggtctcttttcgaatcagaagacccagaaaacttggatccacttctggctctcatccctctgggcagtgtgatttggagcgactgtcacttcttgtgtggattactgcaatgttcccctaacccttctgcctctggccttgcccggaggtctaatctcttcacaggtaccgctttgcagtctggcagctttcctattgcactccgaggacaagctgaacgcctcgctcggatctacgaggcctgcagaggttggaacagtttggagagctcagaagaagacaagaaaatgtggggaagtttggaacctcctagagacttgttgaatggctttgacaaaaatgctgacagtgatatgaacaataaggtccaggctgaggtggtctcagatggagatgaggaacttgttggggaccagagcaaaggtgactcttgttatgttttagcaaagagacttgcagcattttatccctgccctggagatctgtggaacttggaacttgagagagatgatttagggtatctggcggaagaaattcctaagcagcaaagcattcaaaaggtgacttgggtgctgttaaaagcattccatttaaaaagggaaacagagcatgaaagttcagaaaatttgcagcctgacaatgcagtagaaaagaaaaatccactttctggagagaaattcaagccagctgcagaaatttgcataagtagcaaggagcctaatgttaatacccaagaacatggagaaatgtctccaggccatgtcagagaccttcacggcagtccctcccatcacaggcctagaggaccagaaggaaaaagtggcctggggtccctgtgctgtgtgcagcctagggactttgtgccctgtgtcccagccactccagctgtggctgaaaggggctaa

SEQ ID NO: 116707 - DNA, 456 bp, Homo sapiens
atgtgggaaagtttggaagctcttatagacttgttgaatggttttgaccaaaagcctgataatgatatgaacaataaggtccaggcaaagagcctggtggcattttgccaccgccctagagatttgtggaactttgaacttgagagaggtcatttagtgtatctggtggaagaaatttctaagcagcaaagcattcaagatgtgaccggtgctgctaaaggcattcggttttataaggaaagcaaagcaaaatggtttaagagcaactcgtcttcatttgacagtaagggatctggaactggtcacatgggtgcccaactgggtaacatctcccagactcccttgcagttagatgcagatgtgaccacatgttctgagtggaataatgaacaaagagcatcatcttggatgatgaaggcaagacgacccactggggatggtggcgtggagagctag

SEQ ID NO: 116708 - DNA, 882 bp, Homo sapiens
atggcaccagcatctggtgagggcttcaggaaacttctgctcgtggtgcagggggaaggaggagccctgagtgtagagatcacatggcaagagagaaagaaaaggggtgccagtgtcacccaacaatcagatgtcactggaactaatagagaattccgcgacaaatgggtgagtttccctgcacaagctgtctctttgcctgctgccattcatgtaagacatgatttgttcctccttgactttgccatgattgtgaggtctccccagccatggggaactatacctgaaaatgtggaagcgactttggaactgggtaacaggcagaggttgaaacagtttggagggctcagagaagacaggaaaatgtgggaaagtttggaacttcctagagacttgttgaatggctttgacaaaaatgctcatagtggcatgaacaataagatccaggctgaggtggagacaaggaacttgttggaaactggagcaaaggcccagcggcctaggaggaaaaaatggtttcatgggctgagcccagggacctcttgctctgtgcagactatggacttggtgtcttgtgccccagccactccagccagagctaaaaggggccaagacttatgcctgcatcgtcctccttttgaccctgctgctagtggagaaatgcctgtgaccaactcttccaaaaactggcttaagctatttgagaggttttggcgaactttctttcaatgggcttttatcttttcttatggaactcatcctattctacttgtactatatggtaaacttgcttttctgacccttctgattggattacagaagacagagactctgtcttactttgggccacgaagtgaccagcacatagaaggtggccaatag

SEQ ID NO: 116709 - DNA, 1190 bp, Homo sapiens
atggacaataaagtccaggttgaggtgatctcagatggagatgaggaacttgttgggaactggagcaaaggtgactctcgttatgttttagcaaagaaactggtggcatctctcccctgccctagagatctgtggaactttgaacttgagagagatgatttagggtatctggtggaagaaatttctaagcagcaaagcattcaagaaaagaaaaacccattttctgaggagaaattcaagccagctgcagaaacttgcataagtaacagggaaccaaatgttaaatcaccaagacaatgggggaaaatgtctccatggcgtatcagagatcttcacggcagcctctcccatcacaggcccagaggcctaggagaaaatggtttcgtgggccagggacttggtgccctgcatcccaaccactctaatcatggcttcagagggtgcaagcccaagccttggcagcttccacgtgatgttgagtctgcgagtgcacggaagtcaagaattgaggtttggaaacctccgcctatatttcagaagatgtatggaaacgtctggatgcccctgcagacgtttgctgcaggggcggggtcctcatggagaacctctgctagagcagtgcagaagggaaatgtggggtgggagcccccacacagagtccctactagggcaccgcctagtggagctctgagaagagggcctctgtcctccagaccccagaatggtagctccactgacagcttgcaccatgtgcctggaaatgccacactcaatgccagcccatgaagggaacccaggagggagcttggccctggaaagacacaggggcagagctgcccaagacccttggaacttacctcttgggacacgccgacccggatgtggaaaccggggaccaaggaggggatttccagcccttacaagtaggcgttcgggaaaacaacacggctttgctgtatgggacaagtgaaaaggcttgtggcggagtctacacccttggactgagatggtcaaagggctactggtgtctgctcagaaggtctggagcacagacccgagggtggacgtgccagagtcagggaggggccacttctgggaggagggtgtccatgcagacccctaccctggggactggtgatccagaactctgcagcagcaattgggaaatgggcaaagacagcggattctag

SEQ ID NO: 116710 - DNA, 1278 bp, Homo sapiens
actcatacagtaaattggtaccagtagagtggggtgttgctgaaaagatacctgaaagtgtggaggtgactttggaactgggtaacaggcagagggttggaacaatttggagggctcagaagaagacaggaaaatgtgggaaagtttggaacctcctggagacctgttgaatggcattgacaaaaatgctgatagtgatatgaacagtaaggtccaggctgaggtggtctcagatggagctgaggaacttgttgggaactcgagtaaaggtgactcttgttatgttttagcaaagagactggcagcatttttgcctctgccctagagatttgtggaactttgaacatcagagagatgatttagggtatctggcagaagaaatttttaagcagcaaagcattaaaaaggtgacttggatactgttaaaggcattcagttttaaaagggaaacaagagcataaaaggttggaaaatttgcagcctgatgatgcagtagaaaagaaaaaccccttttttttaaggagaaattcaagctggctgcagaaatttgcataagcagcaaggagccaaatgttaatcaccaagacaatggggaaaatgtctgcagggcatgtcagaggtcttcacagcagctcctcctgtcacagacctggaggcctagaaggaaaaaatggtttcatggtctgggcccaaggcccccttgctctgtgcagcctaaggacttggtgccttgcgtcccagccactccagccatggctaaaaggggccaaggtacagtttgagccattgcttcagagagtgcaagccccaaggcttggcagtgtccatttgttattgagcctgcaggtgcacagaaatcaagaattgaggtgtatggtggctgatgaaatgggtctaggaaagacaatccaggcaattggaattacttacttctataaagaggaatggcctctgttaatagtggtcccttcgtctctgaggtacccttggacagaagaaattgaaaaatggatcccagagctaagtccagaagaaatcaatgttattcagaataaaactgatgttagttggatctcagactgctgtgctagcaatgagcgaggctctgtgggcggaggaccctccgagccagttaacaggagtttagagccacacctttccaatcttcttgtccttttctgcctagtagatcacaaagcagctattacggttccagatttggcatcattgcgtgatgcaggaagaaaggaagaagacaaaacgacatgtgctaactga

SEQ ID NO: 116711 - DNA, 1110 bp, Homo sapiens
gctggttatgtcaagcaagatctgaggatctgtctgatattgcttctctaaaagccttataccaaacaggtgttgataactgtggtcgaacagtgatggtggtagttggaagaaacattcctgtaacattaatagatatggacaaggctctcttatatttcattcatgtaatggatcacattgctgtgaaggagtatgtattagtgtattttcacaccctgaccagcgaatacaatcacctgggactccgacttcctgaagaaactctacggatgttgttgatgtcaagtacaagagggaattttgaaggctgtttattttgttacatcccacatttcgtttcaaagggtgtcaacatgggtttttttaccaactttttctgtctcaggactgaaggacaaaatccaccatgtggaccagcctccaccagctgttttctgccatatcaccagaacagattgactttcctccttttggtccttggaatatggatgccaggggaaaacgggccttactatacatcatatcccccatcaccagatttgtgaccctgcccatctttcagtgcttcttggttcccaggatgccacttcctccacgaatagctacctgttgaagtgatattcattgttgctgtacagatccagagagccttttgtccccacctctctggtatttttttattgactgtatattttctggcacataagcaatcttaaaaatggtaggccattctgaactgcacacattttaaatttgtatatttatatgaaatggaaatgttcatttttagattgttaatagaaattggggagcaacttttgagtatctttagtttcctgaaggacaccgaattctccattagataaaccaccaagactgttcacatcatctctctaacattgcacgcttcctttgtgtacttaagtgattctcgaaatatacagaaccaatgtatgctaaccagatgcattgtttgcttcagatccatggtgttaataccatgtatattttataaagataatttggctgtgttaaaagagaattacctgagtccaagaatgtggaaatgtatctgacaaaaaacatcaaaatcattagcaaaacata

SEQ ID NO: 116712 - DNA, 534 bp, Homo sapiens
cttcacaaaacctccaccaggctcaaggttctcccactggacctcccacgagcttcccaggtgggggcggcagagggggctcaacgcatctgtgagcacagtggggaccaggaaagggtgaaggagatgctggcgctgtcttggaagttaagtagggcttaaacctgaggaaatggaggatcagaggttgagtgacctgcccaagaccacccagctaccagtcagccaacaccctgggagggagatggttttgggatgattcaagcacattacatttattgtgtagtttatttctgttattcacacttttagggccactgtcatttgcagtctcaagcagttgatcctcttctagcacagacaaaggtgattcgcgtggcttatccacaaatgggtcacagatccattccttcccagtttggggttctttggtggttgggaagtaacgctcaagctcttttgaaagctgaggtaggggccgggcgcggtggctcacgcctgtaatcccagcactttgggaggtggaggcagcag

SEQ ID NO: 116713 - DNA, 270 bp, Homo sapiens
atgaagaagcatggaagtaacaacatgggattatcagaaaacttgactgatgctgctggcaatggtgttgatgaactaattccacaaagaaagagtgaaaaacctgaaaatcagcaatttcctaggacagagaatgagaagtatcaaagaagcaagctgctcacactgatgctggttgatcaggtagccattctctcccactcggaatactgcaataatgttagaactgtttttcctgctaccccacttcctgagaccatggtctactag

SEQ ID NO: 116714 - DNA, 381 bp, Homo sapiens
atgcccaatgcaggggaaaaaatccatatttcagttctggaaaagattcagaatgcccaatttaacatgggagtgtgtggaacaggtgacgctgttgatgaagctgctgttgagaagacccaagtaattgagactcggtctgtgggcttgttatcggatcactccactgttttccacactttaatcagtcttttccaggactcgtcatccttggcagccccaactcctgcctgtcaggccaagcagccaccaattaagaaagcgttcaagctcaacacccacctttcaagctcaagtctccctttgcggttgctacaaccaccaagggctcatcctcttctcctgtctgccctcatgtcctgccaatcaggagccttttaa

SEQ ID NO: 116715 - DNA, 642 bp, Homo sapiens
atggggaaaatgtctccaggccatgtcagagactttcatggcagctgccaccataacaggcctggaggccctggaggaaaaagtggtttcatgggccaggcccttggtcctggtgctgtgtgcagcctagggacttggtgctctgtgtctcagccactccagccatggctgaaaggggccaatgtggagctcaggctgtggcttcagagggtggaagccccagaccttggcagcttccatgtggtgttgagcctgcagatttcagaagatatatggaaacacctggatgcccaggtagaaatttgctgcaggggcggggcccttgtgaagaacctctgctggggcagtgtggaagggaaatgtgaggtcagagtccccacacagagtctctactggggcactgctagtggagctgtgagaagagggccaccatcttccagaaaccaaaatggtagatccactgacagcttgcactgtatgcctggaaaagacactcagcgccaacccatgaaagcagccaggagggaggttgcaccctgcaaagccacaagggcggagctgcccatgaccatgagagcccactttttgcatcagcatgacctggatgtgagacctgagtcaaagatcattttggagctctaa

SEQ ID NO: 116716 - DNA, 1164 bp, Homo sapiens
atggctgaaaggggccaatatagagctcaggctgtggctacagagggtggaagccccaagccgtggcagcttccatgtgatgttgagcctttttcagaaagcctgagctcctggggcaagaagtttctcttgggaaacaagatggatgagtactttaaagaagaaatagtggctgcaatgggcctaaggctgaaagatggtaaaataaatctgcttactgccaagattcatggtccagcaggattggtctccactagcaaaagggttgacagacagcatgtggaaaatcaggtcactcccaccctaatactgcgtttttccaacggtcttagcaaacagcacaccaggagattgtatactgcagcaggcttggagggtcctacacccatggagcctcaatcattgccagcacagcagtctgagatcaaactgcaaggcggcagcgaggctgggggagtggtgcccaccattgccgaggctagagtaggaaacaggtctggagtggacctccagcatactccaacagacctgcagctgagggtcctgactgttaggaggaaaactaacatacagaaaggacatccacaccaaaaccccatctgtacatcaccatcatcaaagaccaaagtattggaagttctggccagtgcaatcaggcaggagaaagaaataaagggtattcaattaggaaaagaggaagtcaaattgtccctgtttgcagacgacatgattgtatatctagaaaaccccattgtctcagcccaaaatctccttaagctgataagcaacttctgcaaagtctcaggatacaaaatcaatgtgaaaaaatcacaagcattcttatacaccaataacagacaaacagagagccaaatcatgagtgaactcccattcacaattgcttcaaagagaataacatacctaggaatccaagttacaagtgatgtgaaggacctcttcaaggagaactacataccactgctcaatgaaataaaagaggatacaaacaaatggaagaacattccatgctcatgggtaggaagaatcaatattgtgaaaatagccatactgcccaagataatttataaattcaatgccatccccatcaagctaccaatgactatcttcacagaattggataaaactactttaaagttcatgtag

SEQ ID NO: 116717 - DNA, 471 bp, Homo sapiens
atgtggaagcaactttggaactgggtaacaggcaaaggttgggacggtttgcagggctcagaagaagacaggaaaatgtgggaaagtttagaatctcctagagacttgttgaatggctttgacaaaaatgctgatagtgatacgaacaataaggtccaggctgttccagccatggctgaaaggggccaatgtatagctcaggctgtggcttcagagggtggaaaccccaagccttggcagcttcaacgtggtgttgagcctgcgagtgcaaagaagtcaggaattgaggtttgggaacctccacttagatttcagatgtatggaaactcctggatgcccagaaaagccacagacactcaatgccagcccgtgaaagcacccaggagggtgactgtaccctgcaaagccacaggaacagagctgcccaaggccatgggaacccacctcttgcaaagtgcgacctggatgtga

SEQ ID NO: 116718 - DNA, 1099 bp, Homo sapiens
atgatacctcccaagcagccacgacagcccaagggagctgtggacgatgccatcgcctttggagggaaaacagaccaagaagcacccaatgcttcccaacctacaccacccccactgccaaagaagatgatcataagagccaatacagagccaatctccaaggacctccaaaaatccatggaaagtagtctttgtgtcatggctaatcccacctatgatatcgaccccaactgggatgccagcagtgctggttcttccatcagctatgaactcaaaggactggacattgagtcttatgactccttggaaaggcctttgcgcaaggagagacctgtcccctcagcagcaaacagcatttccagcttaaccactctcagtattaaggatagattttccaacagcatggaatccctctccagccggcgtgggccctcttgcagacagggccgaggcatccagaagccgcagagacaagcactttatcgaggacttgagaatcgggaggaagtagtgggtaaaatccgaagccttcatacagatgccttgaagaaactggctgttaaatgcgaagaccttttcatggctgggcagaaagaccagctccgttttggagtggacagctggtcagacttcaggctaaccagtgacaaaccatgttgtgaggcaggtgatgcggtttactatactgcttcatatgcaaaagatccacttaataactatgcagtcaagctggcagaaagtcacacgatcagccgttcttcacctcctctgataagcattaaagagctgctgatgatgatagaccttctctcccttgtcagttctgaggttataaaagaaaaaaaggctcaacgccacatggaagctgccaaggcttggggcttgcaccctctgaagccacagcctgagctctacagtggcccctttcagccatggctggagtggttaagatacagggcaccaagtccctagggtgcacacagcagggaaggccctgggcccagcccatggaaccatcttttcctcctaggcctctgggcctatgatgggaggggctgccatgaaggtctctgacatggcctggagatattttccccat

SEQ ID NO: 116719 - DNA, 182 bp, Homo sapiens
gtgggcacgatggaatcaatcacaagcgtccttataagcgggaagaagaagcgtcagactcaggcgatacgaagatggaagtggtgattgcagtgatacacgatcaaaagccaaggtcacaaggcccttgggtgagaggtgccgtccctgtccctggaggaaggagcatccttgtctcttaa

SEQ ID NO: 116720 - DNA, 231 bp, Homo sapiens
tcacggggtagctccagggaccagcagctccggcagggacccccagggaacagggctgcctgccaactgggaccccaaaggctgctggtgagcccagggcaaggccgctgcacctgcgccagggatgcttgaaatccaccgaaaggggacagccacgtgcttcccctcagggatggagaccctgagttgggtgtggacctcaacacttcatgaaagtgaaaactgaaagtg

SEQ ID NO: 116721 - DNA, 530 bp, Homo sapiens
atgagctatgggcaggcctgtggtgtatggggacacctggacgatggaagctgggaatgtgctctgcttgaaagccctgacatcaagggtcattctgattttgctgagccagagcaaaggagaccctgtctgaaggaagaggaaggaatgtttaccagtatccttggcctctacccactagatgccagcagcactctcctggcccccatccccaagtttcagcaaccaaaaatgtctctagacattgccaaatcttccctggagtttccaaggcacctctatgcagatgactcacaagctccggaccactcatccaactgcggttctgacatctccatccagatgccccaaaggcactcaagcccaatatgtacaaaatcgacttctcgatctaccccaatgaactagttctctaggtctcggggcaaagcttcccccttcagaagccttagtcataaaaaacctaatctccccagccctcaccgacgcggggtcgacggaatccggacggacagcagtgtagggtctct

SEQ ID NO: 116722 - DNA, 478 bp, Homo sapiens
atggacgtagctagcatgggcagtgttatgacaagtgttgatgaaaaactgcaagaactgagatgcttccatgttctaggcctctggtgcaagaaggtagaagattgttggaattgccgatttctaacctgctcccagggaatcgcagttaaagttccccatggcggagttgttgtcagcagacgtgatctaaaagaattgctaaaagatgttcttaagacaaaagggaaatttatatcagaagaaaacttgacattaggaatgaaagaagataaacagaaatgttaccaatctctcttttgccaagagaggcttacagtggactacaggcagcagcagcagtcaaagaatgactacgggagacaaaggccttattgagattttaccaattgtcccaataatgtccttcacaggaaaagaaaagccacgaacactgaacgcacttatttgtggcatctttaatctgagtaattcctaa

SEQ ID NO: 116723 - DNA, 616 bp, Homo sapiens
ctgcagtcgacttcggcaggttcagagcatcctgacccagagcagcaagtctcggccggatgggatcctctgcatcctaggaatcgatagcaggtacaatgaaggctgcagagagctggcaaattatcttctatttggtttgtacaatcagaataccagtgattttgagaaaacgggattttctgaagaagtactagatgatgtaattatattgattaaatcggatagcgtccatctgtactgtaatcctgtaaactttcgctatctcttaccttatgtggcacattggagaaatctgcatttccactgcatgaccgaaaatgagtatgaagatgaagaagccgcagaagaatttaaaattaccagctttgtggacatggttcgagactgtagtagaattggcattccttacagctcccaaggtcacttgcagatatttgatatgtttgtggtggagaaatggccaattgtacaggcctttgcacttgagggcattggaggggatggattttttaccatgaaatatgagtgctttgaggtgtggagcagtttggcctacagatgggctctgccagtgccctctctactccactctgatggcctgatgactgcctga

SEQ ID NO: 116724 - DNA, 713 bp, Homo sapiens
tttttttttttttttttttcagcctggtgcctttagagctaggatttagtttctattctttctgtctcattttcaagtgatttttttcttcaaatggcatctactgggctcaagaactggagattcccacaaagctgagattcacatgggaattttgtacacacccacacaggtatacacttccatttacatgcagacatccacccacagatacacacatccggagaccaagacagaacacaaactccaccataaaagcacggttccccgaacaggagaaacgcaccattcattccagggaggtagagccacggattccttcatccctccatcacattgaggatgcttatcaagacttccccaacaatggggacagggatattatcaaatacttgcagttcaccccaaaatgctcaccctcttcgttccacctgcacatgaccttcagctcaaagacatttctagtcctccaggtactaggggtggctctgggctcagcactaaagacactgaccctggtaaagccacagtctagcaatgacagtcaaccacgtatcagcaacagccctgccccacacgtgctgactgcgcacaaggccggcgctgtgaacgtgctctcaacagtgatctcactgaaccctcatggcagctctaggatgcagacagtagcatcacattatccccattttacttttgaggaaactgaggcctga

SEQ ID NO: 116725 - DNA, 882 bp, Homo sapiens
atggctgacatcgagatgactctgagtacacaaggtgcgaagttacaggagacagaggctctctcggatctccaggtaaacacacgcagctgctcaggaaggcagcctgatccaggagcctgcaggagcctgagtcctacccagatggtcagccaaatgtgggccttctcatgctccacgtgtaaacgtaactcaccaaacagggcccctgctgctttccgggccaagtcagtggagaggactgaaggccggctcacagctaggaaagcagggctctgccgcgccgagggaatgggtcccaggtctctttcaacatcagtaggtttgtggctcaagtcaggaagcacgtcagccctgagacctgcaaaccgaatcccacagacagttctagagggtgttcctagtccccattatgagcaaaagtcgccacttcactgtgttattcgaggagggaaaagtagatacgatgatggaggcatatttgaggtcgatatgagaaagttcacgctcacaaacacagctgtgcataacgggaatggctattttatgagggaccaggtaaccatcctgtgcctagcaggtaacaaagtctggctgcctcaaactcagaacatccttgcaacactgttacacccactgatcttccaagttcaccttcacaaatgtgcaagggatgagggggacaaagaccaagtcaccagcaccactcctgatcccccagattccagcccaggtggtagcctgggacctactgtgcagaaggacacacaggtctcccttgatgatgtggcaaactgcaaggaccaagcacagaggcacctggacaccaacccttccctgcgagccacatggccagtcaaacgttctggttaccggggatga

SEQ ID NO: 116726 - DNA, 507 bp, Homo sapiens
atggtgcaacaaggagaacaacctggagaaagcatgtttgctggtgatcggcctgggttcatgcgagttcagcaagcagttaccatgtctacggcatgccaggatactgttgggaaggtagtattccgtgtacgtgagacctgcacccaggtttctttaagtgcttgtcaaatgaaggaatcagcttctcaggctgcatcacgagcctgtaggatttggatccgtgaaatgtatgtgagatcaccaagcataatgctccccagtgaaaacaggactcatcgaatgccaagacgctcagtcatggttgattaccagaccacagaaaacctggcagagctggcacgatccactgagtcctcctccagggagccttccctgctgccctgccccttgactggcttaggtgccactattcagcgctactacaatagctggtgctcatttctgtcgttgtacttaacaacagctgctgctgcccatgggggctcccttggtgccagacactga

SEQ ID NO: 116727 - DNA, 333 bp, Homo sapiens
tcagagaaccaagaaatgtagcaggaaatccgcagaaaaaaacctctcagacactgagttgtagaaggaagggcttattcagctgggagcatcagcaagctactgctttaaaatcaaagctctccaaatgcacgatttctgtcctttttaaaggctcacaacgctaaagatttccatgaaaggaacatttttgtcattacaaacagaaatcaaaacaaaagtgtgctgcttcttggccagaaggacagggctgatggctacggacttcccataacctgggatgagaactcccgcagttctccccctttgtgtcgaatggtccaggggaactga

SEQ ID NO: 116728 - DNA, 446 bp, Homo sapiens
agagaaaggaaagagaaagctaaatttgataagtgcgagagagagagaaagggaaaagaaggaaagaaaggaaagaaagttaaatgtgataagggctggcaacactggagggtctctgcctctcaagactcagccttgttcacagttcagtcctgcctcaagggcctgggctggtgctgtaccctggtccgggttggccctcaccggcccccaccccggctctggctccttgccacccctctctcacagtactgatgtttaaaacacatacgggccctgggggacacgagcacgggctcacggaatcccacgaaagcaggccctacttcagccccggcccttatgctgccccacccctagctgagtcctgcctcaggacctttgctccggatgtaccctcgtccacgttcgccctcattggccctcctcgagctctggctctctag

SEQ ID NO: 116729 - DNA, 327 bp, Homo sapiens
cgatatgattatctgctgatggccctcctccggacagccccacctgtcactgcccctggaaagctcaccccaatctggatgcggtctcaagccctcaagccaaagcagggcttcccaggtacagtttccaggctctaccagggtcttggctcagagaagacatagcactgccctcatgtgaaaagttaagcaactgagggtggtctccaaatgaccgtcagcaagaaggccctcattctacgaagccacaggaattgaatcctgccaacaaccttgtgagttgggaggcagatcttttcccagtctagacttcaggtgagacaccag

SEQ ID NO: 116730 - DNA, 327 bp, Homo sapiens
tgcgatatgattatctgctgatggccctcctccggacagccccacctgtcactgcccctggaaagctcaccccaatctggatgcggtctcaagccctcaagccaaagcagggcttcccaggtacagtttccaggctctaccagggtcttggctcagagaagacatagcactgccctcatgtgaaaaggcaagcaactgagggtggtctccaaatgaccgtcagcaagaaggccctcattctacgaagccacaggaattgaatcctgccaacaaccttgtgagttgggaggcagatcttttcccagtctagacttcaggtgagacacc

SEQ ID NO: 116731 - DNA, 837 bp, Homo sapiens
ttaaaaggttaaacatacagttaccacattgaaatgggaaaagctcctttgtccccctctcaggacgtgcgatgggggtgtggctcgcttcttcagtgctccgctgctcaaacctctagaggagcagacagacgggggcaggctgtggggttccgaccccatagcactatctaggggtgaatgtttacagcttgtgaagccccagtgggtgtgttttacagtttgccgtctataggtggcttgtgttagctcaattagaccctctaccatgtcgcaaggacagagggctttctgtacccccgggtttcttgccttggtgtactggaagaataggatcacacatgggcttggagaatgagtgtgaggttttattgagtgggggtagctttcagcagatgggggagccagcagggagatggttttcccctggagttgggccactcggcagccccggctctcttccaactgccccggccaaactccgtgtcgttctgccagtgccaatgtactcctctcgatgtccagccgcttctgtctctgccttgctagggtctccgttttccaaaaggtctactacagctccaggatctactgcactttcaaataccttttcaaatctcatgctctcctgaatcataatggggaacgcagagggaaagctgttggtctccaggtactgattcatgaggtagaccccgaggtacacatcttgtttgccaggcaggaacactcctgggcaagaaatcgcccggatctgcagctccaccaccacctccagaggcatcgttccctgcgtgggcgaaaggactggaatgagaagatccttttgtgccgagc

SEQ ID NO: 116732 - DNA, 1452 bp, Homo sapiens
atggaggacagggtggggccgagtgaggagaggagccagcagaagttatccataacacctgccaggctggcgggtggtgacagtcttaaccctgctggaaggacaggtgacctcttagtggagacatcccctttgctggcagctgtcttcccagcccacgacaacagcctctgcaacaagccttactggttagttcaggatctgcgccttatcaaccaaattgttttgcctatccaccccatgatgttactaggggagatatcagtcaccaaggccttggctggctccctgataaaagcccttgcagtattccacactgcagaatccccaggctatgctctcctggattcttactacctgctccagaaagggagtgtttgcatctccatcctccaagaagaggaagcattttcttggccggggaaaggagagtgtcgagataagtcctgggcctctctgggcctaatacccgcatttccccagggaggacagtggaaacaggccctggggcttctggaccacagctgcctctgctttggggaattaggcaccaggttggcagccccagcatccttcagcaccttcccaataacaaaccgagagcgggagagaaaaactgacaagctgattccaaaattcatgtggaaatgcaagggacccagaataaccaaaacaatcttggaaaagaatgaagttggagaatttacacttcttgatttcaaaacttaccacaaatttgcagtaatcaaaactatgtggtactggcataaggacagatacattgatcaacagaatgacattgaaagtccagaaataaattcatatgtttatggtcaactgatttttgacaaagactcagcccgcctgcacccaggtgaaataaacagtcttgttgctcacacaaagcctgtttggtggtctcttcatatggacgcgcatgaaatttggtgccgtgactcggattgggggacctcccttgggagatcaatcccctgtcctcctgctctttgctccatgagaaagatccacctacgacctcgggtcctcagaccgaccagcccaaggaacatctcaccaatttcaaatccgtttttacctgaaaactatatcaaattgagtcatcctgtcccgttagactcctacgtgctctgccagtttctcaggttgtccttgtttttaatgaccttaacagttttaagaagcactagtcagggcaaaacgacagctgtgcttcaccattctggggtacttgctgtcaatgcacctgccctcacagtctgggacactgccaagccccaccatcccaaggactctgtgcagtatgcaggccaggaatccctcaggctgtgggtttccacatgtgcttctgcatggaaagctcccctggctgctgcaggatgtcctttgcagagccccatcctgtcctccttatcgcagctgcaggcagcctga

SEQ ID NO: 116733 - DNA, 654 bp, Homo sapiens
tcattctcttccctcctgttttgttgaaggtcctgggggctctgtcctcactcctttttcttctttcaggagaacctttgactcccatggctttgatgactcctctcctgttggaggattgggagtgaagaaggagaagactcttgaggtaacttctagcagctcaggcccagagggctgggttgtagctatgattatatccctgggggtcagagcacagcattggcccaactccagggagtaagggatgctctggaggtttgggcctgagccaatagggctcagtaacaacttgagtgccgtgagtgccacgagataaggcaccatgtagtagtaactatagaccttgggatggtggggcttggcagtgtcccagactgtgagggcaggtgcattgacagcaagtaccccagaatggtgaagcacagctgtcgttttgccctgggttccatctagttggaacggagatgcctgcctttgtgtcgtcccaccccagggcttccactcaagcctgttcacaggaatgtttggcttggtaaaggaggagcccaggcgcatctgggtctcagaagtgacataatgtgcttgcaatgtctgcctccagcatgaccttgctcctgttctccctcctccaactgtcagaacccccagcat

SEQ ID NO: 116734 - DNA, 128 bp, Homo sapiens
ctactcatggccaagtcaatgtatatggccatggaaccctcttcattccagaagtatctccaaaggattccttttttggagagtatgatggcctaggctaactttactataaatagtagatagataag

SEQ ID NO: 116735 - DNA, 550 bp, Homo sapiens
gttatcttccttatttattaatttatccatatttctttagattaaatgttagctagagcataaagctgaactcatcacattaagcctttattattactagagaactgcggatgagggagctagaaatttatttttaaaaggttttagcaactcacacaggaatttcatttcttctaggcaattttaatggcaaacaacgctatttcaaagcacttccgataaatcacttcaagtaacagtattttgcttatttgacattctcacaagtggaataggtctactacgcttaagacaatgttgaagactaggaaaagactcttttctctcaaaacttcttttattgcttcttacctcatctaatggtttatcttccaaagctgttaaatctagtagtgggtttttcactcctaatgaaaccattgtttttaggcctagaaaatcaacaaaataaaaagttcagcatgtcttatctgtctcagaaattaacacttataatgtctagagggtggcaagttaaataccagtgtctatcagagataaacagttacct

SEQ ID NO: 116736 - DNA, 1894 bp, Homo sapiens
agttagttacttcctgtctagagttgtagcttccacctgcaccttctagccaccatggcaacctcatctgaagaagttttgctgattgtaaagaaagtgcgtcaaaagaagcaggatggagctctgtacctcatggcagaaagaattgcttgggcacctgaaggcaaagatagatttacaatcagccatatgtatgcagatattaaatgccagaaaattagtccagaaggaaaagctaaaattcagcttcagctggtcctacatgcaggggacacaactaacttccatttttccaatgaaagcacagcagtgaaagagcgagatgcagtaaaagaccttcttcagcagctgctgcccaaattcaagaggaaagcaaataaagaactggaagagaagaacagaatgctgcaagaagatcctgttttgtttcagctttataaagaccttgttgtgagtcaagtgatcagtgctgaggaattctgggccaatcgtttaaatgtgaatgcaacagatagttcttccacatccaatcataagcaggatgttggcatttctgctgcatttctggctgatgtccggccccaaactgatggctgtaacggtctaagatataatttaacttctgatatcattgagtccatatttaggacctatccagcagtaaaaatgaaatatgcagaaaatgttccccacaacatgacagagaaggaattctggacacgttttttccagtcccatttattttcacagggatcggctgaatacagggtcaaaggatctctttgcagaatgtgccaaaatagatgaaaaaggcctaaaaacaatggtttcattaggagtgaaaaacccactactagatttaacagctttggaagataaaccattagatgagggctatggcatttcctctgtgccatctgcttccaattctaaatccataaaagagaatagtaatgctgccatcatcaagagatttaaccatcacagtgccatggtcctggcagctggactcagaaaacaagaagcacaaaatgaacaaactagtgagcccagcaacatggatggaaattccggagatgcagactgctttcagccagcagtcaaaagggcgaaattacaagagtccattgaatatgaagacttggggaaaaataattctgtaaaaacgattgcactaaacctcaagaagtcagataggtattatcatggtccaactccaatccagtcactacagtatgcaacaagtcaggacattattaattcttttcaaagtattagacaagaaatggaagcttatacacccaagttaactcaggttctctcaagtagtgctgccagtagtaccatcacagcactgtcacctggaggggcacttatgcagggaggaacacagcaagccataaaccagatggtgccaaatgatattcaatctgaattgaaacacttatatgtagctgttggagaacttctacgacatttctggtcctgctttcctgttaatacgccattcctagaagaaaaggtagtgaaaatgaaaagtaatttggaacgattccaagttacgaagctctgtccattccaagaaaagattcggagacagtatttaagcacaaatttggtaagtcacatagaagagatgctccagacagcctacaacaagctccacacatggcagtcacggcgtctgatgaagaaaacgtgaggtggccatgatgcttacaggttttgtgagattgagagaactatgacctgcagcaactctggaaacctggcctgacagacaagcagatgacctcacaggagtgataagaaacatctgctccacgccaactcccagagctgatgctattgtacttgcacattggagactgaaaggaaagaagggactaaatgc

SEQ ID NO: 116737 - DNA, 309 bp, Homo sapiens
atggggaaggccatgttgcagctgctgatcagagcacattggacggtgtttccgtgtgaacatgaagacaatgctgcctctgtttctgtgacgctgtgctctgatcttgctggaggcgaagtggtgtcagctgtgcttacaggacagtcagtggtgcaaactgagaaagagatcgataggtcatcaaagccacctgcttgcttggtggcccctcaagttgtcttctgctcagaagttctgagagttgatgaaagttatcatcgaaagtacccagtccagctcaggccagtccatattgctgccaagtaa

SEQ ID NO: 116738 - DNA, 622 bp, Homo sapiens
tacttaaaaccagagcttataaggcagcaggaccctaacagaagcattcatgtggatacacctcactgtgtaagctgttgtaaagcctctgctagcatcatgcttgctgatgtcgcattgaccaaggcaaggcacaccgccaagaccagatttagtgtcggaggggatgatacaagagatgccctgccccaagaggaggaatctagagaggcagtctggctacagcagctttgcctagctgtggtacccagcggctttgtttaccctgtgagggaaaaaccacctactcaagcctcagtaatggtggacgtcccttcccttaccaagtttgagcatcccaggtcgacttcagagtgctgtgctggcagcgagaatttcaagccaatggatcttagtttgctgggttccatgggggtgggatctgctgagctagaccacttggctccctggcttcaggccccctttccaggggagtgaacagttctgtctcgctggcgttccaggtgccaactggagtatgaaaataaaactcctgcagctagctcagtgtctgcccaaacagctgcccagtttcgtgcttgaaacgaagggccttctcttggccaggggagggagttcttga

SEQ ID NO: 116739 - DNA, 1191 bp, Homo sapiens
atggtcccccaatatacctgccctctgattcctgacacctgtgaatatggcacattacatggcaaaagggactttgcagccccagtgagcctggacgtggatcctgcaccagagctcagcactgatgacatcttgattttggccttgagagacgaagcacagaagccagcagagccccatggaccatctgccatctgcgggaagctgtggggcaccaggaatgctcatcgcagggttgtatttggttcagccacgatttgcctggggcatgcgatgagcagcatgcagaccaaaggacagcggtccccacagtgcagcgtgctgtgtgctcctgcagaaggagggacagacatgcctgaggatgaagccactaactgggagtggggaagagagagaacagtggctgaacaggagtttcctagggacctgcagaagggaagagtgggcaggacagaaataaataatgccagagttctgtgtcacaaacggtggactgtcagcacggctgacaaggcatatggtgaacgcagtccttccccagctgcttctggcgggaagctgacaagaagcacgttgctgagtgatcctgggttcccatcctccgcacccgtgcatccacgcgtgggcccagccagcaaggagaagtctaacaggcaggaggaggggagacacaaggagcccccgcaagctcagcgtacaggaaaatctcctcaaatgcagaaatttgagtgtgaatttaattttcagtgcatcaaaaaatcatttagcactaggaagatagcctctctgacaggaacggactggcagcaggggactttgaccggcagctccatcatggggcacaatcttctaatctctgataagcggcccttttccgtggagctgtcatggataaatgttttctgtagctatttgtggagcactgggtcccgttcctttctacgagagcggccgttcccaattgggtgtgactttgctccctatgggatatttggcaagtttggagacgttgtcacaacttgggtgcgcatccagtggatagaggccaagggtcctgttaagcataccacagtgcacaggacagtctcacaacaaggaattatccaacccacaatttcaagtgtgctgaggttaagaaccctgaaaccaaacaggagtgtcagcgagcacagggaaggttgcacgttttga

SEQ ID NO: 116740 - DNA, 834 bp, Homo sapiens
ggtgatcacagagcttcctctggcctgccattacgcgttgtctctgggaaaatgggaagattctactgccccgacatgaatagggaatgtgctttgagctgttttcctgatagacatagagcaaacacacagggtcagttaactccctccttccacgggcaaagaagtgttgtcaaaactcggaagaggtcagccacaaagcttgatggaaccctatcctcaggccaaggcaaaagagaagaaactggaattaacaaggaatacgggagccctcaccaagtccaaggacttacctgggagcaggaaggggcagcagaggaaactgtccagggacagaggagggagggctacaccttcgtgtcctctgctgcatggatgaaggttaccatccgtgtggagaagtttggccatgccccgggccttaccgtgcgcggggcagccccggcaggcccagtcgggctggaagccgccgctggctcagagccgcatcccggcccgcggacgcagggggcgcgcggccggtccccggaggcgctgggtccaggccgaggatggttttgctccccgctccgctccgcatttaggaggtgggaggagcgcgcggcgatgcgcacaggaaatctgataggtgaggaggccggcgggccgcgcagggcggcgcgggctgggggacgcggcgggcggctccgggaggcgacgggacccccaggccggcagccgagtgaagaggcaggaactgtctacaaatgctccggctccgaagccccgagggaaagagcatctttcacggagcaccaggaattgacgacggtggaatttgctcagatcccctga

SEQ ID NO: 116741 - DNA, 933 bp, Homo sapiens
atggcaaagccaggaggaatttgcagcagggatttttaccctcattttggatttagtgcggtcaggaagctgacaagaagcacgttgctgagtgatcctgggttcccatcctccgcacccgtgcatccacgcgtgggcccagccagcaaggagaagtctaacaggcaggaggaggggagacacaaggagcccccgcaagctcagcgtacaggaaaatctcctcaaatgcagaaatttgagtgtgaatttaattttcagtgcatcaaaaaatcatttagcactaggaagatagcctctctgacaggaacggactggcagcaggggactttgaccggcagctccatcatggggcacaatcttctaatctctgataagcggcccttttccgtggagctgtcatggataaatgttttctgtagctatttgtggagcactgggtcccgttcctttctacgagagcggccgttcccaattgggtgtgactttgctccctatgggatatttggcaagtttggagacgttgtcacaacttgtgtgtgtgtgcagggatttcctgtgcgcatcgccgcgcgctcctcccacctcctaaatgcggagcggagcggggagcaaaaccatcctcggcctggacccagcgcctccggggaccggccgcgcgccccctgcgtccgcgggccgggatgcggctctgagccagcggcggcttccagcccgactgggcctgccggggctgccccgcgcacggaaggagctcagtgtgaggcccatggacgttacctcctggagatgcaaatcggaaagagatgtttcactatgctgtcacctcagaagattgacaaggacaaggttgtctttgcaaaggttcttccagacaagggcatcccttcttttgtaggatttctaagggcgcacacagggactcctgatgtctga

SEQ ID NO: 116742 - DNA, 393 bp, Homo sapiens
aaggtggacagtggattgaaaagaacccagagggctctcccgctccaccaagctctcaaaggccaaggtgttcgctctgatgagaggtgtgagctgtggtttgttcagcaagtgctggggccttacccacctgccccctttggtcctcctgtgggctgtggggaccaggcccctgctactcaaggccaaggtcaatgtcatacttactcctgcaggaagaggaaatggggtatggggagaggaagcacagaccccccagttacagcaagaaagagttcaggctctaaattactactcacaacccccttgccctttcctctagagcagggatcggcaaacttcttctgtaacagccagaaagcaaatgttttaggcattgtgggtcacatatag

SEQ ID NO: 116743 - DNA, 424 bp, Homo sapiens
cgatccctgctctagaggaaagggcaagggtgtttgtgagtagtaatttagagcctgaactctttcttgctgtaactgggagggtctgtgcttcctctccccataccccatttcctcttcctgcaggagttaagtatgacattgacctgcccaacaagaaggtctgcattgaatctgagcacagcatggacactctgcttgcaaccctgaagaaaacaggaaagactgtttcctaccttggccttgagtagcaggggcctggtccccacagcccacaggatggaccaaagggggcaggatgctgatcctcccgctggcttccagacagacctgggacttggcagtcatgccgggtgatggtgttcctgcggagaccctcagttgtcctattccttcctagcttccctgcaataaaaatccagct

SEQ ID NO: 116744 - DNA, 418 bp, Homo sapiens
gaattcccggctcgacgatttcgtgctgctgacaccgccgccacaccgccgcctcaccgtcgctgcctcagtcatgccgaagcacgagttctctgtggacatgacctgtggaggctgtgctgaagctgtctctcgggtcctcaataagcttggaggagttaagtatgacattgacctgcccaacaagaaggtctgcattgaatctgagcacagcatggacactctgcttgcaaccctgaagaaaacaggaaagactgtttcctaccttggccttgagtagcaggggcctggtccccacagcccacaggatggaccaaagggggcagctgagttggagaatggcaacgaagaccatttggcccacatagcctagactgtttactattttgcccttttcagaagaaaattgtctgtccat

SEQ ID NO: 116745 - DNA, 428 bp, Homo sapiens
cttatttcctcagtggaaatctactcactatgatgtggtagttggcgtgttgtcagctcgcaataaccatgaacttcgaaacgtgataagaagcacctggatgagacatttgctacagcatcccacattaagtcaacgttttgaatcaggaaattgaagcgttcagtctgtccgaagacacttcatcggggctgcctgaggatcgagttgtcagcgtgagtttccgagttctctaccccatcgttattaccagtcttggagtgttctacgatgccaatgatgtgggtttccagaggaacatcactgtcaaactttatcaggcagaacaagaggaggccctcttcattgctcgcttcagtcctccaagctgtggtgtgcaggtgaacaagctgtggtacaagcccgtggaacaattcatcttaccagag

SEQ ID NO: 116746 - DNA, 1098 bp, Homo sapiens
atgcgaaactggctggtgctgctgtgcccgtgtgtgctcggggccgcgctgcacctctggctgcggctgcgctccccgccgcccgcctgcgcctccggggccggccctgcaggcctggttagtgatgtccgacgccgcccgttcgcccgggagcggaacctcgtgtgcccttcagccgccagcgctttctgctttgggagctctggctctgaagttgttttcttcccccccaagttgttggtctttctcggtcaagactggggttttagtgccgtggataatgtgtatcagttggccttatttcctcagtggaaatctactcactatgatgtggtagttggcgtgttgtcagctcgcaataaccatgaacttcgaaacgtgataagaagcacctggatgagacatttgctacagcatcccacattaagtcaacgtgtgcttgtgaagttcataataggtgctcatggctgtgaagtgcctgtggaagacagggaagatccttattcctgtaaactactcaacatcacaaatccagttttgaatcaggaaattgaagcgttcagtctgtccgaagacacttcatcggggctgcctgaggatcgagttgtcagcgtgagtttccgagttctctaccccatcgttattaccagtcttggagtgttctacgatgccaatgatgtgggtttccagaggaacatcactgtcaaactttatcaggcagaacaagaggaggccctcttcattgctcgcttcagtcctccaagctgtggtgtgcaggtgaacaagctgtggtacaagcccgtggaacaattcatcttaccagaggccattgtcaaaccttcccccaccttctcctttgggtaccaaaccctgggctttatttgctgcttcaagttcaaggtgggagtcagagccagtgtgactgctttgtctggcacaacagaactgctcagcgattctgttgaacggatgctgctgcctggcccgtatctggcctggagagtctggctgcgagctcatctgtgctctggtctggctaaggtcaggaatttggagaagacatggtgcgacggcttgtcgctgctctcagctgtctag

SEQ ID NO: 116747 - DNA, 502 bp, Homo sapiens
atgcccaagttccactcccagattcagattaaattggccgccatccaggtattgcagtttctccgagctgcctgggagctcttaattgttcctgcagggatgtctgaagtactctgcaaggctaattaggacagatcaatgtacacttacctctccagaaggtgaaaggtgtgaagcacaagggatgtttagcaataccagcaggacacacatttgggatcacaaatatacagcagaaactattcacaactacaaccacagatccataagacagaaaggcaccatattcaaagggcagaagagcactgaagtcatgcaagcagctggcagcaggaaagagaatgagtgccaagtgaatggggaagcccttataaaaccatcagatctcatgagaactcacttactatcaggagaacgtatgggagaaacctcccctatgattcagttatctccacctggtccctccatgacacgtggagattatgggaacaattcaagatga

SEQ ID NO: 116748 - DNA, 408 bp, Homo sapiens
atgaacacatccgtagaagaagatacaagcggctggtcgtcgagagccagctggcagaagagcacgcagacagccaccagtagctctgtgctcgtcatccacccattgctttctgatgttgtgccatctgctttagctcaccgcattctctgtgccatgggaatcttccaatcagctcctgtgagtactctcgggccagaatgcaatctctattcctcaagtgatcctcatttgagattggagactggattgtattatcacaatactaacagaggctgccctcattcaggccctaagccaggagatcaagagcaagcaagatccaaactcaaaggagctgctgaaggaacactaaatctctgctttcccaggcccaccctcatgatggatggaggccaggttatttga

SEQ ID NO: 116749 - DNA, 498 bp, Homo sapiens
  misc_feature (1)...(498): n = a,t,c or g
gtgcaattccgctcggtggcggtagccgcggttgttggccgaccgagtgccggtataagccccccccggtggggggcagctggtgtgcggatcgcggcgggagagaggcgcgggaggaacgggtccccggagccgtgaaccgcgggtacaggtgtcctgtctgcgctctctgccaagccggcttgcttcctgatctgttgctagggccgctggaccccgttgctaaggacccttgagatcgagtgaaagggaagcaatgcagaaatcagagggctctggaggtacacagttgaaaaacagagcaacaggtaactatgatcaaaggacatcatcaagcacacagttaaaacacaggaatgcagttcagggaagcaaatcctcattgtcaaccagttctccagagtctgcaagaaaacttcatcctagaccaagtgataaactgaaccctanaacaattaatccggtccattcggatgatgaagtgtttgaaagaggatt

SEQ ID NO: 116750 - DNA, 468 bp, Homo sapiens
gtgcattgcttccctttcactccaattcagtggaagttttggatggaattttatggctaaatttctatcttccttcacgtcaaaaagttgttcctgtaacaaacttaacgacaaattacagttggctctccgtatatgcgggttccacatctatagatttgacccaaccacggatacggagagcagactggaggactttggcatgggtggatttgggtatctgaaagagaccgcggttcacggctccggggacccgttcctaccgcgcctctctcccgccgcgatccgcacaccagctgcaccccaccggggggggcttatgaccggcactcggtcggccaacaaccgcggctaccgccaccgagcgcctgagtttggggaaatgaggctccgcgcggcccgcccctgaacctggtcgcgccgcgcaatgacgtcagacgcacgctgcgtcgtctaaaccaatggtaa

SEQ ID NO: 116751 - DNA, 1236 bp, Homo sapiens
tttttttttttttttcactcttttaacaaatattaattgagtgcttaagaacacagttgagtaaaaccagaaccatagatgcttttgtagacagtttcttttttcgtcattttatccagttttctgcctagctggacattcctttgcctttgcttctttctttcacccagtcaaagccagtggcttcactcctcttctttaaaactttccactgtcttcaagtgcttgccagaagaaatccaaactccatcagaaggaccattgatttttaggacataattatcttgtcttttattgagcagaaaattgcattaaattagaactcgttacctagacacacaacagaaatcagttagtgcttgacacgtcaacaggtagaaaaaacaatttttgttggctcccttcttcaacagcatatggagcagtatgttggaattttagatttgatgatgctaaggctcccgcttgtaagcagatgcttcagatggtcgtttagagaaggaccaacaacgacacttagctgaactagagcattcaatcctctttcaaacacttcatcatccgaatggacctgcaaggaatacctcctttagagtaaatagctgcaaatgcagaaggcactcgtgactgttcaccaaacggattaattgttttagggttcagtttatcacttggtctaggatgaagttttcttgcagactctggagaactggttgacaatgaggatttgcttccctgaactgcattcctgtgttttaactgtgtgcttgatgatgtcctttgatcatagttacctgttgctctgttttttcacctgtgtacctccagagccctctgatttctgcattgcttccctttcactccagtttcaattaaggttaacgaaggctactctcgactgaccctctaccccaggaaaggaggggtacactccaagcgctcacgatctcaagggtccttagcaacggggtccagcggccctagcaacagatcaggaagcaagccggcttggcagagagcgcagacaggacacctgtacccgcggttcacggctccggggacccgttcctaccgcgcctctctcccgccgcgatccgcacaccagctgccccccaccggggggggcttatgaccggcactcggtcggccaacaaccgcggctaccgccacagagcgcctgcgtttgggaaaatgaggcaacgcgcggcccgcccctgaacctggtcgcgcacgaaa

SEQ ID NO: 116752 - DNA, 575 bp, Homo sapiens
tgagggatgaagctgtcctaaagtctttccagaactcacacacacgtgtccccacctctcccctccttgatcatgtctccattttacgtatttactgatcatcttctgctattgttaaagtctaagctgaggggtgaaaccacagcagaaagcaaggaaggctcgaccccagatcacacagggagaggtggacagacagcatggctccgcccatttgcagccatttctgggcctgtaggctctggcagctcctgggattgctgtcctcggtgctgaatacgcgtttgttgggggcacacctgacaagtttgtcattttcagggaaaacccagtctctctcggcgctgaggagaaaacatggcacagcccttctcagtcctctagcaaccctggactctgcaggagaaaagagagattccctacatttgtttctatgagagaagggaaggctggagcaggggagtgggggaaatctctgcagtcctctcggaaagcaaacccttctacacctgtgatcccatgtgatttagcagagcccccagttaaaactaggccatgatgacacttggtgacac

SEQ ID NO: 116753 - DNA, 338 bp, Homo sapiens
gaaggcaagagtataatgtcacagccaataataatatgtccaccacctcccaatatggttcacagttgccatatgcatattataggcaggcttcaagaaatgattctgcaatcatgtccatggaaaccaggtctgattactgctacaaaccacacccttggggatgcagacgccaaacatgaaagttagaagaacggatcatgtgccaactgtagttttttaaaaaaaacgctcctttgtagggttttaaacttttctaatagatttagattcacttttggtcttggcttgttctcataagtcatttatctaagtttgtgtttctgtgtgtgtgagtg

SEQ ID NO: 116754 - DNA, 936 bp, Homo sapiens
atggactacgagaaagcagacaagagaccaactccttgggaagcagcagcaaagtctcctctcggtctagtggatgatgctttccaacccaaaaacatccaggaatccattgtggcaaatgtggtttcagcagctcggaggaaggtgcttccagggcctccagaggattggaatgaaagactgtcctatattcctcaaacccagaaggcctatatgggctcatgtggaaggcaagagtataatgtcacagccaataataatatgtccaccacctcccaatatggttcacagttgccatatgcatattataggcaggcttcaagaaatgattctgcaatcatgtccatggaaaccaggcacttgtacactcgccagctttactgttacagctttggagactctggaaacttctgtgaaaatacaaatggcagacctgcagcagatgctgtcaggggcctgactatcctctcactctccaccacttccataccatccagtggaataagtgaggctttgatatctgaaaatgaaaacaaaaacctcgagcatctcacacatgggggttatgtggaaagtaccaccctgcagattcgaccggccacaaagacccagtgcacagaattcttcctcgcccctgtcaagactgaagttcccctagctgagaaccaaagaagtggtcccgactgtgcaggcagcttgaaagaagaaacaggcccgagctaccaaagggctccccaaatgcctgactcccaaagaggacgcgtggcagaagagctgatcttaagggagaaagtagaagcgagtactcagaacaattactatgtaggtgagctgacaggtgtaaccttacaaaatggttatggagaaaaacccatccttgctactcaaggtgaggctcacagaccatcagcaatggaatcacctggaggcttgtga

SEQ ID NO: 116755 - DNA, 2286 bp, Homo sapiens
atgctgcccaatcgcctcggaagctctgagaccatcacggatgccgagcttcgggtaacactcacggtggaagagttaaacggattaagggcggtgcaagatatgtttgttaaacagatcctgaaggcagcacgctcgttaagagtcatcaccatccctaatctcaagtacccagggacacaaacgctgcggaaggccgcagccccagatccaaacacaacaggcttgatttttcttgagaagctttgtgagatcgcagcagccatcgctagttatgtcgcagttccaagcctagaaatcaaccacaggaagaaagcaaacccgaacctgcttctgaggcgatcgggatcgggcagtgtcagtcttcagctgctagccgagaagatctgggaaggagtcagagagccttgggccagagttctagtgctctgggagtggctgccagaccaaaaccccctgagcggattaacaaagtcaaattctacatcccgacatgaactcccgcatggcagggcaatacagctgcatctatcgggttgggagctctggtcagagcccagcaacttgctggatctggtggtaacaggcgacattgagaacaccagccttgcacctgaagaccccaccttcctgaccatgccctcgggatcacactgcccagaatctccttcggatgggcctggcctttctagtctggtggctctagtgtggttcctggttgaagactggctcagcaggaagagactagagagcgagccagcagagcttccacttgggaaggcaggagaagttgtatttgacacgttgccacttccttctcgaaggactcacttctctggctttctcggacacttctgctactcgttttctgacggttacagtaccaacagggcagccccagatggcagcagcaccaaggctgagaaacacggctcatgcagaaagcaaccaccttacacccttcagtgcagggacaaagcagggttacgagtccacggaaactctccagtctcagcctacggctggctgttctcagaggaacgcccaggaaaacctacccgaacccctttcagctgggaaggggacccgcctgggcttctcaccgccgatgagacctccctcgtcgtacacttagagctgcctgtgtttccttccttccttaagcgggctgggaactctagacactcagggatgggcagcccattagaagcagaggaagcgtactccacagttgttatggctgatgtatcccagtacccagtcaatgagccgctcgttgctgctgtcgtgtgccaggaacccgagcgcgcgcagcccgacgtgcacttcttccaggcctgcgcctcgggggccacgcaggaggagttgcagcgcgaccgctgcccgccgctgagaccccgcccctgcagcgccgcccgtcagtccgcgcatgatcagcaccgtagagcggggcgcgggccgcggacgaccccaggcgaacccattcccgaggcagaggaggcgcagaggcctgagccggacatcctgaaccacgtgttcgacgacgtagagagctttgatcgaggctgcagaagtcggcggaggcggccagggtgctggagcaccggaacgcggccgcaggagccggcgccgggcggctggggagggcttgctgacgctgcgggcaagccgccctcggaggccgagtacaccgacgtgctgcagaagatcaagacgccttcagcctgctggcccggctgcgcggcaacatcgccgacccctcctctccgagctgttgcacttccttttcgggcctctgcagatgattgtgaaccgtcgggggggccggagttcgcgagcagtgtgcggcggccgcatctgactcggatgccgtggcgctgctgcgggacaacgtcactccacgtgaaaacggctctggacctcgctgggggactcgtggacccgccccgggctggagctgtccccggaggagggacccccatacaacccgagttcttcagcggctgggagccgccggtcactgacccgcagagcgcgcctgggaggacccagttgagaaacagctacagcacgagcggaggcgcggcagcaaagcgccccccaggtcgctgtcaatggaggtggtcgttcttccgtgttatccctggagaaaaagggcggcattacaggcctgttgctgtctggcagtgggactccaagatggctcaagttggacccctgagtctcagtgtgaagcctagattaggtactaaaaaggacgttgataaggtactggatgaaaagtga

SEQ ID NO: 116756 - DNA, 1026 bp, Homo sapiens
atgtggaagagctggcctggagatagcaaagaggtccaggttatggctgagagatacaagatgctgatcccattcagcaaccccagggtgcttcccgggcccttctcatacacggtggtgctgtatggtcctgcaggccttgggaaaaccacgctggcccagaaactaatgctagactgggcagaggacaacctcatccacaaattcaaatatgcgttctacctcagctgcagggagctcagccgcctgggcccgtgcagttttgcagagctggtcttcagggactggcctgaattgcaggatgacattccacacatcctagcccaagcacggaaaatcttgttcgtgattgacggctttgatgagctgggagccgcacctggggcgctgatcgaggacatctgcggggactgggagaagaagaagccggtgcccgtcctcctggggagtttgctgaacagggtccctctgtgcatcgagaacaagctgggggttggtggtgaggattggggggaccagctaagagtctactggtggaatccaagcaagagagagggtggctctggctggagccatgggagtgaagatgccaaccagtccctgaagcacctgcgtctctcagccaatgtgctcctggatgagggtgccatgttgctgtacaagaccatgacacgcccaaaacacttcctgcagatgttgtcgccttgggaaaccacgctggcccagataataatgctagactgggcagaggaaacctcatcggacaaattgaaatatgcgttctactgcagctgcagagagctcagccgcctgtgcccgtgcaattttgaagagctggtcttcagggactggcctgaattgcaggatgacattccacacatcctagcccaagcacggaaaatcttgttcgtgattgacggctttgatccgctgggaggccgcaccttgtggacgctgactcgaggacatctgcgggaacttgggaacagaagaaagcggtgcccatcctcctggggagtttgctga

SEQ ID NO: 116757 - DNA, 1053 bp, Homo sapiens
  misc_feature (1)...(1053): n = a,t,c or g
agttncctcantaatcaaataaccanttgtgggtttttttcnttcctatttccttcccaagcagcttaattgaagttccatcaattnaaagtccatctattttcaaacctgagtgtcccggagggtgcccactggaacatgtcaaggtttcaaaacagcatcttcactcccactagaaccccaagggattctgaccccaggtccagagtgacgaggctctggttgcagctgagggcagagcagaggtcttcacaactgaacggagggatggaacatccccacaaccacagacatctcaagttgcacagtggtttcctcaaagcctcacacaggaacttcattcccttaactcctatgtgaatcagccccagatccaaacacaacaggcattgatttttcttggagaagctttgtgagatcgcagcagccatcgctagattatgtcgcagttccaaagcaccaaggtctgcagtttacactcggggtacctcaagccctcacacagaaacttcacccctgtattcccaatggggttcttggccaagcacaggtgtgtcagctcccggctgacaaccaacacagcagcaaggtccttgcaattggcttctgtaaggtgacagttttccaacctacaaaagaatcacaaatggcaacacggttgacaggtccaacttcaaccttcccggctagctccacaagtgccagcatccaaaagccccttattgataaactccccaccttctatcatgcactggtgatcctatgaaggaataggaatgagagaagaacaaaattcacaggccatcggcctggatctaaacatgggaacaggtgttcacatcagcgagaggttccatacagccaagtcaggcatgaccattgctcgtctgtggccccagatcgaaagcacagctgctctggaagagaggagagacttacgacaacctctgcagaaagcacttggggtgtctcaaagttgtgtacagcaacttagcaccctcatccagaagctcattgtcggagaggtttacgcacgtcaggaactggttgact

SEQ ID NO: 116758 - DNA, 1200 bp, Homo sapiens
atgggcctcagcgtgctccctctgcaccccaacgcaagctccggccgcttcttgtccccctcctcctgccgcatcacagcccacctcagcctctttgtaggttccatgcgacgctgtaccatggctgggagtcttccaggcgccgtgctggcgccttctgtgcatggactccaagtcgccataatcgtacgggttacccccattatcagtcccctcttatacatcaggctagtgagacagtatcttatcacagtcctacagctggcaggagtagattcaaaccctagcagcaccaatagtgaagccagtcgctacatctcccccacactaaagggaggtggtcgcaccgtggggtccactggaagttgcctaccagaccaggtcatcccaaacacaccctctagccatttggtgtggcatcggaaagaaactaaggccagcctcgggggccggggccttctgtttgagtccatcgaagtctttccggaaacatccgccagttcctccgccacggccagcacagagaatcctgttgtggtcgatggccttgatgagctgaaagtcccacctggggcgctgatccaggacatctgcggggactgggagaagaagaagccggtgcccgtcctcctggggagtttgctgaagaggaagatgttacccagggcagccttgctggtcaccacgcggcccagggcactgagggacctccagctcctggcgcagcagccgactacgatcttcgctctcttcgcctctggacagatttctgtctctcttcagctcaaacagcaacctcaagtttctggaagtgaaacaaacttcctgagtgactcttctgtgcggattctttgtgaccacgtaacccgtgcacctgtcatctgcagaaagtggagttgggaggtcactgtgccaccccggagcagtgggctgaatcttctatgtcctcaaagccaaccagtccctgaagcacctgcgtctctcgccaatgtgctcctggatgagggtgccatgttgctgtacaagaccatgaacgcccaaaacacttcctgcagatgttgtcgttggaaaactgtcgtcttaagaagccagttgcaaggaccttgctgctgtcttggttgtcagcaagaagtgacacacctgtgcttggccaagaaccccattggggatacaggggtgaatttctgtgtgagggcttga

SEQ ID NO: 116759 - DNA, 726 bp, Homo sapiens
  misc_feature (1)...(726): n = a,t,c or g
cagttcctgggtctcccggctcaggtagtgccaggaagctgcgggcatggcggacaggctgtccttcgggtcttggaagggcccaatccttggctttcaaatctgctccagagggttatctggggaggggctgctccctcacagaggggagcctctaagcccaccaggcgggcactttcagcccaaagcctccgggccacctcctcatcctcagcctcgggggccggggcattctgtttgagtccatcgaagtactttccggaaaacatccgccagttcctccgccacggccagggtattgtgctgggctggggcgggccagttcgggggctctttgaccaggcagccagaagatnggggcccgagttgtggtgctggagaaaggtggagccatggatgcccgtgtgtctgcccagctctgtcctggccacgccggggtgcgggggcgttgacagtcacaccagagccttgcagccgccggctcaactccttggtgaaagaggacgatggcgagcttggctctggcagtaggcggtaatggtgtaatacttccatcgctgccagttcaagtcgtcaaagtctatgtgcccagcaacatgggccanggacgaagaggttgatgatccgcgaaagggctgaggctttcagcttgtccagcagccagtttgtcaagagaaagtgacccaagttgttaaacgcaaactgcatctcggagccgtccttcgt

SEQ ID NO: 116760 - DNA, 901 bp, Homo sapiens
gacgaggagtccaaaaaacacaaaagagagttggcttttagcaagctctggactggatccatcctcaagcactgcatttaaatccctttcatcttccttagctgccaacagagagcttgacaagaaagaacaccagggatactgtcagctctcacaacccacggggatagctactgtcccaaaatgggctttagggggtccgctgcttcctgaaatttacacaagattttgtgtgtatttttctgaggcaaagtccttgacttcgatctttagtgtcaactgggttcttcgttgcctaaaaggccaactcaaccacgaccactctggttatttctgctgttccttttcaggatgtatcaatggcagcagaaaggcaaagagaatgacacagtggaaatggaaaagggccctccatagccctcctctcaccccatcctcattcacatgctctgaagcaactctaataacaacgacaataaatccagaagctctcagacacacgtacacactgagttctctcaggggccaagtaggacatttggcatcctgggcttttctgcagaccacagctcctcctgaaatagatcacttggctgcactgcagacaaaggcctgcagtaaagtaggtggcctcataaaacgcaacacccgttataaggagtcagtcagagatcgatttccagggatcccatctacactctgccttcaaacgaaaggtcacctccaggagcgatgcactgggcacagtctctcttcaagacgtgaggacacggcaaatgcactctatgagaaactgatagaagatgatgccctcgtgcagccaaatgaagcattttgtgggcatgctggaatgaaccctgaagccaggccatatcagtgtgggcagttggggagtcattaa

SEQ ID NO: 116761 - DNA, 327 bp, Homo sapiens
atgcctacaatggccccggagggtgtcacgtttagtgaaggttacagaaacgtcaaaagcactaacacttctggggcccagccactgttctgtggcttttatcttcacaagaatcctgcagagaggactggtgagaacatagtcgaggaccagtgtgaattcaagaactggcagttgggagccagtcgctcaggaattctggcagtagcaccaaggagcagctgctcatctcaaatgaagacgctggaggactcagaccccaaagcagacatgagaacgtggggggatgccctggctgagaccctcttagacacgacaagcctttag

SEQ ID NO: 116762 - DNA, 1898 bp, Homo sapiens
  misc_feature (1)...(1898): n = a,t,c or g
ccgccttgggtcagcctgctcccctgcttcctgccgcagtgggggccgtcagcctggccacctcccagctcccaagcccacccctggggcccaccgtccccccacagccaccctcggccctggagtcggatggggaagggccgccccccagggtgggctttgtggacagcaccatcaagagcctggacgagaagctgcggactctgctctaccaggagcacgtgcccacctcctcagcctcagctgggacccctgtggaggtgggcgacagagacttcaccctggagcccctgagaggggaccagccccgctcagaggtctgcgggggggacctggccctgcccccagtgcctaaggaggcggtctcagggcgtgtccagctgccccagcccttggtggagaagtcagaactggcccccactcgaggggccgtgatggagcagggcacgtcctcgtcaatgacagagtcgtctcccaggagtatgctaggctatgacagagatggaaggcaggtggcctcagactcccatgtggtccccagcgtcccccaggatgtacctgcttttgtgagacctgcacgtgtggancccacanacagggatggtgganaagctgganaaagctcggcanagcccccgccgagtgacatgggcanngtggggggccaggctagccacccccagacactcggcnctcgagctttggggtcccctcggaancgtccagatcaccaggatgtcagctcaccagccaagactgtgggccgtttctcggtggtcagcactcaggacgagtggaccctggcctccccccacagcctgagatactctgccccacccgacgtctacctggacgaggccccctccagccccgacgtgaagctggcagtgcggcgggcgcagacggcctcctccatcgaggtcggcgtgggcgagcccgtgtccagcgactctggggacgagggccctcgggcgagacccccggtgcagaagcaggcgtccctgcccgtgagtggcagcgtggctggcgacttcgtgaagaaggccaccgcttcctgcagaggccttctcgggccggcttcgctgggccccgagacacccagcagggtgggcatgaaggtccccacgatcagcgtgacctccttccattcccagtcgtcctacatcagcagcgacaatgattcggagctcgaggatgctgacataaagaaggagctgcagagtctgcgggagaagcacctgaaggagatctcggagctgcagagccagcagaagcaggagatcgaagctctgtaccgccgcctgggcaagccactgccccccaacgtgggcttcttccacacggcaccccccactggccgccgganaaaaaccancaagancaagctgaangcaggcaagctgctaaatcccctggtgcggcagctcaaggtcgtggcctccaacacaggtcacttggctgactccancanaagccctcccgctaangacctgcccnagccagtgtggggctcactgcanacaacacgggcctgaacgggaangcagtgcanaccancanccctgctccgtccggggctccctgtcttcngacatctgctccggcttaccantgatggaagcggaacgcgtngncaanggtcctccaccaacaacctggcccaggcctgaaccaagccccacccgccctgcacgtccaagcgcangtgaacaacancaacnacaagaaaggttcttcnccgacgaactgcacaanctggtggacnaatggacaacaananngtggggggcgcgcactgaaacccacnctcnacccctnaancnnaaccncaacttccanacattgaggcccgcaggtgggctgccctggcnaagcccggctttnacccccctccaaca

SEQ ID NO: 116763 - DNA, 422 bp, Homo sapiens
ttttttttttttttttgccccaaaatattttttattcttgcattacatttgtgtttccaattgtgaataaaaaatgcttagaaagtggttacaaaacagcgtgaactggacaggaggagcagctggccctgagggtccgtcacttctccacttagacggcgtgaagtgggcctggcgtctaggcggggtcagtcaggcttctcactctcaggatctggtgtgggcacggacagggtcggggcggctccgggaatgaccgtggtggacagagggccgggcgctgggggcagacgtggcatccccactcctgctcgaggtgcggtcatagcccgcgcctcgccaggggcagcccagcctgcctgggcctccatgtcttgcagcttctgggtctgcttcagctggttgagcgtgggcttcagctg

SEQ ID NO: 116764 - DNA, 3192 bp, Homo sapiens
aggactacatcgagaagcactgcccgagcgccgtggtgccggtggagctgcagaagctggcccggggcagcctggtgggcggcgggcggcagcggcccccgcagaccccgctgcgcctgctggtggacgccgacaactgcctgcaccgcctctacggcggcttctacaccgactgggtcagcggcggccagtggaaccacatgcttggctacctggcggcgctggccaaggcctgcttcggcggcaacatcgagctcttcgtcttcttcaacggcgcgctcgagaaggcccggctgcacgagtgggtcaagcggcagggcaacgagcgccagacggcacagcagatcgtcagccatgtccagaacaagggcaccccgccgccaaaggtctggttcctgccgcccgtctgcatggcccactgcatccgcctggcgctcatccgcttccacgtcaaggttgcacagagcattgaggatcaccatcaggaagtgattggtttctgcagagagaatggtttccatggcttggttgcgtatgactctgattatgcactgtgcaacatcccctactatttcagtgcccatgccctaaaactgagccggaacgggaaaagtctcaccacaagccaatatctgatgcatgaagttgccaagcaactggacctgaatccaaatcgttttcctatttttgctgctctcttaggaaatcacattctgcctgatgaagatctggcttcctttcattggagtttacttggtccagaacatccactagcctcactaaaggtccgggcccaccagctggtcttgccaccttgcgacgtagtgatcaaagccgttgctgactatgtacgcaacattcaggacacctctgacttggatgccatagctaaagatgttttccagcattcacagtctagaacagatgacaaagttattcgatttaagagagcaattggatattattcagcgactagtaagcctatgtcatttcatccaccacattacttagcagccagacccggtccgtttggaatgcctgggatggtgccgccgcatgttcctcctcagatgctcaacattccgcagacctctctgcaagcaaagccggtggccccacaggtgcccagcccagggggcgccccgggccagggtccatacccgtacagcctctctgagccagcacctctcactttggacacgagcgggaagaatctgacggagcagaacagctacagcaacattcctcacgaagggaagcacacgccgctgtatgagcggtcctcgcccatcaacccggcccagagcggcagccccaaccacgtggattccgcctacttccctggctcttctacatcgtcatcttccgacaacgacgagggtagcggaggggcgacaaaccatatcagcgggaacaagattggctgggagaagacgggaagccactcagagcctcaggcacgaggagacccaggagaccaaacaaaggcagaaggctcgtccactgcctcttcaggaagccaactagcccgaaggcaagggaagccagatgggcactgtccagccaatcccgtgcctcctgtcgatgcccaccaggaaccacatggacatcaccacacctcccctgccccccgtcgcacctgaggtgctgagagtggccgagcacaggcacaagaaggggctgatgtacccctacatcttccatgtcctgacgaagggtgaaatcaaaattgctgtttctattgaagatgaagccaacaaggacctgcctccggccgctctgctctataggccagttcgtcagtatgtttacggagtcctgtttagtttggcagaaagcagaaagaaaactgagagacttgcttttagaaagaacagacttccaccagaattttcaccagtgatcattaaagaatgggcagcttacaaaggaaagtctcctcaaaccccggaactggttgaagctcttgccttcagggagtggacctgccccaacctgaagaggctgtggttgggtaaggcggtagaggacaagaaccgcaggatgagggccttcctggcctgcatgaggtcggacaccccagccatgctcaaccctgccaacgtgcccactcacctcatggtgctctgctgcgtcttacggtacatggtgcagtggccgggagcacgcatccttcggcgtcaggagctagatgccttcctggctcaggcgctgtcccccaaactctacgagcctgatcagctccaggagctcaagattgagaacctagatccccgaggaattcagctatcagctctcttcatgagtggagtagacatggccttgtttgcaaatgatgcatgcggacagccaatcccctgggaacactgttgtccttggatgtattttgatgggaagctcttccaatccaaactcctcaaagccagccgggaaaagaccccactcattgacctctgtgatggtcaggctgatcaggctgccaaggtagagaagatgcgccagagcgtcctcgaggggctcagcttctccaggcagagccacacgctccctttcccgccgccacctgccctgcccttctaccctgcctctgcgtacccccggcactttgggcctgtcccaccctctcagggcaggggcagaggctttgcaggcgtctgtggctttggaggcccctatggggaaacggtagcaacaggcccttaccgtgccttccgtgtggcggcagcatcgggacactgcggagccttctcaggcagtgacagcagcaggactagcaagtcccagggcggagtccaacctataccttctcagggaggcaaactagaaatagctggcactgtggttggccattgggctgggagcaggcggggccgtgggggccgggggcctttccccctgcaggtggtttctgtcggaggaccagctagagggcgtccaagaggagttatttccaccccagtgattagaacatttggaagaggtggaaggtactatggcagaggttacaaaaaccaggcagcaattcagggcagacctccttatgctgcttcagcagaagaagtggccaaagaacttaagtcaaaatctggggaatcgaagtcctctgctatgtcttcagacgggtccctggctgaaaacggagtgattggccgaggagaagccggctccccagatgaacgggagcacgggtga

SEQ ID NO: 116765 - DNA, 3510 bp, Homo sapiens
atggtgccgccgcatgttcctcctcagatgctcaacattccgcagacctctctgcaagcaaagcccgtggccccacaggtgcccagcccagggggcgccccgggccagggtccatacccgtacagcctctctgagccagcacctctcactttggacacgagcgggaagaatctgacggagcagaacagctacagcaacattcctcacgaagggaagcacacgccgctgtatgagcggtccttgcccatcaacccggcccagagcggcagccccaaccacgtggattccgcctacttccctggctcttctacatcgtcatcttccgacaacgacgagggcagcggaggggcgacaaacacagccctggcggcctctgtcacctggaccacccttctttgtgtgaccagtcagcacactgaacggctgccagaaacccaaacagacgctctgctcctgtaccgtctggagcatctggggatgggggccgtcagcctggccacctcccagctcccaagcccacccctggggcccaccgtccccccacagccaccctcggccctggagtcggatggggaagggccgccccccagggtgggctttgtggacagcaccatcaagagcctggacgagaagctgcggactctgctctaccaggagcacgtgcccacctcctcagcctcagctgggacccctgtggaggtgggcgacagagacttcaccctggagcccctgagaggggaccagccccgctcagaggtctgcgggggggacctggccctgcccccagtgcctaaggaggcggtctcagggcgtgtccagctgccccagcccttggtggagaagtcagaactggcccccactcgaggggccgtgatggagcagggcacgtcctcgtcaatgacaggtaacagcttcctgctgaaccctgcgttcacaagccccagtaacgtttctgatgttcccatagcagagtcgtctcccaggagtatgctaggctatgacagagatggaaggcaggtggcctcagactcccatgtggtccccagcgtcccccaggatgtacctgcttttgtgagacctgcacgtgtggagcccacagacagggatggtggagaagctggagaaagctcggcagagcccccgccgagtgacatgggcacagtggggggccaggctagccacccccagacactcggcgctcgagctttggggtcccctcggaaacgtccagagcagcaggatgtcagctcaccagccaagactgtgggccgtttctcggtggtcagcactcaggacgagtggaccctggcctccccccacagcctgagatactctgccccacccgacgtctacctggacgaggccccctccagccccgacgtgaagctggcagtgcggcgggcgcagacggcctcctccatcgaggtcggcgtgggcgagcccgtgtccagcgactctggggacgagggccctcgggcgagacccccggtgcagaagcaggcgtccctgcccgtgagtggcagcgtggctggcgacttcgtgaagaaggccaccgccttcctgcagaggccttctcgggccggcttcgctgggccccgagacacccagcagggtgggcatgaaggtccccacgatcagcgtgacctcctttccattcccagtcgtcctaacatcagcagcgacaatgattcggagctcgaggatgctgacataaagaaggagctgcagagtctgcgggagaagcacctgaaggagatctcggagctgcagagccagcagaagcaggagatcgaagctctgtaccgccgcctgggcaagccactgccccccaacgtgggcttcttccacacggcaccccccactggccgccggagaaaacccagcaagagcaagctgaaggcaggcaagctgctaaatcccctggtgcggcagctcaaggtcgtggcctccagcacagggcactgcgtggacggatggtggctgcttcctttgacccatttcttgggtcacttggctgactccagcagaggccctcccgctaaggaccctgcccaagccagtgtggggctcactgcagacagcacgggcctgagcgggaaggcagtgcagacccagcagccctgctccgtccgggcctccctgtcttcggacatctgctccggcttagccagtgatggaggcggagcgcgtggccaagcggagccagatggtgctaaacaccgggtccttccaaagtccagagggacggctggggggacgagggcacagctttcgagctgggagtttggccttgaggaggaaattctctcgtcaacgctgcgtggacagcagcagctgctcaataaggtgctctcctgtcctcaccatctctgtccagacaaatcatggatgcctcccccaccccatcgaagtctcttatttaatatcaaaggggaaccctatgagccggtcccctggagcggcggccgccagcgcctacccccaagccccacacagcgtgtgtgcatgctcatggctgggtcctccaccagcagcctggccccaggccatgatgctaggcccccagcccgccctgcacgtccaggcgcaggtgaacaacagcaacaacaagaagggtaccttcacggacgacctgcacaagctggtggacgagtggacgagcaagacggtgggggccgcgcagctgaagcccacgctcaaccagctgaagcagacccagaagctgcaagacatggaggcccaggcaggctgggctcgccctggcgaggcgcgggctatgaccgcacctcgagcaggagtggggatgccacgtctgcccccagcgcccggccctctgtccaccacggtcattcccggagccgccccgaccctgtccgtgcccacaccaggtactgccctctccaacctcccaaccccaccctgtgcgctgcctctgggtcagtacagaggcctgctcccagctccagtgtcctgggggccctgggcaggccaggtgggccagctgggggcacagggcagctggaacaccccccaggtgcccgtgctgccagtcttcttgcagccacctgtggtcagcatgcctggcccccggctgcggatcacgtagccttctgccctgtcccttgccagatggcgccctcggaaccgcccggagaaaccaggtgtggtttggcctccgaatcccccccaccgcctgctgtgggcacagcactcagccgcgagggggacagcgggtgggcagcaagactgcttcctttgcggcttcagaccctgttcgctcctatgttcctgtggtccacgcgccgtctccacacccacttcctatacttgagttgatggttagaaccttgtcgtcaccctgcagaagtacagtgccttgaatgccagcttttccgttccctgatgaaaagatatgttaaaaaaaattatcggaaaaggtttcatttgcaattggcttgggcattgataatctttatttactgttttaagttgcaaagatgggaatgggtt

SEQ ID NO: 116766 - DNA, 541 bp, Homo sapiens
ctggatgatgaatacccttgatacccccctgggggccccaaaaatgaaggcaggtgtcggttcatctggggtaagacccaagggttcattgcctcatgcccaaggaaatgaagacagtgtccgttcatctggggttatacccaagggttcactgcgtcatgccaaggaagtcaaggacacgaacacatgtgaagtgagtgcatccattgccactcacaaggttcagaagttcccaggacagcccagcccatggagcctgtggacagggagtgcatcgtgaaggttgccaaggcagtggaggccccaggttatggcagccccaggaaatgagctgggaggaaagcattcaggaactgatgagcatggagaaagaaagcactttgtaggaacagatgaggaagacgtgggggatgatgtacagaagttacaagtaagcggagctgatattaaacaggattttgctacacagagaaaaaggctagaatgtatatgaatgctttttttttttttttccgagacagagtcttgttccctcgtgccg

SEQ ID NO: 116767 - DNA, 88 bp, Homo sapiens
atggcccgcgcagccccgctgctcgccgcgttgaccgcgctcctcgccgccgccgctgctggcggagatgccccgccgggcaaaatcg

SEQ ID NO: 116768 - DNA, 153 bp, Homo sapiens
atgatgggatttttccacatggttgttaggaaagttgctatatttgagactgtgaatgtcagcaaagctgaggaacaggaggtcttccatggagtacacagtgccctagagcatcgtcctttgaaacccgtttccttttatatccgtccatag

SEQ ID NO: 116769 - DNA, 435 bp, Homo sapiens
tcagcttctcttgcatggggccttcctgcttgctcctctgctcacaatgacaagtgaggactcccctccatgccttttgatgctggtgcccatcaccccgatcacatgaacgtctatgcccaggtcccatttcctgacattcccaacatctctaccttctccgggccaggctgccactttggcccctgcgtcacgttcaccaccacccaatgtgtcctgctcatcactgaggtttgtcatttttactctgagtctgtccattgtcatcatctccaccatcaccccttttgttttcattgccacccttgcctggggtgagtgaagacgctcttctctggcttccacccttccaaatgccgggctagaatttgtggtcactgccaacagtggattcatatcgatgggcaccttctttttcttaattgtatcatacat

SEQ ID NO: 116770 - DNA, 427 bp, Homo sapiens
agggctgacaatggggacacctgactacagtcaaggggattcaaagcacagcctggaacctggaggaatcccctggaacatggacacagaaatgcggacagctgaagccatgaccttgaccacaggacttttcccccttttgctcagcacctctccttgctgctgccatgtgaagaaggatgtgtttgcttcccgttccgccatgattaaacatgaagtctactgctttgtgaagagttggctccattactggacagctctaaatgcaggtgatgatgatgacgatgatgatgatgatgatgatgatgatgatgatgatgatgatgatgatacaaagaggagcaggagaagaggacagctaacatgtattgagcagtctccttctgccggacattcttctaggctgtacatgcactgtcttatttaa

SEQ ID NO: 116771 - DNA, 943 bp, Homo sapiens
atggccactagcagggcgccaatcccggaggtgcgggcccatcgtggggcgggcggctccggcgggtcttcaggctacgggttcagccaggcgccagccgcgttctctggagacgctctctctcggagggaccctgcacttgcctgaactcgagagtgggcgctgcccgaagaaggttgatgagggcaatgaacagatcaaagaaccacctttggaggagggcagaactgggtcagagaggtcctccacagtaggtgtcaaagccttactcactctagacaactccgcctggaatgcgtctgccagaaagtcagggcagggcctgttctcactgccttctgctgtccccacaagacttgaatttcctgacagcaggaactgcggcctcttccgtgtggactcaagatgcaactgtgcccttgagagtggcctgctgtggcccgatggcccagactacccctcctcagcctgctggtcctcacacgggccttggggttaccaggaaaactggggaccagcacggatttgtttccaatacctggaaactcctgaaatgtctgtccgctctctgatggcttatgggtacttctgcgttgatgtctggatgggagccgcacagtgctggctcccagagcggattggaccagccccgaccctgtcccatgggaagccaatccatgggccattgaaaggcttggcaggggaaagacatgcccagcagaaagggccatcttcagtccagtcaactcctctgggggaggtgggagtgtgccctaacggagagaagatgctgcacatgacagagaatcgaggcagagggcagccgcgtttcgcagaagcagttctggggcagggaatggtccgctcccaaaagccaggccatgagatggtccacccattgctggagctggatgtggtatctgaacatcctgtgctcatctaa

SEQ ID NO: 116772 - DNA, 730 bp, Homo sapiens
gacgacaggtgtgcccctggtgcatcactgaccttatgtccttctcctcccacagcccacttggctgcacccccgtggaatccgtctggatccttaaatattccaagcatgcttaccctccccaggactctgcccttggtgtttgctctcctcggaaagcttttccccatacatcggcgacccctgcccctatttatctttagaaggtgtcccttaacaccctatgtaaaatggcgcctttgtgcacgcaaacacttcctcccttcttccatctgcttaccccaggttcttttcataccatttgtttccacgtaacaatgggtcaactcgtttgccactggcatcaacattgtaagctccatgagaaaaaggagtttcttctattaggaatttccaacacctagatcagcatatggtacacgtaggcacttattaaatatatgtccaaaagaagtattaagtacttgttatggaccagaagctctgcaaaacccttatcttcattgtttattttcatccttacagccaatatttgaggtaggcaggaagagccatatttcagagatgagagggctgatgcttaggaggagtaagtagctgcagagggtcgggtgcggtgtttgtgccagtaatcccagcattttgggaggccaagacaggtggatcacttgagcccgggattttgaaaccagtctaggcaacatagagagatagggtctcactgtcgagc

SEQ ID NO: 116773 - DNA, 386 bp, Homo sapiens
atgcgtgaccgacataagcctggcgaggaggagcacagacagcgctgcagagagagagatgtcagcaccgaggcagatagcgtctatgtgcgacatgcagagagactgcgcgtcgatagacgagagcaagcgacgagagcaaggccaccgcggtggttcgtggatcacagcgagctcgagcgtgttctactgtctaagcggggtgtctttacaggtctgaaaaagattttggaagtggggggctctctacaggaccctcctggggagctcgcagtgaccgcaaacagccgcatgagcgcctctattctcctcagcaagctctttgatgacctcaagtgtgatgcggagagggagaatttccacagactttgtgaaaactacatcaa

SEQ ID NO: 116774 - DNA, 531 bp, Homo sapiens
gcctgacttcccgggtcgaggctgtggaggacagggaaaacaagaaggtgggaaactttcattttctattggcttaagctaaagaagacaactgcaaagtcacaatcatgttggagaatgtgctggcttctcacagaaagatgcaaggtgctctggagaaagtacaaatagagcttgggcggagggattcagagattgcacgcctcaagaaagaaagggatctcaatcaacagagggtgcagaagctggaagctgaagtggaccagtggcaggccaggatgcttgtcatggaggaccagcacaacagtgagattgaatctctacaaaaagctctaggtgtagctagagaaaacaacaggaaacttgctatgagtctggaacaagctctccagacaaataatcatctgcaaacaaagctagatcacattcaagagccaatggaaagcaaagaacttgagcgacagaatttggaaaccttcaaagaccggatgactgaagagtccaaagtggaagcagaattgcatgctgaac

SEQ ID NO: 116775 - DNA, 486 bp, Homo sapiens
atgttggataaagaagccaaaccatacaaagttgatccttttgtaattatcattaagtttctgttggggtataaatggtttaaagaattgtgggatgtattattgttaccagaattagatgccgtcattttaacttgtcagagtatgtgtttccccctgatatccttgattctctttctgtttggaacgtgtactgcctactggagtggcctactgtcttctgcatctgtgagacttctttcttcattgtggctagctttgaaaagggatctcaatcaacagagggtgcagaagctggaagctgaagtggaccagtggcaggccaggatgcttgtcatggaggaccagcacaacaataattacatggaaaggctaaagtttcctcctaggatcacaggacctgtaggaaccaagttagcctctccaggggagaaagaaaaaaactgcgtgcctccttgtgtcatagccataattcctggattgtag

SEQ ID NO: 116776 - DNA, 441 bp, Homo sapiens
atggccaatgccttcctccttaatgattggttgcttagctctagcagtgtctacagaaattaaagttgacaagaatgaaatagaggatgcccgctggttcactagagaacagttcctctgagaggacggccacatccctgaagaggacagttggccttggcagtgctgacttcatcatgatgtctgacattagattaccgatctgtttagagctgtctatggaaatggggcttgggcaggaaactctacgacctcagtaccgccgcacctccgccctgtcgcgggagcccctgcaaatgcgtccgtggctcccgcgcctgcgcccaccaaaccattacgaggctccgccacacaactcagcaagggccacgcagggcagcgcgggaaccaaagagcccagggaagtggtctccgcccccagaggaggcaatgagcgactaa

SEQ ID NO: 116777 - DNA, 610 bp, Homo sapiens
tccgaccagcgaggcggaattcgaaagtcaaagaaggctgctgggcttaaaatgtcatgagaccaagttacagtttagccctgcatgtttgaaaagggagagagaaaagaagctcacaaggaattccaatattcagatgtgacatatagaagaaagtgtcgacatgaaagaattatccgccagagaattcagaggaaaatcaagaatgcattatatcatgaaagtaaagaaaggataatgacccaaaaaagagcttggggcaagatggccgactagacacagcaagtggaattaccgccagcaagggactgagacaactggcgcactcctaacaaatcatccgatggaaggcaccaggagtggccgagggaagacacagaaggaagctgggctgaaacaggaggaacattgcactgggctaccatgcgctgggacttgttcctggcccccaaggactctcagggaatgggtgagttgaacttgcaaggagcaacctgttctaaccacggacctctggaattccagctgcaggaggcccctcaactgccatggacactcaggttggcagccagagctgcttatagaagtggtaggggcagcaagccagcgt

SEQ ID NO: 116778 - DNA, 626 bp, Homo sapiens
tatcagtacaaataaaattataatgaaaagtctatgaagataatttgttctcagatgcccttcacatatagcaattaattcacaaatgatgagtcactcatgtgccttcatgaaggcaggccctcaagagacccgcaacagaaaggaaagccaccgactggagagaacctgcttcctgagccccaccaagttccaaaaaggagaatgggggcttcgtcctcaccctcaaggagttgccaaactggggcttggttattattcacactttgaaaaggaatgagggaaggtcagccagtcccctccaggtcgctcgggcttcctccaagctcctcttggttcaaatttgctgtgtcctccagccggcatctctcctctgttccgtaactgacagggcagcgaggtagcttccggatgactcctcccgccatggttcttccgtccatcagctcttccttcctcaactctgtggtatgtggctaggggagtttccaactcccaggggacatttcagttccccaaagataacacagctttgcacagtggatgtttacttgctggtggtcttatctaagatcaacattggcagctgtgcccggagaggcctccagggtccaggtaagtggagg

SEQ ID NO: 116779 - DNA, 474 bp, Homo sapiens
  misc_feature (1)...(474): n = a,t,c or g
aaaaaacatgcactatacaatcttttatttccagtttaaaaacaaaatcttanattactaggagtatatttacaagattaattacattttaagccagcacaccatggatgtacatgaagggccactcggtgtccctcgctgggacaggttgtgtgacctgcccaaggggtccggctcatttgccaaagtcaagacgacgaccaggtcttctatctgtaatgggatgcttggtggagtgtgaaaccagtatttaatcaaggcctctatatttcaggaccagggaagaaacaggctcctgccagcaccgacagcaacgaaaatgtttcccacgggagattcaggattgactttgcttgaaagctcaagtggaaggcatctggccattngtttccgtaagccaagatatggtggcttaaaatgccccgacttctaaaagatggttaacttttgggtcccaaagcaagttgtggccng

SEQ ID NO: 116780 - DNA, 988 bp, Homo sapiens
atggcaggcttcctagataattttcgttggccagaatgtgaatgtattgactggagtgagagaagaaatgctgtggcatctgttgtcgcaggctggtggataatgattgatgcagctgtggtgtatcctaagccagaacagttgaaccatgcctttcacacatgtggtgtattttccacattggctttcttcatgataaatgctgtatccaatgctcaggtgagaggtgatagctatgaaagcggctgtttaggaagaacaggtgctcgagtttggcttttcattggtttcatgttgatgtttgggtcacttattgcttccatgtggattctttttggtgcatatgttacccaaaatactgatgtttatccgggactagctgtgttttttcactgcaacctctgtctcccaggttcaaatggttctcgtgcctcagcctcccgagtagctggggttacagatgtatcctccactcctcgctggccaccatcctgctgcccaacaagaagaagctcttctgtctccgatttcctgaacggtctaagggagccagtgggctaggcccatgctttggttccaaagcgtttggagaacatcttcttgctccttttccggaaacgagataatggacacagagtcccagacgtcatcctttggaccaggaagaaacaggctcctgccagcaccgacagcaacgaaaatgttcccacggagatcaggatgacttgctgaagctcagtggaggctaaaaagaggacacgaaagtgaacagaatgatcttcctacgcacaacacaaacgtcagttaatgttccatccatgctgcttaaagagcattcctgtcctagtaaaatgggcaagtccctctaccccccaccctcacctggtatgcttacattaatagctaaagtcaatcctgtaatgaaataaagcaagtggtagctgtctggtagcctccactactgcaaatctcaaaaaaaaaaaaaaaa

SEQ ID NO: 116781 - DNA, 1781 bp, Homo sapiens
  misc_feature (1)...(1781): n = a,t,c or g
ccgggccccccctcgagtttttttttttttttttaaacatgcactatacaaatacaattatttcaagtttaaaaacaaaatcttgtaaattactaggagtatatttacaagattaattacattttaagcgcgagcacaccatggatgtacatgaaaggcccactcggngtgtccctcgctgggacaggttgtgtcgacctgcccaagggcgtccccggctcagtttgccaaagtcaaggacgacgaccagggtcttctggactgctcaagcccaaccaataatgaaaaaagtattcagaggatgtgtcgtatccgattttgcgtaacaagcgaattacatggcctttttaggtgtttaaggaggaggccttaatttttcctgggaatatctcccgtaaaatccattctgggaattttgatttttggaaaattcctttaaggaaaaaatagaaaaagcttggtcaccccccatgagaacctgccgttctctcatggtctggcagggacagggcctttttagaggcccgcaaaaggggaatacctggtcttctgggaaaggtcccaaacagaaacctctagcagcctccgatgggcttggatctttttccaggggagccagtgggctaggcccatgcttttggttacaaagcgtttggagaacatcctcttgctccttttccggaaacgggataatggacacagagtcccaagacgtcatccctttggtgagctgtccttggccaaaggcctctaagaatgggctgagttgggtcttttaaaatactccttctatctggaaatgggatgccttggtggaggggggaaaacaggatttaaaccaggcctctatatttcaggaccaggaagaaacagggctcctgccagcaccgacagcaacgaaaatgttcccacggagatcaggatgacttgctgaagctcagtggaggcatctgccattgtttcgtagcaagatatgttgcttaaatgcccgactctaaagatgttacttttgttccaaagcagttgtgcctggacttgtaaacagtacactctggagggttttaagttatccaatgaaatggagttgcttctgaaagggcctttgacctgttggattcctcctttttcccagtaatggacataataacaaaaaaaggccgtggaggtatcagcgatgtcaaagggagaggagaacctgatgatgagggagccttctcctggggtcacctcaatgttttctggaggcccgacagtcacattccgatagtgttgaaaccaaggcattgtcacccaggcagaatggagtgctcccagctcagctcgaaggcgtagagtgacattgaaatccattgggaagcctgctgagggactggcggcagtgaagtcacactctgttgctgtgatctgtgtacaattcacccctatggacatgatgtcggccgtgaaccatttactgtcggtgtatttaaactgcacttggtagacaacaggcctcgtgctattgctcagggccactggctcccaactcaggacctgctctgcgttgtacaggcgaatcttcgggtgctgaggagcgggcagctgggaaagagggtctggcggggccgcggcggcggcggcgaagactccgagcagcagcagcagcgaccacagcagcgtcggtcgcatggccccgggcgctcggcggcggctcaggtcgcggccggggccccgctcggggtccgcggagccgctcacgtcgccgcccaaaccgccatggcgagcgcagggcgcgcagggcc

SEQ ID NO: 116782 - DNA, 401 bp, Homo sapiens
cctggctaatttttttattttttgtagagacaagggtctccctacgttgtccaggctggacttgaactcctgggttcaagcgatcctaccaccttggcctcccacagcactggggttacaggcaggagccactgcacctggccctgtctttactgatggtcctgccccatgcctcccacacctaaccctgggcacccactcccgaaggaaagggaccgtaaggcacgaggctgcggaggggctctggttgctgggcttcgctggacacgggccactggcagtagctgccgtcagagtgacagctgacgagcaggcggccgtcccgctgccccagatgttctccagttgctggctgtgaggaaagtggtagagcacgcgctgccctgtaggtcccagatgac

SEQ ID NO: 116783 - DNA, 413 bp, Homo sapiens
ctcaggagggactcatgaacacgtgccctgagcacccccaaaatgacatcacacaagggcagaaaggagctgaagggggaacgtgaaaggcagaaagggagccgtggttgccaggcaaccagccctagcccacctttgtttgtttggtgacagcaactaaggtctggtcagggccgcttggccacgctcatgccttttcctctcaacagttgcttctttgagtcagggtgcagctctggtcacctggcggcctcttcagctcagccctccacaaagtgtgagcctgaaggaccaccctgaattgcccttgtaggacccagaacagctaccagcagaatcagattctcatggaccaactggtattcaaagagacaatctggaatgatgcgttctggcagaacccctgggaccag

SEQ ID NO: 116784 - DNA, 805 bp, Homo sapiens
ccctcgagacccaaccagatcctgatcggctacagccgaggcctcgttgtcatttgggacctacagggcagccgcgtgctctaccacttcctcagcagccagcaactggagaacatctggtggcagcgggacggccgcctgctcgtcagctgtcactctgacggcagctactgccagtggcccgtgtccagcgaagcccagcaaccagagcccctccgcagcctcgtgccttacggtccctttccttgcaaagcgattaccagaatcctctggctgaccacttaggcagggggttgcccttcaccatcttccagggtggcatgccacgggccagctacggggaccgccactgcatctcagtgatccacgatggccagcagacggccttcgacttcacctcccgtgtcatcggcttcactgtcctcacagaggcagaccctgcagccagtaggagagcttcgggagtgggtgcccagggttaggtgtgggaggcatggggcaggaccatcagtaaagacagggccaggtgcagtggctcctgcctgtaaccccagtgctgtgggaggccaaggtggtaggatcgcttgaacccaggagttcaagtccagcctggacaacgtagggagacccttgtctctacaaaaaataaaaaaattagccaggtgttgtggcacgtacctgtagtcctagctactcaggaggctgaggtgggaggatcacttgagcctgggaggtggaggttgcagcgaaccaggatcatgctactgtactcagcctgggtgacatagccagactgtgtctcaaa

SEQ ID NO: 116785 - DNA, 1169 bp, Homo sapiens
atggtggaggcactgcaggagcaccctcgagaccccaaccagatcctgatcgctacagccgaggcctcgttgtcatctgggacctacagggcagccgcgtgctctaccacttcctcagcagccagcaactggagaacatctggtggcagcgggacggccgcctgctcgtcagctgtcactctgacgcagctactccagtggcccgtgtccagcgaccagcaaccagagcccctccgcagcctcgtgcttacgttgcccttcaccatcttccagggcatacgggccagctacggggaccgccactgcatctcagtgatccacgatgccagcagacggccttcgacttcacctcccgtgtcatcggcttcactgtctcacagagcagaccctgcagccagtaggagagcttcgggagtgggtgccagggttagttgcttctttgagtcagggtgcagctctggtcacctggcggcctcttcagctcagccctccacaaagtgtgagcctgaaggaccaccctgaattgcccttgtaggacccagaacagctaccagcagaatcagattctcatgggccaactggtattcaaagagacaatctggaatgatgcgttctggcagaacccctgggaccaggggggcctggcagtgattatcttattcatcaccgctgtcctgcttctcatcttatttgccatcgtgtttggtttactcacttccccagaaaacactcagtgtgaagcgggtgaagaggagtgacctgacttgctggggactgagatggcagcaggggaggcgagctgacctgcccccattccagtggtgggccccttcgcggttccctctggctcaggggccaagccctggtgtcttcctttcccatcaggaaaaagtctagtaaaatactgtatctggcttagggttggtcagactagtaagatggggaggctggtctgagaccaattctggctccttgaccctattgtttttagggttccccgaccagaaccctaaaagcacatggagaggatggctccactgcctcaggtggaaggagctatggctaacaaggttctctaacaggctcacaggcccagccagcgaatttcacaaatccttgacagagaaagacacaaccaaatgaaataaaaattccttttcaaatctgct

SEQ ID NO: 116786 - DNA, 297 bp, Homo sapiens
atggactcaaccgtgtgcaggcgcctgcgggcggtatcctcggcgacgccgtatggcttccagggcgaggccatgtaccgggtgcccgagttttatgcgaggaggaagcggttaggtgggcagaccccttacttgatggatatcaccatccatcttcaagaagctactttgaaagtctggccagtgtctattcaggcccactgggagttaggaagtataaagacatttgacgatgtggagatgtttttggttgtcacagttgggtgggcgatgagggaggctgctgctggcatctag

SEQ ID NO: 116787 - DNA, 3179 bp, Homo sapiens
  misc_feature (1)...(3179): n = a,t,c or g
ttttgatggcaaacttgtttccttgttattctgttggaacgtcactaaagtaaacagacatgcatgatttattgttaatttatacatgatgagaattaaggctgaaaatgacttctggggaaactccctactattagtttcagatcttctgggcaggggctgacttctcttggcttacttatacttcctaactcccagtgggcctgaatagacactggccagactttcaaagtagcttcttgaagatgggatgggtgatctgtttaggaataatcccattcaccctgttcctgtttcaggggtcccaaatcaatatcactaaaaaacagggggccccggggggggagtccagggcattggtgctcatcgttccttaactttnaaanaaaggngggggnggnnttttaaanccccgaaaaccagccccaacgctggcgcgggatgtcgcgaaatggggcagaatgaagccctgtaggggacacctttttgctctggggttgtgagacaaagacaagggggggttttagccatgcagatgggggagattcccaaagccctgcttcgtgtagacttacctttttgtggtagaacttgggggaagtattccaatgccatctgctccatagatcttctgtgcaatgaaccggatttttaccccaacggggaactttaaggtcataaaggagctggaagctgctgggtgcttgtgctgctctctggacggggctgagccagggctaaggcacccttgcccccttctgcccagtgagtgcacttcacggcatcaaaagccccatgttctctggaaaggcggctgatgaggtccagctcagactctgtatccgtcttgaatgcattcacggccactactactggaattccaaacattctggcattttcaatttgtttcttcaagttactgaagcctttttcaaccagctccaggttctcctgtatgtaagccttgggaagaggcagtccagcagtgaccgtggggccgcccccgtgcatcttgagagccctgacagtggcaacaagcaccaccacgtgggggcagaggccggaataccggcatttgatgttaaaaaacttttccattccaatgtctgctccaaatcctgcttccgtcactacaaacccttctgggccaacaagcttgagtgcgatccggtctgcaatgatggaggaattgccatgtgcgatgttggcaaacgggccagcatggacaaacactggagtgccctccagtgtctgcatgagattgggcttgattgcgtccttcataagcactgtcagtgcaccactcacccccagatcttcggcactgacgggctctcctttcttactggatgccaccaccattttgcccagtctctctctcatgtcttctagagaagtggtgagagccaggacagccataatttcactggccacagagatatcaaactgggccgtccgtgtgtgacccttctccgttggagcctgtccaatcgtgatcttcctcaggaatctatcattggtatccaacactctttgccaagttatggtttctggatcaatgtccaatcttgcaaatctgtttatctcttcatctgtcagtgtggtagggtcagtcttttcaatgcctagtctctttaaccttcggatttggatgtcagagaaccttctcactccatttactgatggcaccaaacgattaaagagagccttgtctgtctgggtcagttcatgaaatatccgagcatcaatggccgcagcaacgaggttattagctgcagtgatggcatggatgtcacctgtgaggtggagattaaactcttccataggaatgacctgggagtagccgcctcctgcagcgccaccttttattccaaaggtggggccctgagaaggctgtcgcacacacgcaaagacattctggtagagatgggcaccaagggcttgcactagcccgattgtagttgtgcttttcccttctcccaggggtgttggagttattccagtcaccaccacgtatttcccatcaggccggtgcttcaggcgttctagtgctgacagcagaactttggcctttgtttcaccatataattctacctcttcagacagcagaccaatttctcgagccagcttaccaatgggcttcggtttacaagatcgtgatatatcaatgtcacttggaacaggtgtcttgaggttaaggttgttatactgaatcatccactttcctggcttaaatttctccaggaaacgcttggcactctctactgtgctctgcatgagcattgcaactgtcatgggccctacgccgccaggaacaggagtgatgaagctcgccctctctttggcctcgtcgtatgccacatcacccacaacttttctcccatttggttttttatcatctgggacataattgattccacagtcgatgactattgccccaggtttgatccactcccctttaaccatttcaggctgaccagttgcaaccaccaggatgtcacctttatttacctcctcatccagatgggcagtcttggagtggcaggtggtcactgtggcattgttccacagaagcaagtcatgcatcggggccccaactattttactgcgcccaaccaccacagcatgccttccggcaatcggcacccctgtctctttgatgagttccaagcatcccttaggcgtacaaggaatgaaacagtcattgaggtcacctctagcaagtctcccagcattgatgctagtcaatccatccacatccttctcgggtgcaatagcattgatcacttcttcagtgttaatggaattctctgaatctaaaggtagctgcactaagaacccatgtacagtagagtcttcattcaaagatgtaatgtacttcatcacctcagattctgtggttgttcttggtaacttaatgtgagtggctttgatcccaatctcttcagcagccttcagcttcacatttatataaagattggaatcatctctgttgccaacctgtaatattgccaggcgtggtgtgaaaccaggtacttgctccttcaactgagtgacttgatttttcagtctcgcccttatttgcgcggagatctccttcccgttcaggatttctgctggcgccatggcctttattagtccgctgcccacgatggacaccaccaatatcgaggttccac

SEQ ID NO: 116788 - DNA, 414 bp, Homo sapiens
atgagagagcggccagacgcccagctcgcccctcgccgggcatcagcctcgctcccctccccgtctatcccggcccgaggggccctggcgccggctcgctccgtccccgcggccgtaaagcgcgctgttacacgactgcgtcgcaaacaaaacacgtcggggaaaccagaccgccgcggagagggacagcgcccagcgaaagcgaggctgatggagcgaagccaggaagaggatgcggagacgcggggagagcccggggactgcatgcgtctgcgcagctgcgaggttaagccgccctttggcggtccccaggacggttcctggtgccagacggtcccacccctcatttccttccccatatttggcaaccagaccagcatccaggacaacataaactatgccactggttgttag

SEQ ID NO: 116789 - DNA, 278 bp, Homo sapiens
tgcatgggcgccatctttgctggccaccttgtggtgcacctgaccgccgtctccatcgatccagcagatgccaacgtgcgggacaagagctatgcggggcccctgcccatcttcaaccgaagccagcacgcacatgtcattgaagacctgcactgcaacttgtgcaacgtggatgtgagcgctcgctccaagcactgcagcgcctgcaacaagtgcgtgtgcggtttcgaccaccactgcaagtggctcaacaactgtgtgggcgagcggaactaccg

SEQ ID NO: 116790 - DNA, 504 bp, Homo sapiens
ctccgggcccgccgctcccgcaacacccatgtcgatcttcccggagctttactttaacgtggacaatggctacttggagggactggtgcgcggcctgaaagccggggtgctcatccaggccgactacctcaacctggagcagggcgagacgctagaggacttgaaactgcatctgcagagcactgattatggtaacttcctggccaacgaggcatcacctctgacggtgtcagtcatcgatgaccggctcaaggagaagatggcggtggagttccgccacatgaggaaccatgcctatcaaccactcgccagcttcctagacttcattacttacagttacatgatcgacaacgtgatactgctcatcacaggcacgctgcaccagcgctccatcgctgagctcgtgcccaagtgccacccactaggcagcttcgagcagatggaggccgtgaacattgctcaaacacctgctgagctctacaatgccattctggtggacacgcc

SEQ ID NO: 116791 - DNA, 1323 bp, Homo sapiens
atggcggagcaatgggagctggacgaggaaggcattcgccgcctgggggcgctgacgctggagcagccggaactggtggagtctctttcattgcagggatcttatgctggcaaaatccattccattggtgatgccttcagaaattttaaaaatctccgatccttagatttatcaaggaatttgatcactagccttaagggaatccagtatttatgttcactccaagacctgaatttatattataacaacattccttcattagtggaagtgtcccgtctacaaccgttacccttcctcaaagaactggatttgagacttaatcctgttgtaaggaaagatacagattataggctctttgctgtatatacactacaaactctggagaaattagatgaccgaactgtacgtgaaggtgagagaaaagctgccaagctgcattttagtcagttgggcaacagtgaaaattttcttttagaggtggaaaaaagctctagggagaagacaatgaaaaactgtgtaacagatctgtatgccacaacccatttcaacagtgaccctgctgtacttgtcaatgtagagcaacaattatctaccagcctggatgatttaacaccagcacatggttctgtcccaaacaacgctgtcctgggaaacaggacaactcctctgcggacactgctgttgtctcctgggacttcagaacacagaaagatttttaccaagaggtcactaagcccatcgaagagaggattcaaatggaaggacaatatccttgccaacctgaatctaaagcatggtttccaagatgctacaggcagcgaggcaagtgttggcttgtttgtgtttgtgcgagaaacaggtcaggaaagtttgaagcaaaaactggtcagagtgctggaggaaaacctcattttgtcagaaaaaattcaacagttggaggaaggtgctgccatctcaattgtgagtgggcaacagtcacatacttatgatgatcttctgcacaaaaaccaacagctgaccatgcaggtggcttgcctgaaccaggagcttgcccagctgaaaaagctggagaagacagttgccattctccatgaaagtcagagatccctggtggtaactaatgagtatctgctgcagcagctgaataaggagccaaaaggttattccgggaaagcgctcctgcctcctgagaagggtcatcatctggggagatcatcgccctttgggaaaagcacgttgtcttcctcctcaccagtggcacatgagactgaggctctcaccgccattgccaccagtatggtggtatgtactcacaaagattaa

SEQ ID NO: 116792 - DNA, 4263 bp, Homo sapiens
atgggaatggatggtgccacaagggatgccagaggggacttgtccctgagtgatgacagtccagtgacagtgctgatggtccatgcctgtcagagcactgattatggtaacttcctggccaacgaggcatcacctctgacggtgtcagtcatcgatgaccggctcaaggagaagatggtggtggagttccgccacatgaggaaccatgcctatgagccactcgccagcttcctagacttcattacctctgccttcatcaagctcctggagaagctgagtggaggaaaggaccttgggatctgcaggctcggggagggcacctggactgcacggggagggcacctggactgcacagggaggccagaatgtagtggcacgttctcggctcactgcaagctccgcatcccaggttcaagtccctggaatccattcctctctgtctcagctgagacaatacttcctcagtgcatgggcgccatctttgctggccaccttgtggtgcacctgaccgccgtctccatcgatccagcagatgccaacgtgcgggacaagagctatgcggggcccctgcccatcttcaaccgaagccagcacgcacatgtcattgaagacctgcactgcaacttgtgcaacgtggatgtaccccactcaaccaccccgaccggccgggccgcagagcggggaatgagccgggccaatcggcgctgtgccccctctccctgcaggagcgctcgctccaagcactgcagcgcctgcaacaagtgcgtgtgcggtttcgaccaccactgcaagtggctcaacaactgtgtgggcgagcggaactaccgtgttgcatccgctttactgggcgtcctgctcctggtgctggtggccacatatgtcttcgtggagttctttgtcaaccccaccctcctggggcacctgctctgcttccacatttatctcatgtggcacaagctcaccacctatgagtacatcgtgcagcaccgcccaccacaggaggccaagggggttcacagggagctcgagtcatgtcctcccaagatgcggcccattcaggagatggagttctacatgcggaccttcagacatatgcgcccagagccccctggccaggccgggccagcagcagtgaatgccaatccctcccagtttcttgccacccgtggccaagcggaacctccaccaccctcttccccagacactctcgccctgcctccccggatccgaccccagggcctagggcccccagccgccgctccagctcgtcgacggattccgcggacgccagccctgtgcacgccgctggccctgccggcgcctaccactcggcgtcggcagagtccgtggacgagattccagtggcgcagacgcgcctgggcagcgccgctctggccgccccgcggggccggggccgacagcccacgctggcgcggcaggcgcgaagccccgcgctctgccggggccctggaactcaggccaccggctccaggcggaagcgagcccaaagccggccaggcggcagcatccgctaccccgtggctcaagccaggctccgagccgcgcctcagaccctcgcggtagggacggtccccgggactgggcggcaacgcgcccgggagcggggccccatcccggacggagactgggccggaaatgatgctgtccgcatcatcaacgaatggaagttttgtggccgcgagctgctcaggggtgagcgcgccttagggtgtgtgcgccagggacctggcgcagccgaccacgtgggagtgcggcgcgtgtacgggcgcgggcggcagcggcagcggcagcggagaccgggtgagcaccggctggttcctcgcggtgttcctgcaggcttggcggccgcggtggtgcgatcagcaaagggcaccgggatgccggttactctagataacctgaaggaagggaaacaccatctacgcgtacggcctgcagacctacctgttgctgagagagcatctctgaactactggcgtacatggaagtgtattagcaaaccctcagaatttccaattaaaagcccagcctttacaggcctacatgataaggcacctctggggctcatggacacacccctgttagacacagaagaggaggtgcactactgcttcctgcccctagacctggtggccaaatatcccagcctagtgactgaagacaacctgctgtggctggctgagacggtggccctcatcgagtgcgagtgcagcgagttccgcttcattggtgattgctctgtccgggtgaattttcttcgctcacagaagattttactaccggataatttctccaacattgatgtattagaagcagaagtggaaattctggaaatccctgcactcactgaagccgtaaggtggtaccggatgaacatgggtggctgttccccgaccacctgttctcccctgagccccgggaagggggcccgcacagccagcctggagtccgtgaaaccgctctacacaatggccctgggtctgctggtcaagtacccggactctgcgctgggccagcttcgcatcgagagcacgctagacggaagccgactgtacatcacagggaatggcgtcctctttcagcacgtcaagaactggctggggacttgccggctgcccctgacagagaccatttccgaggtatatgagctctgtgccttcctagacaaaagggacatcacctacgagccaatcaaagttgctttgaagactcatctggagccaaggactttggcacccatggatgtgctcaatgagtggacggcagagatcactgtgtattccccacaacagatcatcaaagtgtatgttggaagccactggtacgcaaccaccctgcagacactgctgaagtatccagaactgctgtccaaccctcagagagtgtactggatcacatatggacaaaccctgctcatccacggggatggccagatgttccgacacattctcaacttcctgagacttggcaaactgtttttaccatctgaatttaaggaatggcccctcttctgccaggaggtggaggaataccacattccatccctctcagaagcccttgcacaatgtgaagcatacaagtcatggactcaggagaaagaatctgaaaatgaagaagctttttccatcaggaggctgcatgtgaccacagcctacatgcctgtggacttcgaagactgcagtgacaggactccatggaacaaggctaagggaaacctggtcaggtccaaccagatggatgaggctgagcagtacactcggcccatccaggtgtccctatgccgaaatgccaagagggctggcaaccctagcacatactcacactgccgtggcttgtgtaccaatcctggacactgggggagccaccctgagagccccccaaagaagaaatgcaccacaatcaacctcacacagaaatctgaaaccaaagaccctcccgccactcccatgcaaaaactcatctccctggtgagagaatgggacatggtcaattgcaaacagtgggaattccagccactgacagccacacggagcagccccttggaggaggccaccctgcagctccccttgggaagcgaggctgcttcccagcccagcacctcagctgcctggaaagcccattccacagcctcagagaaggatccaggaccacaggcaggggctggagctggagcgaaagacaaggggccagagccaaccttcaagccatacttacccccaaaaagagctggcaccctgaaggactggagcaagcagaggaccaaggagagagtgattttttacttttattcttgtcttttgatgagctacgaggctccgtgcaatcttgcctgtggctgccgggattcgcgctacgggttattgggaatccagtatttatgttcactccaagacctgaatttatattataacaacattccttcattagtggaagtgtcccgtctacaaccgttacccttcctcaaagaactggatttgagacttaatcctgttgtaaggaaagatacagattataggctctttgctgtatatacactacaaactctggagaaattagatgaccgaactgtacgtgaaggtgagagaaaagctgccaagctgcattttagtcagttgggcaacagtgaaaattttcttttagaggtggaaaaaagctctagggagaagacaatgaaaaactgtgtaacaggtgagagctctgcatcaaaagtcagtgctaatgttgacagcaggattgaaatgg

SEQ ID NO: 116793 - DNA, 1234 bp, Homo sapiens
attctgtaacggtttttggccaagttttggtaagaggttgattctctttgccttcatttcaccttcctcttcgtttacggctaggacatcgctgcttgatccttacaatactgtgcaactgcaatgcaacgtggccctgcttcaggagatccgcgggaggggcctccacgccagcgccgggaaggctgctggggcctccacacctgcctcatcacggcggcgaggctacgacaatccggctgggagcatgaccttggcgtctgttctgggagcacatatgataaacctttgaaactggccggtgtgtaaagcactggcaagtttgttactgttaaaatgtcaaataccaatgctttatatcgacgcgaagtgcttaacacagccgggcttgggggcagtcaggaggaagctggccatccgtggaggaggggccggtcctggactcccgcaggactcctctgaggcagggcctgaagtctgtacacgtggaccagatttgtccttgtcttttcttcacactgagttctctatatttattgaacatcttgcccttttaagccagagtagggtaaactgcgtctcggatgtctgtcttttgcctcgaagccacgatggatcgctggtttcctctgcagcgcgagggcttcggcgaccagaggattcttcccggaaggcattcctggcgggcctccccggggcacccctcaattgtgtactacgtccttgtttagtgtgtatccgtgcccacgtagatgatgtctgtaacgtagttttgtttgaaatatgagaatatgcggcttaaactttgatccaggatgcaggagtaggcagtcaccacatgggatccacagccccaggtcagtggtaaagcaggggagagtatgtggggaggtgtccggtcttgggctccatggctgccctttgctttgtaactcaaacccatcaaggcttctgtcaccccagaagttttacgtgtgctcctgggtggaagcctccagtctctctgcatactgttttcacattgattcatgttggtcgcacccagtagtttgcttatttcatgactgaaggatgctccgttgatgtgtggactgcgtctcgatttcttcttcaggtgatgggcgttcaggctgttcccactgcttggctgaggaagccgcgacagcaagtgccctgggccgccagcctggtgggaagtagggcaggacgaaaacaggaacttgaagtgggtcat

SEQ ID NO: 116794 - DNA, 1447 bp, Homo sapiens
cccgtaaattcccgggtcgtcgatttcgtgtgtccttggagtccacaatgatacgtgagaagtttacccagccacagtttgagactgtccatgaatgtgatttggctgaacctaaagaacgttcaatttaagccaatccagtatctatactgtagacctcagtgaaggctggaagactaatccaacacaatctgacatcctgattctttccaatcacctttatgttccaccctctggaaatactcgcggagtttccgtaactaaggaagagacgctgctgctgcatgacggtgtgctaggaactaaagaagtgatcatagcaccggctgaggaagcagtcaacatgcagactgagcacagacaagagaaatgtagaaagcagaaattaagcccatgtctcccatcctctgcatttcttgtcattttagaaatcttttccaatgtattccccttcctctgctgccagaataggaaaaaagaatctatagtgacagagagcagatcagtcggaagagaagattttagggtaacagatatattctgtatcttgatcgcactgctggttacacagggccagcatccagggagggaggaagaggacagggacaacaatcagcagggcccgtgtaagcatacacttcttatggatgactcctctgacaaccacacggggaggctcgtgtggtccctgtttgtcatccagtcaatacggccatcagcttctggccccagacacctttcctctgcactgtggcacagaggagcagactgctttggagggcagcttcctgggagctccagggaccctggccaggcggccactgccactgacttcctcggctcactgagcccgtgcctgcagctctcgtgtttcctctgtgctgcagtggacgcttatcttcccccgatggcacatttctttgtcacagacaggaccctcactggcagtcgaaagaggtattcctgtaggaaccttgaaaatctaacagacattggatccagaatcattgggctttttgaaacatcctatggcctggcaatggacatttctatgtgggttggcagcatcagacaggggtcagctcaagtgcctgggattgggagttgggtacatgatgaacagagtgacatggagaaggctgcagcagctggcccatcatacatgcaagtcagggcatatgttgcacttactcggtgccagacactgtttaaggtgctctgcaaatatccaatcattgattcttactgtaaccctatgaggatcaggatacataagcagcaagttcaaagactgaaggaacaaggaatatcagctcataaagatgagaaagaatcagagcaagaactctggcaactcaaaagccaaggtgtcttcttacctccaaacaaccatattatttcgttagcaacgattcttaaccagactgagattgctgaagtaacataa

SEQ ID NO: 116795 - DNA, 477 bp, Homo sapiens
tttcgttggtggacgaaagcgctgagtttttgtatttttatacaggctcccaggtaatgcttgggaagaactggtgcttcttggacagcaacacttacaaggcaacgtgatcttgagctccacctcgaaggatgtgagctgggaaagttccagctcacagagatttagtcacttgagaaatggtccacttcctccaaggtgtttcttggatgccccaaagggatgaaaacaagaagtgaccgtgggcgaggaggaggagctggccgacctcctcggttgccagcccgtcggagctcaccagctaagcgagggcgggaagacagcccccgggccggcccacggattattagaaggcgcggacctggaggaggcgccccagaaggcgacgcctcttgcctcctgtctctcgcctctcgaaggaagtttgctcttaatttcagagccgggttcgccgtcggatcaacctccaggagctag

SEQ ID NO: 116796 - DNA, 1091 bp, Homo sapiens
atgcccggttatgtaccaatccaccctcaccagcaagtaatgcttgctgcaaaacagatccatgtgcaacacaaggcagatgtcagctgcaagctgaatgtgaggccacacctccagacggttcttcagcccgctgaagttcaaaaactaccgtttcagttggattcagggcaaggggaggccgcgcgggaacggaaggaggaaacggaagatttgaaaagattctgccgcccccagaaactgtgcgacgcgtgccctcgcagccacccccaagaagctccgtctttaccaacgcgagcagcgcagcagtcttctccaggcggtcgagcgcggcgcgactgtgggcccaggcaccgcgaccatccggttccatggcgggcgcggaacgaggctcgttcccggagcggatcctcggctgccggttcctcggctgccgattatccagcatcgtcccgccttcggatgaaaggctcctctgagagcgggaagcaaggaggcctccggaaaccacagggaagctgcaggtcagcgactcgaaaccggccaagctcttcccgcagtgtagtaagcccattgaggactggggctatatcttattcacctttgttcctccaggaagtccagctagcttcatctctcaacaggaagacatatccacaggaaaaggtggagagtactacatcaagggaacactccatgggacaaaaaaatctgaacagcagccttcagccctagaccttccctctgacagagcctacccaaatgagaaggaaacagtaaagcaaccctgtaagttcaaggccacaaataacttcaagagacatgagaaagcatactactacaaatacaaatatttgatgccttacaaagaggcccatgtgaaaaaggaactaagtgtagccttcagccaacagccaacaaggactgaggccaataaagaatggaaccgtgccaacaatcatgtagtgaacttagaagcaaattcttccacagctgatcattggaattactgcaactcagatgataccttgatggtagcttgtaagaaacctgaagcagacaacacagataagcagggcccagattcctga

SEQ ID NO: 116797 - DNA, 3108 bp, Homo sapiens
atggaaagatttgagggtgaaaaggatggctgtgatccaaatgataatgtcttcgataaatgtgtgaaaattactgggaggttggtccatggccaagcagagaggaagacggcaacccggcgggcacaaggtcggacgacctgctacgtaactcgcgcgtgtgactgcctagtaacagtgtctcgagtcggaagcgctcggagcgaggggcggggtgggagagctggcgcgcgcacgcgtaaagtctttgcagcctcgctacggggcggagtcttgcctgtcagcaggggcagagtagcgatcgtcgccaaagcgcgcggttttatttctctccgctttggacggggcaaactagcttttgggagtgaagcggggctagattggccgaaccctgagaggaatcgggctggggtcccgggaggggtgatccgaagagctggttcccaagggcccaggtcctggatccaaaaggttcttgagcagattatggactcacctcgccagtgtgtcaccccctcggaggtggtgcctgtaactgtgctggccgtccagaggtacctgttagaggatgagccacgcgacacggtgcccaagcctcccctttattgctatgatgtgacgatctcagatggggtgtaccaggagaagtgctacctggaccccagcttgaactctctcgtatatcaaaatattcttaaagttggcattcaaatgagaatttccagggtctcatgtctttacaatgagaaaaggataggccaggggatcctgtgcatagataacgtccactgtggggagacttcagacagtatttctttagaaactcccttcagaaatagagcgcaccaggagaaaccagagaggcctttaagaggcgggaagagtcattacctggcgctgtggaataacgaagatccctatggagatatctggttaacagacaagcaacctgaggaacacaactttagcggtctgaaccatgagatagcaatcgatgttgctttcctacccatgtattgtccagaagatattcgaacatctcaaatagacacactgttgacctccatgaattacagctgtgcatatccacaggacacaactggaaatgaccgattgccaggtccaagagcggttgcagctagagtagaaattcaagaaagaaatggtaaacggcatcaagatgatgagcctgtgaattctcagtatttccaaactacatctacaaatttaagtctgagcaataaaataagaattcttcaaggcccacacgctaatccagttgctgtacctcaaccaggagcttctgtacaaacaaagggaattaaaccgggcatgccaagcatcttcaaccgtcgagcaaatataaatgctaatctgcaagggaaagccagaaaaactataagtgataggtgggagagtcagctgtggagagagaaaaagtttggcttaatagatcacctacactacagccgtgtttatcctgaaagtattccacggaaatttatgtttgaacacagaaagtttcttagtgaccagtataattctcagcctgcgaaatatgtaccaccagaaggaaggcccccaaaacttgatgattttaagagcgcccgaagccttggacattttgaagtaaccatactagaaatctgcctgaatcttcgcgatcccccaacaaatataattatcattccagaaaagcaggtgaaaccagaatggagactgccaaagctaaatcaccgatttaccacaaggtcagaactggatgatatgccagaaaattgcatctgtgatgttattggccttttagtttttgtaggaagggtccagcggtcaaaaaagaaagaaaaccgtgaagatttttggtcatatcgctggattcacattgctgacggtacttcagaacaaccatttatagtggaactgttttcaacatcgcagccagaaatctttgaaaatatttacccaatggcatattttgtgtgtacacagttgaaagttgtcagaaatgacaatcaagtacctaagctgctttacctcaccactacaaatgagagtggagtgtttattactgttgagtcgctcttgacagctataagtgaagtcaggaaggagattgaagacttgcagtatagggaacaaaagcgcattgcaattcaggggataattactgctataaagtatatcccccatagcagtgcgactgaaagtgcctcagcatcagaaacacttcgggtatggtggctcccattgcatttaggcagcaacccaaactctaccggggtctggaaggcaggccgtactgcggaggatggcgaactttcagtaaagagccaaacagtaaatctttttgtctttccagacatgatctctgtcacaaccattcacttttgccattgtatatggaaagcagccacaagcgataccaaaataatttccctttctcatcttgaaatgacctggactaacagaagaaattttcctgcattgcttgtgaggatcttacataaatcaaaactgcgatactatggaaaacctgataaaaagatgattgaaccatatcagacctttttggaagttgctgacagttcaggcacagtgtcagtgattatgtggaatgccctgtgtcctgagtggtataaaagtttgcgggttggtttagttcttctgcttcaagactattctgttaaaaagagttatccattcagaatacagcctgtccccgtggatccacagatcaaactaatttctacaatggaaatctgcctgaatcttcgagatcccccaacaaatataattatcattccagaaaagcaggtgaaaccagaatggaagactgccaaagctaaatcaccgatttaccacaaggtcagaacttggatgatatgccagaaaattgcatctgtgatgttattggccttttagtttttgtaggaagggtccagccggtcaaaaaagaaagaaaacccgtgaagatttttggtcatatcgctggattccacattgctgacggtacttcagaccaaccatttatagtggaactgttttcaacatcggcagccagaaatcctttggaaatatttaccccatggcatatttgggtgtcccgtt

SEQ ID NO: 116798 - DNA, 1203 bp, Homo sapiens
atgctcagccgaccctctcttctacttcctgaggcccatacaatcaaaatcctctggcacctggaaccaggtagaaatgataggcgaggtatgcgttatccccacttcacagatgaggaaataggttccgaaaagaaacttactgaaggacacacagagggtcgagtcagagatccgctccaagccctatcttactctagtggccaccttctttttacttcacatcccatcataaaatataaaactaaacgaagtgttgatggttgtttaatgcgagcaatgcaggctgccaaaaaagtcatcaagagatttatccgaaagtcaggcttggatagactagctggcagtagtcatctttacctttggtcctaccgtctcaattgcatcctactacttgaatcatgtcacaaggtattaaaggaagaaagtgagattggtgagacagcagagacgctcaattccaaaactccaacagcaaaaggattgatcattttagaataccttgcctcacaatcatggcggaaggcaaaagtcacgtcttacatggcaacaggcaagagaggaaatgagagccaagtgaaaaaggaaatcccttataaaaccaacagatctcataagacttattcactaccacgagaacagaatggggaaaaccgcccctgtgatttcagttatctcccaccaggtccctcctacaacacgtgggaattttgggagctacagttcaagctgtggatcaagaccaagttcagaggtcagagacctagcaagaaattggagtgtgttccagatcttcaaataggtggggaacagagtccaccattactttcctcctctattattatccccagtaatgctttgagtccaggttatactgaggtgcatgttggagaatgggagcgggaccaggattcagtgacccacgtctgtttgaggctgttctatgttgttccatccaagctgagcgcattcttggcttcagataccctcctccaggtgaatgacgctctgatttgtgagaattctggtgcgcacagagttaaaatatttccaaatcctcgatctctatgctatgcatctatgactcagggtggggctaagggtcttgaccttgtcactcttcctgaggacaagacaagaggagcagatgaatccaactgtgaatgcagtgtcccagaaaagagaggcaaaaatcctttttag

SEQ ID NO: 116799 - DNA, 423 bp, Homo sapiens
gcagtcagagctccaggtctggttcttacttctcctaaaggcccaggctgtgtggccccgtgtcctgcaggtattgggagatccacggctaagacaccgggacctcctggaagccaaaaatgggaccattgcaatttagagatgtggccatagaattctctctggaggagtggcattgcctggacactgcacagcggaatttatataggaatgtgatgttagagaactacattaacctggtcttcctgggtattacggtttctaagccagacctgatcacctgtctggagcaaggaagaaaacctttgaccatgaagagaaatgagatgatagccaaaccctcagtgagcttccttcaagtttcacagggagaagcaaaggcccttctttgtgacttataaaagactgcacagtgtggctgct

SEQ ID NO: 116800 - DNA, 1024 bp, Homo sapiens
  misc_feature (1)...(1024): n = a,t,c or g
atgtcgaagcgtcgttggttaacgggaaacggaagtgatcgagagaacattcgcctggatttgggatttctggtcagcgatgaagagaaacggtacaaatgtgaagactgtggcaaagcctttaaccgctcctctaaccttactacacataagaaaattcatactggagagaaaccctacaaatgtgaagaatgtggcaaggcctttaagcgctcctctatccttactacacataagagaattcatactggagagaaaccctacaaatgtgaagaatgtggcaaagtttttaagtacctttcttccctttctacacataagataattcatactggagagaaaccctacaaatgtgaagaatgtggtaaagccttcaactggtcctcacaccttactacacataagagaattcatactggagagaaaccctacaaatgtgaagaatgtggcaaaggctttaagtactcctctacccttactaaacataaaataatccatactggagagaaaccctacaaatgtgaagaatgtggtgaagcctttaagtactcctgttcccttactgcacataagataattcatactggaaagaaaccttacaaatgtgaagaatgtggcaaagtgtttaagcactcctctcccctttctaaacataagagaattcatactggagagaaaccctacaaatgtgaagaatgtggcaagagactttgcccaggnaatatagcagcaccaacgatgttaagtaatgccagtaaaggcgccaaacccgctccgttggnctgtggaggtcccggtgtcttagctgtggatctcccaatacctgcaggacacggggccacacagcctgggcctttaggagaagtaagaaccagacctggagctctgactgcagcgagagacaaaggccccgccaaatcccggaagccgccctgtccgctccagttgcgtgcctgattggacggtccccagctcagggtccctgattggaaaacgtctaaggcccagccccttcaggccttaa

SEQ ID NO: 116801 - DNA, 549 bp, Homo sapiens
atggctcaacaaggcccaggtacaactcaggccaccacttcagaggatgcaaacttactggaatttctgatcaaggaaattagccaagaaaaagaaataaaagccttggaaactggaaacaaagaggatcccctggatgtttttgttgttgcagatacagatgtggtgtataaaagcgagaatggacatgtcattaaactgaatatagaaacaaatgctaccacattattattggaaaacacaacttttgctgtccgcacgcacagtggcctgccagcgtgtcggaggtgctgcatgctcagtgtgtttactgaagttgtgcccatgatcacttggcatttttcccttaccagtcgagtgctgcaagaagaaggaaataagaaggccagttggtgccagaatatagaaactccagtaatcactcaccctctcccaatgaaaacagggaaaatgcctttagcatttgaacatcaagcatcaaaggccacgtctaagcccaggacctgcctccagacctccagctcttcccactctaacccaactgactaa

SEQ ID NO: 116802 - DNA, 1647 bp, Homo sapiens
gtttcttctctcgtaccagctctaccccatctcttcattgattttagtgccctgacatttgatgataagtcaccagaaatgtctaagaatgatgtattgccccagataccatggttctgttcccttttgcaagacttactgcccacgcactccacagtcccagccagcatcctgcatccacccttttttttcaagcccactgcattagaccatggaaactcaggatgtgtggccacaacggcccctgctctggatccagctggcccaccacgtggcgtggccgtgaccttagtcacacttccccctgacatcctggccgcaactacgaacctcagaaagaatgcttggagcagctatacgaggactctgaaaagccacagtccccaagtaaccctgcagtggctacagcagccagcagcaaggggagcctgcaagacagggaactctgagggaggaaaaccttcctctagattcaacagtgccatgattccaagaaatctaccaatgactttgagaactgaagacctagctcccagatcggccactgtggagcacacacacaggatatatccaaatggtgctgcaaatgctaacacaggaccacagctcatagaaggtggttggaacttgttctctgaacctaaccattatcaactgcctgctaaaacaaaaatattgacattctccataggatttagacaagatgcagagtttcataacataatattcaaaatgccctggataaattcaaaattactcagcatggaaaaatacaatcaacaggaattggagctgcaagacgttcttgttgaattctcaagtttgattcagttacttgatctccttgaattccagaagagaccacctgatctgggatcttccagattgtcacagacaggttcccaaccttcttggcaacaatcagataatggcagcacagcaaggttaaatttcacagcaaaagacacacctcctctttcatatccaaatggacagcttactaagaatttgaaagctgatggggaacaagggtggctggatatcctacagcagcagttggcaaactttttctacaaaaggggaattaaagaaccagaaccacaaggtagtgaatatggggaagaggggatgtctatgaaagatgtttcagagaaaggagaaagactcagcagctttgatgaccaactaagtatgagctgtgagggtgataaaagtcatgcaggagaatccggaacagtgccaagaattctacttcagaatcctagaggaatggacgcacattcacacggaacactctcctttcgctctcaaccccgaacacgctctggactatcccaagagggtctttggggacccgccagagatcgatactgctcccacgtgcctccattaaacccttgtccaaacatgcacaaggcgccaagggcatgtgcagtatcagccctcagagttctgtgcacccatcccccaacttctgcaggcttgtctcctaactgctcacacctgcagctttcttcagagaactacccttgggctaccggacccacttcactggacctgctgagagctggcaggcttatgtccctccccatctctccctccaccacccccaattctgatcctgggcagcccataagcaataactaa

SEQ ID NO: 116803 - DNA, 384 bp, Homo sapiens
atggtatcttggattgaatcttggaacagaaaaaggacattagtggaacaactgatccagaaagaatggagcagggagcatattatcatggaaagaattcaagaacatgtctcagacctgaagatcatgaggttcctgattgaaatgtctagcacaatggatgaaaatagacccaccctaaggcacaccattgagaaagttcagaacactgagaataaagagaaagggcctacgagcttccagagtgaaacaaaacaaaacacaacaaaacaaaacaaaacaaaaacatgggaagcacttggagaatatttagatgggaagaaggagagtgaggaggatcaaagcaagagctacaaacagaaagaagaaagccgattggtatga

SEQ ID NO: 116804 - DNA, 422 bp, Homo sapiens
catgcagaagagacataattgcaaaaaagttcatgccttacctccagcagtcttgggcttccagagggcttcaggctgtcgatttgcgaacaagagatccaggattacgcattttgggggccgaaggctcagcctgactcccgcttcggactcggcaggtgtctagcaccgcgggcccaggcggaaggcgctggcgcagcgcagagcagggactccacttatcgaggactggaaactccccttgccgcccggcctccgcgctgcgctccttgctgtcaccgctccgagcgacgcaggcacgctccccgctgcctcctagtcctggtgggtctctctgctctcttctccgggttcgtccgctccctcacagaccacaccctgtcacctcagcaaccctccactccttcctctttgacacgaaa

SEQ ID NO: 116805 - DNA, 807 bp, Homo sapiens
atgctgcgcacgggaaccgggcggcgggcctcgcggtcgggtctctgcgccggccgcggcgcgccgggaggctggagcatcctggacgccgccagagctccccggtgcgcttttcgcgcagaacctccgtcagcagctcctcgcttcgcagataaagaagtaaaggcgacggaggagaaatggagagaaaagggaagacttacttgggggccgaaggctcagcctgactcccgcttcggactcggcaggtgtctagcaccgcgggcccaggcggaaggcgctggcgcagcgcagagcagggactccacttatcgaggactggaaactccccttgccgcccggcctccgcgctgcgctccttgctgtcaccgctccgagcgacgcaggcacgctccccgctgcctcctagtcctggcagcagacattagaataggcctggaaactttccctgcaagatcagggacacagcaagaatgtcctctctcaccatgtgtattcaacattgtattggagttcctagctaatgcaataagacaagaaaaggaaataaaagacatgcagtttgaaaaagaagagatatcagaacaaggatctgctgctattacacaaaccaagcagggttccctctgccattctcatgtcttcaccgagcagcaagaaaggagagggaacaaccaagtagaagttagggaagaatatagtggaggtgacagtgtgctcatcctgagcctaggtatcaagaggccttgcctgcaactgttcactctcttagaacactgcccagctgccatgaacaaacctgtgtga

SEQ ID NO: 116806 - DNA, 532 bp, Homo sapiens
ggggcctccatccccattcccagagttgactgcaggctttctcgctatctgttttcttgtcaaggtgctataggagaaaagcacttggttggctccatcgggtctggagaatcccctccagcagtcttgggcttccagagggcttcaggctgtcgatttgcgaacaagagatccaggattacgcattcactgcaagcaaatgtgaaatccttaaattgctggcctcagtgttcccatgtcaactggcatatgctcaggttggagatcatacaggtctgcaaatgcgaacagctgtatcttgccttcttttgatttcggtcgtttcttttgtgaaattcaaggatggactctgattctcaagccccaagtttaacactccgtggttcttacagtgtctcttgggggccgaaggctcagcctgactcccgcttcggactcggcaggtgtctagcaccgcgggcccaggcgcaaggcgctggcgcagcgcagagcaggaactccacttatcgaggactggaaactccccacgaaa

SEQ ID NO: 116807 - DNA, 885 bp, Homo sapiens
  misc_feature (1)...(885): n = a,t,c or g
atgctgcgcacgggaaccggncggcgggcctcgcggtcgggtctctgcgccggccgcggcgcgccgggaggctggagcatcctggacgccgccagagctccccggtgcgcttttcgcgcagaacctccgtcagcagctcctcgcttcgcagataaagaagtaaaggcgacggaggagaaatggagagaaaagggaagacttacttgggggccgaaggctcagcctgactcccgcttcggactcggcaggtgtctagcaccgcgggcccaggcggaaggcgctggcgcagcgcagagcagggactccacttatcgaggactggaaactccccttgccgcccggcctccgcgctgcgctccttgctgtcaccgctccgagcgacgcaggcacgctccccgctgcctcctagtcctgctgataagcaacttcagcaaagtctcaggatacaaaatcaatgtacaaaagtcacaagcattcttatacaccaacaacagacaaacagagagccaaatcatgagtgaactcccattcacaattgcttcaaagagaataaaatacctaggaatccaacttacaagggatgtgaaggacctcttcaaggagaactacaaaccactgctcaaggaaataaaagaggatacaaacaaatggaagaacattccatgctcatgggtaggaagaatcactatcgtgaaaatggccatactgcccaaggtaatttacagattcaatgccatccccatcaagctaccaatgcctttcttcacagaattggaaaaaactactttaaagttcatatggaaccaaaaaagagcccgcattgccaagtcaatcctaagccaaaagaataaagctggaggcatcacactaccgacttcaaactag

SEQ ID NO: 116808 - DNA, 458 bp, Homo sapiens
atcattgcttcgttgcccagaaggggaagaaatgaaaagaacccaaataataataaagtcctcaagctttacacgcctcggtttagcagtccaacaaaccaatttccgaggatgggggagccttggactggctcgtggaggaaccccagaaaaagacaggtgggaaaatattagcttgggggagaactggagagggcttgggtgtttgcaccggccagggggtggccggccgcggccccgtgggtaaaagaaaaagtaagatcggcgaggggtggatgaaaggatggagaggaaggcttggggagatggaagagccaagctgcttcccaaaagcggtgccggcaggttaggggctgcgcagcctgaaggctggggctacggagaagcccactgcagtgtcactccagcccccgaaggcgtgtgcgcacacactcccgcacacacacacccgcacgaaa

SEQ ID NO: 116809 - DNA, 1152 bp, Homo sapiens
atggaatactatgcagccataaaaaaggatgagttcatgtcctttgtagggacatggatgaagctggaaaccatcattctgagcaaactatctcaaggacagaaaaccaaacaccgcatgttctcactcatagcttggaaggcctcccaaaagcctgaattaatgaaagcttctgatgtgccgatccctttctctggcaggaaaaagcaagtgagtcagaccaagatccgggtcatctcaaccatcctgttcatcttggccggctgcattgtgtttgtgacgatccctgctgtcatctttaagtacatcgagggctggacggccttggagtccatttactttgtggtggtcactctgaccacggtgggctttggtgattttgtggcagggggaaacgctggcatcaattatcgggagtggtataagcccctagtgtggttttggatccttgttggccttgcctactttgcagctgtcctcagtatgatcggagattggctacgggttctgtccaaaaagacaaaagaagaggtgggtgaaatcaaggcccatgcggcagagtggaaggccaatgtcacggctgagttccgggagacacggcgaaggctcagcgtggagatccacgataagctgcagcgggcggccaccatccgcagcatggagcgccggcggctgggcctggaccagcgggcccactcactggacatgctgtcccccgagaagcgctctgtctttgctgccctggacaccggccgcttcaaggcctcatcccaggagagcatcaacaaccggcccaacaacctgcgcctgaaggggccggagcagctgaacaagcatgggcagggtgcgtccgaggacaacatcatcaacaagttcgggtccacctccagactcaccaagaggaaaaacaaggacctcaaaaagaccttgcccgaggacgttcagaaaatctacaagaccttccggaattactccctggacgaggagaagaaagaggaggagacggaaaagatgtgtaactcagacaactccagcacagccatgctgacggactgtatccagcagcacgctgagttggagaacggaatgatacccacggacaccaaagaccgggagccggagaacaactcattacttgaagacagaaactaa

SEQ ID NO: 116810 - DNA, 885 bp, Homo sapiens
atggatgtgggagatgcagacttagacgtttctctgaggaaatttccagtgggccacccttctcttcgttctgcagtgggaataccaaatctcaaagctgctcgttatgcgttcatctgctctttgcctaaagggagcaggtacttttatcatttccggttctcaagttgggaagcagacacagagagtactgaggctgaatgcagagattattgcctgagcagcaggcattcacgctcctatagaaactgcgttctcaccctgccagagaaagggatcggcacatcagaagctttcattaattcaggcttttgggaggccttccaagctgaggccacaagaacacaactagcagggggtcccattagagtcaaaggagaaataccccaatgttacaatacctctggacacaccaggaacaaagtgacagcggaaggggaagaaatgaaaagaacccaaataataataaagtcctcaagctttacacgcctcggtttagcagtccaacaaaacaatttccgaggatgggggagccttggactggctcgtggaggaaccccagaaaaagacaggaggcccgtgccagccatgagccttttgttctgggaccgctccgcatctgctgcgctctccccgcccggggaagctcgctcccaaggcacagcttggtcccttccccagctacctgcagccggactggggccgctggtcgttggctggaaaggaggcttgagagaggcacgggggcccccggaggaaagcggagttgccaagacccggcagctcccggaagcggcggccccgggatcctgggaccagcagggcagatgcgaagggacccagacctgttcccggaaaggggctaaacctggagcattcgtctaa

SEQ ID NO: 116811 - DNA, 418 bp, Homo sapiens
  misc_feature (1)...(418): n = a,t,c or g
gctgacgatttcgcacgannaaaaactgcgactgcctgcagggcttccagctgacccactcgctggggggcggcacgggctccggcatgggcacgttgctcatcagcaaggggtcagacacggtggtggagccctacaacgccacgctgtccatccaccagctggtggagaacacggatgagacctactgcatcgacaacgaggcgctctacgacatctgcttccgcaccctcaagctggccacgcccacctacggggacctcaaccacctggtatcggccaccatgagcggagtcaccacctccttgcgcttcccgggccagctcaacgctgacctgcgcaagctggccgtcaacatggtgcccttcccgcgcctgcacttcttcatgcccggcttcgcccccctcacagcccggtg

SEQ ID NO: 116812 - DNA, 597 bp, Homo sapiens
  misc_feature (1)...(597): n = a,t,c or g
cgccnnccngccaagacgcgcccagtatgagggagatcgtgcacatccaggccggccagtgcgnaaccagatcggggccaagttctgggaagtcatcagtgatgagcatggcatcgaccccagcggcaactacgtgggcgactcggacttgcagctggagcggatcagcgtctactacaacgaggcctcttctcacaagtacgtgcctcgagccattctggtggacctggaacccggaaccatggacagtgtccgctcaggggcctttggacatctcttcaggcctgacaatttcatctttggtcagagtggggccggcaacaactgggccaagggtcacttacacggagggggcggacttgggttggattcggtcctggatgtggtgcggaaggagtgtgaaaactgcgaccacctggtatcggccaccatgagcggagtcaccacctcctttgcgcttcccggggccagctcaacgcttgacctgcgcaanttgggccgtcaaacattggncctttttcccggngccttgaatttctttaatgcccggttttggccccccttaaaagcccnggggcaanccagcantaccgggct

SEQ ID NO: 116813 - DNA, 2054 bp, Homo sapiens
  misc_feature (1)...(2054): n = a,t,c or g
gacgtacgaccggnttggaattaccgggtcgacgatttcatcagcccgcccgcgcccgtccgcaaccgcccgccagaccgccgcccagtattgaggggagaatcgtgcacatccaggccggccagtgcgggcaaccagatcggggctcaagttctgggaagtcatcagtgatgagcatggcatcgaccccagcggcaactacgtgggcgactcggacttgcagctggagcggatcagcgtctactacaacgaggcctcttctcacaagtaagacactcgaaccatttaaggtggatcttaaacccggacccatggacagtgtccgcttcaaggggcctttggacatctcttcaggcctgacaatttcatctttggtcagagtggggccggcaacaactgggccaagggtcactacacggagggggcggagctggtggattcggtcctggatgtggtgcggaaggagtgtgaaaactgcgactgcctgcagggctttccagctgaccccactcgctgggggggcggcacgggctccggcattgggcacgttgctcatcagcaaggtgcgtgaggagtatcccgaccgcatcatgaacaccttcagcgttgggccctcacccaaggtgtcaagacacggtggtggagccctacaacgccacgctgtccatccaaccagctggtggaggaacacggatgagacctactgcatcgacaacgaggcgctctacgacatctgcttccgcaccctcaagcctgcccacgcccacctacggggacctcaaccacctggtatcggccaccatgagcggagtcaccacctccttgcgcttcccgggccagctcaacgctgacctgcgcaagctggcccgtcaacatggtgcccttcccgcgcctgcacttcttcatgcccggcttcgcccccctgaccagcccggggcaagccagcagtaccgggccctggaccgttgcccgagctcacccagcagatgttcgatgccaagaacatgatgggccgcctgcgacccgcgccacggccgctacctgaccgtggccgccgtgttccgcgggccggcatgtcccatgaaggagggtggacgagcagattgctgcccatccagagcaagaccagcagctacttcgtggaggtggatcccaaccaacgtgaagggtgcccgtgtgtgacatcccgcccccgcggccctcagaatgtcctccacctttcatcgggaaacagcacggcccatccaggactttttcaagcgcatctccgagcagttcacggccatgtttccggcgcaaggccttacatgcactggtacacgagcgaggggcatggacgagatggagttcaccgaggccgagagcaaaatgaacgacctggttgtccgagtaccagcagtacccaggacgccacggccgaggaaagagggcgagatgtaacgaagacgacgaggaggagtcggaggcccagggcccccaagtggagctgctcgcagctggagtgagaggcaggtggcgccccggggccgaagccagcagtgtctaaacccccgggagccatcttgctgcccgacaccctgctttccccatcgccctagggctcccttgcccgccctccttgcagtatttatggcctcgtcctccccacctaaggccacgtgtgagctgctcctgtctctgtcttattgcaagctccagccctgacgttttacgggtttggtttttactggcttgagcctatattgtcgaaaaccccggagacatcttgttggcgagaccctgtttttccctcgccctaggggtcccttgccggcctcctgcagtatttatgggctcggcctccccacctagggcacgggggaggtgctcctgtgcttgttttttgcaaatcccggcccggcggtttaccgatagggtttttctggatggggtgtatttttcggcgacataataaccctattggcgggggggcaaaaaaataaaaggggcaccctttttttttctttccttctccccaccttcccctggccgtctcgggtatcgttctctttctc

SEQ ID NO: 116814 - DNA, 1045 bp, Homo sapiens
tttcgtgcccgctttgacttagagccctccgcatatccttcccctggctggagcagccaaggcgcggaggacagctccgaggccagatgtttactgcgcagatgcccgactttacaccggggtccgggctgtgccgggcgctgggggaagcgcccaccttccagagagcgaaatcatggagccttccaagaccttcatgagaaacctgccaatcacaccaggctatagcggctttgtgccattcctcagctgccaaggaatgtccaaggaggatgacatgaaccactgtgtgaaaaccttccaggagaaaacacagcgctataaagaacagctgcgggaattgtgctgcgcagtggccactgccccgaaactgaaacctgtcaactccgaggagacggtcctgcaggccctgcaccagtacaatctgcagtaccaccccctgatcctgggtagcagcgccctgaaaccatttcccctcacccctgaatgcaaatatgtaaagaaacctctccaggagcccccgatccctggctgggcaggctacctgccgagagccaaggtcactgaatttggctgtggcacgagatacactgtcatggccaaaaactgctacaaggacttcctggagatcacggagagggccaagaaggcacatctgaaaccatatgaagaaatatatggagttagctccacaaaaacttctgctccgtctccaaaagttttgcagcatgaagagctgctgccaaaatatcccgatttttctattccagatgatcacactagctccccagcaatggttcttaaccagattgaaatggctgaaatgtcagacatagaattcagaatctggatggcaagaaagctcaatgagacacaagagaaggttgaaacccaatccaaggaaaacaataaaatgatccaagggttgaaagatgacatcaccattttaagaaagaaccaaaatgaacttctggaaatagaaaatttacaggaatttcataatacaattggaagcattaacaacaattggaatagaccaacctga

SEQ ID NO: 116815 - DNA, 954 bp, Homo sapiens
tttgcggagaagcaccctctttattccgacatgacaaagaacggcctttatcattaatgacatgcaaccgggaaccactcaggatgcaggcggcagataaaaaattcttgttactaaacttctttattgctcactgggcgcgaatccaacatgagaatggcgggttttggaagccccacttaaagttcacctccttgggagactctgcgcttctagccttctgcatactttgcggaggacagtggctctagatacatcttcccactgcatggtatacttggcctctgagcacagccacatgtcaacggagttttgggggcctctctcaagggccttccaagggcaagggcaccttccatctggaatagaaaaatcgggatattttggcagcagctcttcatgctgcaaaacttttggagacggagcacaagcttttgtggagctaactccatatatttcttcatatggtttcagatgtgccttcttggccctctccgtgatctccaggaagtccttgtagcagtttttggccatgacagtgtatctcgtgccacagccaaattcagtgaccttggctctcggcaggtagcctgcccagccagggatcgggggctcctggagaggtttctttacatatttgcattcaggggtgaggggaaatggtttcagggcgctgctacccaggatcagggggtggtactgcagattgtactggtgcagggcctgcaggaccgtctcctcggagttgacaggtttcagtttcggggcagtggccactgcgcagcacaattcccgcagctgttctttatagcgctgtgttttctcctggaaggttttcacacagtggttcatgtcatcctccttggacattccttggcagctgaggaatggcacaaagccgctatagcctggtgtgattggcaggtttctcatgaaggtcttggaaggctccat

SEQ ID NO: 116816 - DNA, 462 bp, Homo sapiens
atggggggctgcaggtgccgagccctgccccacagcgaggcggctgaggcccggcaagaattcgagcctagagcgggtgggccggcagtgatgcggaactcggcgcatactccgcagcggctggctctgggtgctaagcccgtcactgcccagggcctgtggcgccagcctgaccgctctgagtgcagggccgccctgcgtgtgccgcgcgcagcctcagttcccgcctgtgcctctccctccacacctccccgcaagcagagggagcaggctccggccttggccagcccacagacgggctcccacagtgcagcggtggggcgaagggctcctcaagcgcggccagagtggacgtccaggccgaggagacacggagagcgagcaagggctgccagcacgctgtcacttcttattaagtcaagcattggacatgaccttgatattgctggtgattacccatag

SEQ ID NO: 116817 - DNA, 351 bp, Homo sapiens
atgggccggacgcagttgctcacgcctgtaatcccagcactttgggaggccgaggactctcataactgtcacctgagttggttccaacggatacgcagaatagaagacaaatgggagaagaatattgacaaactgcaagaaccagccacagcgacagcccaaacaactgcaggggaacttgccaataactcgcggcaaatgctggaggaagtaccgcctccaagctacagcggcgccgccgaagccaagagcggcgccttccgcagagggactgcggcttcctgcgcagcgccccctaccggacaggcggcgggaaaacgccgcgcaactcagaccactggagcggagtag

SEQ ID NO: 116818 - DNA, 396 bp, Homo sapiens
atgctgatgctgatgctgatgcttctggtttggagcacatactttgagaccactgctctaatggaatcagtagtcacaaggccaagcagccagcttgaaggcggtacttcctccagcatttgccgcaagtattggcaagttcccctgcagttgtttgggctgtccctgtggctggttcggggtgtgcggccagccatggagcgctctgggcccagcgaaggtgggttcatgaggcgagtccgggcgggtgacaggctcaacgcgtcgggaccggacccgcagcttgcggtcaccatgggcttcacgggttcgtgtgctcttgcctctgggacaccaattgtacgtcttagtgttgcgcgcggaaggcgctttcgtcccacgggatatggggcctaa

SEQ ID NO: 116819 - DNA, 458 bp, Homo sapiens
gcattgaaaccatgcccaggccggaattcctgggacgacgattgtctgtccctgtggctggttctggggtgtgcggccatccatggagctgttctgttcccagcgaagtgacaggctcaaacgcgtcgggaccggacccgcagcttgcggtcaccatgggcttcacggggttcggtaaaaaagctcgcacatttgacttggaagcaatgtttgaacaaactcgaaggacagctgtggaaagaagtcgcaaaacactggaagcaagagaaaaagaggaagaaatgaacagagagaaagaattaagaagacaaaatgaagatattgagccaacatcctcaagatcaaatgtggtcagagattgctccaaatcatcttccagggatacgagcagcagtgaaagtgaacagagctctgactcttctgatgatgagttaattggccctcctttacccgctaaa

SEQ ID NO: 116820 - DNA, 411 bp, Homo sapiens
atggccagccacatctatgaccaaattgacctaagctttcagatgttttccaaaacatcggactgccacagagacgaagccttcagcagcatttccctggaccctcttctctctggtcccaggtcaggttctgtacagcaatggaaagcaggggagaggatgcccacgctgtgcgtggccgtttggagcagactcagggaccagtgggacctcctcttctgggctgaaggggacgtcacagaagccccaagtgggtcacggcagagcgtcagccagaacctccagggctcactcccaggcctcagtcaccagatgcttcgtggctacctgggttgccagaacctgatgtttttgctgttcgtggtgttggatggctgcaaaggggtgacggcggttcaagcaggcttctga

SEQ ID NO: 116821 - DNA, 1020 bp, Homo sapiens
atgagaagacatgtgaaggaggccatgggtttgcctgtggcttccaggtgcccctctgagacgaagcttccagatgaaggatcaggcagcaacatttgccgttctgcaatatttgctgttctgcagcctccgctggtgatacccaggcaaacagggtctggagtggacctccagcaaactccaacagacctgcagctgagggaagggagctcctcaccagcaatggaacaaagctgcacggagaatgactttgacgagttgagagaagaaggcttcagacaatcggcattaacaaacttctccgagctaaaggaggatggccaaactcattgcaaagaagctaaaaaccttgaaaaaagattagacgaatggctaactagaataaacagcatggagaagatcttaaatgacttgatggagctgaaaaccatggcacaagaactacgtgatgcatgcacaagcttcagtagtcgattcgatcaagtgaaagaaagggtatcagtgatggaagatcaaatgaatgaaatgaatgatggggagaatggaaccaagttggaagacactcttcaggacattatccaggagaacttccccaacctagcaaggcaagccaacattcaaattcaggaaatacagaaaacaccacaaagatactcctcaagaagagcaactccaagacacagaattgtgaaattcaccaaaattgaaatgaaggaaaaaatgttaagggcagtcagagagaaaggtcgggttagccacaaagggaagcccatcagactaacagctgatctctcagcagaaactccacaagccagaagagagtgggggccaatattcaacattcttaaagaaaagaatgttcagcccagaatttcacatccagccaaactaagcttcataagtgaaagagaaataaaatactttacagacaagcaaatgctgagagattttgtcaccatcaggcctgccttacaagagctcctgaaggaagcactaaacatagaaaggaacaaccggtag

SEQ ID NO: 116822 - DNA, 517 bp, Homo sapiens
ttgccttccagctgccctttgctgagggcgcgggcgatggggcgcgcctcgacttcgtggtgcgctatgagacccctgagggcactttctgggccaacaaccacggccgcaactacacagtcctgctccggatcgcacccgctcccacacccactgatgccgaagggctgccccagcagcagcagctgccgcagctggagccacagcccgagtgccagggtcccgtggaggctgaggccaggcagctgaagagctgcatgaagccggtgaggcgcaggcctgccgaggaggaactgaagacgaagaacatggatgataacacctttgccatggcagagcatcctgatgtccaggagtcagtgggtccactggtagcccccacccctctccgtccatggccccagatgacacttcaggtctgctggagtttgttggagttccactccagaccctgtttgcctgggtatcaccagcagaggctgcagaacagcaaagattgctgccttttccttcctct

SEQ ID NO: 116823 - DNA, 621 bp, Homo sapiens
atgctttttccacggaactgtgtaaccaatggatcggaagatcccgctcacgaacccacaccactggagcctagcgtcccaaccctggaacacacagattctcaacagcctctcagctggaatctgtttaagcctactgaactcctggggagaggggtgaccagcaccacagctgtgatttcctgctgtgtaagcctgtttgagctccttgggtgttcgtcagatacccctgacctatctggctatgaggtgtcaggcactgtatttggtgttgctgatatggtgtcaagtacaatgatagagcaagacagaacagcagcaaaaggggtccgatggtactcaccacatggcgaaatcccagatgagcccccaagatatgtccggagttggttccttctggtggttcatggtcttgctgacttcaagaatgaagctgcgggttttcacggcccctctgctgcaggtctgctggagtttgctggaggtccacttcagaccctgtttgcctgggtatcaccagcggagggtacagaacagcaaagattgctgcctgttccttcctctggaagcttcgtccctgaggggcacctaccaaatgctagccagagttcttctgtatga

SEQ ID NO: 116824 - DNA, 1233 bp, Homo sapiens
atggacccagtccttatggatcatagtccaggaaagaggaaacaccggataggagagctcaaggttaccactgactatttcctaacagtacacatgggctccaaaaatcatgttttcacccaaaccagctcttccctggaaaaactatctttctcaccaactgagctgaaggggatgggagtagccccagacaaaaaggtggcaaactcacactgttcttccccaaattccagtgctgctgataagtctgatgacattctggttgccattttttctgtgaacaaaagtgcctgcctgccagctctggagagagcagcagatctcccagcacagaggactggtcaaagaactaccgaagaaaacattcctttggggccaccagtgaatgaaaatgtgagtctagctatctcaggcagatacctctcagcaggggttgacagacacctcatacaggagatctctggctggcatttgctgggtgcccctctgggacgaagcttccagaggaaggaaaaggaagcaatctttgctgttctgcagcctccgctggtgatacccaggcaaacagggtctggagtggaccaccagcaaactccagcagacctgcagcagagaggccttactgttagaaggaaaactaaccaacagaaaggaatagcatcaacatcaacaaaaaggatgtccacacaaaaaccccatctgaaggtcaccaacatcaaagcacgggaacaaaactggacagagaatgagtttgacaaattgacagaagcaggcttcagaaggtgggtaataacaaactcctctaagctaaagcagcttgttctaacccaatacaaggaagctaagaaccttgaaaaaaggttagacgaattgctaactagaataaccagtttggagaaggacataaatgacctgatggagctgaaaaacacagcacgagaacgttgtgaagcatacacaagtatcgatagccgaatcaatcaagcaaaagaaaggacatcagacactgcagatcaacttaatgaaataaagtgtgaaggcaaggttagagaaaaaagaatgaaaaggaacgaacaaagcctccaagaaatacgcgaatatgtgaaaagaccaaacctacatttgattggtgtatgtgaaagtgacggggacaatggaaccaagttggaaaacactcttcgggatattatccaggagaacttccccaacctagaaagacaggccaacatttaa

SEQ ID NO: 116825 - DNA, 1563 bp, Homo sapiens
atggatccaaaccaagataaaatctttgaaatgccagatacagaattcaaaaggttaattattaagctactcaaggagataccagagaaaggtgcacctcagggacgaagcttccagaggaaggaacaggcagcaatcattgctgttctgcagcctccactggtgatacccaggcaaacagggtctggagtggacctccagcaaacagcagcagacctgcagaagaggggcctggttgttagaaggaaaactaaaaaccagaaaagaatagcatcaacatcaacaaaaaagatgtccacacagaaacctcatctgaaactcatcaacatcaaagaccaaaggatcacaactcctcaccagcaagggagcaaaactggatggaaaaatgagatagatgaattgacagaagtaggcttcagaagggtaggtaataacaaaatcctcctaaaggaggagctaaaggagcatgttctaacccaaggcaaggaagctaacaaccttgaaagaaggttagacaaattgctaactagaataaacagtttagagaagaacataaatgacctgatggagctgaaaaacacagcacgagaactacatgaagaatgcagaagcctcaggagccaatgtgatcaactgaaagaaaggacagcagaagatctccaagcacagtgctcaagccctgctaagggacagactgcctcctcaagtgggtccctgactgctgtgtctcctgactgggagacacctcctagcaggggtcgacagactcctcatacagccaggtgcccctctgagagaaagcttccagaggaaggatcaggcagcaacatctgctgttttgcaatatttgctgttctgcagcctccgctggtgatacccaggcaaacagggtctggagtggacctccagcaaactccaacagacctgcagctgagggacctgactgttagaaggaaaactaacaaacagaaagaaatagcatcaacattaacaaaaagcacgcccatgcaaaaaacctatccaaagtgcacaaaactgaacagagaagagtatgacgaattgacagaagtaggcagaaggtgggtaataataacaaactcctttgagctaaaggagcatgttctaacccaatggaaggaagctaagaaccttgataaaaggttacaggaagggctaactagaataaccagtttagagaagaagataaatgacctgatggtgctgaaaaacacagcacgagaacttcatgaagcatacacaagtatcaatagtcgaattgatcaagcggaagaaaggatatcagagattgaagatcaacttaatgaaataaagcttgaagacaagattacagaaaaaagaatgataaggaaaggacaaagcctccaagaaatatgggactatgtgaaaagaccaaacctacgattgattggtgtacctgaaagtgatgaggagaatgtaaccgagctggaaaacactcttcaggatatcatccaggagaacttccccaatctagcaagacaggccaacattcaaattcaggaaatacaaacactactaagataa

SEQ ID NO: 116826 - DNA, 246 bp, Homo sapiens
atggccagccacatctatgaccaaattgacctaagctttcagatgttttccaaaacatcggactgccacagtctgagtgatgaaatgagaagcacgcctacgacgacgctgctgcccatcaaagcacagcggtcctggagaaaagcagctgtgcagctgtttggattgcaagctgaactggccacctttttggtagcacattatttacacgtgacctacagacaaaccacggtcgttcaggcttga

SEQ ID NO: 116827 - DNA, 747 bp, Homo sapiens
atgggctacagctaccgcttaaaaatgtggacggatggactgcgggaggaggggcagtgcgagagcagcagcccatccgtgaagagaggagaagctgggaatgtatggagcgccatttgtcttcagagagccaccaaacttcaagcacactatgactcctccccaagtggcaggcatgggaaccaggggggtgatagctacaagatttcataccaggtgctgcacaaacaccaccatcagcatggacgctgctggccgggagagctggcgcggggctctgcggccctcagctttgccatgcacaaaccctctatttactggatggggaggcccagagcagtctgctccacgggagatggcgagaagctggtgcgggacttctggttgctgcaatacctggcaaaaggaaagtcacagccagagaacgtgactcccggtgagcctggagccagcgtgactgcagagggccagtccccaggtgatgccggtacgctggagaaggcctgggaagatgtgcggagacagacacctgggacacctaaggaccaagcccagagccacgctgctgatgtagcctcatcagagaggcaaacacattcttgggttgatgtggtctatgatcagccctgccaggaacgacgaagaaacatgtaccctaacgtattcaccgaagactccaaactaacacaaacttatctcaaattatcagggaaccagatcatctacagcaaccagaagcagctgtga

SEQ ID NO: 116828 - DNA, 861 bp, Homo sapiens
atgtatttagtcccttgcaacagaactgaaccggagtatggatttattgaaagtgaaatctacaaagcaaatatagacagtcagtctggagctacaattcacaatgcgaactttcgcaagctgctctgtttggagcttcaatctagtcctgcctcccatacacaagaaaacaaacaacagcagaatcgtgtgggatcgaaagacaccggagaacgaccaggaataacaagttgcagacaaaactcctcagacaccgagttaaagaaggaagggttttattcggctgagggtatcggcaagactcctgtctcaagagccgagcgtgtgagaagacttgggccagatctcagaccaagaatccactggctgaagaagctgaattcccaggaagaaggaccctgcaatcccatgacaaacgatcacagctccttgccagctatggaacaaagctggatggagaatgactttgatgagttcacagaagtaggcttcagaaggtcggtaataacaaacttctctgagctaaaggagcatgttctaacctattgtaaggaagctaaaaacgttgaaaaaagcaaatgtaaaaaaacagaaatcacaacaaactgtctctcagaccacagtgccatcaaattagaactcaggattaagaaactcacccaaaaccacacaactacatggaaactgaacaacctgctccagaatgactactgggattccacgattactcaaaaacacacaactgtgataaagagaaaacagcaacctcatacatcagcgtacacaatgcaaggcttgccaattaacaggtgcaaactacagtggggaaagctgcatcagaataaacttcgaacaggataa

SEQ ID NO: 116829 - DNA, 1278 bp, Homo sapiens
atgccctacagagtgcttgtatgcagctcatccagtgatcttgtggtagttagaacctttacatggcagcccagggctccaaaagcaagtgttctaggaaacaaagaggaagctgtaagcccttttatgacaaagccttggacatcagctactctgttggtgaatgcagtctcaagcctactcacattcaagtgggtgtcatgggagccagctcttgctgatggtgaggagcctcattatcttaagacaacacacagtggagatgtgctttacgtaattggcctgccctgtgaaaacccctggctgttttttcaggctcttctagggaaaatttgcgtctgtggccttagtccagaacacaccctagtcttctctggagggaaacacagtcagggaaggaagagattttgtaatgtggacagtgttcggtgttcatcgctgaggaatctgagtactcagcccccactgcacccaggtgaaataaacagccttgttgctcttcacatggatgcgtgtgacactagccagggatggagagtgtgtaatactgagagtagggattattctaggcacctgaatagaacagccagccaggatggcttgttcctgctctcctatgcttctatcattggcagtaaacttgtgcaaacactgggatccctggataccatgaattcagagtctgagcctttcatcttgagctgtagcaggaccacccgcagacaaaactcctcagacaccgagttaaagaaggaaggggtttatttggccggggcatcggcaagactcctgtctcaagagctgagcttcccgattcaattatttggcgcttcctaccatgtacattttcaatttaaagtgaggctacgccaacccctggcaaggcttgtgccccacatgataccaaccagccaagtacctgcttccagaagcaatctgtggacagagcttgcaaaggtccatgagatcactgttgcaaaccggggagaggtcaaggcaagaggaagtatcttgggaacagtgctgggtttcaaagtaggcatcagggcagggctgctagttaaagggggtggtcagcaggcccagagggcccaggttgccctggggaagcctggagaaggctgtgaagttccaagcttaaggcaggcaagggaaggccatatggtgtgtggtgaaaaatggcggaggaaaacagaacaaacaaggctgaggagtgggagcacagctgagaaggaagtgagaagagcacgatgtaacggaagctctggagagcaatga

SEQ ID NO: 116830 - DNA, 630 bp, Homo sapiens
atgacccagcacttttgcattatccccccgcagcccgtgcagcagggccaggcacaggaagccctaccccagaccagtcccaccctagctcagccccacggcggccctccaggactggggcactgtgtcctcacaccgaggctacagctggaccctgtcacttcccgcttttgcatttataacagtcccaactgcagcagtggacaccctgccatcagaatctgctggggagcttttccagagtgtgggtgtcagtcccaccctggcctactggatcggaacccaaaaccaaaagccctgcctcagcgagcaagttcaaagtcattggcccaaaggaaaaactccaagtcctttgttggtcattcagtgagagcatcaggcctgccaacaaccccatggtacaacaagaaaatggctgtgctggagaaatttgactccatggagctgcattaccatatgctgactgtgtgtgtaagcattggacatgtatggaaaaacatcgaaacttcctcagtaaacgaacaggtgcactttatgtatgactgtacgtgtgaaagtactgtgaagacagatgctcaatctgatttaccaaatgaagaggacgcaatcggatattccaactggtcctag

SEQ ID NO: 116831 - DNA, 175 bp, Homo sapiens
ctaacgcttgaggtcaccttcatggtttttccagtgaccttggccattaatgagctcccaccgcttccccagctgcagctgtattatagcgccagagtcttccaagcctgcaggttgtgccaagcctggagggatttgcaaaagtaagtagccagtggtttccgtgcactggtcc

SEQ ID NO: 116832 - DNA, 1079 bp, Homo sapiens
  misc_feature (1)...(1079): n = a,t,c or g
tttcgtgccgggaggaggagagccccttagagaggagctgggagcggaggcgcaggcaatgctcagccctggatgtagctgagaggctgggagaagagacgaccgctggagaccgagcggcgtggggaagacctaggggggtgggtgggggaagcagacaggagaacactcgaaatcaagcgctttacagattattttattttgtatagagaacacgtagcgactccgaagatcagccccaatgaacatgtcagtgttgactttacaagaatatgaattcgaaaagcagttcaacgagaatgaagccatccaatggatgcaggaaaactgggtgatgtctgcgcgacagggaaggcgggagagatgccacagtccagattcgccttacctgtggttcccctcccctcccccggtttttcatctaggattttggggttttcttcgcttgggcctnttccccgcaaccggagttttgaaagggcagtgggaggggagggaccttgttcttcctgttggcctttaaccctctcccgcccgccgcccttggccctgggcctcgctgtctctccatccctcgtgtccttcctttctccttgcagcgctcctacttcaccgtcctcctctttctgccgctcctcaggcggatgccccctttttagtacccctttccccacgcggttccctttccggtttcatagagagaccgggtgggagggaggaggggacaatgaaaacagtaataaatgaatgaacccgagcgagtggagccacgccattattaagtttctgttttacggaaacgccttttggacacacttctaattctgtgcgtagctgctgattggagttcaggcacacagattaaaagcccctccgtctgcagagtccttaggggctcttccctaggaaactaataatcagggaaaacacctttcttgtttactgtagtccccccgccagaccttttgaaaatccctgtgtgggaggcgatccagtgtcaccttgcaatatttaacagaggagggtgtgctcatctcgcttcttgtagacagggttgtggcagaggcattcctctcctc

SEQ ID NO: 116833 - DNA, 295 bp, Homo sapiens
ggatgtgttcggagtttcttccttttggtgggttcgtggtctcactggctcaggagtgaagctgcagaccttcgcggtgagtgttacagctcctaaggcggcgcgtctggagttgttcgttcctcctggtgggttcgtggttttgctggcttcaggagtgaagctgcagaccttcgcggtgagtgttacagctcataaaggtagtgtgaacccaaagagtgtgcagcagccagatttattgcaaagagcaagtgtgaaaggggacccgagcgggttgccactgctggctcgggca

SEQ ID NO: 116834 - DNA, 2277 bp, Homo sapiens
atgctcaaaccccttatgggagggggagcacacagaagggcagctgcaggagccaggaaatgggatggtactgctatcattgcatctacctctggattagaggttctttgggtcactacctctagatcgaagactgttgagagcgtcggactggcaaagccaggacaacataacgatgcacggatgaaccttgccattgctctgactgctgccaggtatggggctgccacagccaattacatggaggtagtgagcttgctcaagaagacagacccccagacagggaaagtgcgtgtgagcggcgcacggtgcaaggatgtcctcacagggcaggaatttgacgtgagagccaaatgtgttatcaatgccacgggacctttcacggactctgtgcgcaaaatggatgataaagacgcagcagctatctgccagccaagtgctggtgtccatattgtgatgcctggttattacagcccagagagcatgggacttcttgacccagcgaccagtgatgggcgagttattttcttcttaccctggcaaaagatgacgatcgctggcactactgatactccaactgatgttacacaccatccaattccttcagaagaagatatcaacttcattttgaatgaagtgcgtaattacctgagttgtgatgttgaagtgagaagaggggatgtcctggcagcatggagtggaatccgtcctcttgttacagaccccaaatctgcagatactcagtctatctcccgaaatcatgttgttgatatcagtgagagtggccttattactatagcaggtggaaagtggacaacttatcggtctatggcagaagataccataaatgctgctgtcaaaactcataatttaaaagcaggaccaagtagaacagttgggcttttccttcaagggggtaaagattggagccccacactctacattaggcttgtgcaggattatggacttgaaagcgaggtggcacagcatcttgccgccacctatggtgataaggcctttgaggtggccaaaatggcaagtgtgactggcaaaaggtggcctattgttggagtacgtcttgtgtcagaatttccatatattgaagcagaggtgaaatatgggattaaggagtatgcctgcactgctgtggatatgatttcacgtcgtactcgcctggcctttctaaatgtccaggcagcagaggaagccctacccaggattgttgaactgatgggcagggaactgaattgggatgattataagaagcaggaacaacttgaaacagccaggaagtttctatattatgaaatgggctataaatctcgatcagaacagttaacagatcgctctgaaattagcctactgccttcagacattgacaggtataagaggagatgtcataagtttgatgcggaccagagaggctttatgaccgttgttgaggtgcagcgtgtattagagagtatcaatgtccaaatggatgaaaatacactccatgaaattctaaatgaagttgatttgaataaaaatggacaggttgaactcaatgaatttttgcagctgatgagtgctattcaaaaaggaagggtatctggaagccggcttgctatactaatgaaaactgcagaagagaacctcgacagaagagttccaattccagtggaccgtagttgtggaggattgtatttctgtgtccggaattggtgggttcttggtctcactgacttcaagaatgaagccgcggaccctagcggagtgaagctgcagaccttcacggtgagtgttacagctcgtaaaggcagtgtggacccaaagaactcaggagcccagttggcttcacccagtggatcccgcactggggctgcaggtggagctgcctgccagtcccgcgccctgcgcctgcactcctcagcccttgggtggtcgatgggactgggcgccgtggagcacggggcagtgctcatcggggaggctcgggcggcacaggagcccatggagggggtgggaggctcaggcatggcgggctgcaggtcccaagtcctgccccgcgggaaggcagctaagacaccgagaaatcacctaagatttcttggagctgcctccactcagctcctcaaactaaaaatgcttacatcggccaaaatctatttcttcatcccaattagttcagcaaagatagactatactattcaaggcttcagtctcaatgccaatacacaagggctctgcacagaccttgcagatacctcatctgtgcacgcagctttagaggtatga

SEQ ID NO: 116835 - DNA, 339 bp, Homo sapiens
atgaagccgcggaccctcgcggtgagtgttacagctcttaaggtggcgcgtctggagtttgttccttctgacgttcggatgtgtttggagtttcttccttctggtgggttcgtggtctcgctggctttaggagtgaagctgcagacctttgcgactcaggagcccagctggcttcacccagtggatccctcactggggctgcaggtggagctgcctgccagtccctgtgcagtgcgcccacactcctcagcccttgggtggtccatggggctgggcgccgtggagcagggggcggcgctcatcgaggaggctcgggccgcacaggagcccacggattgg

SEQ ID NO: 116836 - DNA, 447 bp, Homo sapiens; identical to SEQ ID NO: 114113

SEQ ID NO: 116837 - DNA, 819 bp, Homo sapiens
atgtgggaaagtttgacactttctagagacttcttgaatggctttgaccaaaatgctgatagtggtatagacaataaagttcaggttgaggtggcctcagatgaagatgaggaacttgttgggaactggaataaagaaagggaaaacccattttctggggagaaattaaagccagctgccgaaatttgcataagttacaaggagccaaatgctaatcaccaagataatggggaaaatgtcgccagggcatgtcagagacctttgcagcatcccctcccatcacaggcccagaggcctaggaggaaacaacggtttcctgggccaggttcagggcccacctgggacttggtgccatgcatcccaggtgctcctgccttgactaaaaggggccaaggaaaccaaaatcatggtattctgaaggccagagatatgaatctccgtcatttggcatcccactgggatcggatttgtttcactactaatgctctgctgctaaaaccatacaagttgcctccctctaggcccagggactactgcggaagagctgccttccctcgtggcagggttcgggacctgcagcccgccatgcctgagcctcccacccactccatgggctcctgtgcggcccgagcctccccgatgagcaccaccccctgctccacagcgcccagtcccatcgaccacccaagggctgaggaatgcgagcacacggcacaggactggcaggcagctccacctgcagccccggtgcgggatccactaggtgaagccagctgggctcctgagtctggtggggacgtggagagtctttatgtctag

SEQ ID NO: 116838 - DNA, 720 bp, Homo sapiens
atgggctgcaaacattggatgacctgtggcagagcacggaaagaaggcaaggatgacagctacatgcagacccaatggctccatcgtgccttcgctgctccaccagagacctgtccctttcctctccgggaccacattcagacagggagggacttgtatattctaggtacatttgagaagtgtgtattttggggtggggcagaaagggaggtgtggagggagaggcaccagcgggaaccggggctgcgtgcagcatttgcgggccagttggagttcccagcgggtgtgggcttggcgggccccgcactcggagcagccggccagccctgctggccccggggcaatgagggacttagcaccagggccagtggctgcggagggtgtactgggtcctccagcagtgccagcccaccggtgctgtgctcgatttctcaccaagccttagctgccttcctgcggggcaggtctcgggacctgcagcgcgccatgcctgagcctcccaccccctccatgggctcctgtgcagccggagcctccccgacgagcaccaccccctgctccaaggagcccagtcccatcgaccacccaagggctgaggaatgcgagtgcacagcgcgggactggcaggcagctccacctgcagccctggtgcgggatccactaggtgaagccagctgggctcctgagtctggtggggacatggagagtctttatatctag

SEQ ID NO: 116839 - DNA, 444 bp, Homo sapiens
atggcagaaggtaaaggagaagcaggcaccttcttcacagggtggcagactggaccaccagaaaggcagattgtggttggaatatgttccatggcaaagaaatccaaatccaaaccaatgaaggaaattcttgaacggatctccttatttaaatatatcacagtagtagtatttgaagaggagggcagggctcgggacctgcagcctgctatgcctgagcctcccacccactccatgggctcctgtgcggcccgagcctccccaacgagcaccaccccctgctccacggcgcccagtcccatcgaccacccaagggctgaggagtgcgagcacacggcgcgtgactggcaggcagctccacctgcagccctggtgcgggatccactgggtgaagccagctgggctcctgagtctggtggggaggtggagagtccttatgtctag

SEQ ID NO: 116840 - DNA, 519 bp, Homo sapiens
atgggactgggcgccgtggagcagggggcggcgctcgtcggggaggcttgggccgcacaggagcccatggagggggtgggaggctcaggcatggcgggctgcaggtcccgagccctgccccgcgggaaggcagctaaggcccggcgagaaatggagcgcagcgccagtgggccggcactgctgggggacccagtacaccctccgcagccactggcccggtgcagcggtgggctgaagggctcctcaagtgtcaccaaagtgggagcccaggcagaggaggtgcccagagcgagcgagggctgtgaggactgccagcacgctgtcacctctcctaaccacctggactcagtgatatggtttggctgtgtccccaccgaaatctcatcttcagttgtagctcccataatccccacatgtcatggaaaggaactggtgggagtaggaggtgctgctcaggcaatgcatgctcaggcacacaggactgctcaggcaatgcgtgctgagcaaatgaatacatga

SEQ ID NO: 116841 - DNA, 864 bp, Homo sapiens
atgggccatccagatggagattccaagtatacagttgtagatacggatgtggaacttagaatgaaagagaagaaacataccttgaaagttgtagatgtcctagcatcaacaccagcttgcacaaacatgcgtgaagttcttattgacagctgtgtgctagatacctggtgctgtgagatcacagatgaaatacggcaccggcttgtcgtggctgcggccactgtgactctttacagcatcctccttgatgtctgtgagtggcccagtcccctcgtcacgcagccaggcaaaaaacctgtgtctacatacatttttttcatccatcgttcagccagggtccgcagcttgcagggaggtgtggagggagaggcacgagcaggaaccggggctgtgtgcagcacttgtgggccagctggagttacgggtgggcgtgggcttggtgggccccacactcggagcagctggccagccctgctggccccgggcaatgagggacttagcacccgggccagtggctgcagagggtgtactgggtcccccagcagtgccagcccaccggcgctgcgctcgatttcgcaccgagccttagctgccttcctgcagggcagggctcgggacctgcagcccaccatgcctgagcctcccacccactccatgggctcctgtgcggcccgagcctccccaacgagcaccacccgctgctccacggcgcccagtcccatcgaccacccaagggctgaggaatgcgagtgcacggcgcgggactggcaggcagctctacctgcagtcccggtgcaggatccactaggtgaagccagctgggctcctgagtctggtggggacgtggagagtctttatgtctag

SEQ ID NO: 116842 - DNA, 654 bp, Homo sapiens; identical to SEQ ID NO: 114690

SEQ ID NO: 116843 - DNA, 801 bp, Homo sapiens
atgagggcactgactgcttcttggtggtaccaagtctcaaccaagaaaaacagcagatcatccaatgcctccaataaacagatgactccctttctatatggaagagtatccagggaaattaaaaaagaaaactggaaactcaaagaagagcaaaatcctgtatcaggaagccacggaccaaatctgacaaagactgcagtgtggaatgttttgagctacttgtggagtgtaaagaaaaaggcccacttgaccttcactcttagaacatcgtttgtcaagtggaccaagggaggtgtggagggagaggcacgagcgggaaccggggctgcgtgcggcgcttgcgggccagctggagttccgggtgggcgtgggcttggtgggccccgcactcggagcagccagcaagccctgctggccccgggcaatgggggacttagcacccgggccagtggctgcggagggtgtactgagtcccccagcagtgccggcccaccggcactgtgctcgatttctcgctgggccttggctgccttcccgcggggcagggctcgggacctgcagcccgccatgcctgagcctcccacccactccatgggctcctgtgcggcccgagcctcccctaggagcaccaccccctactccactgcgcccagtcccatcgaccacccaagggctgaggaatgcgagcgcacggcgcaggactggcaggcagctccacctgcagtcccggtgcgggatccactaggtgaagccagctggactcctgagtctggtggggatgtggggagtctttatatctag

SEQ ID NO: 116844 - DNA, 930 bp, Homo sapiens
atgagaaaattttgcaggggcagagatattgagaaacacagcatccagttctacccactcctgggaccctcttttactgtcttcgttaagcatcttctgcatataacttgtggcctgcagcacctggctaagatcttcctccactccctccctgggagactgcacagcctagctgggaaagtcaaagccatcaaggacccagaaaatgttacaagggctcctcaaaagccagcaagtgccagaaccaccacccaagcagctggttgcagagccgactccccgttcttaaagggcctgagcctatgggaccggaagagctccacagtctgcctgtctctggtggtggaagaccactctcagaagcgcgggctgaggcttgcacacagtcagattcccgcgcagcacgtgcacagacccacctctgctcagagtgagcctaaggtaggagcaggagagagagcatgtcttaagagagaaagccaccttcatgaacagacgctcacctgctccattaatgccaagagcagccagccagccctgctggcccggggcaatgggggacttagcacccgggccagtggctgcggagggtgtaccgggtcccccagcagtgccggcccaccggcgctgtgctcgatttctcgccgggctttagctgccttcccacggggcagggctcgggacctgcagcccgccatgcctgagcctcccacccactccatgggctcctgtgcggcccgagcctccccgacgagcaccaccccctactccacggcgcccagtcccattgaccacccaagggctgaggaatgtgagcgcacggcgcaggactggcaggcagcttcacctgcagccccggtgcgggatccactaggtgaagccagctgggctcctgaatctgatggggacgtggagaacctttgtatctag

SEQ ID NO: 116845 - DNA, 3594 bp, Homo sapiens
atgagggagtggaggcgagggagtgggcgatgcaacagggaaggagggaaaaccaaagaggtcagttgtcaagatccctggtgtgggggaggccagcttgatgccactgggagcagcacagagaactgtcagcagagggtggctgtgaataagctaagaatggtaatgcagtttcaggggttagaaaatccaattcaaattagtcctcactgcagctgtacgccgtcaggatttttcatggaaatgatgagtatgaagcccgcgaaaggtgttttaacagaacaagtggcaggtcctctgggacagaacctggaagtggaaccatactcgcaatacagcaatgttcagtttccccaagttcaaccacagatttcctcgtcatcctattattccaacctgggtttctacccccagcagcctgaagagtggtactctcctggaatatatgaactcaggcgtatgccagctgagactctctaccagggagaaactgaggtagcagagatgcctgtaacaaagaagccccgcatgggcgcgtcagcagggaggatcaaaggggatgagctgtgtgttgtttgtggagacagagcctctggataccactataatgcactgacctgtgaggggtgtaaaggattaagggagggttgtggagggattgggcactggggagtggggctctggccccacagctgtggggctgggtggggcttggtgccacagctgttgacacagtctgagatctgttggagtgctgttgtatttggtcttcagtcaccagtgggaaaggtctctgtgacaccatcctggggtactgagcacactcttccatcacgtctggccctggctgtctccttcattcagctcagggatcccattggtgctacacattccccagatggcaatgccaaccctgtctacttatcctgtattaccagcaaggctctgttcctcagtgaatttcctttccattcattttcaaatgacttttctgatatgagcattgttgaatatgcacaagaaagaggcagagttcaggcattggtagcctctcagttgtattatggcaatagtctcctctctctagtctccaatacgcgttccacctttaccttgctccgaggagcttcccaacatacaggtttcttcaggagaagcattaccaaaaacgctgtgtacaagtgtaaaaacgggggcaactgtgtgatggatatgtacatgcgaagaaagtgtcaagagtgtcgactaaggaaatgcaaagagatgggaatgttggctgaatgtatgtatacaggtattcacttcaagcaattacatttcactaaaaatctcttaaggaggcagatgtcaggcttgttaactgaaattcagtgtaaatctaagcgactgagaaaaaatgtgaagcagcatgcagatcagaccgtgaatgaagacagtgaaggtcgtgacttgcgacaagtgacctcgacaacaaagtcatgcaggttaaaagaagaattcagtgcagaagaaaattttctcattttgacggaaatggcaaccaatcatgtacaggttcttgtagaattcacaaaaaagctaccaggatttcagactttggaccatgaagaccagattgctttgctgaaagggtctgcggttgaagctatgttccttcgttcagctgagattttcaataagaaacttccgtctgggcattctgacctattggaagaaagaattcgaaatagtgggctggccaaggctggagcccactcccttagcttgcagggaggtgtggagggagagacgcgagcgggaaccggggctgcgtgcagcgcttgcaggccagctggaattccgggtgggcgtgggcttggcgggcccctcactcggagcagccggccagccctgctggccccgggtaataagggacttagcacccgggccagtggctgcggagggtgtactgggtcccccagcagtgccagcccaccggcgctgcgctggatttctcaccgagccttagctgccttcccgaggggcagggctcgggacctgcagcccgccatgcctgagcctcccacccactccatgggctcctgtgcggcccaagcctccccaacgagcaccaccccctgctccacggcgcccagtcccatcgaccacccaagggctgaggaatgcgagcgcagggcgcatgactggcagacagctccacctgcagccctggtgccggatccactaggtgaagccagctgggctcctgagtctggtatctctgatgaatatataacacctatgtttagtttttataaaagtattggggaactgaaaatgactcaagaggagtatgctctgcttacagcaattgttatcctgtctccagcctgggcaacagagcgacaccctgtcttcaaaaaaagagaaagaaaaaaacccagtaactgcctggagggagttataaaggctgcagcggaacttgctgtgggtttaccctggaacttgggaaagtttcatacaggagatggtacttctgctgggcttcaagggatagccccaaattcagtgggtccaggtcagccagctcccgagtggatgtggggttgggagcggctcttaacagaccaggataaaactcagggaagcgccttcagctgcaccgcaacattccaggacgctcagaagcaattattacaggcgaggttcattcacctctcaggcctgtgggaacaacaggacgggctgtggctttcgaactggctgtcgctgaaaggccagatcggaggacctgctctgactgaaccacttcgcctttcagtgaacagagggacttggccaccgaagctccgagacgcccggaggcgcagcgctggacgcgctgacaggcgagcgcccacgggtcgcgtgcttcccggcagcccgggggcggggcctcagaccacgcccccgccttatgattggtcccttcgaaacaggcggcggccagcggctactgaccctgaggcccaggcggcggcggcagcggcggcggttggtcaggggcgtgttggccccgcacagattgagccgagttgtcgccccgctgggagaagtgaccctcctgcgcctggccccgaagctgaggtttgttgggtctcccggctgcgggagccagtacgctctgcgtttgcctggctgcggcagtcgcgtgctctgattggctcctggggccgtcaaggtgacgttgcgcctgccttcacctgtccacccaatgcggagagaggggcgacaggtgtgcggggcggttggggctgctggtgtgggcgagctcagctggggaggagggatccagccgctactcgccctgctttaaatccagagcggtatcagagcccgaagtccatgcagggtctagaacgcccacatgtgcggaactggggaatagagctggagaccctgcgcgatgccttccgcccacaaccctcagtttggaggactgcccggggagaggctggcaaaagaaagggaaggcttgtagagtgccttggaagtcagaggaaagttttggagggcgtgctcctctatgcagtcacccgtggttcctttcctaatcttttcacaccgagggattga

SEQ ID NO: 116846 - DNA, 654 bp, Homo sapiens; identical to SEQ ID NO: 116005

SEQ ID NO: 116847 - DNA, 444 bp, Homo sapiens
atggaatactatgcagccataaaaaaggatgagttcatgtcctttgtggggacatggatgaagctggaaaccatcattctcagcaaattatcgcaaggacaaaaaaaccaaacaccgcacgttctcactcatagcccttgggtggtcgatgggactgggcgccgtggagcagggggcggcgctcatcggggaggcttggccgcacaggagcccacggagtgggtgggaggctcaggcatggcgggctgcaggtcccgagccctgccccgcgggaaggcagctaaggcccggcgagaaatcgagcacagcgccgcattcaatccttataaacagttgcgaaaatcctatgtatacaaacagctaccagtgccaatacctctgctaagggccacacccttactgcgccatcacagaccctatggaaacactgaggtcctctgctaa

SEQ ID NO: 116848 - DNA, 1560 bp, Homo sapiens
gtaggcctttcttacctggacactactgtttgttctggatatgctaaccactttaaagacgttgatgattctaaacactcattcaggctggccaaggccggagcccactacctcagcttgcagggaggtgtggagggagacgcacgagcgggaaccggggctgtgtgccgtgcttgcgggccagctggggttccgggtgggcgtgggcttggtgggccccacactcggagcagccggccagccctgctggccccaggcaatgggggacttagcacccgagccagtggctgcggagggtgtactgagtgccccagccgggctggcccaccggcactgcgcttgatttctcgccgggccttacctgccttcccatggggcagggctcgggacctgcagcctgccatgcctgagcctcccacccactccatgggctcctgtgcggcccgagcctccccgatgagcaccaccccctgctccacggcacccagtcccatcgaccacccaagggctgaggaatgtgagcgcacggcacaggactggcaggcagctccacctgcagccccggtgtgggatccactaggtgaagccagctgggctcctgagtctggaactaacatttccattacacctggaaatgccacatttgtgacccgggtgcagggacaggcttggtttgcctcatgtatcactggtcatgatatgtctagtttaaaaacttccagtgtcgtggtattaaggagacaatctgaggcacttctaccagccaatttgacatgcaattggcaagattcttctgcccttgccaccttagaaagtgccctgtcccaggtcagacacaaaagattcacatttacacttatggtctttacaggctcagccatagacattatggcaactgttagcattgctgttgtatctattactgaatcagtacaaacaactgcttttgtagataatctggccaaaaatatatgtgatgaacttctcctacaggacatggatgaagctggaaaccaacattctcagcaaaataacacaagaacagaaaaccaaacaccacatgttctcactcataagtgggagttgaacaatgagaacatacggatacagggaggggaacattacatactggggcctgttggtggcagggatgagaagacgctgttgctgaggacttactgtttaaagtcacaagaaggagcagacacaaaatgcagaaataagcacaacaaagagacacagaaacagtccaagtctctggtatactcttccaccctgaatcctgagaaactcttagtgtgtaagagactgtctcttgaactaactcggccagaaaacactctcagatgcactaacatagggaagctaaaagcagtcgcggggggtatgtctgcagcttcaggaatatatctggaaacagacacacaaccctaccccctgaaacaggaattaaaagaaattaaagaatgtgtaggcaaaaactcagttgtagataagcacaacaaagagacacagaagcagtccaagcctctgacaaactctcctgtcctgaatccttaa

SEQ ID NO: 116849 - DNA, 1827 bp, Homo sapiens
tcactcagaataaaggcagaggacgtcccaggccaacagccggcagccttccagacatggcaggaggaccccaggagggatcacgcaacggcaggaggagaaccgactacctgaaggggccatccttgtgggcatatgcacgacatgcaaccccctcaactcttcaggcaggtactcctgatccacaggctcgctgtacatggggttgtacttgtagcctttgccatagcccaaatccttcatcagcctagtgggcgcgttcctcaggtgcaggggcacggggggcagtggcccctggtggttcctcaggcaggctttgacgttgttgtaggcgctgtacacctcaatggactttggggctctggcaaagtagaccacacactgggccagaagcacctcacattcaggcatgcctataaaatgacagccttggtaggcagcaaccgcttgtgttaacgcagatgggtctgccagacctatgtcctcgctggcaaacctgacaagcctccgtgccacgtagagtgggtcctctcctccctcgagcatgcgagccagccagtagagggaggcgttctggtctgagccccgcatggacttgtgcagggcggagatgcagttgtaatgctcctcacctgcccggtcatataaaatgtgggatcgctgtaggccctccttcacgtcattctctgtgatcagaactctactgggagaataggattgcccactcttcttacagaacatcttcctagagcttaacctagccagcaccgccagctgcagtccgttcaacccagctcgggcgtcaccgtcactgaggtaagccagggtgtctactgctttatcctctatgaacatggcgggctctgagctgctgttgctgctgtggctcagagggtcagtgggacggctagagtctaggacgtggattcccagggagttgatcgctcgcattaaaatagtcaccattgcctctactggaagcttctcaagaacaatcactcgacagcggctcagaagagcagcgttgacctgctgagatttattgaaccgatgaatctcatcaataaaaaggatggttttccttttgaaaaagctcttttcattttgagcttgttttatgacatctcgcacatcatttgtcttggcatttgttgcagataatgtcacaaaccttatgctatgtttcttgctgttgctggctatgatgtgagccagagtggtttgaatcgaggagacttccacatctttgctatccattgcgcctggctttgtccactcgctgacttcttcatatataagctcattttccacgagcgggaaccggggctgcgtgcagcgcttgctggccagctggagttccgggtggacgtgggcttggcgggccgcgcactcggagcagccggccggccctgctggccccgggcaaagggggacttagcacccgggccagcggctgcggagggtgtactgggtcccgcagcagtgccagcccaccggcgctgcgctcgatttctcgccgggccttagctgccttcccgcggggcagggctcgggacctgcagcccgccatgcctgagcctcccacccactccatgggctcctgtgcggcccgagcctccccgacgagcaccaccctctgctccacggcgcccagtcccatcgaccacccaagggctgaggagtgccagcgcatggcgcgggactggcaggcagctccacctgcagcccggacatatgtagagtgtgtcggtcagaaggaacacctgagaaaccgctttatcatccttgtgtatgtactggcagtattaagtttatccatcaagaatg

SEQ ID NO: 116850 - DNA, 2770 bp, Homo sapiens
tcagggacagtcccgcccacatttgtgaggacagtcattcaggcacaaggggctcgtacagtcattcagcaatcgttgattgggagcctctatatattcagacactgtgttaggtgccaggggattgagtctgtctttgtcatcattctggagaaccctgaagtctagaagtggcctggagtagccccgtctgcgatctgccgggacgcttccggccgcgggctggcacgcccttggctgcgcaaatccaagtgcctggcctgccaccttgtggacaccaggagtaaaaccgccggtgggctggctccagtgccctctgcccaccttatctctgtgcgccctatctctgaaatgcatctctataagaacttccacttggacgttcagaatgatctctaacatcacctcaccacagccatcacaatcactttccttaattgcataaccatcatctcttggtgacatacggtcatttctccaggaagagattggctctctgcatggaggacctccataattctctcttccacgtgatatgggaccggcactgcgcttgatttctcgccgggccttacctgccttcccatggggcagggctcgggacctgcagcccgccatgcctgagcctcccacccactccatgggctcctgtgcggcccgagcctccccgatgagcaccaccccctgctccacggcacccagtcccatcgaccacccaagggctgaggaatgtgagcgcacggcgcaggactggcaggcagctccacctgcagccccggtgtgggatccactaggtgaagccagctgggctcctgagtctggaactaacatttccattacacctggaaatgccacatttgtgacccgggtgcagggacaggcttggtttgcctcatgtatcactggtcatgatatgtctagtttaaaaacttccagtgtcgtggtattaaggagacaatctgaggcacttctaccagccaatttgacatgcaattggcaagattcttctgcccttgccaccttagaaagtgccctgtcccaggtcagacacaaaagattcacatttacacttatggtctttacaggctcagccatagtcattatggcaactgttagcattgctgttgtatctattactgaatcagtacaaacaactgcttttgtagataatctggccaaaaatatatgtgatgaacttctcctacaggacatggatgaagctggaaaccaacattctcagcaaaataacacaagaacagaaaaccaaacaccacatgttctcactcataagtgggagttgaacaatgagaacatacggatacagggaggggaacattacatactggggcctgttggtggcaggttgccaacatccaaactcgctgttgattgccagctcctgctccttgcagcagcccagcatgctctctgctggtgccaaaatacccttccaccaaaccccgctaacttctggaactgtcctagagggtttcctaccctagcaagtgagcttgcctatgtcagccctaaccttgctcttgtcattcagctgagccagaggaaaaaatttgagctattctggggtggtctacagagaaccatcttctttcccttcagtgttctcagaatattgactgttgatgaacaagccaatgatgtgagtgtggctgcagcaaggacccttcaaattttcagagatgacatgattgtatatctagaaaaccccattgtctcagcccaaaatctccttaagctgataagcaacttcagcaaaatctcaggatacaaaatcaatgtacaaaaatcacaagcattcttatacaccaacaacagacaaacagagagccaaatcatgagtgaactcccattcacaactgcttcaaagagaataaaatacctaggaatccaacttacaagggatgtgaaggacctcttcaaggagaactacaaatcactgctcaaggaaataaaagaggatacaaacaaatggaagaacattccatgctcatgggtaggaaaaatcaatatcgtgaaaatggccatactgcccaaggtaatttacagattcagtgccatccccatcaagctaccaatgactttcttcacagaattggaaaaaactactttaaagttcatatggaaccaaaaaagagcccacactgccaagtcaatcctaagtcaaaagaacaaagctggaggcatcacactacctgacttcaaactatactacaaggctacagtaaccaaaacagcatggtactggtaccaaaacagagatatagatcaatggaacagaacagagccctcagaaataacgctgcttatctacaactatctgatctttgacaaacctgagaaaaacaagcaatggggaaaggattccctatttaataaatggtgctgggaaaactggctagccatatgtaggaagctgaaactggatcccttccttataccttatacaaaaatcaattcaagatggattaaagacttaaatgttagacctaaaaccataaaaaccctagaagaaaacctaggcattaccattcaggacataggcatgggcaaggacttcttgtctaaaacaccaaaagcaatggcaacaaaagacaaaattgacaaatgggatctgattaaactaaagagcttctgcacagccaaagaaactaccatcagagtgaacaggcaacctacaaaatgggaaaaaattttcgcaacctactcatgtgaaaaagggctaatatccagaatctacaatgaactcaaataa

SEQ ID NO: 116851 - DNA, 1038 bp, Homo sapiens
tcatacctctaaagctgcgtgcacagatgaggtatctgcaaggtctgtgcagagcccttgtgtattggcattgagactgaagccttgaatagtatagtctatctttgctgaactaattgggatgaagaaatagattttggccgatgtaagcatttttagtttgaggagctgagtggaggcagctccaagaaatcttaggtgatttctcggtgtcttagctgccttcccgcggggcaggacttgggacctgcagcccgccatgcctgagcctcccaccccctccatgggctcctgtgccgcccgagcctccccgatgagcactgccccgtgctccacggcgcccagtcccatcgaccacccaagggctgaggagtgcaggcgcagggcgcgggactggcaggcagctccacctgcagccccagtgcgggatccactgggtgaagccaactgggctcctgagtctagtgggaacttggaggacctttatgtctagctcagagcttgtaaatataccaatcggcactcggtatttagctcaagctgtaacactcaccgtgaaggtctgcagcttcactgctgaagccagcgagaccacgagcccaccgggaggaacgaacaactccagacgcgccgccttaagagctgttacactcaccgcgaaggtctgcagcttcactcctgagccagcgagaccacgaacccaccagaaggaagaaactcccaacacatctgaacatcaaaaggaacaaactccggacacgtcggcttttaagaactgtaacactcacggcgaaggtctacagcttcactccttgagcccggggagaccaccaaccccaccgggaagaccaaacaactggagaaaccctgggcttaaaagctggaacacttacccggggaaggtccgcaactttcattggctgttctccaagaaggagattgaagacatccgaaataccaccctgcgggacgtgctggtcgctgttatcaacattgaccccagtgccctgcagcccaatgtctttgtctggcataaag

SEQ ID NO: 116852 - DNA, 382 bp, Homo sapiens
cctgcgatcacaatcacgagggggtagatctggatttccattggtggttttcttttcggctgcaatttccttttcggcgctgtgctctgtttctcgctgggccttagctgccttcccgtggagcaaggttcgggacctgcagcccgccatgcctgagcctcccacccactccatgggctcctgtgcggccggagcctccctgacgagcaccgccccctgctccacggcgcccagtcccatcgaccacctaagggctaaggaatgcgagcgcacggcgcaggactggcaggcagctccacctgcagccctggtgcgggatccactaggtgaagccagctgggctcctgactctgtgcctaatgtgggtgatgactgtgaataa

SEQ ID NO: 116853 - DNA, 1041 bp, Homo sapiens
atggtgattattaaaagtcaagaaacaacagatgctggtgaggctgtggataaacaggaatgctttgatactgttggggaaaacttggccctggggagtaacaggaatgaaaatcatatggtaagtcataaggacctgacagagccagagttccgattagtgtctgtcccagcaatgtgccagcagaaaggggaagggttggagttcatccgagctggtaggggatggggctccctgaaagcctgcaaagagccctgggatatgatccatcttcagatctctcagccacggataccactacctgttccagtggaggccttcagtgagaaaagtaactgcagatatggtggaaatactaagataactacaataatggagcctgaagctataactaagtttcagaaatcttgtgaaatacactcaggagcccagctggcttcacctagtggatcccgcactggggctgcaggtggagctgcctgccagtcctgcgccgtgcgctcgcattcctcagcccttgggtggtcgatgggactgggcgccgtggagcagggggtggtgctcgtcggggaggctctggccgcacaggagcccatggagtgggtgggaggctcaggcatggcaggctgcaggtcccgagccctgccccgcgggaaggcagctaaggcccggcgagaaatcgagcgcagcgccggtgggccagcactgctggggtacccagtacgccctccgcagccactggcccgggtgctaagttccccagtgcccggggccagcagggctggctggctgctccgagtgcggggcccaccaagtccatgcccacccggaactccagctggcccgcaagcaccgcacgcagccccggttcccactcgcgcctctccctccacacctccctgcaagctgagggagtgggctctggccttggccagcccagaaaggggctcccacagtgcagtgggggctgaggggctcctcaaatgccgccaaagtgggatcccaggcaggggaggtgccgagagcaagcgagggctctga

SEQ ID NO: 116854 - DNA, 642 bp, Homo sapiens
ctaacaagataatggtgtcaaggacaggtttttagcaaaatgcactgcattttccattcgaacaataaattgtttccaatggttgtctcttcttttatcatctcgggtttttgttatttcatcctctaagtgatcccaaagctgccccgaggtatacaaatcaaattcagtgcatgtgcagctgccacattgcttcttgggttttgcaccgtcaaaatactttgatattggctcagaacctgagaacttgtttgacatattctgatattctgtaatttttccattcccttcttcacaatgtggtgaacaaaaactaccaaatgagtagcgtgccttagctgccttcccgcggggcagggctcgggacctgtagcccgccatgcctgagcctcccacccactccatgggctcctgtgcggcccgagcctccccaaggagcaccaccccctgctccacggcgcccagtcccatcgaccacccaagggctgaggagtgcgagcgcacggcacgggactggcaggcagctccacctgcagccctggtgcgggatccactgggtgaagctagctgggctcctgagttgtttgggtccacgctgcttttaagagctgtaacactcaccgcgagggtccgtggcttcat

SEQ ID NO: 116855 - DNA, 999 bp, Homo sapiens
atggataggcctgaaacctgggtacacaagggcagacctgacgcctatgtctgcaaatatttgcctacatctgtagaggctggccttatccttgggtccacagggggctacttggctctgggattggctttgagtctgagtctgcaggaaatagtcagttactgggatggatctgatgtccaggattataggggacagcccagtgctggagaagttccagaggctgggctgctaaggggtcctggacaaggtcgcttggatagcggcctaaccacagcattatacatgctcaggaagaggcaaagccggaaatttaccacttggcaaagcgtctttacaaaaccagagtttggctttgtggtagcttccttagaacttatctacaaggaagtaatgaattcagaagaaaagactaaaaatggtgtagtaaaaggacagccttctccttcagcttgcagggaggtgtggagggagaggcacgagcgggaacccgggctgcgtgcggcgcttgcgggccagctggagttgcaggtaggcgtgggcttggcgggcccccgcactcgggacagccagccagccctgctggccccgggcagtgagggacttagcacccgggccagtggctgcggaaggtgtactgggtcccccagcagtgccggcccaccggcgctgtgctcgatttctcgccgggctgtagctgccttcctgcggggcaaggctcaggacctgcagcccgccatgcctgagcctcccacccactccatgggctcctgtgcggcccgagcctccccgacgagcaccaccccctgctccatggcgcccagtcccagcgaccacccaagggctgaggaatgcgagcgcacagcgcaggactggcaggcagctccacctgcagccctggtgcgggatccactaggtgaagccagctgggctcctgagtctgtgactaaacaagaaaaggaggaggaactgctaccttcacaagacatgaaaacccag

SEQ ID NO: 116856 - DNA, 1700 bp, Homo sapiens
tcacacagattttctcttgttgtcttctaggagttctatgattttgcattttacatttgggcctataatccattttgagttaatttttgtgaaacatgtaagatctttgcctagatgttttttcaagtgtttggccagttcttcagcgcaatttgttgaaaacaatatctttgcttcattgtattgctttgtcgctttgtcaaaggtcagttgactgtatttatttggctctatttctggagctctattctgttccattgacatgacttcaagcgtagaagccgcggaccctcgcagtgagtgttacagttcttaaaggcggcgtgtccggagtttgccccttctgatattcagatgtgttcggagtttcttccttctggtgggttcgtggtctcgctggctcaggagtgaagctgcgggaccttcgcggtgagtgttacagctcttaaggtggcgcatctggagttgttcgttcctcccggtgggttcgtagtctggctggcttcaggagtgaagctgcagaccttcgcagtgagtgttacagctcttaaggcagggcgtctggagttggtcgttcctccctttgggctcgtggtcttgctgggctcaggagtgaagctgcagatcttcgcggtgagtgttacagctcttaatgcactgcgtctggagttgttcgttcctcccggtgggctcatggtctcgctggcttcaggagtgaagctgcagatcttcacggtgagtgttacagctcataaaagcagtgtggacccaaagacccttgggtggtcgatgggactgggcgccgtggagcagggggcggcgctcgttcggggaggctcgggctgcacagaagcccatggagggggtgggaggctcaggcatggcgggctgcaggtcccggagccctgccccgcgggaaggcagctaaggccctggcaagaaatcgagcgcagcgccggtgggccagcactgctgggggactcagtacaccctccgcagccactggcccgggtgctaagtctcccattttgcccagagccagcagggctgcctggctgctccgagtgcggggcccaccaagcccacgcacacccggaactccagctggcccgcaagtgccgcacacagccccggttcccgctcgcgcctctccctccacacctccccgcaagctgaaggagagggctccggccttggccagcccagaaaggggctcccacagtgcaggggggaggctgaagggctcctcaaatgccaccaaagtgggagcccaggcaggggagaagaattgtggcattcacgatagaagtgggggtgttgagggaagatctgttttgaatggtgatcctactttgaacattttgggtgtagagcagtacgaggccatcaggtatccaggtggagatggcatactgctgagccagcaggaaaaggcaacaggacgaggggcaggatttgccactggaatgtcagcaggccatacctcaggcgttcagctccatggagcaaagacagtagtgatcacgttccttgacaacagtgctagtgtgcggggagcttttagttttccttttctctgctccttgaaccaagaatccagcatcagcatcagcatcagcatcagcatcagcatctgctcagctgtaggccatgattgtctgtactgtttaccagcagctcatgtaatatgcttgatgtaa

SEQ ID NO: 116857 - DNA, 266 bp, Homo sapiens
tgaacacagcgctgttacggatcggcggagacttggtccatgagtggcgttgtcaggcgaggaatatggctgcgctatgtcgtgtctcttgggagccgccatcttagcacccattccgtacagtgggctgttccacagaaggcgggggcgagagggcgttcacgggtagaatccctctaagggcaagattctgggagaagctggtctttggaactcggttctataagtttgggcaaagtttaaagaagcagaggtgcgccacgaaa

SEQ ID NO: 116858 - DNA, 366 bp, Homo sapiens
atgagtgggagtcgaaaggcaaaagttaggtttgtggatgtgcaaggaccattgatgatagaagttacccgtgggagattcggggccctcagtttggcagtgcctcctactgccatcacaggctacagtgatcttgtaaaagggttacacaaccatggaggagctaagggagccttctggcttacctgtcacattagagctgagggctctttctctgttcaccatttgggcaaagagattgaaagaggggagtcacataatcagcatacgtttatgaagattacccccacagctgtgtggcaagtgatcaaaaaggaacaggaccagagaagagcaggaaaactggtcagaaagcaggcgccctaa

SEQ ID NO: 116859 - DNA, 421 bp, Homo sapiens
cacagcggctctgggagagggtgcacggtggatgtggccaggtacggtggccgagatcatgaggacagcgggactttcgtcgatctacctgtcagtggcgatgtacaacccccaacctgctgaggggcagaggctcagaggccagtaaccaaaaggtagacactggcagatgccagaggtgggcactacacctgacttccctccccatgactctcggcaacccggcaagacccttaccacacagacgccactccgaggggagggggtcctcaggcgtgtgtggctgccttctcagcccctgaggtcccgcagaagtgccccatcttacatgcaagaactcttaggcagaacaggggcttgagagaccaatgaagttttgacgtttgctgagacagaactaaggtgactttttttgacgaaa

SEQ ID NO: 116860 - DNA, 550 bp, Homo sapiens
atggtggacacccctccctccaccaagctcaagcattccaggttgacttcagactgctgtgctggcagtgagaatgtcaagccagcggatcttagcttgctggtctccatgggggtgggatctgctgagctagacgactcggctccctggcttcagtcccctttccaggggagtgaatggttctctctcgctggtgttccagggcacccctgggttgtgaaaaaaaaactcctgcagctagctcagtgtctgcccaaatggccgcccagttttgtgcttgaaacccagggccctggtggtgtaggcacctgagggaatcctctgggtctgtgggttgcaaagaccgtggggaaagcatagtatctgtgccggaatgccccgttcctcacggcacagtccctcacggcttccatgggctcagcaagggagttccctggccccttcccgtataagacgacgccccaatgtgctaaggatccgcctctgtagggtgcaccacctttataaccagtcccagtgagatgaggagcgtggacgcggcctcggtcat

SEQ ID NO: 116861 - DNA, 599 bp, Homo sapiens
  misc_feature (1)...(599): n = a,t,c or g
aaaattggtttcagatacttgtggtcaaagctataccacattctgaagccaattttaacccactctggtcctccgctgactacaacattacctgaatggtgtggtccgatttccaggctgcttaccagtcctcaagcctatggggaacagctaaaagaggatgatgtcggaatgcattgtaacccagggatgaactacccataaattacccaggagcaagcctcctcaccctgcagtcctcctgccaaggcttaggtctggaccagaaagcttcaccccagaccgccaggcanacggaaaacatttatgagggagacctcggccctgggaggctatgaactcaagcttgagcaaactttgggtcaatcccagtttgaattaattggcatgaagagtacagatgtaatcacaagtaatgcaagactcactgaggaatacaagccaagctgatgaggcagtacaggggagaggctggaaaacatattaagagcataaattggagagaatcaaagccttgtcacatggatcctctggtgcctgaagaaatgagattttattatccctctctattatgcaaatgaatttagttttttgacagc

SEQ ID NO: 116862 - DNA, 993 bp, Homo sapiens
atggagaaattggaatctttgtgcactgttggtgagaatgtaaaagggtgcagctgctatggaaaacaacttgtgtcctttgttggtggaagagcatctgcctgggttctttcttgtcagagctggagtggcaccagtcatggtcccacagtggagagtaacatgcttttagctattctgtccttgaggaaaaagcacccagagcctgcagtgcacacagtcagccttggtcagccacccctcatgactgacacccactcgctgctcttgggcattccaggcataattctgtgtctacatgaaccagtagaaggaacggcaaagggcttggcacctgtaacccaagggctagtccatagcgagggatgtgggaagaagtgtttgcagttgctgggaaggggcagtgaggaaataaagctgctacagtctttcctgtttgaggaacagctaaaagaggatgatgtggaatgcattgtaaaccaggatgaactagccataaattaccaggagcaagcctcctcaccctgcagtcctcctgcaaggctaggtctggaccagaaagcttcaccccagacgccaggcaaggaaaacatttatgagggagacctcggcctgggaggctatgaactcaagcttgagcaaactttgggggttgcctatggctgggtgtgccctgccctaaatgcagcaccactttcaagcttagtaggaccattccaagaaaaccaggtttcttctccccataccacgttgtgcctgaagaacaagccttcccgtccttgcctgcatctcttgtactcagagtgccagctgaagcaggcactgaaagctaatgtatgggacatgcagggatcctgtgggccagaaacagctaacagactagcaagacaagtcactgaaggaatgaagagagcagggatggactggggaggcgtcccagagaagggaaacctgagtcaagcagaggggcacagatgccgcctttcccactag

SEQ ID NO: 116863 - DNA, 369 bp, Homo sapiens; identical to SEQ ID NO: 114809

SEQ ID NO: 116864 - DNA, 321 bp, Homo sapiens
atgaagaaaacaccaattcttgaatttcctccttcttgctgtgggaaatgtatagctgatgaagcccattcccttgtccacaacccacacatatcacggagcagaaaacgccagtctgaaagtcaaaggaagaagtgtagcaggacaagccgcagacaaaacccctcagacaccgagttaaagaaggaagggctttattcagccgggagcttcggcaagactcacgtctccaaaaaccgagctccccgacatctggacgtcaatccagtcctacttctgttgaatgccgcagagtacactttaaaccgttgggacctttaa

SEQ ID NO: 116865 - DNA, 779 bp, Homo sapiens; identical to SEQ ID NO: 114810

SEQ ID NO: 116866 - DNA, 646 bp, Homo sapiens
atagcaatgcctcggggagcttcctcactctgtcctctgtctgcctttcagctgtgagaggaactgcaggccagttaatgccagcaaagacattctgctcagggtcaccatgggggaggactctccagtggctatgttcagctggtatttggacaacaccccaacagagcaggctgagcccctcccggatgcctgcagactcagaggattttggccaaggtccttaaccctcctccagagcaacacctccacgttgctgttgaacagctcgtttctgcagtcccggggagaggtcatccgaatcagagccacagcactgaccaggcatgcctatggggaggacacctatgtgatcagcactgtgcctccccgtgaggtgcctgcctgcactattgccccagaggagggcaccgttctgacgagctttgccatcttctgcaacgcctccacagccctgggacccctggagttctgcttctgtctggaatcagtctgccatgtcttcagcatccagggaatatggtgcacggcatccgttgagatactgcggctgctgggcaagagggcaagagctttcctggaccctcacttgacgaatctgggcactgccaaccagcttggagttcccatcagtgataaagcctaa

SEQ ID NO: 116867 - DNA, 564 bp, Homo sapiens
cagttcatgttatctatagatttacagacattgtacaagaaaagcactgtgaaaatccgtgtcctgttctgttctgttctaattaccggtgcatgcagcccccagtcacgtaccccctgcttgctcagtcgatcacgaccctctcatgcagacccccttagagctgtgagcccttaaaaaggtcaggaattgctcactcggggagctcagtttttggagacgtgagtcttggccaaagctcccagccaaataaagcccttccttctttaactcggtgtctgaggggatttgtctgcggcttgtcctgctacagggttacagggcgtgagtaaccacatccaggcacatgtgtattaactttctttaaaacattttaaggcactgcagtaaatttgggtctcaaagttggacacaagaagatccatggccaggtgtagtaagtagctcttgcctataatccaaacagtttggaggctgaagggggaggactgcttgaggctgcagtgagccatgatcgggccactgcaccccagcctgggtgacagagcaagtcaccattgtcaa

SEQ ID NO: 116868 - DNA, 408 bp, Homo sapiens
agtgtgagcccggcgcctacaacgcaacaccccgcgctcctctccggctcccccgccgtgcggatcggagccagccggttgttgccatggcattcgccagctggtggtacaagacgcatgtcagtgaaaaaaccagtgaatcgccttccaaaccatgagaaaagaaaggatcatatgagaaaaaagcagcaagcctcggcagcagtcaatcctccagaacctatgctggtggaacagcctctgtcaccaaggtgtcagctttctctggtgcaaccagcaagtcttacagtatgaatcccacagaaaccaaggctggtaaaacagatcctgagaagaagtcacagtgtaccaagccaatgagcctacccaagcatgcatcagatactggaagtagcgatgctcacaata

SEQ ID NO: 116869 - DNA, 1512 bp, Homo sapiens
  misc_feature (1)...(1512): n = a,t,c or g
atgttcccggggaaggacaagcgggccagcaggcgggccgcggccaatagtccccaaggcgcacggggacaaggagaggcacacaggccaggccgcgtccacgcacaggcagggccacgcgcagtggcggaaggccaggcacgggcacagggcgcacaggcgcggccaaagcggcccaagttggaaggtggtggaaggatgggcggcgtcacatggtcaggcagtcagcaggggcttgggcggaatgggggtaagccaggggtgcacacggggaggccgtggttggccacaggcacacatgccacatggggcagttgcacaagggcatggcaggtcatgcaggtcacccaggcagcaccaccagcaggggcagagggttctgcccacctggcaccgccttgggatgtgcggagctcagtgccagcccggtcccggccaagcgagtgtgagcccggcgcctccaacgcaacaccccgcgccctcgccggctccccgccgtgcggatcggagccagccggttgttgccatggcattcgccagtggtggtacaagacggtaaataggagcggttgtgcctgggcaggacccgaagggagtgtgttggaagggagtgtgtttgctttgcccttctgggcgtgggatgaagcgttgtccggggtttggcggggaaggggtgcggaccgggtggacctcctcgcagaccttcagagggcgattgttggacgtacttcgccgacgcaaaggagaggcagctgcaatgtgaggcaaggagaaaatccaaacatcaaggggcagaagcaactgagatctgagaccaagacccttgagagagcggtggaggggtggaggaaagaaagcgagaaaagcttgtcagctgtgatgagcacattgtccttagccctgctctcatctatgtccctgctaactaaatctcctcagacctacagctgtttggaggtgaatatgcacaatgctggcctgttctttcttcctgtgcggctgactttccgggtcctcagtttccacagtgaagcccaggtctacatgttcacgttacggtttttagcacccagaaagttttttcctctatcttcatttaatttcattactcagtccccacctcccaatgaggaaagaaaacctgccgtttgggtcagttcaagtcaggtctaccattggtccagtcaactgtggctgtggagaagagggatagagcaatggggagccatgatgggatctggaatctactccaaaggaggaacagggtggatnacaagcgacctgcttgtgcgatcgacacctcgactgaggactttgaccgcggactatgacaacccgctgtcgcacaacttgaacgcgctctccaccgtacccacgcggctgcactacccatccataaagcatgattccgcaacgcatacgaccacgcagtcaactaagcacaccgccatcttcgcgcccaccgttagcgacacagctaccgatatatatacacagaccagctaccggtag

SEQ ID NO: 116870 - DNA, 405 bp, Homo sapiens
cccacgcgtccggccgctgcgcccgcccgtcatggtgtcccgggaccaggctcacctgggccccaagtatgtgggcctctgggacttcaagtcccggacggacgaggagctgagcttccgcgcgggggacgtcttccacgtggccaggaaggaggagcagtggtggtgggccacgctgctggacgaggcgggtggggccgtggcccagggctatgtgccccacaactacctggccgagagggagacggtggagtcggaacctgcgggacacgcaggctgtgcggcactacaagatctggcggcgtgccgggggccggctgcacctgaacgaggcggtgtcctttctcagcctgcccgagcttgtgaactaccacagggcccagagcctgtcccacggcctgcggg

SEQ ID NO: 116871 - DNA, 1026 bp, Homo sapiens
atggaggctgaggaccgaggggcccctctttgtgtctatgctctgtatctcccgccgagcggcaccagcccgggcagcttcattaagggcctccgccagctctgcagctcacctgctgcagcgcccctcgcgctccgcaaggacattagaaaccgtcaaccaagattaatagttgcccggctccggggcagggagatgagcccagatactgcggcggcggcgctcgcttcgcgcgagccaacccggcacgggctgggcgcaccacctgccgctgctgtcgctccactccgccttcctttcttctcctcctaccactcgcccgcgcacctgaggctctcagctcaaaacgttgccgagacgcttcgatactatcaaagcaaagagactgagatcgcggcagctatagatctgataaatcagcttgatatgaataaacttgagcaaatagttgctgatgtgaataaggcgaaatctgattctcaagctgcgcaaaatcaggctgaattagcgcgtgacgatgcggtaagatcaaaagatgcggcatctgttagcgctcaagaagctaaagacgcagctaacagcatcaatgctgaaaatcttttaactaaggatggaaacttggctggtcttgaggataaaaaagagtcaagaaaaaatattgggttaggtgaaaatgatgctgttaactttcttactattaacaccacgggtgctataggtgcaggaaggaactcatgggacggttctaactggggtagtaagaccatgttgtcatcattgatgattatgtcacctgatggaatatcctcgccagggatttacggtaatgcttacaccgctgatagtggtgctgaaaactatcaatcacttattgctggatcgtgcgacaccagaggtctgggatacgttggcggcgtagcatttggcatgatgactacgggtttatggcttcagggcaaatatcttacgctggaccgcaaggggctggaagtttccaacaggttccggcatctgacagaaatataa

SEQ ID NO: 116872 - DNA, 1044 bp, Homo sapiens
atgccaaactgtaaggcttataaggtgaccaatggaggacacagaccctttctgaccatcctctacaaaccttggaaagcaaatctatcaaccactcttaaactgaatcctgatcaacgatgctcaactacgctcattttttttttcagagatgccctactttgcacatgtttctccctcgttgtccaaaaaaagccctcctactgtgtcttactccgtggcaataggcgtctgtaccaacagaaaggactggctggggttgtctgggctgagaggccctcccgcaaaccccctcacccaaatgcaatccggctgaccattgtgtggggattctccagcattttgaaccttttctttggtcagaaatacttgaatgactcagagagtttcccaataaaagatgaattgccaggaggtcttcaccacggggctggaagggtaatgcttacaccgctgatagtggtgctgaaaactatcaatcacttattgctggatcgtgcgacaccagaggtactgggatacgttggcggcgtagcatttggcatgatgactacgggtaataatgaatggcccagggcacaaatatcagtaggcactcaagatagggatggatcaggcaatattggtctgcaaatgcatttcaggtttatggcttcagggcaaatatcttacgctggaccgcaaggggctggaagtttccaacaggttccggcatctgacagaaatataaagcacagcataaaggatgatgaatcaagcattgcatacaacaacataaaatcaatgagatttaggaactttatatttaacgatgatgagcaagaaagggtaaggagaggtgttatagctcaggagatagaagagatcgacaatctatatgttaagagaagggtgtatgagagccacgagctaaacgggccaaaagttgaaaggcttgagcttgatacaactcctttattgcttgacactatgagagctttacaggatacaataaagaaagttgaagagttacaagaagagataaaaatgttgaagtccaaatga

SEQ ID NO: 116873 - DNA, 1575 bp, Homo sapiens; identical to SEQ ID NO: 114748

SEQ ID NO: 116874 - DNA, 1356 bp, Homo sapiens
atgggcaaggacttcatgtctaaaacaccaaaagcaatggtaacagaagccaaaattgacaaatgggatctaattaaactaaagagcttctgcacagcaaaagaaactaccatcagagtgaagaggcaacctacagaatgggagaaaatttttgcaatctactcatctgacaaagggctaatatccagaatctacaaagatctcaatcaaatttacaagaaaaaaacaaacaaccccatcaaaaagtgggtgaaggatatgaacagacacttctcaaaagaagacatttatacatccaacagacacatgaaaaaatgctcatcatcactggtcatcagagaaatacaaatcaaaaccacaataagataccatctcacaccagttagaatggcgatcattaaaaagtcaggaaacaacagaactaaaaaaaactactttaaatttcatacggaaccaaaaagagctcgtatagccaagacaatcctaaacaaaaagaacaaagctggaggcatcacactacctgacttcaaactatactacaaggctacagtaaccaaaacagcgtggaagtggtatacagagagtaagaacacagatgtaaatgcattcataatgctcacatatccaacagcaatcatacacacccacaataagggtaatgcttacaccgctgatagtggtgctgaaaactatcaatcacttattgctggatcgtgcgacaccagaggtctgggatacgttggcggcgtagcatttggcatgatgactacgggtaaggatgttaagccaaagatgttaactggcttcgaccatgggcatgcagtgtgtcttctgctctacctacaacttttcacaatgagagcaatatttcagtacgcatatttcaggattctatacattgcattatataagaatcaagaaaagtcccgaaggtgtacgactgaccaatttgcctgcgtccctgggcaacagtgcatcccagctttatctctctgcttacattctggaagcaggcaaatagctctcatgatgtttatatggatttttacaactgctaatactcgaatatttggagttttcctgatcttgttggatgtggctctgatctttgctgacctaattttcactgatagcaaagtttatattcctttggagtatcgttctatttctctagctattgctttattttttctcatggatgttcttcttcgagtatttgtagaaggacaccaaagaacatctgctagcatcaacactgtccgagaaaacatgacctcaccaaatgaactcaataagacaccagaggccaatcctggggaaacagagatacgtgacctttcagacaaatcaaaatag

SEQ ID NO: 116875 - DNA, 3726 bp, Homo sapiens
atgggtaagaggttgggccagaccaacgagggcttgatccccgtgagtatgcatcgatcctggcttgctgtcaaccaggctcttcccgtgtccaacacccacatgaaaaccagcaatctagcaccccccaaaagtgggaaagcctgtgtgaacacagcccagctatctttgtcacagcctggcaatgtagaaggaaaaaaggccattttcagagcaaacttcaagaagacttcagatatttgcattaaaaagaagaccagtgttaacagagaacacgttactaatgggtgcacctgggtttggggatcagggaagacagtggacatggactcgtaccaatacctggactcttcacacaccaaatcctgggggccaggcactgttgtaggtgccagatatttaattcacatcacagatgtgccattcttgcttctactcctgccatatgaagcatctccttgcccgttggacttctggccctgcggcctagaagagaaaaatggtttcctgggccagctccatggcctccctgctgtgtgcatcctcaggacactgctgcctgcatccgtgcagctccagctccagccatggctgaaagatgcacagccctcacacccctgtgccatggatgtgggacaaggattccaaaaggatgattttggagctgtaggattgaatgactggcctgctgcattttggacgttcatgtatcctggtaatgcttacaccgctgatagtggtgctgaaaactatcaatcacttattgctggatcgtgcgacaccagaggtctgggatacgttggcggcgtagcatttggcatgatgactacggatggggacattggttttggacctttacaacagaggatgtctgaagaagtttctttccagtctgagattaatattaatctcttcacaagagatgacccatattccattttagaagaattgtggaaagacgatgaacacacaagaaaatgtggagaaaaccagaacaaacctttaagtcgtgttgtcttcattaacaagaaaacactagctaatgacagcatctttgaatataaggacattggggaaatagttcataaaattcatactagagagagcctctatttgttttctgactacgtaaatgttttctccccgaagtcacatgcctttgcacatgagagtatttgtgctgaagaaaagcagcatgaatgccatgaatgtgaggcagtcttcactcagaagtcccagcttgatggcagtcagagggtttatgcaggaatatgcactgaatatgagaaggatttttccctcaagtcaaaccgtcagaaaactccttatgaggggaattactataaatgcagtgactatggaagagcctttatccagaagtcagatctgttcagatgccagagaattcattctggagaaaaaccttatgagtacagtgaatgtgagaaaaacctccctcagaattcaaaccttaatatacataaaaaaattcatactggagggaaacactttgaatgtactgaatgtggaaaagctttcacaaggaaatcaacactaagtatgcatcagaaaatccatacaggagaaaaaccttatgtatgtactgaatgtgggaaggcctttatccggaagtcacattttatcacacatgaaagaattcatactggagaaaaaccctatgaatgcagtgactgtgggaaatcctttattaaaaaatcacaactccatgtgcatcagcgaattcacacaggagagaatccctttatatgttcagaatgtgggaaggtcttcactcacaagacaaatctcattatacaccagaaaattcatacaggagaaagaccctatatatgtactgtgtgtggtaaggcctttactgacaggtcaaatctcattaagcaccaaaaaattcatactggagagaaaccttataaatgcagcgactgtggaaaatcattcacctggaagtctcggctcaggatacatcagaagtgtcatactggagagagacattatgaatgcagtgaatgtgggaaagcattcattcagaagtcaacattaagtatgcaccagagaattcatagaggggaaaaaccatatgtttgcactgaatgtggtaaggccttcttccacaaatcccattttattacacatgagagaattcatactggagagaaaccctatgaatgcagtatttgtgggaaatccttcactaagaaatcacagctccacgtacatcagcagattcacacaggagagaaaccctataggtgtgctgaatgtggaaaggcttttactgacagatcaaatctctttacacaccagaaaattcacactggagagaaaccttataaatgtagtgactgtgggaaagccttcactaggaagtcaggtctccatatacatcagcaatcccatactggagaaaggcattatgagtgcagtgaatgtgggaaagcctttgcaagaaaatcaacactaattatgcatcagagaattcatacaggagagaaaccctatatttgtaatgaatgtgggaaatccttcatccagaagtcacacttaaatagacacaggagaattcatactggagagaaaccctatgaatgcagtgactgtggcaagtctttcattaagaaatcacaactccatgagcatcatcgaattcacacaggagagaaaccatatatatgtgctgagtgtggaaaggccttcaccatcagatcaaatcttattaaacaccagaaaattcatactaaacagaaaccctataagtgcagtgacttggggaaagccttaaactggaagccacaactcagtatgcctcagaaatctgacaatggggaagtagagtgctccatgccacaattatggtgtggggactcagaaggcgtcagaaaaatggctacaaacttcctagtacatgagaagatctggttcgacaagttcaaatatgacgacgcagaaaggagattctacgagcagatgaatgggcctgtggccggtgcctcccgccaagagaacgacgccagcgtgatcctccgtgacatcgcgagagccagagagaacatccagaaatccctggccggaaactcaggccccggggcctccagcggccccagcggagaccacagcgagctcgtcgtccggatcaccagtctgaaagtggagaaccagagcctgcgcagtgtggtacaggagctgcagcaggtcatctccaagctggaggcccggctgaacgtgctggagaagaactcgcctggccaccgggccacggccccacagacccagcacatgtctcccatgcgccaagtggagcccctggccaagaagccattcacaccagcagaggatgacgacgatgatgacactgacctgtttggcagcgacaatgaggaggaggacaagaaggcggcacagctgcaggaggagcggctgcagcagtacgcggagaagaaggccaagaagcctgaactggtggccaagtcctccatcctgctggatttcaagccttgggacgatgagactgacatggcccagctggaggcctgtgtgtgctccatccagctggaagagctgctggtgcccatgggctacggtatccggaagctacagattcagtgtgtggtggaggacgacaaggtggggacagacttgctggaggagatcaccaagtttgaggagcacgtgcagagtgtcgatatcgcagctttcaacaagatctga

SEQ ID NO: 116876 - DNA, 757 bp, Homo sapiens
  misc_feature (1)...(757): n = a,t,c or g
ggcgggcgtgggcgagttcgaggcggccatcttcaaaaatggtcagactctggagcatgccctgctggcctacacgctgggtgtgaagcagctcatcgtgggcgtgaacaaaatggactccacagagccggcctacctcgagaagcgctactactagatcgtcaaggaagtcagcgcctacatcaagaagatcgggtactacccggccaccgtgccctttgtgcccatctccgggtggcacggagacaacatgctggagccctcccccaacatgcctgggttcaagggctggaaggtggagcgtaaggagggcaacgcaagcggcgtgtccctgctggaggccctggacaccatcctgtcccccacgcgccccacggacaagcccctgcgcctgccgctgcaggacggtgtacaagatttggcggcattggcacggtgcccgtgggccggtgttggataacggcatcctgcggccggggnatggtggtgacctttgcgccagtgaacatcaccactgaggtgaagtcagtggagatgcaccacgaggctctgagcgaagctctgcccggcgacaacgtcggcttcaatgtgaagaacgtgtcggtgaaggacatccggcggngcaacgtgtgtggngacagcaagtctgacccgccgcaggaggctgctcagttcaccttcccagtcatcatcctgaaccaccccgggcagatttagcgccgctactccccggtcatcgactgccacacagnccaca

SEQ ID NO: 116877 - DNA, 3527 bp, Homo sapiens
ccatgggcgcttccaggccgcactcacggtccttgcctgccccctggcgtccgtgtggaggaaggcagtgcccgtttcttcagccgtgggtgcccctggctctgcctccccggggatcccccaaaaccctcgggccctcctcttccgggaagtcctccgggccgacccacacagctgtcgctgccctgattccactccctcttccctgcttggcccttacccgagggcgggcctgcccatgaggccgctctcaggacgcctgcccacagcagctcctgacattgggccctgtgctcaggggtggagtctggggctgggtgagggcaccgacgggtggaggggaagctgccggaagcggggagagaggcggcccccacctgtgcccccgcagctctgagggttgggaaggcagcgcctgcagccctcaccttcctgccctcaggctgcgaggcttgttcccagagggccgttggcttccctgagtgcctgagtgtccataagttggacccccaagaagccccaaccgggaggtcctcctccccctctcctgcgctcaggccggccctggcggtgcttgcccagtgggttcccatagtgcgggcgctaagtgctcagatgggccccagtgggcctgaggacttgtggggccggctgggccctcaggaggagccggggtgctctggagcgcctgtgggtgctgggtgtggctgcttcccggcctgtcatgaggaagtgggacggcccgcctgccacgcccagctctgggtgctccagctgggccacagcctggtcctgccgctgcgcccgcccgccatggtgtcccgggaccaggctcacctgggccccaagtatgtgggcctctgggacttcaagtcccggacggacgaggagctgagcttccgcgcgggggacgtcttccacgtggccaggaaggaggagcagtggtggtgggccacgctgctggacgaggcgggtggggccgtggcccagggctatgtgccccacaactacctggccgagagggagacggtggagtcggaaccgtggttctttggctgcatctcccgctcggaagctgtgcgtcggctgcaggccgagggcaacgccacgggcgccttcctgatcagggtcagcgagaagccgagtgccgactacgtcctgtcggtgcgggacacgcaggctgtgcggcactacaagatctggcggcgtgccgggggccggctgcacctgaacgaggcggtgtccttcctcagcctgcccgagcttgtgaactaccacagggcccagagcctgtcccacggcctgcggctggccgcgccctgccggaagcacgagcctgagcccctgccccattgggatgactgggagaggccgagggaggagttcacgctctgcaggaagctggggtccggctactttggggaggtcttcgaggggctctggaaagaccgggtccaggtggccattaaggtgatttctcgagacaacctcctgcaccagcagatgctgcagtcggagatccaggccatgaagaagctgcggcacaaacacatcctggcgctgtacgccgtggtgtccgtgggggaccccgtgtacatcatcacggagctcatggccaagggcagcctgctggagctgctccgcgactctgatgagaaagtcctgcccgtttcggagctgctggacatcgcctggcaggtggctgagggcatgtgttacctggagtcgcagaattacatccaccgggacctggccgccaggaacatcctcgtcggggaaaacaccctctgcaaagttggggacttcgggttagccaggcttatcaaggaggacgtctacctctcccatgaccacaatatcccctacaagtggacggcccctgaagcgctctcccgaggccattactccaccaaatccgacgtctggtcctttgggattctcctgcatgagatgttcagcaggggtcaggtgccctacccaggcatgtccaaccatgaggccttcctgagggtggacgccggctaccgcatgccctgccctctggagtgcccgcccagcgtgcacaagctgatgctgacatgctggtgcagggaccccgagcagagaccctgcttcaaggccctgcgggagaggctctccagcttcaccagctacgagaacccgacctgagctgctgtggagcgggcatggccgggccctgctgaggaggggcctgggcagagggcctggacctgggatcaaggcccacgcgcttccctggggtttactgaggtgatgggtgcaggaaaggttcacaaatgtggagtgtctgcgtccaatacacgcgtgtgctcctctccttactccatcgtgtgtgccttgggtctcagctgctgacacgcagcctgctctggagcctgcagatgagatccgggagactgacacgaagccagcagaggtcagaggggactctgaccacagcccgctctctggctgtctgtctgcagtgcccggctgagggtgggaggcaaacacgccttgttcctgctcttcccagttcagcttggtgggagaaagtcattcgcgtggctcgggacgctcatgtaaatttggttttggtgctcaagggttctttcctcccaggggcaggtgtttctttcctgtttgtcttgtgtcttgagagcttggccttatgaccagtgagaactctctccctggtctctgccagcccaagcatcactgcccgaggcgccagctcagtttcaccgtccacgtccacaaggggcttttcccaccttcacctttgtcgctgggtcagtgctggaaagcgcccctcactcctgcgctgacaagggcccttctctactgtctgtggggtggttccgggctgggggggctgcctcctttgcacctgattttgaaggtgtctctttcatccatggttaagtcataaaaagcttattggttttggttttgactcacctgaaagtttttttggtttaaaagaagaataggcggggcacggtggctcatgcctgtaatcccagcactttgggaggctgaggcaggtggatcacgaggtcaggagatcgacaccatcctggctaacacggtgaaaccccgtctctactaaaaaatacaaaaaattagctgggtgtggtggtgggggtgggcgcctgtgatcccagctacgtgggaggctgaggcagcagactggtgtgaacccgggaggtggagcttgcagtgagccgagatcgcgccactgcactccagcctgggcgacagagcgagactccatctcaaaaaaaaaaaaaaaaaaaagaaagaaagaaaaataattttgggagtttctggaaaggtactaggatttctcaaaaggatttgtcttctcccttgtgaaagacagatgtcagactaatcaggcttatccgatgtgctacatgagatggaaatgcgtgtgaaatagtaagtcacactaagtcttctggaggttctatttacgggtttggtttgatatgaatgttgcagaaactctataaaattctaga

SEQ ID NO: 116878 - DNA, 2667 bp, Homo sapiens
atgaaggggttatggcgtgaggcgttccagtccgtatgcggattacctaacggggttttcaacaagaagcaccaaccttgccctaactgcggcggcaaagaccgttttcgctggactgacaatctgaatacttctggcgacggcggcgcgatctgcaactcctgcggtaacgactccgggattggttggttgatgaaattaactggtatgccgtacagcgaatgtataaacatcctgggaagatttctcggaaaggttccgcaggaatatatcgtcaaggcgaacaagaaagcgcgccgaactccggtatcaggtgtcaacgtcatgatggcagaccatgaagcagtaatgaaagttatggagcgtacagagaagcgcgtaaacacacccctaagtatttttgagtcactacccactgaatcattcgacgttggcgtaaaacgtcgagaagatggcggagagagcgtatttcacactatcccgtgtcaacttgtgcatgaggatgggcttgatgacgagttttgcaatattttgattattgatgaggaaggaagggagtcattttacgcgaagaaatacacgagttgctcggttgccgtgactggtaaaacagagaaggcgatctacttatgtctgaactggattgatgctcagcatattgcatttcacacaaagcaagaagtatgggcctgcttcacccctgaaaatctcgaaatggttgcatacaggtataaaggtgatcgagaagtaagggtggcgtgcgaaccttcagacaaggataccttgtacatggcagacgaccgacaattaaaaataatcatcacgaatcctggaggataccgttcaggaatgcaagccaaattattctcagcaagagtttatactatggctttatatagacgcggtactgcatcaatggatgcagacggcacggttcacggaaccgatacaaaatggaaagatcagcttgctctgattcgagtcggtgcaactatcgtattcctggagcaaccaattaagctggcggtaatcagcgatattgtgagcgacacagagctaaaggctatctctacggatggtcagactgcagctgacggaaagtatgtgatcttgcttaacgattcgttgactgttaacggcttagctcaaaacgttgccgagacgcttcgatactatcaaagcaaagagactgagatcgcggcagctatagatctgataaatcagcttgatatgaataaacttgagcaaatagttgctgatgtgaataaggcgaaatctgattctcaagctgcgcaaaatcaggctgaattagcgcgtgacgatgcggtaagatcaaaagatgcggcatctgttagcgctcaagaagctaaagacgcagctaacagcatcaatgctgaaaatcttttaactaaggatggaaacttggctggtcttgaggataaaaaagagtcaagaaaaaatattgggttaggtgaaaatgatgctgttaactttcttactattaacaccacgggtgctataggtgcaggaaggaactcatgggacggttctaactggggtagtaagaccatgttgtcatcattgatgattatgtcacctgatggaatatcctcgccagggatttacgtaagaaaagaacatagcgataatggttatgctgggactttattattttatgagggggcaaactacttcgagactaacaatagattcagagccaatcagtttttatgcaagaaaacaactatgagttataaccagatgtggtctgcttcatgcttccagggtaatgcttacaccgctgatagtggtgctgaaaactatcaatcacttattgctggatcgtgcgacaccagaggtctgggatacgttggcggcgtagcatttggcatgatgactacgggtaataatgaatggcccagggcacaaatatcagtaggcactcaagatagggatggatcaggcaatattggtctgcaaatgcatttcaggtttatggcttcagggcaaatatcttacgctggaccgcaaggggctggaagtttccaacaggttccggcatctgacagaaatataaagcacagcataaaggatgatgaatcaagcattgcatacaacaacataaaatcaatgagatttaggaactttatatttaacgatgatgagcaagaaagggtaaggagaggtgttatagctcaggagatagaagagatcgacaatctatatgttaagagaagggtgtatgagagccacgagctaaacgggccaaaagttgaaaggcttgagcttgatacaactcctttattgcttgacactatgagagctttacaggatacaataaagaaagttgaagagttacaagaagagataaaaatgttgaaggccctgaaagattggtcaggtgaagagaactgtacctttggagttagtctccaggatcccaggattaagcctcaagtctatccctttatccaccaacttctgagactagtgctctggagccacaacaccctttacgaagctaataaagagctgcaaacattggcaggaagagaacccacccacacactggcaagagcaacagcagtgatgagaagagccctgcaaaggctaaagaacatgggtacagaagtggcagctgctaatcaggaccagcaggaggcctag

SEQ ID NO: 116879 - DNA, 2778 bp, Homo sapiens
  misc_feature (1)...(2778): n = a,t,c or g
atggaggctgaggaccgaggggcccctctttgtgtctatgctctgtatctcccgccgagcggcaccagcccgggcagcttcattaagggcctccgccagctctgcagctcacctgctgcagcgcccctcgcgctccgcaaggacattagaaaccgtcaaccaagattaatagttgcccggctccggggcagggagatgagcccagatactgcggcggcggcgctcgcttcgcgcgagccaacccggcacgggctgggcgcaccacctgccgctgctgtcgctccactccgccttcctttcttctcctcctaccactcgcccgcgcacctgaggctctcagctcaaaacgttgccgagacgcttcgatactatcaaagcaaagagactgagatcgcggcagctatagatctgataaatcagcttgatatgaataaacttgagcaaatagttgctgatgtgaataaggcgaaatctgattctcaagctgcgcaaaatcaggctgaattagcgcgtgacgatgcggtaagatcaaaagatgcggcatctgttagcgctcaagaagctaaagacgcagctaacagcatcaatgctgaaaatcttttaactaaggatggaaacttggctggtcttgaggataaaaaagagtcaagaaaaaatattgggttaggtgaaaatgatgctgttaactttcttactattaacaccacgggtgctataggtgcaggaaggaactcatgggacggttctaactggggtagtaagaccatgttgtcatcattgatgattatgtcacctgatggaatatcctcgccagggatttacgtaagaaaagaacatagcgataatggttatgctgggactttattattttatgagggggcaaactacttcgagactaacaatagattcagagccaatcagtttttatgcaagaaaacaactatgagttataaccagatgtggtctgcttcatgcttccagggtaatgcttacaccgctgatagtggtgctgaaaactatcaatcacttattgctggatcgtgcgacaccagaggtctgggatacgttggcggcgtagcatttggcatgatgactacgggtaataatgaatggcccagggcacaaatatcagtaggcactcaagatagggatggatcaggcaatattggtctgcaaatgcatttcaggtttatggcttcagggcaaatatcttacgctggaccgcaaggggctggaagtttccaacaggttccggcatctgacagaaatataaagcacagcataaaggatgatgaatcaagcattgcatacaacaacataaaatcaatgagatttaggaactttatatttaacgatgatgagcaagaaaggctgggccacagcctggtcctgccgctgcgcccgccggccatggtgtcccgggaccaggctcacctgggccccaagtatgtgggcctctgggacttcaagtcccggacggacgaggagctgagcttccgcgcgggggacgtcttccacgtggccaggaaggaggagcagtggtggtgggccacgctgctggacgaggcgggtggggccgtggcccatggctatgtgccccacaactacctggccgagagggagacggtggagtcggaaccncggggcatctccaagaatgggcagacgcgggagcatgccttgctggcctacacgctggagccggcttacagcgagaagcgctacgacgagatcgtcaagaaagtcagcgcntacatcaagaagatcggctacaacccggccaccgtgccctttgtgcccatctccggctggcacggtgacaacatgctggagccctcccccaacgagggacaccagtgtttgctgctcacctctgacagccagacaagggctgtgctcaggggcagctcggctgggcacacagtaggtgctttagcggacagcactgaggcccccagcaagaagcccatgagctcctccccctcccgcagtgccgccgacatctacatccgggagtatttccacagccacgtcagcggcggccaccccgaggccactcctctccgtgtgatgtacacggaccggccgctgagccagacggacccagtcacgctgcagtactgttgcctgaccgacgaccgccaggctttccgcccgcccacacgggcagagctggcgcggcaccgcgtggtggtcaccaccacctcccaggcccgtgagctcagggtgccggtcggcttcttctcccacattctcatcgatgaggcggcccagatgctggagtgcgaggccctcaccccgctggcctatgcctcgcacggcacccgcctcgtgctggcgggcgaccacatgcaggtcacaccccggctgttcagtgtggccagggcccgggcggccgagcacacgctgctgcaccgcctcttcctgtgctaccagcaggagactcacgaggtggcgcggcagagccgcctggtcttccacgagaactaccgctgcacggacgccattgtcagcttcatctcgcggcacttctacgtggccaagggcaaccccatccacgccaggggcaagggtccgccccacccccggcactacccgctcatgttctgccacgtggcgggcagcccagaccgggacatgtccatggcgtcctggctgaatctggctgagattgcgcaggtcgtcgagaaggtgcaggaggcctacaacacctggcccagctgctggggcggccgcgagcagaggtgcatctgtgtcgtttcccacggtgcccagtga

SEQ ID NO: 116880 - DNA, 662 bp, Homo sapiens
cgctcttcacagtgcctctccgaaatgaagagcttctcttggggcagaaaccaacacgctgctcccttctaggagaaagtctcactctgggagaaatgttcactgagcctcaaggtgtgttcccagacggtcccatggatttacacgccgccggcaccaggcccctgagcaatccaactactgtccttttggatgaggctgtggatgctgagagaggggctgtggctgagtccaatctcaagaaccaaagacctgaactgcagacgaagcttccttcccacctcctgggctttgaggagcctgcattccctgcccactcttctcctgctgtgcccacagcagggctgagtgccaaatgggccattttcctcttccccagcaagcagggcctggaaggggtggaactaaggcaaggctgtgcaggggtctcaggcaaggagcccgtcctcactacaccacacatggagggcatgaggctggaccacaccagaacgtccctccccccggagcctggagctgcaggtcttgatgcggagaggtttccatctgggccacccagaccttgctctgaggctctcccgatcctggaacaagcagatcttgccaagttcctgtattggaagataaatcatattgaaattctctttaaaacccatagatga

SEQ ID NO: 116881 - DNA, 245 bp, Homo sapiens
ggtgaggatgaatgtaaaagtgtagagcaagctttcagacaacttcaaagtttgtttttggcgcttccgtttgtaagcaatcaagatggtgagagacgctatcccaaagaagaaagtctgtaggaaccagagtagctgagcccgaccacttgtgatgcctttatgcttgcacaatactatggcatacaaggactctcccacatgaatcagccaggcaagccaatacccattgcacaggagggtgt

SEQ ID NO: 116882 - DNA, 566 bp, Homo sapiens
atggctacggcagccggcgcgacctactttcagcgaggcagtctgttctggttcacagtcatcaccctcagctttggctactacacaaggatggtgaagtcggaggccagcaatgcggctaccgcctatttccgtccagcaagacccttgccctctctggtcacagtcctggggctgggctacttcgcgtgggttgtcttctggcctcagagtatcccttatcagaaccttgggcccctgggccccttcactcagtacttggtggaccaccatcacaccctcctgtgcaatgggtattggcttgcatggctgattcatgtgggagagtccttgtatgccatagtattgtgcaagcaaaatgagctaagaatacggataaaggtatgtgaatgagaacaagttatgatgaccccaggaaaacccttctccgggttacctaagccaccaacttgtgacccttctgaaggaggaggaaacaagcactgctgttcagtgagcctgctcttccaagatggcaactcatctttatttttctttactaaatatcatacacatttacaggatca

SEQ ID NO: 116883 - DNA, 404 bp, Homo sapiens
  misc_feature (1)...(404): n = a,t,c or g
ggagaagtacgtggaggaacttgcagcagggaggcttacccttcagacagacctggagacatccattcggcggattgccgacctgcaggctgccttggaagaagtggcatccagtgacagtgatactgagagtgtccagacggcagtggattgtggcagcagcggccgaaaagagatggataacgtctccatcctcagctcccagccagagggcagcctgcagtcctggttgagctgtactctgtccctggccacagatactatgaggactccttctcgacagtcagccaccagcagccgcatcctcagccccaggataaacgaagaggctggggacactgagaggacccactcggcattggcactgagcagagcccggtccaccaatgtccacagcaagaccn

SEQ ID NO: 116884 - DNA, 647 bp, Homo sapiens
atggaaaagtgtgcaaatcacggtgcgcccactgagtctgatgcttccctagcagatggaggatgggatgcagagggcggcaagggggcaatggtggagggtggaagatgccagcagcatttccccaagttgcgactgccaaaaatgtctccagacatgaccaaatgtcccctggggggcaaaatcactcttagatgggctgagtatccactgtgcgtggtggtgcagattcagagcatggccctggggtcagatgcattgggagcagcaccccctgcacaggagaagtacgtggaggaacttgcagcagtgaggcaaaccctccagacagacctggagacatccattcggcggattgccgacctgcaggctgccttggaagaagtggcatccagtgacagtgatactgagagtgtccagacggcagtggattgtggcagcagcggccgaaaagagataatcaggggacataaaagtagagtccctgttttaaagatgatccagataagggataacgtctccatcctcagctcccagccagagggcagcctgcagtcctggttgagctgtactctgtccctggccacagatactatgaggactccttctcgacagtcagccaccagcagccgcatcctcagccccag

SEQ ID NO: 116885 - DNA, 705 bp, Homo sapiens
ttggtgaggttggtgcttgggactcctcagctgcagagctgagtcccaggccggctggagactgcgagcggcaaggaattcggagccagggccagggcagtgcttcattccagtggaaacgtgtgctagctgcggatttctgggtggtgtggtatgggctggagccggctggcatggatggaggcacaacaacttccgaacagcagttgtgtgccaagcccaagcgggcactgcgggtgccaaggtaaataggtctcaagttctgtctcctcccagctccttccctgcagccttttgatgttatttccaaaggcggttacaaaagcaggctgccaagagcacctcctgcaggggacgacccgcatggcaccttctctggagactgccagcccctgcctggtgtagctgcctgcaatcccgccctggccaccttacctgcagattccttgaattactatgacaaagagccctctcagtggaactggttgctttgggggccaccagacacctgcaccctgtcctgtcctggtgagttcaccattgtttgactcttctactagggaagtgcgcccaagcaacctggggagcttgcatgtggtgttcatctgaaagccctggttagggacccagtcaacagtcagcatcacctccaggcatcaaagtgaatgagacttcatgccattcctgctctcaagcctcaagcct

SEQ ID NO: 116886 - DNA, 1059 bp, Homo sapiens
atgacacaggcccagtccccgcaaggcactcacagtgatcgaataaatgagcaatttttcttggacttaaaaattcatttggtcaccacactttccagggaatacctgcagtattgcggaggttcttctgttctcattgctcagccccattcagttgcttccctcttctgtacagatgctaatggcacacagattttgtggttggtggcagagggagagtgtgagcaaatgggtatgggaactggagtgaatgagagctggaacaatctggctgcttcagcaccagtgggatcaaagttcactcactcagacacactgtgttctactccttgtgggaggcagcacacagtaaagtgtagaggagaaaaagagtatagcatagcagaatggtgtgatactgtgattgtgaagatcaatgcctctggattcagacacctaggctcaaaccttgattttccttctcacctgctctgtgaccttgtacaacctcctaaactgacattctacctcctcattcatgcagggaagaccataagatcctggctagtgggccttttccagaggccctcgacaactgagggggccatggtgtcattgcgtcatcaggccacagccaggctcagagtgtctgcctctgcagaaacactcctgaacaagcatcaggagaatgcctttccccagtctagtgtagagtgtgatggaagaaaaatagcaaatatgcccatgatgaggatgcaaacttcagctgggcctcagaagtcatcagtagcaaaacccatcttttcttctgccagacgtcctcacagagaaatctgttacctaaatggatttaccactgcccaggttctagccctcaacctgcaggcccagaaacctgatataccaacacagagaacacatccatgtctttcagtagacacatacaagttcacagggatccatgaaacacaagatgcctatctactcatctacaaagagatgctctaccacaatttataccacaaactcgcaatctccaagtggcctaaattgcatgttaccttcttacaagaagactga

SEQ ID NO: 116887 - DNA, 592 bp, Homo sapiens
ctggtcagataaggcatttaaacctgacacctcagatcctttcaacgccaaaaccagatgtgctcagctggaaagaggaaagggttcctctgtgttcaacaaaatccaagctctctgcagtgaagagggccaaactgacaagcaggccaaggcttcagttctacatgttggaatagatcatctggaccctctggattctggtcctgtactgaccttcaagctgtctctttcagctttctgtgctgaggcagaaaagaggaaagctggaccacacccagccaggactacacgtgcagtcctcttctactatgaaattggaaagaaggtgatagtggacccagcactctcatttcatgaatctgtcggttttaagaaaccaatacacatatctctcacgttacagtctgacaaggagagtgaagtgtgcgtacatcagggcaattggcctgtcactgccgtcaataaaggaaagctgcttgctgagaagataactcatgtcatcctgactgaagctgaaatgggagatttctctgtgccttttatattccccacaatcctgtgcccacgagataattctccagaggattgctga

SEQ ID NO: 116888 - DNA, 466 bp, Homo sapiens
atatgttgtgcaatcattgggtcaactaattgccatgaaggcagagtcttcgtatgaacaagttgcagctgaggggcctttggaacattcaaagggggatgtgttgcagggaatgggataaacaggtcagacctccagcagagaggtaagggattgaaacatgcagttgggagcaggaggaaatgccttctcagagcacggcaatggcagtcattttctggagatgtcgggtgccatttcatctggcttcctggaggagctgcatttctcaatcaaaaccctggacctgagcaggaaggctggaagggagataagcagacatcctttttctttggactggagtctgggagaagagagtgccctggagagctgcctgctgttttgtagtcacatggagtatgagcatgccttcccagggaccctcacctggatggaaactccagagaaatactcactcagaacctga

SEQ ID NO: 116889 - DNA, 2791 bp, Homo sapiens
atgattttaaactactcaaaattgaaaggcaaggaggagtgtgcctctgtctccagtgtgcctatggtcttcttcagctcacagtaccgtctacaccgcaagagccaatatttgaaaatggctgctgcaaaccttaccttctctcaggaggtggtgtggcagcgaggcctgcccagcattccttatagccagtacagctttgaccacctctacaataccaatgacatcatccatactccccagatcaggaaggcccggcctcagaaacctgttagcttcaagttcctgggttcctcaagtcccttaacaggagacacctccctggctgtgaagacagaaagctctgccaatcccgaaaagaagctgaagaaatcaaagccagccagcaccgtccgggaagcaccccgccctctcatccatcatccctgcatgcatccagatatgctgggtcggccaccttctctagatgtgaacctggaggaaagagaagcctggcttctgcctcctgagaaggaggccagagcgtgggaggccactgtgctggaaaagctgaacgagcgcacagcccgatggatccagagcaagcgtcctcgaaggcctggggcatcccccaacaagtggcagagcttcctgcgccagcagtacgactggagtcacattcgggatgagcttacctctgccagtgacctggagctcctgaaacagctggaggcagaagagacagcagagtttgaggatcaaagtgtcatcctgcccccacaggaaaagaagaagccagaactgctgcttcccgtttactacagattgcccagttacttccaacaagcagagacagttgagatcatgcctggcaacaagagcactgaggatatccatgaaaagacgagcctctcccagccccaaacccagagctactttcgccaggtgactccccgagctggaaagtttgcctactccacagacaacacctttgaacaggagatttactttgatgaagtccagatcatccaccagattggtgcaaagagagaccagattgtcctggaaaacctaaatcggtacaacaagcagctatctaaggtcttccctgaaactccagaaaagtggagtgcccaggcaattcctgaagcatcttacagacctgtgcaaggagccctgcgctggactgctttgcccacccccgccaaggatatgctgctgcaggtgggtgagaaggatgtgcctattaagaccaggagattgaagaagcaggcaaaatcactgcaggaggatgtgacctgggaactggtggtcctgcggaggatgctgaaggaatggaagactgcctgggctctgatcatagagtggcaccatgagacagtagagaacctgcttcagagcttgggagacctgcatgatgacgttcggatcaaagctatcaccacatgtgccacagctgctttggaacggccccggattgccaccagccagagagactcagacaagaccatccaggacttgccggaggttctactgcctgccctagaggctgctctttgtgacaagaatgcccatgtgcggatggcagcagcaatatgccaatatgccatacagtcacataatccccttgcccggaacatcatgcagactgcccttctgaagggtaacagtgtggatagctgggctgcagctcagtgcttggctctggaaggtactgctacttaccctgtgattaagaggatcctccaccagctgtttacaaagaagaatgaggacactgaggaacagtcttatatcctcctgagctatctgagtgagaagacagatgccatttcagaatgtaacttcaaggttctagtatctctaaaagtgattgtgaatatccatacaagtcttccatttcctcagaccctgatacacaccatgcttgctgtggagctgaacagctgtcaatggaagaaccggattgtggcctgccaggctttctcccggatcagtggaaatgtctgcttggatatgaaacataagttgatccagctgatgtggaatgactggaataaggaagtgaggagagcagctgcacaggcgcttgggcaaatgagcctcgggaaagaggtgcacgacataatcagggtcaagctaggtcaaggaaattcccaggagcgtgtggaagctctctacctgataggtgagctcaagcttatgaccgccaagcttctcccaagcttcctgcactgcttctctgatgacttcacagcagttcggcgggcagcctgtttggcagctggtgccctgcagatccgcgacaagatggtgcttgaatgcctcctgaacctgatgcagagagatccttactggaaaatcaaggcctttgccattcgagctttgggacagattgggcaagtaagtcccgagctgacggatcttctgctctgggctatccactatgaagagtcaccaggtgtacggctggaagcttgccgtagcatcctagccctgaaacttcaaggggaccgggtcagggacaccttcctagacgtgctgctcctggagaaccacgatgctgttctaaaagaaatgtaccagacaatgaagatactcaacttaggaaatgaaggaaaccaagaaatgcttcaggagatcaagaacaggattaaaacactaagccaaaaggacttgctgacacacaaaatactcaagctggagatggtcatgggaaaagtgagggaggaagcaaaacgtgtttacttgaaacccaaaggagaacaaggaccactaacactccagactttactccaagaaacttttcagg

SEQ ID NO: 116890 - DNA, 406 bp, Homo sapiens
atgcgtttgttgagagcctgaagctgactcacccaaatgagaaagtggcacaaagcaagaagtcctgagcagctcaatttctaccccagagccagtctctccaggaactaaatatgagggaggcaatttccatacctgccaggctagagaaggaagaaaaataaaagggggcagaaatattttgataagactaatttcctttggctgtgcagaggcagcacatacctcacctggggtggtgagtgtgctttattttaatcaagccgagtgtattcatagcttttcttctttggtgtccttgtgctttcagtctggctttctcatcctgtaataaatgtttaagtaggaaggaggcttaagagaaggtggaagagagacagaatgagtgacagaaaactgggaatgg

SEQ ID NO: 116891 - DNA, 1929 bp, Homo sapiens
atgcatgacactgaaggacacgtcaacgatgttcctctggggcagagaagagggcctaagcctgcgaggtattcattcattcactcatccattccacctattttaagcacctactatgttccagataatgtgctagatgctgaaaatacagtatttaatattccagttgtctgtgttataaacggtgcttcagaaacagaggagctggggagagtggcctgttttctccacagtgctgctccagtttctgccgtcatcggtttccagcctcacagcggccgcatgtcgggggtcagggcgcaccggggcgcaacacattcagtacttgctcatcgccaatttcttgctccccttgctccttctgcagggctgcctttcccacctggccctccgctcagatcggatcctgttgtccctgaattattagggtggcagcaaagggtgcaagatgaaaaactgacctatgttaacgtatccttatcagagatgcaccgagaacaatcggagcagctaagtctaggacccgactttgtggctaaatggaactcgtttaaatgtgtacaagttcttagagcacaactccaggtggttggacacaaagatgcggaccgtatagccactgtccccagtgcttacagaataattcccttcctccttcaagtccaggcaaatctgccctgtgctctgcagaagcagcaggtctccaaaagcagcccatcgacagagcccacgtctcctttacccatggaggaaaactgccggttgagaaaacctatttctccttcattttccttttcaaaacagcaagggtgggatgctgatggaaactccatctggtgggggcagcaacagctgtgccaccgggaaggggatttggtaaattgcactatggctcttcatgcttctgcccctcccacggatatacagctgaataagtctgcaagtcagaggttaagaaaagttggctctggcatccgacaggctgacttggatgaggctctgcaatgctaccttggatgggcccgcattgggaacccgcatcgcctgcctggagctgagctgtatgctaacccgcgtcttcgggcgggccctgcgccccgaaggcgtctccctaaagccaaagtcgtagcggtctgcacgcctgcccttgggccctcggcctcagtttccctgtatgtaccatggggggtgggaggtggaagtgcgctcccagagccgggaagtgtcggtcatactgggccagcagaggaggccttctctggagcgcagggaatcggaaacagaaatcagattctggatttccagtggacccctggcctgctactcccacgcgttccccgaggactgcgcatggagatcaccgaggaaaagagccacgttttgagggctggcggtgtgtcacggtgttcggccactcgcgccatcttccgggtgcagttcaggggccccgcagagccgagccttcgcgcagcctggcaggtatggaaattgcctccctcatatttagttcctggagagactggctctggggtagaaattgagctgctcaggacttcttgctttgtgccactttctcatttggcccagacgtcagtgctcagcgtccttcgctgccactttgcgaggaactttggccggctcccctgcgccaccgggagcgggatgttaatgagtttagagcacagtggcgatgatactcccaaaggaagtggcaactgtagcccaacgggtgtccgtagatacaaaccaaagctggctaaaaccatgtctggaaagctgacaaatttccaggcaatctaccctgagcagcagacagaaataaaagagctgagggaggtccgagatgcgattagtcagggcgacggcccccagtgtccggctcggaagccgaagaatcgaaacatggctcaagaagctacttgtcactga

SEQ ID NO: 116892 - DNA, 626 bp, Homo sapiens
ctctgcccggccgccctgtctaggacgcagcaaatatgaagtctatggaccctgcctcaggttattcaaataacatcctcaccattgatcaaatgctcaagaaaaagcagacttgtatagtggccgatgcaactactattaaacaacatgtgaagagagctactgatacctataatttgggaattgcccttgaacaccgaaaagaaatgctaaacctctggcagaagatccgaggggatttgattgggatagactctagaaatgaggccttttatgacaccttttctacttatacatggtcctggaatgtttgccaagaattactttctcctaaggacttaaggttatatgatgcctatgtgaatagaaattcctcccataactgcagatcctcttcctcatcagataccagtgaatgtgacacagactcaggaagaaaaagaaaacggaaaggtttaaagggatttcaacaatgaaatttctacattttctaaacagctcatcacaaactactttttcatagttatcaaaattattgtttcttgcttttgtctaagtacattcttagaagctggaaattttgacatcttttggattctgaccagtaaaaaagtttaagtcataaa

SEQ ID NO: 116893 - DNA, 1489 bp, Homo sapiens
  misc_feature (1)...(1489): n = a,t,c or g
cgcgtttgctttcgctcgccgaggcgcgtatcagtcggaattttggggagccaaccgcgccgtctgtccctggcaagccagcggcggtttaaaggaggtggcgggaagcctgtgtgtgcttcaaatcgtcaccctcatggtcgctccggtttttcacgactgaaaacaacatagcaaaataagccaagatgtctgtggatccaatgacctacgaggcccagttctttggcttcacgccacaaacgtgcatgcttcggatctacattgcatttcaagactacctatttgaagtgatgcaggccgttgaacaggttattctgaagaagctggatggcatcccagactgtgacattagcccagtgcagattcgcaaatgcacagagaagtttctttgcttcatgaaaggacattttgataacctttttagcaaaatggagcaactgtttttgcagctgattttacgtattccctcaaacatcttgcttcgtgaagataaatgtaaggagaccccttatagtgaggaagattttcagcatctccagaaagaaattgaacagttacaggagaagtacaagactgaattatgtactaagcaggcccttcttgcagaattagaagagcaaaaaaaattgttcaggccaaactcaaacagacgttgactttctttgatgagcttcataatgttgggcagagatcatgggactagtgattttagggagagtttagtatccctgggttcaggaactccaggaaaacttacaggaacattaggaggacaatgtgggaaaagggattcgaaacgactgaaaatatcttaattgctcagtagtcaaaaggaggagcctgtcaaaaagtagaatcataaggactgttcaaaccataaggactgttccaaatcataccagtgactgttcaaaccaaccatactttttattagatttgctttgtcaactctttcttgtattctgtgttttcctcttttttggtccactttgctgaggtatgaagtgtactactttgaactaggctgaagcatctgagtcttctaataagtgggaagggatccaacaaagaagccatgaccagttaaagatatttgcagagttacaccttggtcataagtcctttgtgaccttgattatttttngccttactctttggatgagaccagacaagaaatggattaaacgggtggctcctttaatattattattattgtttttgagacaaggtccctttctgtcacccagggttaggagtaggatttcagtgggcacaatcttgggctcactggcaacctctgtgtcctggggctcaagtgatcctcctgcctcagcctcccaagtagctagggaccacaggtgcgtgttcaccatgcttgggctaaattttttttgcagaaacgaggcctcactatnttgtccngggttgagtgggctcttttatttaaccagtccattacactgcgggancagcccaacctagggta

SEQ ID NO: 116894 - DNA, 665 bp, Homo sapiens
ttacggtaaaatgaggtcatatgagcaggacctaatccaagctgactggtgtccggcaagtaaaaagacggcgtgtggttctatacgcttgtctggggcttttattgtctgcaccctttggcctttttgagttgccagcttctccaggtcctccagcttctcatgagttgcatcacaccccttctcatctgtggtcccttctgagtctgagcccaggagttcaaaaacaaagatcagctgagagcagaaggagaatgacaatgtttctggggtcaccggatcatgatcattggggcacaagatgatgtctctgagtttctttggttgctgtaacagctcagagcagattttgggactgactctgtgtgcaggttctgggcattgggcttggcaggtgaggaaatgcagggagggctctggaaagggttaagcttctggaatttgcaggtggggaagagagattgcaatgcagtcagagaggacacgggtgattattaggtgggaatccaagaattaaatagggaagagagaattaagtttgaggttcagaggtacattagggataacagtaggcattagctcaacctggggcaagggtttccttaccgaagattatgggcaccatggagcttcagagcagctgatgggacagcagcagtgcaaat

SEQ ID NO: 116895 - DNA, 221 bp, Homo sapiens
  misc_feature (1)...(221): n = a,t,c or g
ctttcccaaagatttntatccacantntacaatgctcactgggaaccaaagtcaggcatggggctgggctttaaggggnnctctggaaaaacaagcagcaaaaggngcagtatcaaactccacagaaattcacaaacatcaagncaccaagaaagctgcattcatttaatatncataggtgacaggctgggctctgtagctccagcnctgttatcctagca

SEQ ID NO: 116896 - DNA, 275 bp, Homo sapiens
  misc_feature (1)...(275): n = a,t,c or g
aggttcccacctctcaagancattaggagcttcttttccaaatcctctgttttgcatgcattggaagataccccatcagcctgagtctcttaaaggcctttatacacatatgtctacacatagggatttggatganctcgggancccacatcctcgctgtcccctgtccccccanaacatcccanaccaatacctttctgaagttttcctagtccctcctttttgtttgtgctccttaaagcccaaccccatgcctgaactttggttncccagtg

SEQ ID NO: 116897 - DNA, 415 bp, Homo sapiens
tgtcaccttgatttaaatgaatgcagctttcttggtgtcttgatgtttgtgaatttctgtggagtttgatactgctccttttgctgcttgtttttccagagtccccttatcacttgacgtgctgttatattatgtttgatttattacagataccccatcagcctgagtctcttaaaggcctttatacacatatgtctacacatagggatttggatgatctcgggatcccacatcctcgctgtcccctgtccccccgcaacatcccccaccaatacctttctgaagttttctagtccctcctttttgtttgtgctccttaaagcccagccccatgcctgactttggttcccagtgagcattgtacatttgtggatattaaatctttggcaaagtcatttacctgggctggaaaaaa

SEQ ID NO: 116898 - DNA, 657 bp, Homo sapiens
tttcgtcgcacggcgggtatagtggttccgcaaccttgggatgttcggctgagcgcctgcctaacatgggagcgcctgcctaaccctcctgactggagggtcagcggcggggagtcctggccttcaatcggccatcgccacggcagaaactggggcccgggctgcgtccaggcccttccccgtccgtccacaggtctcatgggcgcccggactggggctgatgtagtttcccgacctctgacacataggatctggagattaaagctgctctgctaataattaggttcccacctctcaagatcattaggagcttcttttccaattcctctgttttgcatgcattggaaggtggattttcacatctcaagccagctaagagtatgggaaataggactcgttaaagcacagataccccatcagcctgagtctcttaaaggcctttatacacatatgtctacacatagggatttggatgatctcgggatcccacatcctcgctgtcccctgtccccccgacaacatcccccaccaatacctttctgaagttttctagtccctcctttttgtttgtgctccttaaagcccagccccatgcctgactttggttcccagtgagcattgtacatttgtggatattaaatctttggcaaagtcatt

SEQ ID NO: 116899 - DNA, 507 bp, Homo sapiens
atggatgactgtcaagcccagaaggttcccggcttccgaggtggcattctgggagctgcaggcctccttacaggccctctccctcggctgcttgcccagttcaccgtgcatagccctgttgctcccctcaatccctgccgattcccacaccaccgtttgcctctggattggtcgcccactagtcagaaccgtgggagagaggaaacatctgccatgatgcaggcaaggaatgcaaagctcccagacatcatgtggctcactcaaggtcaccctactatggcccttgcctttctgagtgcctggtttgacctcttgatccctccaggggagaacgtcacagtcaaaggaggggtgcaagaggccagtggcacacagagagctgtggtcctagaggcagctctaggcggcaatgggctcttcggcttcctgacttctggtggtccagccactgctgcttctccttctgctggatctttcctggccgacttcactggcccttcaggctga

SEQ ID NO: 116900 - DNA, 489 bp, Homo sapiens
ctgctgacagctgagggctctagctctctagatttgggtagaaaggcctgggggtgggaatatcctccaggcgggaatagccctgtgacctgatctcacttgaattttcaggtgatctgactttccagtgatctaagactgtagtgcaaagaagccaagtctcaggcagttttttcagggacaggccttggtttagctctgcctgaaggtagatgactactttggcagataatgtggaggaaggaacactactctttggaatgccctcagctgtctaactgtgaccgattgtgcctggcccagctgcaacttgatctcaacaaatgttcaaggagaggagctgtgatggggccacttagattgctgtatagcaatctaaggagtatagcagttgaggttccatccttccagcaaggtgtagatggcctggattttttgtggaaaaacagtggacaggcagttcatttttgtgaaattgatttggtatag

SEQ ID NO: 116901 - DNA, 476 bp, Homo sapiens
acgcaggtttaacttctttattcaacaaaaatgcggattcagaaaagcacccaggaaggttgaacctcgaagatcagacccagggacaagtggtgaagcatacaagagaagtgctttgattcctcctgtggaagaaacagtcttttatccttctccctatcctataaggagtctcataaaacctttattttttactgttgggattaacaagtggtggaataacctaagtgatggccagcggactgtgacaggtattatagctgcaaatgtccttgtattctgtttatggagagtaccttctctgcagcggacaatgatcagatatttcacatcgaatccagcctcaagtgttatttccaattttgtcagttacgtgggtaaagttgccacaggaagatatggaccatcacttggtgcatctggtgccatcatgacagtcctcgcagctgtctgcactaagatcccagaagggaggc

SEQ ID NO: 116902 - DNA, 1478 bp, Homo sapiens
cgtggcgacggctgggcgcagagaggctggggctgcggccaggcgtggggtgcgtcggtgggcggccgcagctgcgagcgagctcactgcggtcctaaccccgccgcagctcctcggacgcagggtttaactgtctttatttcaacaacaaatgccggattcagtaaaagcaccccaggaaaggttgaactctcgaagatcagacccagggacaagtggtgaaagcatacaagaagaagtgctttgattcctcctgtggaagaaacaagtcttttatccttctccctatcctataaggaagtctcataaaacctttattttttacttgttgggtttacaaggcttgtgcattttggatcagctgctatttgggcaatatgaatcacttgaaatccaggggttccaggagttattttggatgggtattaaaaggctggattgggttgggataggcattaaggaccacaaaaaaggaagggagactttcaggaaagggagatttaacaagtgggtgggaataacctaaagtggatgggccagcggactgttgacaggtattattagctggcaaatgttccttggtatttctgtttatggagagtaccttctctgcagcgggccattgtccaggtattttcacatcggattccagcctcaaaggtcctttgttctccaatgttggctgtcaacaattcagtcacttctcctttatttcacatgggaagcaaatatgtatgttttgtgggagcttctcttccagcatagtggaacattctggggtcaagagcagttcctgggcagtggtacctatctggcaggtggttattttccaattttggtccagtttacgtgggtaaagttgccacaggaagatatggaccatcaacttggtctgggatcgcgccatcatgatgatcctcgcagctgtccgcactaagatcccagaagggaggcttgccattattttccttccgatgttcaccgttcacagcagggaatgccctgaaagccattatcggccatggatacaagcaggaatgatcctgggacggaaattttttgaattatgcagcacatcttgggggagctctctttggaatatggtatgttacttaccctcatgaactgatttggaagaacagggagccctctagtgaaaatctggcatgaaatgaggactaatgcccccccaaacaagaggtggctctaagtaaaactgggattgcacagtacccggtgcacctgtcttgtcctgccggagagccccaggagacatcggccctagagtgatcatggctacgttcccgcctggaagacgccagcatctggcctcccactgttttcagctgtgtccccgggtccgtgtcttttcagaaagtgaaaatgacatagttgtgacgtaaaggtttacatctagttcgtaaaaaataaaaaaataaaaataaaaatacattccttttaccttgcaaaaaaaaaaa

SEQ ID NO: 116903 - DNA, 528 bp, Homo sapiens
  misc_feature (1)...(528): n = a,t,c or g
cttcatttcttcttctaaccataccacttcattgaaaatactttttggtcatgggtcccacatctcagttgccagatccaatggcctcttttcagtccttgttctatttgaccttcctgtggcatatgagatcattgaaaacttgcttcttgaaagccagttctctcttagtacaatttttatctcaatgtttttatttttccatcttcttcataggcttctgtttctgtgcccaacccctgccctcctggaaatgaaatgcttggcactcttccatccatgctgaagatctctggtggtgtccaccagcctagcgcctgccctgatcagctcaccctgngaaagcaaaaaaggggcttggagttcaatggccaatgtccagtactgtgtgaggctgctcaaatctctgctgagtgtgagacacttagggtgactttctgtgatgctgctgagagacactcagcacagcggcactgtgtgctgggaggaggggatggaaaagatcccgtgtggcccggtgcatcctga

SEQ ID NO: 116904 - DNA, 597 bp, Homo sapiens
atgcccggcctcagccccgccctctggtccctgtgccggctgtgccagatcggcttcaccaccgaccctcggatggcccgctcctccccctaccccactgacgtggcccgagtggtgaatgcccccattttccacgtgaactcagatgaccccgaggctgtcatgtacgtgtgcaaagtggcggccgagtggaggagcaccttccacaaggacgtggttgtcgatttggtgtgttaccggcgcaacggccacaacgagatggatgagcccatgttcacgcagccgctcatgtacaagcagatccgcaagcagaagcctgtgttacagaagtacgctgagctgctggtgtcgcagggtgtggtcaaccagcctgagtatgagggtgaacccgcaggcacgctggctcaaacggagaggcacagagtgcagagtactttttcaaggtggagccaggggaaggacccagagcagggaaagctcagaaacaggactgcacccaaacagcccggcagcccaggccgcctctgccgcattcacaatgacggctttgccggcgagggcctgcaggtggtggtcatcactccccctgtccaatga

SEQ ID NO: 116905 - DNA, 564 bp, Homo sapiens
atgaaggggggccacctagttcctctccaggtcctctttgtgcagcctggagcaccagtggggagggaggacagccccctaagcaaccagactgctggggaagccatcaccagcagtagtacttgggtgaggggggctggctctgaagttccctccccagtggagcaagctgacgctctcacatctagcttagatatttcggatccagaagtaccttttttatatccagaaaagcgcaaggatgttggcagtgatgttgggacccactccacttggcactggctggtggtcatgcttccatcagaagaaccttgggccatgctgcaaagcgacaacaggacaaatccggggacccaggcaggcacgctggctcaaacggagaggcacagagtgcagagtactttttcaaggtggagccaggggaaggacccagagcagggaaagctcagaaacaggactgcacccaaacagcccggcagcccaggccgcctctgccgcattcacaatgacggctttgccggcgagggcctgcaggtggtggtcatcactccccctgtccaatga

SEQ ID NO: 116906 - DNA, 766 bp, Homo sapiens
tttttttttttttttttaaagggttttacgtaagtgcatgtgtaatttattgatagcaaggtttgcatgcatttattctgtgaatcagctcgggctggacttcctgggaatcccaggcgaagatctcagggtctctttctgctgatggctctcccttccacgaccggtcccttcccttccctgggcttcaatttccactttggtaaatggaaagggtttaagctaattctacaatccctttccttcttgggcattgttgattcctgggaaagccctgcaccccctccctcaaggcaaggcttcctcttccccaagcacacgcaaagttcttctcgggcctcccagctcttttcagcagctccccagaatggaacggcccagccatggcttctcagaggacagcttcttggcagagctgggagtgggtggagtagagcacattttttcctttgaggtccaaagggctgtcaaccctcttcagctgccctgcaagctcatgggaactccaggagcatcttggggttggagtgaaggtgtcctggcaggcatggctgctgcctccaggcttccccaggtcacagtgcagtcttctggtcttgttcatatcactgctatggttatgatcattagattcaatgcaatcacatacaagttcagggatgcaagaaatgacattgaagttgccatcaactatacagccttctgcaggccaactccagagctggagagttggtgggacttctcccaaggagttccctgaaagcat

SEQ ID NO: 116907 - DNA, 519 bp, Homo sapiens
cacatcaaaggcaaactggggtgctccgaggatgcagaggggaatggatcggaagggatgtggcacttggcaccaccctctggtggcactggcctcatatcccttgtggcaattgtcaccaccatgattgctcaaggacttaggaaacatgcacagcatcttcaattcatcttctgccttagggcaggactggcaaacaaacagtttcataaagaggctggagagagaggggtaggttgcctgtgtcaggctgccaaatcttttgtctttttcctactctggagtcctatgccccagtccgagtatttgccgttgttatgtctgccaatcatgtttgaaactattcctaaccctaggagcatgggaagtgcatagtacaacatgtatttccaacgctgaatttgtccatctcagaacagagccccattagtaccctggagggtccccaagctgctggtccggggcgtggcagtcagagtggaggaggaggggacagactggagcacagctggatccacg

SEQ ID NO: 116908 - DNA, 1232 bp, Homo sapiens
atgcctcgccctgcttcagcttgcgcagggtgcactgcacctactgtcctgcacccactgtctggcactccctacacacggcaaaacatcaggtccagagtaatcgaactgaatcagtgtagagagtgggagacaagagctggtactgaacttcacgacactgacaaccgtcatcgcctatccaaccagcgtctcattccagggaactgggactggccaagaataaccaccctggggagcctgccgtggtcacacacaagccctggaagttcttcagccctcttcacatttaacactggggtgaagcacagcaaagtaactttaccaggaaatccctgctctgttgaagcccaggacctgaaggcagggtgggcagctagaattttcccacgtcacatggaaacctctctccaacaaggaaattttgctcatcaaagttcagctaacatacacagcggacacatcaaaggcaaactggggtgctccgaggatgcagaggggaatggatcggaagggatgtggcacttggcaccaccctctggtggcactggcctcatatcccttgtggcaattgtcaccaccatgattgctcaaggacttaggaaacatgcacagcatcttcaattcatcttctgccttagggcaggactggcaaacaaacagtttcataaagaggctggagagagagggaacagagccccattcagtacctgagagggtccccaagctgctggtccggggcgtggcagtcagagtggaggaggaggggacagactggagcacagctggatccacgatgcaaacctttggccccacagaagggttaacatgcccagaggacacacagcaagggacagatgaggtgggagcgcaggaagcccttagagagcgggcctccaggaggaagccccagcctgccgactcagagctgagctgttcacagctctcacatggcagcaggccttttaaagggccacttgagatgaagggcgtgtttgtaaactgggaggcacagtacagtgtccaggattctcctgatagccaaggagctctgcagcagacccagccacagggccctgatggcaaaccccctgcagaggctctccagaaagctcaggccatgcccgcagccaaagctggagaaggagctggggtctcagacagaatgacctttcccacgagacagcgcaaagggaaagtcaagcaaaacacatcattgtgagataaacgtg

SEQ ID NO: 116909 - DNA, 358 bp, Homo sapiens
gtaccctatatgccaggcactgtggcacacaatttctggcatgttcacatctactgaatttcacaacatcctcactaaaccaaggaaggcacgtgattatattactttcattttatggatgcagaaaacagctcagaaaggagacactctagaaactttcttccttgctggctttgaacaaagtagcaatgttgagaggtccacatggcaaggagctgaggacctccagccaaaagctagtaagaaggcaaggcccccagtcttgcaagtacaaggaaatgaattcccagatgagcctctagatgagaactcagtacttgccaaaactttgattatagccctgcagagtcccagctaa

SEQ ID NO: 116910 - DNA, 323 bp, Homo sapiens
acatctactgaatttcacaacatcctcactaaaccaaggaaggcacgtgattatattactctcattttatggatgcagaaaacagctcagaaaggtaagctattcacctggatctcactaaggaaaacgtgtggaccctacagcagtgttttcataggatggtggaacacagggtgatcaggtaggagaaaaggacagaattagagtaaactgctagaattgtttataatccagaaaagcctatcttatctatgctgctgtcagatcaatgcaatctaacgatgacagtaaagggagtatcactcaagagagcttggcagaaa

SEQ ID NO: 116911 - DNA, 582 bp, Homo sapiens
atgaggagaaatgtctgtctgtgccgaacccccagtggagagcgtgtgggctcggaattaggggccacaacgctctacgctgtacgattgggaggcaggctggaggggctcggctgccctgccctctttactgggctctttagtgacttgctccacgtcagcacacccacccagaaatttgtgaagtcttcagaagaacatttcccagtggcctccctgtttgcacatctgcaggtgctggtgagtgtgaaccacctgtccctgcctgacacggaaccagatccttctcaggactcacctggggtcagtaggcatccagcgctggggcagctgcttcaggacatcgccgaggacaagtctcctccccattctggttccaccatctgtagcctgtggctttcatcctcaagggctccatgcgaccgctgcacatccaggcccagttccaaggtgcaaggctacttgtgccagcaagatagcagaagcaggacaagagctggctggaagacacctaccgtggtgggaagacatgtacccgtgaagatcgagaaagagtccatccggccagcaaacttcggctga

SEQ ID NO: 116912 - DNA, 543 bp, Homo sapiens
atggcagtggtgggctgggcatgtggacatgttcttcagccactgggcagctggtgtgatgtggctgatggcagtgggactgttggagcaacctaccggaacccatgcagtccatgctatgttggtggtgactgtgacaggttgggcaggccggtgcttatgggtttcagctgtggtgatattggcaggttgagtcagccagacctcagaccacagcaggagggatcaggtgccaatggtggtagacttagcttgggtatttttaggctcatgggttggatgctcgagtatttgggggatgggaccaagcttgataacttgtcctcaggccccttagtagtgcattcaggtgctgcctatgcctcagagataccacttcccacaggcctgacactgtactgccggagtcacactggagcaggatttggccctcaagttccatttattatgaagatactgaattcgttaagcaggcgaggcatgaataaacacttaagagacaccaagaatagagccaagtgtaggaaagactgcaggaggtga

SEQ ID NO: 116913 - DNA, 1538 bp, Homo sapiens
atgctggtgggcaacagagtgacctgcgccacctgcgggctgtgcccactgacgaggcccgcgcttcgcagaaaagaacaacttgtccttcatcgagacctcagccttgattccactaacgtagaggaagcattcaagaacatcctcacaggtggccgggaccagatgggtacctgggcggcccccgcctgtgcccggtccccgccgccgggggcgcacgcagcccgagctcgccctactcggtggagacgccctacggcttccacctggacctggacttcctcaaccaggcgcctggacatccagcgagtccctggccagtgacgacggtggagaccgggcatactctcccagggcgcgccctcggggctcctgatgcagccgtgtcgccgcgcgcgcccgtgcgcaacccgcgcgtcgagcacacgctccggagaccagccggcggctggagctggcgcagacacacgagcgcgcgcccaccccggccgcggggtcccgcgcagcccacgcgggtccggccgcagcagcccgcccctaaccttgcccctgcttcgccccggccctgcccaactgcagcggtgcgcgagcagatggccgcggcgctgcggcgcctgcgcgagctcgagaccaggcgcgaacgctgcccgagctgcaggagcagggccagcccccggctgacagcccagacggcctggctgcagggcgcagcgagggcgcgctccggtcctcgacggggaggtcgggagtctcgatgggacgccccagacccggaggtggccgccgaggccgtgcccgagacccgagaagcgggtgcccaggcgtgccggagacccgggaggccggcgtggaggctgcccccgagaccgtggggcggacgcgtgggtgaccgaggcgctgctggggctgcctgcggccgccagcgcgagctagagctgctgcgcgccagtctggagcaccagcgcggggtagtgagcttctgcggggccggttgcgggagctggaggaagcccgcgaggcatcctcaaatccatcatgaagaagagagacggcacacctggtgccaacccagctccggacccaagagcctgcagtttgttggggtcctcaacgagatttcctcatcgttaaatgggaacggccacacccacatcgcagactccagaacgagcccacaggggaggtttagcagacacctcccaccctgccccaggtacgagagctcctccagcgaggacgccagcgacagcgatggcacagcgagaacggtggcgccgagcccccggcgcggggacatccgggaccctgagcccgaggcggaggcagagcctcagcagtggcacaggggagctcccccacacggcgccgcctggaccatcgccgatgttatcttggcccctgtcccttgcagggcgcagtcgcctcgtggcccaggagtggtttcgagtgtccagccagcggcgctctcggcggagcccgtggccaggatgctggaaggggtgaggcgcctgggacccaactgctggcgcacgtggtga

SEQ ID NO: 116914 - DNA, 754 bp, Homo sapiens
ggctgcggagtcgccgatcccgccggaagcgccaggacaatggggacccgggacgacgagtacgactacctattcaaagtggtgctcatcggggactcaggcgtgggcaagagcaacctgctgtcgcgcttcacccgcaacgagttcaacctggagagcaagagcaccatcggcgtggagttcgccacccgcagcatccaggtggacggcaagaccatcaaggcgcagatctgggacaccgctggccaggagcgctaccgcgccatcacctcccgccgtactaccgtggtgcagtgggcaccctgctggtgtacgacatcgccaagcaccctgaccctatgagaacgtggagcgctggctgaaggagctgcgggacccacgcagacagcaacatcgtcatcatgctggtgggcaacaagagtgacctgcgccacctgcgggctgtgcccactgacgaggcccgcgccttcgcagaaaagatcaacttgtccttcatcgaaacctcagccttggattccactaacgtagaggaaagcattcaagaacatcctcacagagatctaccgcatcgtgtcacaggtaacagatcgcagatccgcgctgcccacgacgagtccccggggaacaacgtggtggacatcagcgtgccgcccaccacggacggacagaagcccaacaagctgcagtgctgccagaacctgtgacccctgcgtcctccacccagcgtgcgtgcacgtccttcgcccgtccccgc

SEQ ID NO: 116915 - DNA, 407 bp, Homo sapiens; identical to SEQ ID NO: 114545

SEQ ID NO: 116916 - DNA, 394 bp, Homo sapiens; identical to SEQ ID NO: 114547

SEQ ID NO: 116917 - DNA, 197 bp, Homo sapiens; identical to SEQ ID NO: 114548

SEQ ID NO: 116918 - DNA, 712 bp, Homo sapiens; identical to SEQ ID NO: 114549

SEQ ID NO: 116919 - DNA, 1104 bp, Homo sapiens; identical to SEQ ID NO: 114550

SEQ ID NO: 116920 - DNA, 329 bp, Homo sapiens; identical to SEQ ID NO: 114552

SEQ ID NO: 116921 - DNA, 2172 bp, Homo sapiens; identical to SEQ ID NO: 114553

SEQ ID NO: 116922 - DNA, 1338 bp, Homo sapiens; identical to SEQ ID NO: 114554

SEQ ID NO: 116923 - DNA, 410 bp, Homo sapiens; identical to SEQ ID NO: 114556

SEQ ID NO: 116924 - DNA, 1137 bp, Homo sapiens
atgttgcaagcttggtccatgcaagcagagccatgcatcagttcaggaatcacggctgccaaagcccagctggagcaggtgcagatgcagatcggcaactcatggctaatggactgctcccaatctcaccccagccagctggcactgagccctgaggcttcaacctcccagcaaagtggcaatgaccaacccagccccacgaccaaggatctgctgcaatacagtgacctatttcctcaagtcggcaaagaccatcgagccccctatggagaggacagccggacagcaggggcaccattttcagataaaaacatagacctgaatggcatcatccagtatccaaggaaaccatcatggtttcctgaatattttaagcacatgggtgagacctactgctcagaaaacaagattcctttcaaaatattactgctcagtgataaggcacctggtcacccacgagctctggctctccagccgctcaggtgccctctgccctggccccttgtttctttcagcctcatactgacgctgattgatatcttcgtgcagactcagttggagggcaactcttaccagggaggtcatcagtttcatagctttgatacagaacctgctaaggccatcaaacctatcgatcggaagtcagtccatcagatttgctctgggccggtggtactgagtctaagcactgcggtgaaggagttagtagaaaacagtctggatgctggtgccaccaatattgatctaaagcttaaggactatggagtggatctcattgaagtttcagacaatggatgtggggtagaagaagaaaactttgaaggcttaatctctttcagctctgaaacatcacacatcgatgtcaccatttctacctgccacgcatcggcgaaggttgggactcgactggtgtttgatcacgatgggaaaatcatccagaaaaccccctacccccaccccagagggaccacagtcagcgtgaagcagttattttctacactacctgtgcaccataaggaatttcaaaggaatattaagaagggattagggatggaggtcatgcttctgcttcgacttcatgctgagcagggcactgagtcccctaaagtgaaaggaatgaaactcctgggcttctga

SEQ ID NO: 116925 - DNA, 1322 bp, Homo sapiens; identical to SEQ ID NO: 114557

SEQ ID NO: 116926 - DNA, 460 bp, Homo sapiens
ttttttttttttttttttaatttatgaagaaaagaggtttaattgactcacagttctgcaggctgtacaggaagcgtggctggggaggcctcaggaaactgacaatcacggcagaaggcgaaggggaagcaggcacgtctggccatgttggagcaggagagacagagagagtgaagtgggagggctgcacgcttttaaacaaccagatcccacaagcgctcactcaatatcacgagaacagcaaggggggaagtcggcccccatgagccaatcacctcccaccagggtccctgccacaacactgggaattacaatttgacatgacattttgggttgtggatacagagctgaaccatgtcaagggtagttcaaccgctgagattgattgattgattgattgactgagatggagtcctgctctgttacctaggctggagtgcagtggcacaatctcggctca

SEQ ID NO: 116927 - DNA, 2212 bp, Homo sapiens
cttatcttgtccctctctgcaatctctacaaccacactggctcgccatcttggtgtttcctggcttggcttcactgctccttccaaatgccctccacttgactttgcatttgtgttttctgtctgggtgtcccgcacacatgtggttctgaagggaaggacccattccttgaagtcggttcaccccacagcctctgtgatgccttccctcgtcttccaacttctgcatgcccgtagctctccagttacagtcagttttgcaggctgtacaggaagcatggctggggagccctcaagaaactgacaatcacggcagaaggcgaaggggaagcaggcacgtttcttcttaatattcctttgaaattccttatggcgcacaggtagcgtagaaaataactgcttcacgctgactgtggtccctctggggtgggggtagggggttttcttgatgattttcccatcgtgatcaaacaccagtcgagtcccaaccttcgccgatacgtggcaggtagaaatggtgacatcactcagtgcacaaagtgagctcagagctttcccctgaaagccaaaagtttcaacccgagttaggtcggcaaactctcgaatcttagatgtgtgatgtttcagagctgaaagagataagccttcgaagttttcttcttctaccccacatccattgcctgaaacttcaatgagatccattccatagtccttaagctttagatcaatattagtggcaccagcatccagactgtttcctactatcttcttcaccgcagtgcttagactcagtaccaccggcccagagcaaatctgatggactgacttccgatcaataggtttgatggccttagcaggttctgtaagttttgcaggctgtacaggaagcatggctggggagccctcaagaaactgacaatcacggcagaaggcgaaggggaagcaggcacgtttcttcttaatattcctttgaaattccttatggcgcacaggtagcgtagaaaataactgcttcacgctgactgtgggtccctctggggtgggggtagggggttttctggatgattctcccatcgtgatcaaaaacaccagttgagtcccaacttaagccttcgaagttttcttcttctaccccacatccattgcctgaaacttcaatgagatccattccatagtccttaagctttagatcaatattagtggcaccagcatccagactgtttcctactatcttcttcaccgcagtgcttagactcagtaccaccggcccagagcaaatctgatggactgacttccgatcaataggtttgatggccttagcaggttctgtacggactgcgttttttttccgaacgcccgcagcagggtcagaagggaggtggtcgccctccgtcgtggtctggcgtgtattccgagccttggtgtctggcggtttccgagcgttggtgtctggcggtttccgagcgttggtgtcttggcggtttccgaccgttggtgtctggcggtttccgaccgttggtgtctggcacgcgccaccctctcttgctttggttgcgccatgccgatgtaccaggtaaagccctatcaccgggtctgcgcccctctccgtgtggagcccacctgcatgtactggctccccaacatgcacggcaggagcggcggcccagcacttggcactggccacttgcagacaagaagacaagaaaatgatttgaggacagcttcaatcgcggtgtgaagaagaaagcagcaaaacgaccactgaaaacaacgccggtggcaaaatatccaaagaaagggtcccaagcggtacatcgtcatagccggaaacagtcagagccaccagccaatgatattttcaatgctgcgaaagctgccaaaagtgacatgcagggatgtccttcctgagatccgtgctatctgcattgaggaaattgggtgttggatgcaaagctacagcacgtctttcctcaccgacagctatttaaaatatattgggtggactctgcatgataagcaccgagaagtccgcgtgaagtgcgtgaaggctctgaaagggctgtacggtaaccgggacctgaccgcacgcctggagctcttcactggccgcttcaaggactggatggtttccatgatcatggacagagagtacagtgtggcagtggaggccgtcagattactgatacttatccttaagaacatggaaggggtgc

SEQ ID NO: 116928 - DNA, 498 bp, Homo sapiens
ctccccagcctcagcccctagcctggcctctttgcatggggctgggggagatggggcgccgggagtgagtgcatggtgctttgtcccagctcctgcacccacaggccccctcagggctccttgcctttcccccccaccagcacaccccgtaccctgcctggaatcccagcaccagcccccctgcctctcctctgcctttctggtttctctccctctccaagcatctgtaagttgcactcaggagggtttaggggagggccatgggcaggctggtctcgtgatagtgagtgagtgctcatgggatctgggttgttaagaagcatgcagcacctcctgcttcactctctctgtctctcctgctccaccatggccagaaacgtgcctgcttccccttcgccttctgccgtgattgtcagtttcttgagggctccccagccatgcttcctgtacagcctgcaaaactgtgagtcaattaaacctcttttcttcataaaaaaa

SEQ ID NO: 116929 - DNA, 3420 bp, Homo sapiens; identical to SEQ ID NO: 114561

SEQ ID NO: 116930 - DNA, 1094 bp, Homo sapiens
cccaatctgagcccctgcattgtgccttcaaatcctcctggactgcaagtcgttaagaaacaggacctccaggttccgccccagggaggttggaattcaccaatataaaaagggtggtggtgccgcaagaaagggtggaactggaaacgctcctggtttcttacttttctccaaggactcctagaaggaccccaccccccttcccccacccctgctcctaggaggacaacgtgatcactgtattcagctccatcaagaatggtccaggttcttctagatgatctgcacaaatgggttcctctccttctgcctggtgtctgccattagcattgggaataaagttcctgctgaaaatccacatctccccttgggttccggtgttcttggaagcgagagagacaatgtcacacttcaaggaggcagctctctagacaggaaagttattcacgtcccatgtcaagtctagagttcagagcaattgagaaatgcaattttatctgctgcctttcattctataccctgcttctgaaccatcgtgttcaactgtgaaactcacactttggtgaccatgactccaaaactcacttaatacacccaaggtcagcccccagtgatctgcttcatagcagggactttgggtgggtctgcccagggagtagggcaccctcagagaatgtggctttggactttatcacagctggggccttttgtgtcacttaagatctaaacttgtaaccatgctagatgtgttttctaatgtgacaacatcacgaaccacgagtccagaagcctaatccttaatcctacctcctcatgatgaagtctcatgctctgtgctcaacgtggttagctgcacaagatgtaaaccaaagcttcactgaaccctcgacccaaatcagtaactcaagtgcgtcaatcataatgaacctccccaaactcagtatttatgattatttttgaggcagggtctcactctgtcgcccagactggagtgcagtggcaggatcagggctccgtgcagccccaaccttccaggctccagcaatcctcccgcctcagcctcctgagtagttgggattacaggtgcccgccac

SEQ ID NO: 116931 - DNA, 4268 bp, Homo sapiens
atgtgtccttggcggcctagactaggccgtcgctgtatggtgagccccagggaggcggatctgggcccccagaaggacacccgcctggatttgccccgtagcccggcccgggcccctcgggagcagaacagccttggtgaggtggacaggaggggacctcgcgagcagacgcgcgcgccagcgacagcagccccgccccggcctctcgggagccggggggcagaggctgcggagccccaggagggtctatcagccacagtctctgcatgtttccaagagcaacaggaaatgaacacattgcaggggccagtgtcattcaaagatgtggctgtggatttcactttttgatttgtggtggcaactggaccctgatgagaagatagcgtacggggatgtgatgctggagaactacagccatctagtttctgtggggtatgattatcaccaagccaaacatcatcatggagtggaggtgaaggaagtggagcagggagaggagccgtggataatggaaggtgaatttgcatgtcaacatagtccagtacataacctgctatggccatcaaacctattgatcggaagtcagtccatcagatttgctctgggccagcggtactgagtctaagcactgcagtgaaggagttagtagaaaacagcctggatgctggtgccactaatattgatctaaagcttacggactatggagtggatctgattgaagtttcagacaatggatgtggggtagaagaagaaaactttgaaggcttaatctctttcagctctgaaacatcacacatgtaagattcaagagtttgccgacctaactgaagttgaaactttcggttttcagggggaagctctgagctcactgtgtgcactgagcgatgtcaccatttctacctgccacgcgtcggtgaaggttgggactcgactggtgtttgatcacgatgggaaaatcatccaggaaaccccctaccccccaccccagagggaccaccagtcagcgtaaaccaggtattttttaacgcctacttgtgcgccataaggaatttcaaaggaatattaagaagtgagtgagcgctcatgggatctggttgtttagaagcatgcagcacctcctgcttcactctctctgtctctcctgctccaccatggccagaaacgtgcctgcttccccttcgccttctgccgtgattgtcagcttcttgagggctccccagccatgcttcctgtacagcctgcaaaactgactcctagaagtacccccaccccacccctgctccttggaggacaacgtgatcactgtattcagctctgtcaagaatggtccaggttcttctagatgatctgcacaaatggctcctctcctccttcctgatgtctgccattagcactggaataaagttcctgctgaaaatccacatctcccctgggtccggtgttctcttccaactcctccagggaaacccaagccctgcagcgcatggaacaaaagaagtggaaccgatacttccggaacaaggctatctgagagcagttcttcctggccctcgggttcatgtaacggcataactggaaccaaagctcacggagcaagggtatatgagagcgggtctcctcgtacaggaagtagaagatgttttgtttgggggcctcatcgtcctcctccatgtcattggccagatagctcagcattggggtgactgtgctcatgtggaaattgcggggtggaggggtattcgaaggtcggatgcaaatccgagaagccggaggaagggttttcggtgatgctcccaggatggtgggctccgatgggatcttgtccgacaccctcagatctttgtcccaggccaggagtcttttaatgacaggatcctcaagcagcctgttgaaggcctcgtagtactcagggagcacgagcgacactcgccgtcgcttcgccttcatcttgaggccacacagcgtctccgccacccaggtctcctcaggctcaggggcgagctccttctctggctcatcatcagattcatccaaacattccctcttccttttccagccaagggacctacgtggggggctgggatctaccccaggggctgatggtcccgacacttcatcatccaccacctcctggagggggtaccctgaggtgctccgctgggggctctgctcttcctggggctgcggttgatggctcatcatgatctttcccaaaatctgtcccatctcaccaaacctagtctctgttctgtccttggtcttcttctggacactcagaccactgtccaaaagcatcttcagggtctccgcatccctctgttccctgtcccagcagaggctgtgtcctctccactcaaagcttgaagcgtgttggggtctcctcttctctgtacatgcccgtttcagagtccagtctgtccgtggtctggtcatgctgccatctctgcggttctctgcggagtcgtggtttctgtaccttgaagagaacttcccctctgccttttgctctgctatcgggcagatggcattgtctctgctttgcaactgatgaaataggaactctggcttctgggctaggctgagagggtgcttgctgctgccattccgggcccaggtgagacattcggtcatgagcatctgtagctcttgcctgagcctctgagccttcttaatattcctttgaaattccttatggcgcacaggtagcgtagaaaataactgcttcacgctgactgtggtccctctggggtgggggtagggggttttctggatgattttcccatcgtgatcaaacaccagtcgagtcccaaccttcgccgatacgtggcaggtagaaatggtgacatcactcagtgcacaaagtgagctcagagcttccccccgaaagccaaaagtttcaacccgagttaggtcggcaaactcttgaatcttagatgtgtgatgtttcagagttaagccttcgaagttttcttcttctaccccacatccattgcctgaaacttcaatgagatccattccatagtccttaagctttagatcaatattagtggcaccagcatccagactgtttcctactatcttcttcaccgcagtgcttagactcagtaccaccggcccagagcaaatctgatggactgacttccgatcaataggtttgatggccttagcaggttctgtacggactgcgttttttttccgaacgcccgcagcagggtcagaagggaggtggtcgccctccgtcgtggtctggcgtgtattccgagccttggtgtctggcggtttccgagcgttggtgtcttggcggtttccgaccgttggtgtctggcggattccgaccgttggtgtctggcacgcgccaccctctcttgctttggttgcgccatgccggtgtaccacacaagaagacaagaaaatgatttgaggacagcttcaatcggcggtgtgaagaagaaagcagcaaaactgaccactgaaaacaacgccggtggccaaatatccaaagaaagggtcccaagcggtacatcgtcatagccggaaacatgtcagagccaccagccaatgatcttttcaatgctgcgaaagctgccaaaagtgacatgcagcaccgagaagtccgcgtgaagtgcgtgaaggctctgaaagggctgtacggtaaccgggacctgaccgcacgcctggagctcttcactggctgcttcaaggactggatggtttccatgatcatggacagagagtacagtgtggcagtggaggccgtcagattactgatacttatccttaagaacatggaaggggtgctgatggacgtggactgtgagagcgtctaccccattgtacttttctaccctgagtgcgagataagaacgatgggtggaagagagcaacgccagagcccaggtgcccagaggactttcttccagcttctgctgtccttctttgtggagagcaagctccacgaccacgctgcttacttagtagacaacctgtgggactgtgcagggactcagctgaaggactgggagggtctgacaagcctgctgctggagaaggaccagagcacgtgccacatggagccagggccagggaccttccacctcctaggagaatctccaggaatttctgccattgtgcagggagcaattgaaaaatcaggcgagaggagctcgcccccacccaaacgtattggttcgatgaaggaagggcccatggttctgccactggccctggacacccagtgctggtttcccgtggaagtccccctggactga

SEQ ID NO: 116932 - DNA, 2379 bp, Homo sapiens
  misc_feature (1)...(2379): n = a,t,c or g
gctaagtctcaaaaaaaaaaaaaaaggaacatgctctctcattcaaggttacccccttcctatcactcccaaggattcaccccataatcttatctttcttgatatgttacactcactaaaatgttcacatcaaatcaagtttgtagacacttgtccttaccaccttacaaaaaagtgagatggtatcaacaagaggtaagacactgctttacctgcatgtcacttttggcagctttggcagcattgaaaagatcattggctgggtggctctaactgtttccagctatgacgatgtaccacttgggaccctttctttggatgttttgccaccggcattgttttcagtggtcgttttgttgctttcttcttcacaccgcgattgaagctgtcctcaaatcattttcttgtcttcttgtctgcaagtggccagtgccgagtgctgggccgccgctcgtcccggtgcatgtggggcagccagtacatgcaggtgggctccacgcggagaggggcgcggtcgcctgagatagggcttttcatggtacctcgggctggcgcgtgccagacaccaacgagtcggaagccgccagacaccaacgctcggaatccacgccaggccacgacggagggcgactacctcccttctgaccctgctgctggcgttcggaaaaaacgcagtccggtgtgctctgattggtccaggctctttgacgtcacggactcgacctttgacagagccactaggcgaaaaggagagacgggaagtattttttccgccccgcccggaaagggtggagcacaacgtcgaaagcagccgttgggagcccaggaggcggggcgcctgtgggagccgtggagggaactttcccaggtccccgaggcgggatccggttgttgcatcctggaagcgagctgagagctcgagtccagaacctgttaagcccatcaaacttatggacggaagtccagtccttcagatttgttcggggccgggggtaccgagtctaaggccgaatgcggtgaaggagttagtagaaaacagtctggatgctggtgcccactaatgttgatctaaagcttaaggactatggagtggatctcattgaagtttcaggcaaatggatgtggggtagaagaagaaaacttcgaaggccttaatctctttcagctctgaaacatcacacatctaagattcgagagtttgccgacctaactcgggttgaaacttttggctttcaggggaaagctctgagcctcactttgtgcactgagtgatgttaccatttctacctgccacgtatcggcgaagggttgggactctgactggtgtttttgatcacgatgggaaaatcatcccagaaaacccccctaacccccaccccagagggaccacagtcagcgtgaagcagttattttctacgctacctgtgcgccataaggaatttcaaaggaatattaagaagaaacgtgccttgcttccccttcgccttctgccgtgattgtcagtttcctgaggcctccccagccatgcttcctgtacagccctgcaaaatttgnatttcctagaagtaccccaaccccacccctgctccttggaggacaagcgtgatccctgtattcagctcttgtcaagaatggtccaggttcttctagatgatctgcacaaatggttcctctcctccttcctgatgtctgccattagcattggaataaagttcctgctgaaaatccacatctcccctgggtccggtgttctggaagtgagagagacaatgtcacacctcaaggagacagctctctagacaggaaggttattcacgtcccatgtcaagtctagctagagttcagagcaattgagaagtgcgattttatctcctgcctttcattctataccctgcttctgaaccatcgtgttcaactgtgaaactcacgctttggtgaccctgactccaaaacttaatacacccaaggtcagccccagtgatctgcttcatagcaaggactttgggtgggtcttcccagggagtagggcacccttcagagaatgtggctttggacttcatcacagctggggccttttgtgtcacttcagatctaaacttgtaaccgtgctagatctgtttctaacgtgacaacatcacgaaccacgagtccagaagcctaatccataatcctccctcctcatgacaaagtctcatgctctgtgctcaacatggttagctgcacaagatgtaaaccaaagcttcactgaaccctcgacccagatcggtaactcaagtgcatcaatcataatgaacctccccgaactcagtatttatgattatttttgaggcagggtctcaatctgtcggccgggctgggagtgcagtggcaggatcaggg

SEQ ID NO: 116933 - DNA, 697 bp, Homo sapiens
ttaatacctaagatgtttaataagatgtttaacatcactagtcatgagggaaattaacatttaaagcattatgaatcaccactgccaggtgctgatgaaaatgcagcgcgcctggagtcgcgggcgttcctggcgggggtggaaatcgggggctgcccatttggaagacagttgagctgatgagttgaacgtacccttaacataggctccagcaatcccactctcaaaagaaatgaaactgcacgtccccaccaaacctgcacgcaaacgtctgaagtggcttcactcacaacagcccacatgcccatccacaggtgaacccgtgagcaactgtggtacctccacctgtcccacaacctacaactcagcagtaccaagggctggacgctggtgccaccacacgggtcccgcgaagcctgctgccaagtgaaggaagccagacaccaaagtctccaatctgcgggagtcactcacaggacaattctggaggacgcaaagctttcggagcgaggagagacaggtcgttgcttggggcccggaaggggcctgaatgcagaggggcaaaaatgtgggctgcctctgtcggggcagaagtgccccactctagacccttaccaagtcgtcggctgtacatcgaaaacgggtgagccttatgtgtgtacgtgataccgcaataaacctgacttgtaaaagcaaa

SEQ ID NO: 116934 - DNA, 318 bp, Homo sapiens
atggacaagcagctgcctttgggctgctgtgccagcaacatcgtggccagtggtttggcaaagaaggcaacatcaaggcttggtcaaggcaacatcaaggcttggtcaatgcagccggggcaagagtccaagcagtgctaccccaacttgacaggagaggcagagaaactgaaggattccagctcatctgtctggacactccacagccaccaaagagccagcaccatctccctggatctgggcaccttccaaccttgagaagactcaggacggcagaatggtgtgccgtgaggaagttaggaggcagctagcctcgga

SEQ ID NO: 116935 - DNA, 834 bp, Homo sapiens
atggccacgtggcggaatctgacctccctcagctcgcttttctctttgcacctgattgttgtttggattcggcacaaagcacagagagcagcccagatccacgcagccttgctgctcagtgatggctgggagcctttactcctgcacagcatggaaacatcctccagcactgcctcgcaaagggccactcctaaggaaatgtttgccacccctcgctgtctcctgggccacatcattcaaagaccaggggggctgctgtcccttaaaaagcaaatgcatcaccaaatctgggaaatgatattccctggtatttcttcctatcaccagttcacaggagacaggtgtcaaaacagctttgctctgcagcagtgtggcaatgtctgccccaggacccctctgaagctgctgtgtagaatgtctgtagaatccactgggcactcacccatggacagcctggagataaatcttgaaaatgagaaacacattgctgaactgaagaattcattagaggctctcagcagtagaatgaccaggcagaggaaagaattgagagctgcttcattccttccaccaagggagaagacagctgtccatgaaccaggaagtgggccttcaccagacagcaatctgccagcaccttcttcttggacttccccacctccagaatggcaattgggggatgttattacgtccgctgaaagagagcctgttctgagggaccaggcgatctgcatgaagccccacgatggtgcctcagccagcggggttattctaggccagaagctcatggaagtggacacctgcaggtggggcccagaggacgaagggtggtag

SEQ ID NO: 116936 - DNA, 1226 bp, Homo sapiens
atgatctccttgggcccacacagcaccctgccagtttctgactttcaaagcaaaaatggctgcatctcagttgctgagaagccggggagtccttgtattcctgctgccaactcagaagggaaaacgaagtaaacagcagaagctcatggctgtctgtatcagtcacaagtttgcagcccaggcagctgagcagacagaaaaaactcgacatgaggcagtttcatctttgggtgctatattcatttggcaggacacgttccagcaatggttcagttttcaggatggcactgtgccatggcagcttaggccacaggggtggggctatcccagaggttccttctctggggcaatgcagctgtgtacatgtggacaactgtctacacaagatttgtggcctttgaagactggaggaccctctgtaggaattgctgccagtgtttgtggtggtgatggggaactgccaaggtctcctgcttaccatctccccataagaagtccccttggctccaggacaacatggcagggtagacagtattggagagatccacgcagccttgctgctcagtgatggctgggagcctttactcctgcacagcatggaaacatcctccagcactgcctcgcaaagggccactcctaaggaaatgtttgccacccctcgctgtctcctgggccacatcattcaaagaccaggggggctgctgtcccttaaaaaggcaaatgcatcaccaaatctgggaaatgaaattccctggtatttcttcctatcaccagttcacaggagacaggactcagagaagctgaaaaaagaagacctggtgggagctggcagacctgcagaagcagggcaattgggggatgttattacgtccgctgaaagagagcctgttctgagggaccaggcgatctgcaggaagccccaggatggtgcctcagccagcggggttattctaggccagaagctcatggaagtggacacctcaggtggggcccagaggacgaagggtggtagactagatgccctttatccccactgttctccagccctgggctccttgcctgcacttgctctttttgtgagacagcggtctagacgaatggagataacctttccagaccaatccccgcacctttcgccaggacatttgcatgcaattcttatgaaaggtcacccagaaactccgtggtcaaacagcatccttccaaacaacaaatgtgacagttaa

SEQ ID NO: 116937 - DNA, 835 bp, Homo sapiens
atggccacgtggcggaatctgacctccctcagctcgcttttctctttgcacctgattgttgtttggattcggcacaaagcacagagagcagcccagatccacgcagccttgctgctcagtgatggctgggagcctttactcctgcacagcatggaaacatcctccagcactgcctcgcaaagggccactcctaaggaaatgtttgccacccctcgctgtctcctgggccacatcattcaaagaccaggggggctgctgtcccttaaaaaggcaaatgcatcaccaaatctgggaaatgaaattccctggtatttcttcctatcaccagttcacaggagacaggtgtcaaaacagctttgctctgcagcagtgtggcaatgtctgccccaggacccctctgaagctgctgtgtagaatgtctgtagaatccactgggcactcacccatggacagcctggagataaatcttgaaaatgagaaacacattgctgaactgaagaattcattagaggctctcagcagtagaatgaccaggcagaggaaagaattgagagctgcttcattccttccaccaagggagaagacagctgtccatgaaccaggaagtgggccttcaccagacagcaatctgccagcaccttcttcttggacttccccacctccagaatggcaattgggggatgttattacgtccgctgaaagagagcctgttctgagggaccaggcgatctgcatgaagccccacgatggtgcctcagccagcggggttattctaggccagaagctcatggaagtggacacctgcaggtggggcccagaggacgaagggtggtag

SEQ ID NO: 116938 - DNA, 396 bp, Homo sapiens
atggtacctgacactggtgataacgaagatgaatcagtaacagtcactacccatgagcccttaaaaatagaagaggaaggccttagggtgaatcataaagatataacaatggaagaagaggcaggagagattccaagcatggaaggcactagacctgccactgccagctttgaagatggaggaagaggactagcctccctggtggcggatctgagaacagactccagagacaagactggcagcagagaccagttagaaggctactgcaaggaagagatgagcagaggggctggtggcagtggaggtgctaagatgtggcacacacgatactctgaaggtagagctcctgacattattggattggagtatgagaaaaaaatactcaaggatgactga

SEQ ID NO: 116939 - DNA, 411 bp, Homo sapiens
attgactcggcaacatgttcttgccttttggagttgccctccaatttttccaggcttgattctgtaaatcatttcatcttgtaaaaatactgggctgtgagcacggatgatctcaaagatgaggaaacagaagctgggatatgtgagtaaacatttccaaggtcctgcagctaatcaatggttgacaacttctttcctctgcctatgttgccatccatgtcatggtttgtgtcaagactctaggagaagtctaccatcagcaccacagctactgtgcacaaatccagaatgccagactgaagtcagaaggaaagagatgatgcagctcattgctgatgctgagatccaacgtccagtgcctgagtacccctggattctgagcactaggggctggactgtggagaccatcag

SEQ ID NO: 116940 - DNA, 774 bp, Homo sapiens
  misc_feature (1)...(774): n = a,t,c or g
atgaaaacactattggcccgtgcatcaagattcctggctttgccacgaactagctttaatgcccttagtaagtcacacaacctcttgggtttcaaggacatccgcagtaacgtggaagccttggcccagaagacccagccctctgtgttccccaaggagtcagtccaagttacaccagtttgctatactaaaggagacagggaaagtgtgcagaagtgtccgcttatttttagaagccactcagccacagaacaggtgtccataagaagaggagtgattgttcgtgtggctaagtggcgaggagagagtcacatccatggagggcctgatgtgccaggccttgtcctagacacctcttatgaaacatcacctttaatccacacaccagccctgagagtgtattacattggagaagacattgcaatggaacaagtcactaacctagcatttcccctgctatattccaactcccatagggtttcagagcctggggaactgggcttctggggtccaggagagtcagtgatgccggcagatgctgtgtcagtgccttgcacgtgccatcctggatcttacggagtccagcccctagtgctcagaatccaggggtactcaggcactggacgttggatctcagcatcagcaatgagctgcatcatctctgacaggaatgggtgataagaacatttccctttccttctgacttcagtctggcattctggatttggaattccaccacacggagctagtgctactctatnnnnnnntttccca

SEQ ID NO: 116941 - DNA, 246 bp, Homo sapiens
atggagaacacagaccatgataaactgggggatctcttagaagatgatagaaaagacttattaatagaaaatttatctttaaacctgcccaaactcgagaaaggctcatggctgtatggagaagcacagaaagctgcctctagttgtgaaagctttgaaaactgcatggacgtcatcacctgcaccatctcacttcacatgtttgtggcctgtgtcactttacttccatgcatcaagtctgcctga

SEQ ID NO: 116942 - DNA, 438 bp, Homo sapiens
ggcgcacaggaccacagagacccccaccccagcctagcagatgcaggctgtctgggcaatattgcagccttcacttccatgcccagctcttcggaggcatgtgggctccacctgtcactgcgatggggatgcaggctcattgcagcccagctgggccctctgtgacttctcacctggcccccttgataaggaaacaccaccctgtcatgcttggatggtgcaccaaggagttctggaagctaccatgctccctacagtgagatcatttctaagtacggccaggcaaggctgcttcccccttccaatggtgctctgatatacacagttttaatctggaacgattccttggccttcaggcctgtggaagaagaagagaatgcttaagggcagctccggccctcctctgtttctcatggggatgtggtcccaaggaaataa

SEQ ID NO: 116943 - DNA, 363 bp, Homo sapiens
atgaaagaaagcaaagctttctacttcagtttcagttacccgacaagtattttggagcgctatgtgtcaggccttattccaggttctgaagaagcaacagcaggaaaaaaaaccattcatggtcccatcatcacagagattatattacagtgctttagctccgcaccctacagctgtctgggtaaaggagagcatgtgagtggacccaaagaatggctaggtaaagccctgtccaagtctagaacagcaacagccatgctgcagcaatgtggaaacagacctgaagaaaaaactagcactgtgaggatggcagacggaagatggaaagagcttgggtccttgaggacactgtggaactgctga

SEQ ID NO: 116944 - DNA, 273 bp, Homo sapiens
atgcttgtgaatgctcatcagtgtctggacattgaagagttagatatttatcgtagtgttcacagtgtgggcctgtttgtacccatcctactgggaaagactttgcagggttgtgagttgccccagaccccagatgggtccagagatgctatccaggagcaggatttggatccagaaaccttagaaatctacctggtgctttatcctactgcggttaagctggcacccaaaccacaagacagtccttcccactcttccttcccctttccctag

SEQ ID NO: 116945 - DNA, 176 bp, Homo sapiens
atgctcttaacctgttcactgtatcacctcctgcaaggacaaacattccaccttcttttcccctcttcaacccacagcctctgccagcgcctcttattggctgaacctaatgagaagccagggagcctgggaaatgtgatggctgtggcaagaatagaaattggaatctgtgagta

SEQ ID NO: 116946 - DNA, 882 bp, Homo sapiens
atgcctccaagtgaacaggtgacagatgtcaagcctcctggcacccggaagaaaggcactgcaacagactatgaggattcctgtgttaatcagttttctgtaaacttctgcaaatccaagagaatgaccaccacctccaccaacaatatcacaacaacaaataacctaccacccaagaaggactatgagacacttattttccattttgctgggctgctgaaggcctttacctccacctcccctcatttccatcttcactggtcaagacgaggcactgtatttgctgcgagaatgaaaaatcatgttggagagaaggaagaaggcaagatactcccctctcgccagcatcagtgtcaacatgaacagccaggacctgacgggagtggtggctggattcgctcaatggctatttgggggaaggaccctgtctacagcctcatggctgacaggtgccggtcctgtgaccagtggatgaaactggcccatgccacacccgccttctctcttgatgttgtctgggtctggaataagccatggcaggctgatactgacttgggagctggagaactattagagaaagcagcaggaatggggctgcataaacgatgctcctcactcttattgaaacagcccactttcaagcatgaagcttcgtttaggattcacggagacgttgggataagcactctattcagagtcaagaaaggtgtgcttctcacactcatctctattgctgtggacagtcacagcaattcttcccatgggactcttggtgccacacttgctggcatatcaagggtcagaaccacgctcacagatcctcatctgtggggcagcagctgtagaccatcagtgatgaccctggtccagttccccggatga

SEQ ID NO: 116947 - DNA, 246 bp, Homo sapiens
atggtgtgctacgtcctgcaccaaccattgccacttcatactgaccaggtggaaccaaacactcacattccagttggctccccatccctccccagggagaacagatccacaggtggtgcaccttgctgggattacaagcaagagtcaccccactcggccagtgtggcccttcttcaggtcatcacttgccagccgcaggcggtggctctgcccctcaccggacacgacgtcacagccgggatgtga

SEQ ID NO: 116948 - DNA, 639 bp, Homo sapiens
atggaaaatggaaaaacaccctcagcatttcagttacctgataaaaatgagagacagatgaaaaggaggcagatagaaggagaaggagaagagataatgtctatgacatggggagagaaacaaaggctagagagaggtgtaatgtttcaagatcttcatcatcgaaaaaaaatcaataaagctaccgatacttctcattatgagaagttgacaccaattccagtgaacagaggaaaattcagaaaaatggcagccagatttataaatatttccaatgaaacattaagatcagttgagagagacagtgatacaagcagaattctcaatattaaggctgaggatagtactaaagccaggcctgccagtaggcctgtagacaccaatggatcaaattatataactgactttatcactaaaactaatccaaataatgtcatttcaaacaaccagtttacttctgaaggagagaacaaactgatcctcagagaggcgaatttatccagtgatgcccaagataacaagaagagtttgccagactgcaaatctcctcttttcccagaatgcagagagttaaagaacctgaaggaatattttgttttacaagaaagaagtgaagcagaacaaggaagtcatgagtaa

SEQ ID NO: 116949 - DNA, 411 bp, Homo sapiens
atgaggcacactacattatacgagaagcggaagtcgtgctacccgaacatactcgctcatcagccccggcagcggccgcgtcagctgtctcagtgtaatgggtggcggctggcacccagtccgggaatgcccaatggtggtgctagaaagctcgtcgtgatgggtcctccatcttcaagaaaggtagaatggactgaaggtcttttaaaaacacacctcaccaagctcagccaccaaaaaggactggacaatacttttatcactttcccttctcagaattcaggcctgtcctcggaatgctacaagatgcaggcaacagtgcaatggaatctggaagcacagacatgcagcacagaaggtgatgtgaatctgtcctgtctgcaagatccagattgtgtcactggtgtttga

SEQ ID NO: 116950 - DNA, 584 bp, Homo sapiens
caacatgccctgagtcagataactaaaatacctcttagtctaggtagatactttcactggataggtagaggcctttcctacagggtctgagaaggccacggcagtcatttcttcccttctgtcagacacaattcctcagttaagccttcccacctcaatatagtctgataacagatgagcctttattagtcaaatcagccaaacagtttttcaagctcttagtattcagtgaaaccttcatatcccttacagtcctccatcttcaagaaaagtagaatggactgaagatcttttaaaaacacacctcaccaagctcagccaccaacttaaaaaggcctggacaatacttttaccactttcccttctcagaattcaggcctgtcctcggaatgctacagggtacagcccatttaagctcctgtatagatgctcctttttattaggccccagtctcattccagacaccagaccaacttagactgtgccccaaaaaacttgtcatccctactatcttctgtctagtcatactcctattcaccgttctcaactcggacgcgtgggtcgccccaagaattccgcgaaat

SEQ ID NO: 116951 - DNA, 826 bp, Homo sapiens
ttatctgattcaatacgtgtggagctttgcatcaaccaagaacttgtttagggccactcttggtgtccggctgcttgcaaaagtcaaatcaattttactttctactcttgtcagtcatatctgcaaggctgacagttaccaggggctgtggccaggcatgagggagaatgtgtcattgctggctgcgttggtcatagcaacgtgtctgcctcagaacagatccagcatggatgagcaaacagaaaaatgtgtaagaaggcttgtgactgaaacagaccaaggaaatgatgaatgcatgggtcccataggtgaatgcattggtccacaggcagagagaatggagttccaagtcagtcaggccaaggttcaacacaaggaggtgggaacttcagactggaagctgaagcagtttctatggtcattagcggcagaggccagcccagaagaccagggagacttcactccatcttggaaatataggacaagcctcatccttgatttttgccaattgtctctgactcagccttccacccaccaggtggttgagaaatccaaggagggcctttcttattcttcctcactcttcacttgggatcatacaggaaacctggtccagaaatgctgggaagggcagcaggatttcgttccatactctcgggattttgttcttcattcaggggtactgctgatgatgtgtggttctgctcagggatctgtgctcaggccctcagactgcagcactagcgttcagactctccaggtgcatagcaggaagcacacactcaacttagatgaggacttaatacctctgctgtactctgtgtga

SEQ ID NO: 116952 - DNA, 382 bp, Homo sapiens
ttagagtttattaagcaggggagtggaggggagatgtggcacaaatagaagtatgtaacattcaaacaacagaaaaaactttcggttacagttacacaaagggtcacttcctccccagcgacacatgggcctctcaaaggagaggagggagtaagtcccacggtagggccagtggttgctccctgggttttggaatcatttctgcggagctttcaaggccagaccctgggcttagggtcgagacttcatagcagtgacagccagacccagcaagatggctgcgaccgtgaaaccctgggcggcgatccgggtgcgcatcatgagctgagagcgctgctgttgccccggtggaaggagtagaggccgtaggtgagggcggccc

SEQ ID NO: 116953 - DNA, 958 bp, Homo sapiens
  misc_feature (1)...(958): n = a,t,c or g
gacactgtaaccaaacttctgcctccgggttgttgcccttggccttgggcatcgcgctgaccaccgcaccagcagctcaaacacgctgcctctgtctctcagacctcgtgtaaacaaactccttccggaaaggcgtgcacaaaggctttgcgggcatttggggaaatgtagtcctttttggttaactacccgtgctgagcactacgactccccaggatgcaacgagcatttgcgcctgcgtacaaggctcaatttattcgtttccccgcccctttcatgaccttcaccgggaggctgaggtcggagtcccgattttctcctgctgctgtggcccggacatggcgactcccggccctgtgaattccggaggtcccctttgaaccatcgaagcctccagtcattgaggggctgagccccactgtttacaggaatccagagagtttcaaggaaaagttcgttcgcaagacccgcgagaacccggtggtacccataggttgcctgggccacggcggccgcccttcaccttacggcctcttactcctttccaccgggggcaacagccaggcgcttttcagcttcattgattgcggcacccggattcgccgcccaggggttttcacggttcgcagccatttttgctggggtctggctgtcactgcttattgaagtctcgaccctaaagcccagggttttgggncttgaaaagctccgcagaaatggatttccaaaaacccaggggagcaaccacttggcccttaccgtggggaattactccctcctctcctttgagaggcccatgtgtcgctggggagggaagtgaccctttgtgtanactgtaaccgaaagttttttcaaaaatcctagatgctgttgtttgaatgttacatacttctatttgtgccacatctcccctccactcccctgcttaataaactctaaaaatccacttgtatttaaa

SEQ ID NO: 116954 - DNA, 915 bp, Homo sapiens
atggaatactatgtagccatgaaaaagaatgagttcacgtcctttgcagggacatggatgcagctggaaaccatcattctgagcaaactatcagaaggacagaaaaccaaacaccgcatgttctcactcataggaaagggcttcgtagctatcctcacatctggtggactctcaatagaacttgttggatggcttaatgtctacagtcctgcccacagcaatgttaggctaacaacaacaacaacaaatggaaacccggatggaatgggaaacctgaggatcacagaaaaaggtctaaagctagaaggagactctgaattcttacaacctctctacgccaaagaaatccagtcccgaccaagctcccagaggaaggagcagacagccgtccttgctgttctgcagactccactggtgacacctccaggtgcaggaaaagacccaggagtggccccccagcaaactgcagcagctgtacagaagaggggcctgactgttaaaagtgaacagaaagcaacaacaacatcaacaaaaaaatacccacaaaaccctatccaaaggtcagcagcctcaaataacaaagcaataaccacatccttaggttctgctgtgctgccttgcaacacgctggctcagaataaagaattgtctagagtatcacagcaaatcaggggtaactgcagagcaattccaaatcagaagagccaggcaccccttcatagtcttttgagatcagaacctgcagactatgtaatctatcctggttccctgtacccgtcttcggcctgggggttgggaacccctgatctagcaaatgggaaccacgggtgcccagcttatcacatgcgatttggaaatggaagtatggatatgtctgcgggaagcccaatactggggacattcaaagaatgttga

SEQ ID NO: 116955 - DNA, 798 bp, Homo sapiens
atgatggaagtggcatttgacctgggccttataggatttgatgcactatggggaacaaaaggaaaggaaaagtactttctggctgagaacactgtaagcaaaggcaaggacatgggaaaacccagccccactcagcagtcagtgaaagcaataaccacatccttaggttctgctgtgctgccttgcaacacgctggctcagaataaagaattgtctagagtatcacagcaaatcaggggtaactgcagagcaattccaaatcagaagagccaggcaccccttcatagtcttttgagatcagaacctgcagactatgtaatctatgtatgtgaattcaggacattagaaggcaaaagccagcattttggtgaatggattgccaaagccattcactttgcgaagaataggactaatagaataagagctcctgttcagcatctgagagatcaacacccagaaattcggctaagtgttgacatgaggtttccatatgatgatggcattaatgcacctgtaggctatatttatgtggcaatgaaggaggctcaagaaattcataaaactggaagctatgtaatagaaaacagtttaaaattcagattcagatggaatttacaacccgttagtaagaagctggagtgcttggtgatgtatctgtggaccaagggatctgagtgtaaatcaatggtcataaagttagctcttactggctgcaccagcaggccccaggctcacacaggcagcaatgtctgcagtgagaatggcatgagggtcacagaattcaatgagataaaataa

SEQ ID NO: 116956 - DNA, 707 bp, Homo sapiens
tttcaaaggacacaaagagagatgtggactcaaagtcaccggggatgcctttatttgaagcagaggaaggagttctatcacgaacccagatatttcctaccactattaaagtcattgatccagaatttctggaggagccacctgcacttgcatttttatataaggatctgtatgaagaagcagttggagagaaaaagaaggaagaggagacagcttctgaaggtgacagtgtgaattctgaggcatcatttcccagcagaaattctgacactgatgatggaacaggaatatattttgagaagtacatactcaaagatgacattctccatgacacatctctaactcaaaaggaccagggccaaggtctggaagaaaaacgagttggtaaggatgattcataccaaccgatagctgcagaaggggaaatttggggaaagtttggaactatttgcagggagaagagtctggaagaaccgaaaggtgtttatggggaagggagaatcagtagaccatgtggagaccgttggtaacgtagcgatgcagaagaaagctcccatcacagaggacgtcagagtggctacccagaaaataagttatgcggtttccttttgaagacaccccatcatgttctggagcgggcagatgaagcaggcagtcacgggaatgaagtcggaaatgcaagtccagaggtcaaactggatggcccg

SEQ ID NO: 116957 - DNA, 1103 bp, Homo sapiens
atgaaggcaagggaaagcctgcagaaggaaaccggtcacagccctctaacgggtgtcagcctccctgcccatcagaatcgccagggaagctttaaacatgcaatcccaagcccaccccaaacaatggagtcagaatcctgggagtgggacccagcatcagtacttaacgctcctggggtgcgtctaggatgcagtcaagtgcgcaccgggttagtggcccacatcgcagggagaatggagaaatctgggggaaaacgccccgcccgtaccgtggtccccgaatcacgaatttctggaggagccaccgcacttgcatttttatataaggatctgtatgaagaagcagttggagagaaaagaaggaagaggagacagcttctgaagcgatgcagagaaagctcccatcacagaggacgtcagagtggctacccaaaaaataaggcatttggttccatttgaagacacccatcatgctctggagcgtgcatatgaagcaggcagtcacggtaatgaagtcggaaatgcaagtccagaggtcaatctgaatgtcccagtacaagtgtccttcccggaggaagaatttgcatctggagcaactcatgttcaagaaacatcactagaagaacctaaaatcctggtcccacctgagccaatatttcccttgtgttcactttagcctgtgggccaccagcatcaacatgcagggtcacaaatgtgatttgccaaatcagacctgcagctgtaaggcaacagcactgacttctggattttacggtaaagaggacagactgttatcagagactctgataagactaaaagtggtgagggggcgtatgggagggaaatgaagtcccctcacaagtttccagaaggaaaaatccacaacgacaaagaacatgataggatcgtccaagaatttctggcagagactggaccaaaagtcacaaggtttaatgagcagtgtcgtttcaggccacgaatttgtgagcgcctgtttctgctcacagcttgcccacttctctctctctaccataaagctttttggtcaaactccacttagcttagcagctgccactatttccaggatctggcaacgagaataa

SEQ ID NO: 116958 - DNA, 434 bp, Homo sapiens
  misc_feature (1)...(434): n = a,t,c or g
gcacgggggagcgaggcctgctggnttggcaacagagggactcggcctcggaggcgacccagaccacacagacactgggtcaaggagtaagcagaggataaacaactggaaggagagcaagcacaaagtcatcatggcttcancgtctgctcgtggaaaccaagataaagatgcccattttccaccaccaagcaagcaganctgttgttttgtccaaaatcaaaactgcacatccacagagcagagatctcaaagattatgcgagaatgtcaggaagaaagtttctggaagagagcatgcttgtcacccagggactagtctaccaaggttatttggcagctaattctagatttggatcattgcccaaagttgcacttgctgggtctcttggggatttggccttggaaaggtatcatacataggagtatgccaga

SEQ ID NO: 116959 - DNA, 487 bp, Homo sapiens
ttccattagaagtattttattttaaagtacacttgaaattttaaatgtgtacaaattcagaggtttaaaaaacttcgaaagtcacagacacagaatttaggaagctgaaggctgagagtctcccttctcacttaatccatgctttattttgcattcctcacaggtaaggaggcagtgcctagaagagaagcaaaaatagacagcggtttgtactttgacactggaagccctagtctttacataacatattattcttattattttaacataatctttttaatagagatgtggggggagtctatctatgttgcccaggctggtctcgagggctcaagggatcctcccacccaaccctcttgagtagctgagactacaggcatgaaccactgcacctggctttaacacaatattagaaatatagtctatgctaaagttcactagccttgttttttcagaaataataggagtattctcccattctgtaggt

SEQ ID NO: 116960 - DNA, 806 bp, Homo sapiens
gccggggagacaggtggggtactcgggaagctggagcgagccggcggtgcagtcacgggggagcgaggcctgctgggacttgggcaacgagggactcggcctcggaggcgacccagaccacacagacactgggtcaaggagtaagcagaggataaacaactggaaggagagcaagcacaaagtcatcatggcttcagcgtctgctcgtggaaaccaagataaagaatgcccattttccaccaccaaggcaagcagagcctgttgttttgtccaaaatcaaaactgcacatccacagagccagagatctcaaagattatgcgagaatgtcaggaagaaagtttctggaagagagctctgcctttttctcttgtaagcatgcttgtctaccccagggacttagtcctacccaaggttatttggcagcctaattcctagatttgggatcattgcccccaaagttgccacttgcctggtcctcttgggatttggcccttggaaaaggtatcataccatagggagttttgccagagttaaattccattttttttgaagttccagcttccgtggggctggttttggtccacaggcatatacaggcactgcctccttaacctgttgaaggaattgcaaaattaaagcatgggattaaagttgagaagggagactcctcagccttcagcttcccaaattccggtgtccgtgactttcgaagttttttaaaactcttgaatttgtacacatttaaaatttcaagtgtactttaaaaataaaatacttctaatggaccaaaaaaaaaaaaaaaaaa

SEQ ID NO: 116961 - DNA, 440 bp, Homo sapiens
  misc_feature (1)...(440): n = a,t,c or g
ncatataatagatgtccagcattcagacattgtttctctattatttaaatccatggcttcttcctgtttgatttgatgaaggcggctgatggaaccatgaaagggaggaggtggcaacaaccaagtccattgatcaaaggggcactgttgactcttctcagaatgttgccgtctgcggtagtggaactcggcagcgacttgaaacctagtttcattttctcctgtgccatgtccgggtcgaggaataagttctcaaggctttccggctcccgtccacacaaggacaagtctccaagtctataatgtaactggggaatttaatctgtcaccgccgcgaatccttctccatctctctcagccctggcaactcatggtaagcctttccggccaaaacaaaaactacaatccccggctcgagccggggaattccaccacacgga

SEQ ID NO: 116962 - DNA, 574 bp, Homo sapiens
tacatgtcagctgcaccacctgtgaataaaaccaagtccattgatcaaggggcactgttgactcttctcagaatgttgccgtctgcggtagtggaactcggcagcgacttgaaacctagtttcattttctcctgtgccatgtccgggtcgaggaataagttctcaaggctttccggctcccgtccacacaaggacaagtctacttagtgggcaggtgatgtaaggagagaggcaaaggggaaaaagagaagagaggagaaagctcttaggcgagtaggggtgcccacctttgcagccctagcagccctaacatcagtgaacacaaagttaggcagaactggctccgaaccgcctatctcccatgatcggggcctctaacgatgagaagatcccccacctccaagtctataatgtaactggggaatttaatctgtcaccgccgagaatccttctccatctctctcagccctggcaactcatcgtaagcctttccggccaaaacaaaaactacaatatgaaacatttgacaatcagttgggtcccgcccctcagagcctgcgataagctatcagcg

SEQ ID NO: 116963 - DNA, 715 bp, Homo sapiens
ccatttaaaaagattttttttaatgcagtactcttggcattatgcataattacttacagtcatcccttggtatatgtggggaattggttccagcacccccccactgcaataccaaaatccacacatcctcaagtccacagtgggccttctggaacccgaggatacaaaaagtcacccatacgtataggaggggtttcacatcacacgccattcaaatccatgttgttcaagtttggaggttcctgtttgatttgatgaaggcggctgatggaaccatgaaagggaggaggtggcaacaacagagagcgtcgattcctaaatgttgttctgtttgtcctaattcttaacatgtcagcttgcaacacctgtgaattaaaaccaagtccattgatcaaaggggcactgttgactcttctcagaatgttgccgtctgcggtagtggaactcggcagcgacttgaaacctagtttcattttctcctgtgccatgtccgggtcgaggaataagttctcaaggctttccggctcccgtccacacaaggacaagtctccaagtctataatgtaactggggaatttaatctgtcaccgccgcgaatccttctccatctctctcagccctggcaactcatggtaagcctttccggccaaaacaaaaactacaatctgccgcctttgacaatcagttgggtcccgcccctcagagcctgcgataag

SEQ ID NO: 116964 - DNA, 1029 bp, Homo sapiens
atgccaaatgttaatgaggatgtggagcaaatagaacttgtattcattgctgtggagaaccgtccagctcatggtatggtacaaacacaagtgcgccttgcaaaaaaaaactttgacaaattgaagatggatgtttgtcaaaaagtggatcttcttggagcgagcagatgcaatctcttgtctcacatgctagcaacataccagaccactctgcttcatttttgggagaaaacttctcacactatggcagccatccatgagagtttcaaaggttatcaaccatatgaatttactactttaaagagcttacaagaccctatgaaaaaattagttgagaaagaagagaagaagaaaatcaaccagcaggaaagtacagatgcagccgtgcaggagccgagccaattaatttcattagaggaagaaaaccagcgcaaggaatcctctagttttaagagacccatagatgaactattagacatgaaatctgaggaaggtgcttgcctgggaccagtggcagggaccccggaacctgaaggtgctgacaaagatgacctgctgctgttgagtgagatcttcaatgcttcctccttggaagagggcgagttcagcaaagagtgggccgctgtgtttggagacggccaagtgaaggagccagtgcccactatggccctgggagagccagaccccaaggcccagacaggctcaggtttccttccttcgcagcttttagaccaaaatatgaaagacttacaggcctcgctacaaggtaggcaaagtgagagaagttcatctcagtgcccacagtggggctgccagactatgcctgagagctgtgacaagggcagcggccatggggaattgcacttcagccttgccccatatacacgggaaaggcaccaaaccacactgaggtctaaggagggaggtgttctgggagggagagagaaacacaagctcatgctacggaaagagaaacaggaactgcaaagggaggccatttgttactcaggccaacaacatctcatttga

SEQ ID NO: 116965 - DNA, 1415 bp, Homo sapiens
attaacccaggagatgggggtcgaggagagaccccggggagtagagagagagaaactcactccccgagtccccgaccctccccaagcaaggttataatataacttatcctctcatgcttttttcctgccccttctccccaaatcatcaacaatagaagaagaagaaaacatgtcaggacacaaatgcagttatccctgggacttacaggatcgatatgctcaagataagtcagttgtaaataagatgcaacagaaatattgggagacgaagcaggcctttattaaagccacagggaagaaggaagatgaacatgttgttgcctctgacgcggacctggatgccaagctagagctgtttcattcaattcagagaacctgtctggacttatcgaaagcaattgtactctatcaaaagaggatatgtttcttgtctcaagaagaaaacgaactgggaaaatttcttcgatcccaaggtttccaagataaaaccagagcaggaaagatgatgcaagcgacaggaaaggccctctgcttttcttcccagcaaaggttggccttacgaaatcctttgtgtcgatttcaccaagaagtggagacttttcggcatcgggccatctcagatacttggctgacggtgaaccgcatggaacagtgcaggacggaatatagaggagcactattatggatgaaggacgtgtctcaggagcttgatccagacctctacaagcaaatggagaagttcaggaaggtacaaacacaagtgcgccttgcaaaaaaaaactttgacaaattgaagatggatgtttgtcaaaaagtggatcttcttggagcgagcagatgcaatctcttgtctcacatgctagcaacataccagcttgcctgggaccagtggcagggaccccggaacctgaaggtgctgacaaagatgacctgctgctgttgagtgagatcttcaatgcttcctccttggaagagggcgagttcagcaaagagtgggccgctgtgtttggagacggccaagtgaaggagccagtgcccactatggccctgggagagccagaccccaaggcccagacaggctcaggtttccttccttcgcagcttttagaccaaaatatgaaagacttacaggcctcgctacaagaacctgctaaggctgcctcagacctgactgcctggttcagcctcttcgctgacctcgacccactctcaaatcctgatgctgttgggaaaaccgataaagaacacgaattgctcaatgcatgaatctgtacccttcgggagggcactcacatgccgcccccagcagctcccctgggggctagcagaagtataaagtgatcagtatgctgttttaataattatgtgccattttaataaaatgaaagggtcaacggccctgtttatattggtat

SEQ ID NO: 116966 - DNA, 806 bp, Homo sapiens
gagctgatcacttcaagcttggcacgaggctagagtctgatgcccagaaactgaacttgctttggaggacaggggacaagggaacatgggattcgaaatttaattctataaactcttaagagaggctataataataggatgaacttatattttgatgacatttttcttaaatctagccatcaaccagtctcccccttcgcagcccccacagcattgattcctgagggcttgagccctccgtggtgacgttttgttctctgttacttcaatcagcttgcctgggaccagtggcagggaccccggaacctgaaggtgctgacaaagatgacctgctgctgttgagtgagatcttcaatgcttcctccttggaagagggcgagttcagcaacgagtgggccgctgtgtttggagacggccaagtgaaggagccagtgcccactatggccctgggagagccagaccccaaggcccagacaggctcaggtttccttccttcgcagcttttagaccaaaatatgaaagacttacaggcctcgctacaaggtaggcaaagtgagagaagttcatctcagtgcccacagtggggctgccagactatgcctgagagctgtgacaagggcagcggccatggggaattgcacttcagccttgccccatatacacgggaaaggcaccaaaccacactgaggtctaaggagggaggtgttctgggagggagagagaaacacaagctcatgctacggaaagagaaacaggaactgcaaagggaggccatttgttactcaggccaacaacatctcatttga

SEQ ID NO: 116967 - DNA, 2035 bp, Homo sapiens
  misc_feature (1)...(2035): n = a,t,c or g
cggccgccgcaggaagggccggttcctgcgctccccccgcccctttccctcgccttcggctgacgctnacgtcggatgagtgatccggagggacgctccgaccgcggccgggaggctcctgggggccggggctccgaggttataatataacttatcctctcatgcttttttcctgccccttctccccaaatcatgcaacaatagaagaagaagaaaacatgtcaggacacaaatgcagttatccctgggacttacaggatcgatatgctcaagataaggcatgtgtaaataagatgcaacagaaatattgggagacgaagcaggcctttattaaagccacagggaagaaggaagatgaacatgtcgctgcctctgacgcggacctggatgccaagctagagctgtttcattcaattcagagaacctgactggacttatcgaaagcaatttgtactctattcaaaagaggatatgttcattttaggaggccaaggcaggaggatcacttggagccaggagtttgagaccagcctgggcaacaaagtgagacccccatctctacaaaaaataaaaacacttaaaaattatccgggtaccgtgcatgtgcagtcccagctactcaggaggctgaggcaggaggatcacagtgacctataatgagccgttgtgctccagcctgggcgacagaagtcttgtctcaagaagaaaacgaactgggaaaatttcttcgatcccaaggtttccaagataaaaccagagcaggaaagatgatgcaagcgacaggaaaggccctctgcttttcttcccagcaaaggttggccttacgaaatcctttgtgtcgatttcaccaagaagtggagacttttcggcatcgggccatctcagatacttggctgacggtgaaccgcatggaacagtgcaggacggaatatagaggagcactattatggatgaaggacgtgtctcaggagcttgatccagacctctacaagcaaatggagaagttcaggaaggtacaaacacaagtgcgccttgcaaaaaaaaactttgacaaattgaagatggatgtttgtcaaaaagtggatcttcttggagcgagcagatgcaatctcttgtctcacatgctagcaacataccagaccactctgcttcatttttgggagaaaacttctcacactatggcagccatccatgagagtttcaaaggttatcaaccatatgaatttactactttaaagagcttacaagaccctatgaaaaaattagttgagaaagaagagaagaagaaaatcaaccagcaggaaagtacagatgcagccgtgcaggagccgagccaattaatttcattagaggaagaaaaccagcgcaaggaatcctctagttttaagactgaagatggaaaaagtattttatctgccttagacaaaggctctacacatactgcatgctcaggacccatagatgaactattagacatgaaatctgaggaaggtgcttgcctgggaccagtggcagggaccccggaacctgaaggtgctgacaaagatgacctgctgctgttgagtgagatcttcaatgcttcctccttggaagagggcgagttcagcaaagagtgggccgctgtgtttggagacggccaagtgaaggagccagtgcccactatggccctgggagagccagaccccaaggcccagacaggctcaggtttccttccttcgcagcttttagaccaaaatatgaaagacttacaggcctcgctacaagaacctgctaaggctgcctcagacctgactgcctggttcagcctcttcgctgacctcgacccactctcaaatcctgatgctgttgggaaaaccgataaagaacacgaattgctcaatgcatgaatctgtacccttcgggagggcactcacatgccgcccccagcagctcccctgggggctagcagaagtataaagtgatcagtatgctgttttaataattatgtgccattttaataaaatgaaagggtcaacggccctgtttatattggtat

SEQ ID NO: 116968 - DNA, 633 bp, Homo sapiens
gagagcggtggcctggaaaccgcttctagacaatcctgtattatttagatccacatagagatacacgaaaaccctttataccaaataagagtaaataattataccaatataaacagggccgttgaccctttcattttattaaaatggcacataattattaaaacagcatactgatcactttatacttctgctaagcccccaggggagctgctgggggcggcatgtgagtgcccttcccggaagggtaccagattcatgcattgagcaattcgtgttctttatcgggttttcccaacagcatcaggatttgagagtgggtcgaggtcagcgaagaggctgaaccaggcagtcaggtctgaggcagccttagcaggttctggggagagaagaggaaacatgagcaaacgcaccttccaaatgtccacctctgccatgcgggatgcaggcaggtccaggtcatcttcaaatgcagattgttcaatcagtcaaatccctgtgcactctctatgacaatagttagggaattccaactcccgtggctggttggccagttaacatttccaaaccagggcctgaagctccgagaataacaagctcttgtgttaacaaactcccacctgcaccccaacccca

SEQ ID NO: 116969 - DNA, 3491 bp, Homo sapiens
atggccacgtggaacacctgccggagagcaggggcggggtcactctgggcggcggatccgagcgggggatacccaggagatgggggtcgaggagagaccccggggagtagagagagagaaactcactccccgagtccccgaccctccccaagcaaggcgagtcgcctcctcgggtcccggatcccggtgcggaaccgcatcagccccttcccctcccctcctccctccggcctgggaaggtctggaggatgcgcgcgccgtgagagcgtgcgtcagccccgggggagcggtagggaagcgttccgcgctccggccccagcgctgggagcaccggcacccatgccagcccaccccacccacccaccgcgcgcctcgccttcccggcggctccggccccaggaccccgagctccctggtgggcagggacttgcgtccagggttgacttgttgacaagttcacctgccgcggcgcctggccagttgcttaagataactgaacttaaacttcttcgtgaaatgaatataaatcattatgtcaacttggccgtattgcgaggatactccgtgatgtgggtgaagcatacaccccagtgtctgagaagtggcagttcctcaattagtggtaactccttgtcccagtgtaaacctactgagtggccttggacaagtctgatcatctgtgattcaggaggattagatgcactaattagtgtaagcacaggactgattctaaatattcgttgcatggttgtggaggtggtggagggaccacagaaagaagaatttgagagtgcagatggaaagaggagtttagttttagatgtgctgaatttgaagtgcctgtggaacaatccaggtgaagattaccatctggaggtggaaatgtggatctggtgccctggagaggttgttatatcaaaattagaaacttgctttccattgatctattcatccttgggcctctgcttctttgagcagatcttaattattggtgcaactgctttgtcttctttgaggaaacagtttaactgtgaaacacaaacattcatgcgatcaagttgtgctgactgtgacaatatcttggcgctcacagtccatcagcatcttgttacttgcccttctttgcttatctcccaagccttgcattccagggatgaagccgacttgattgtggtggataagctttttgatgtgctgctggattccgtttgccagtattttattgaggattttcacactgatgtttatcagggatatagcagttatccctgggacttacaggatcgatatgctcaagataagtcagttgtaaataagatgcaacagaaatattgggagacgaagcaggcctttattaaagccacagggaagaaggaagatgaacatgttgttgcctctgacgcggacctggatgccaagctagagggggaaagcacatccgaggaagctaagtgtcactctggtgcctgtggcttggctgctggtgtgtgttcaggacccccactgtaccattatgtggtcttgtctcaagaagaaaacgaactgggaaaatttcttcgatcccaaggtttccaagataaaaccagagcaggaaagatgatgcaagcgacaggaaaggccctctgcttttcttcccagcaaaggttggccttacgaaatcctttgtgtcgatttcaccaagaagtggagacttttcggcatcgggccatctcagatacttggctgacggtgaaccgcatggaacagtgcaggacggaatatagaggagcactattatggatgaaggacgtgtctcaggagcttgatccagacctctacaagcaaatggagaagttcaggaaggtacaaacacaagtgcgccttgcaaaaaaaaactttgacaaaattgaagatggatgtgtgtcaaaaagtggatcttcttggagcgagcagatgcaatctcttgtctcacatgctagcaacataccagaccactctgcttcatttttgggagaaaacttctcacactatggcagccatccatgagagtttcaaaggttatcaaccatatgaatttactactttaaagagcttacaagaccctatgaaaaaattagttgagaaagaagagaagaagaaaatcaaccagcaggaaagtacagatgcagccgtgcaggagccgagccaattaatttcattagaggaagaaaaccagcgcaaggaatcctctagttttaagactgaagatggaaaaagtatttttttctgcctttagacaaaggctctacacatactgcatgctcaggacccatagatgaactattagacatgaaatctgaggaaggtgcttgcctgggacccagtggcaggacccccggaaccctgaaggtgctgacaaagatgacctgctgctgttgagtgagatcttcaatgcttcctccttggaagaggggcgagtttcagcaaagagtgggccgctgtgttttggagacgggccaagttgaagggagccagtgcccacctatggccctggggagaagccagacccccaaggcccagacaggctcaggtttcctttccttcgcagctttttagaccaaattttgaaagatttacaggcctcgctaaaagaacctgctaaaggctgccctcaagaccctgactgccctgggttcagccctcttcggctgacctcggacccactctcaaaatcctgatgctgttgggaaaactcgataaagaacacgaattgctcaatgcatgaatctgtacccttcgggagggcactcacatgccgcccccagcagctcccctgggggctagcagaagtataaagtgatcactatgctgttttaataattatgtgccattttaataaaatgaaagggtcaacggccctgtttatattggtataattatttactcttatttggtataaagggttttcgtgtatctctatgtggatctaaataatacaggattgtgctagaagcggtttccaggccaccgttctcctgcctacatcccattcatggctgcttgcggtgtcactgggctaccgtgagatccaagttgaaattcagaagcctactttgatggtaggtttgaaattacgtgtcctacagcctcagaggcagacaggaggctagcaaagctttaaatgccttccttctctgcccccagccttctgtcccccttggaggagggctgtaggaagattccctcttcctgccaagccaccttccagtgagctctggatgaagctctggccaaccaaagacactgtccccacagcaggtgcctggtgggccacgtgttctcacactggtggaggagctgggcttctgtccaaggcacaaaccttaatattgggaagcagccatatttgcagataccactgtctccttttgtcctcttcgtggctggaattcaaaagcatgtatttctgaagcctcttgtgacattgtttttttttttttttttaattaaacagaaaagatatttgacatgca

SEQ ID NO: 116970 - DNA, 321 bp, Homo sapiens
atggcctcgactgtgcttgggaagtctctgcagaggctctcaccattgcccctggtgtgcttctccttccccggcttcctctttgctgtctgcactgggggcgagaatgaacctaaacgcctgaaaaaacaccttccccaaatcctgaaactcctgaaaccagatgaccggattctgattgtggggaccacacggcgtcccttcgatgctgaactccaatctttctgcaaagtttaccagaaaattattttggtgcccagaccagactatgcttccagatacggcaagtacccccagccccttcccatgcatgatagctga

SEQ ID NO: 116971 - DNA, 552 bp, Homo sapiens
atggagcttgcaggactggaggatgctcagtctattcaatcactcagccagcacttattgatcaccaagctatttgatcaaccagtactattgatcaccaagctattgatcagccaatacttatggatcaccaacctattgatcagccagcacttactgatcaccaagctatttgatcagccagcacttattgatcaccaagctattgatcagccaggacttattgatcaccaagctattgatcacccagcacttactgatcaccagacaggcactgaactaggagatacagtggaaggactatggtctctggttacacttattagtggtgataatggtgacatgtacttgttggcgtacgttaagaaaacttctgcagtatacagatggccaataattactaccctaactcaaattctatgcgacctctgttttggtgctcatcaccacctggcagcttccctacgtctatacgttgaaaatcctgagacgactctacgtctcaaaaactattatctctgtctgagtgaagctcatcacaccaaaccataa

SEQ ID NO: 116972 - DNA, 603 bp, Homo sapiens
atggatccaaaccaagaagaaatctctgaattgccagaaaaagaaatcagaacattgattattaagctaatcaaggaggcaccagagaaagaagaaatttctaagcagcaaagcattcaagagaagacgacagatgactttgatcacgacaccaacacttacctgggtaagaacccagaggatttacagggcccatcaaccagaagcagcattttcagattcaaggcagaaagtatggtcatgggtaacaatttagtgaaaagcctgcactataaaccaagaagttcgaatgtcatgtcctctgtatcagtccattctcacactgctataaagatactacatgagaccagaaattatggttatctgctttcctgcatggaacgtaaatccttaaaagtagggcagaagtggattcatgcttggattctcagggcctggtttactcagtggtcccaaaagcaaacatctatagggtggtcacaaagaaggaagccaggggtaaaggatgttcttgcaaatcgttccttgattgtaatggatgaaaagaaaaaagaaatgggagaggcccactgcatcaccaactgcaacggaaattccctttga

SEQ ID NO: 116973 - DNA, 406 bp, Homo sapiens
cctgttggctagctgctgctcgaagtccccacaatgccgcaaaagctctccacaggtggctattatcctaatggagttctgaaaagccgtccaatcttcctggaagagggagttgggaggaatgtggtccagtttgcacttctttcgtatggactggagagtgctggtgaaatcagacacataccagaggcacagcactcatctggatgaggaggttgctctcttccatgtcgccatacttcagctggtagggtttgtatggatcatacacagcatccaccagctccgtgacttttaccagattgtgttcattggtatcctcacatccttctggtcccctccttcagctagttttattattactatttacagcctcatcctccttccctcttcctctagcacgaaa

SEQ ID NO: 116974 - DNA, 831 bp, Homo sapiens
ttaagccgagtcagcgctgctcgaggtgcagccagcaggttgtggttgcttgaacccctttttcccttaaagggtaataaagtaatttcccattaaaactggccatattcagccagggttaatctttcctggaggtaaattatattcttgcccatgggttcttggacagagttccttcttgtctgtaaaaaatgctctccctaaaaccgacccaggctcccgggggctgcaggaatcagatagatacttccccagctgtggaacaaaatcctgttggcctagctgctgctcgaagtccccccacaatgcccgcaaaagctctccacaggtggctattatcctaatggagttctgaaaagccgtccaatcttccctggaagagggagttgggaggaatgtggtcccagtttgcacttctttcgtatggactggagagtgctggtgaaatcagacacatacttggcaaagagggatttcagggctgacaacaggccgcaggtcccccaggccattggtgaatctggacgcatctgtcaacggctgcagacgccagaccaaacagcttgttcacggagtggcttcactactgcacacagtcaatcacttccccatgctccagaggcacagcactcatctggatgatgaggttgctctcttccatgtcgccatacttcagctggtagggtttggattggatcatacacagcatccaccagctccgtgacttctaccagattgtgttcatgtaggtgggggagcaaagccatctccaagcccttgacgaagtgggcggtggcgtcgcgcgcgcgtgtttcgacacgggaagtgaga

SEQ ID NO: 116975 - DNA, 942 bp, Homo sapiens
atgcatgttaaattccatggcggtcatggaaagactagaagtgaagtgcataactttaaactactacagaaaaagatgagtaaaaccagccaatcagcccaaaagaagaaagaggagagaaaggaatgtggaaatggtaacacaagtagaaatcacaacgaactggagtatgagagcagcgctggactcagtcagctgctcagttccagcaggggcagactccacccattcgaacctgctgcgttccaccccttgctgggggggatcatgcagtctttcctcttacaacttaaaaaccctggacgtaatgcaacaaacataggaaaattgaaagatggaaagaaggagaggcttctagggacatcaggactcgaggaacaacacagaggaataatgtcagccaggcccatcagagaactaaacttccactatcacacaacagcagggaggccaagtgagacagtgcaagggactcttatcaacatttcccttcccctctgtgctcatgccaactggtgctctgcaatacaactctcgcacaaaccagcagagttcatgcagatcctgaaagttaaagggatctcaacaagaccgctgtcacttcagatgccagctgcacctcaggggtccccagttttattacgcaggataaaaatcaggaccagccaagtggagagacacataggtgaatcctggggggtcctaagtgcagagttcccatgccttcaacccatgaaatcagagtgggtcaaatcaatgtgtttaccaggcagcgcagtgtatgctaaaggctctggaaggaaaacagaggtcaatggagacaagtatggcaatcctagtactgggaaagatgtaggaagcaaacctctgttgcccatagactttggatttgaggttgatgttgaaagtggagagttgctttccaggcagagtttgggatga
